United States Patent Application Publication US 2019/0348154 A1 - sequence listing, part 119

SEQ ID NO: 447532 - DNA, 828 bp, Serratia marcescens
atgcgtctgacttcccgtttcggccgttataacgccatccgtaaagaccgcccgttaaccaacgacgaattaatgaacgtggtgccgagcgtgttttctgaagataaacacgattcgcgcagtgaccgttatacctacatccccaccattacgctgctggataaattacgtgaggaaggttttcagccgttttatgcctgccagacacgcgttcgggatgaaagcaaacgcggccataccaaacacatgctgcggctgcgccgggaaaatatgattgcctccggcaataaggaagtgcccgaaatcgtattgttgaacagccacgacgggagcagcagttaccaaatgatccccggcatgttccgctatgtctgcgccaacggcatggtatttggtcaatcgttcggtgatgtcagagtgccgcataaaggcgacgtagtcgggcaggtgattgagggggcttatgaagtgctaggtatatttgaccgcgtcgataatgatctcgataccatgaaatgcatttcactgaccgagcgcgaccaggaattgtttgcgcgggcggcgttaagttatcgctacgagtatgaagataaatccccaatcaagccgtcccaggttttgcgtccgcgtcggcgtgaagattacggcaatgatttatggacgacattccagcgcgttcaggaaaacatgattaaaggcggattacccggtaaaagcgctaccgggaaaaatacccggactcgggcggtcaacggtatcgatggcgatataaaactgaaccgtgcgttatggttgattgcggatgaattcaaaaaccgaatgaaataa

SEQ ID NO: 447533 - DNA, 195 bp, Serratia marcescens
atgaacaagatcgtcccaaacagcggtaaggccgttagcctccgcaacacgcgtaccggcgcgccgtgggtaggatcattcgattacatccgcggccgctaccggttcgaaccggtcggcaaccttcgggccatcaagcgcccttttgaatccctgcggatcccgccggaattcgagccagctggcacgcactga

SEQ ID NO: 447534 - DNA, 282 bp, Serratia marcescens
atgttcgacattgcaaaaaccactttcaacatggcgcagaaacgcgggctgacacttaccgtggaaaagttggatggcgaccaatgcctctgtgtttgggagtccaaaaacgacatggaatggttgttcagctacacgctgacaggtgcaggcctgcaatggaggggcaacgtttatctgccgaatgatcttaaggaagaacttccagcgctgatcacctctgagaagaagctccgcgaaatggtcgatttcatcggaataaaccgccacctactcaactaa

SEQ ID NO: 447535 - DNA, 150 bp, Serratia marcescens
atgaccaacatcccacgcaggccgcgcttggtgcgcggtgtagaaatcacaacagaacaggacatgtggcagcagagcaaacattatcgctttcgctcaggcatgtactacgggcggatcagatatgcggagttgcgtgatgaaaagtga

SEQ ID NO: 447536 - DNA, 756 bp, Serratia marcescens
atgactactgtaatttacacagatgaagattttgtcgcaagtgacagtaaatgggcttgtgataacagcctgttggttttagacaaccactgcgtgtacaaatatgtttacttcgatcaaaatcaacgttcaatactagcgttctttgctggtgatgagtatccgatcgtctcatatcaagcaaagtttctcggtggaatagatgaagttgaattcattaaacaagtagctgaacaaggggagcttaacctaagcttagaatggttgcttatcgacgcaacgaatggttcgttcgtgggcacaaatgcaaccataggttggttccaacagttgagacaccttggcagcggaggcctacacgcggcgcagtttttctattatagtaagaaggcaaaatacaacagcatttataagaataacgttgttggcgcgatgaattatgcatactataaagatgagcgatactcaggacctccacacacaataaggtcctggaataaaaagcatcttattgataatacagtaaaaaacaatcatcatctttatacagactctctcataagtagattaggcgaattgcaaatgaactatcgtaacggacataacatcacggatttgccaagcgtagcaaaactgtcgtctgttaacagaaatcggagtattgtgcccccgttaaagacgacacaatccaacacatcaccaaaagtgactgtttctggtgccatatcaatgctcaacctgcttaaatctctataa

SEQ ID NO: 447537 - DNA, 216 bp, Serratia marcescens
atggaaaaacagcccggctggctgtggcctcttctcgttttcctgccttcctttcactccttaacctttccatttttatccccaccgctcgccgcagtgttgactagcgcagtctgtcaacgcgaggaagcggaagtgcatctgaagctgatgtgtcacacggtcatcgcggggcttttgttgacgatgcaagataggcactgtgttcccgtttga

SEQ ID NO: 447538 - DNA, 741 bp, Serratia marcescens; identical to SEQ ID NO: 353506

SEQ ID NO: 447539 - DNA, 846 bp, Serratia marcescens
atgagaaatttttttacggaatgtgaaatcgatagttataaaccagttgaactgtttggggtaagtgatgaatcccaaaaaatatttaaattttgtaatttaatatggtctgatgattgggttgtaaagagagggatatataattttaatccaactatattactccatggttcacctggaactggtaaaacaacattattaaaaaatgtagcaaaacgcctgagtggagaggggtttaagtatttttacataagcttggagctatttttagataaagatcttggcatgtcttcgaaaaacttgaatgagttttttaagtatctggggaatttagcattgacggaaattaaaatatttgttcattttgatgatgtagattcagtcttatgctcgagatatatttcaaatgagtcttctggagtaaaacgcttagttaacacctttattaaagagattgataaaattgagtcaatgaattataaatatcctcctattataacagtaacgacaaatatgtactcaatgattgatacagctgtaaaacgtaggttttcactcaaattctcaatcgaaaataatatcacaatatccgaatttgagatgtggcttaaacccataatatcagacttgggtatggtagatgattttgattatttctctttatatgaaaaaatgaaacaaaaaaaactaacaaattatgacgtttatctcattatgcagagtgtttttttagataaaatagctggcaatgaaatttcattcgaaactatagctctaagattcgaattaacagaatcttcaagtatcggctttgaaaacagtaaggcgtcacttggctgcttataa

SEQ ID NO: 447540 - DNA, 228 bp, Serratia marcescens
atggacaactggcacaactgcggctttcgcgagttcgacggcccacctatgctgggtgacatggtgattatgcaggtttccgcgccggtagcgaaccatgccggtattctgctagaagacggtatgctgctgcaccacatgtacggcatgcttagccagcgggtgccttacggtggctattggaaagagcgaactgtgaaggtgctgcgccacaaagaactgatgtaa

SEQ ID NO: 447541 - DNA, 447 bp, Serratia marcescens
gtgagctatttcggcatcgatgaagaaaccggcctcgagctgcgcgtacgtcccgatctagagattgaggccggcggcctgcgtaccggtttcgacctgaaaaccatcagcatgggtaacgtcaagcaaagcgccctgcgcgcccgcctgcaccgtgaaatcatcgagcgcgattaccatctgagcgcaggcatgtattgcgatgttgcggcgctggatcagtttttctggatcttcgtcaacaaggatgagcactaccactgggtcgcaatcgttgaggcctccgctgacctgctcgaactcggccgccttgagtaccgcaaaaccctgcgggatatcaaacaggcacaggataccggcgtgtggccagaaccgatcacagaagaaatcgtcgacgacattaacgactttgaccagcgccgcatggaagcactgcgcgtagcctaa

SEQ ID NO: 447542 - DNA, 486 bp, Serratia marcescens
ttgacggttgccaatatcaacggcctgatcactgcgctttgccttcagtttgaagatatggcacaggccaaggtgctgatccacgatacgctggtgcattaccttgatgcccgaaattttccagaagggaacccaacggctgacccggtgcaggaaaagctacaggtgttctacatcgatcgcaaagcgacggaaagcgatgaggcggtggagttcgagctctccagtccggcagacctgcggggattgcgcatccctacccgccaaatccacagcctgtgcacctggtgttcgcgtggatggtatcgcaccggtaagggctgcgattacgcaggcacgcgatactttgacgacaagggcaatccggtggatgacccaagtaaagatcgctgcggtggactgttgagcgattgtcaaaaacgttttggtgagactgagcctttaccgttcggcggtttccccggcgcagcgctgattaagcagtag

SEQ ID NO: 447543 - DNA, 231 bp, Serratia marcescens
atgatttttacgccgatgctcgatggcgaggtgtataactgccagaccaaatggaatattgctgcgcagcgctggtatctcaatattactgacaactcaggaaatcgcctgctaaccacccccatgatcgactcgccggtaggctacgacattaatttgcttatcggggcatttacgaatacgaaaatggtgtggcgatcttcattgggacaaatagaggtaatcaactga

SEQ ID NO: 447544 - DNA, 390 bp, Serratia marcescens; identical to SEQ ID NO: 447507

SEQ ID NO: 447545 - DNA, 873 bp, Serratia marcescens
atggccgaatcaccatcacataaattaggacagctaataggtaacatcctagagagtttgtttgtgcctcttcttcaaggaattgcagataaatcaggattatatcttgatgttgttggtcaaaataggaaagcccgtaaaggcaaaaaaatcacatgggaagatgcttatggaagcactcatgacttagattttgtttttgaattttctggtagtgacaccaccttaggtaggcctgttgcttttattgaatcggcatggcgtcgttatacaaagcattcaaaaaataaagtacaagagattcaaggagcagttctacctatagtcaataaatatcaagtcgagtgtccctttaaaggtgcaatccttgctggtgaatttacagaaccgtcactaaagcagttacaaagctgtggatttcaagttctttacattccttacaaaaacttcgtttctgcatttttagttgcaggaatagatatgtcatttgatgagaacactccagtgagcgttctttccaacaaagtagcatcaatagaaaaactagaacaaaatcaactagaaaaagtaaaagaagcagtatttaaatcaagccaaaatgaaatcaatgaatttattaaatctttagaactcaaagttcagaaaacacttaaatacataacaataagcccgttgtatggccatgatttcaaatttaaaaccctcgatgaggccaaagccttcataactgaacacaatagtaataaaacaccagataatcttcgttttaatacgttcgtcattcacgtaaaatacatgaatggtgatacaataaatgcagaattatcctcaaaaagtgctgctattagtttcttaacaagtattttatcttga

SEQ ID NO: 447546 - DNA, 1269 bp, Serratia marcescens
atgcttaaaaaaacagctcgctctggaacattcactgacaatatgaagttacctattcaccgctggttccgctattcagcaggcttttctgcagaatgggtagtagctgaaattgaaacattccaagaagaaacaggtaataaagctgttgtgcttgaaccgtttactggttcgggaacaacaaatattgccgcagactctcttggcgttagttcatatggatttgaaggtcatccttttgttgcaaggatagcacaagctaagcaaaattggaatttaaacacgaatgaattgcgtcgagcaagtaaagaaactcttgaacttgcgacttcgttaaaaattaattcagacaatagtagatattcagaatttaatctattgggaaagtgttactctcttgaatcattttataaactggaacaacttaaggctgcatatgaaatgcttgccgaaccccataacccagtgtgggaattggtaaggcttaacataacttcaattttaagagcatgtagtcatgttggaaccgctcaatggcaatacattttaccaaataaatcaaaaagtaaagtgttagatccatttgaggccttcaacgcaaaaatggaaattatggttgcagatatggagtatgcagtttcctcaggctgggagtgctgttcgaatatctcccagcatgatgttcgacaatcttttatagcaccacaaaaatgcaatttaattattacatcacctccttacccaaacaattatgactatgctgatgctactcgcctagaaatgatgttttggggagaaattaatggatggggggatcttaaaaatgtggtaagaccaagtttaatgagatcatgctcacagcattcagcatctgataaaattgacctcgaagaggttcttgaggataaattattaaaccccataaagaaagacatatcgcttgtaactaagcaattagaagaaattagacatacgaaaggcggaaaaaaaacatatcacactatggtcgctgcgtatttcttagatttggcaaaaatttggtcgaacttaagagttaatatgtcggataattctaaaatttgttttgtcattggtgattctgctccatacgggattcacgttcctgctgagaaatggctaggtgagctagctttagctgctggatttaaatcttacagttttgaaaaactaagagatagaaatgtcaaatggaaaaaccgtacccatactgtaccgttgcatgaaggtcgtttgtggataaaagggtaa

SEQ ID NO: 447547 - DNA, 183 bp, Serratia marcescens
atgtcgcggcggctgagcaccgagccgatggtcaggcgcgagtgggttttcttcagcagatcgcgatcggcggcggtgactttcagcctgctgcccatcgggcgtttgctgtccagggcgaccatggcggtcatcagcttggtgagcgaggcgatcggcagcacgcggttcggctgcttctga

SEQ ID NO: 447548 - DNA, 1197 bp, Serratia marcescens
ttgcccaccattgctgcgcactgcaccgccggtattttccagcaagccaagaatacgcagcgccacgcgttgctggccgtctatcgtcccgccggcattgttcagcgcttgtgcgtcaagttgaagcgcctcgccaccttgcactttcccatcgcggttgttcagcgcgccactcaacgtaaggcgttgttgtttcttgctgtacaacaatccaccctgcgtattgtcgagtgcgcgggcggcgatagtcagcccctcgccggccagccactgaccgccggcgttattgatggcgccggcgtgttcgccgtctttgatgcctgtgacagcaagctgcccctgcgccgaggccttgccgttgcgattatcaatatcctgtgcgacgcgcagtaccagatccgccgccgactgcaccacgcctttagcgttgtccagccagttcgccgcaagttgtgctccctgccggctctgtacgctgccttccgtattgtcaaaaccgccgctgatggcccgccagctccccaggctgcccatccagccctgcgtgttgacgatatcctgtgcctgcaacacctgagacgattgactgaaaacacgcccctggcggttatccagtttgccggtgaactgcatgtccaggctatccagcgcgttgatggcgccctgagcattgagcagactggcggcgcgcacctgcgtgcggccattgccggtcaaggtgccgttttggttatcccagccccccgccagattcagagaaagcgcctggccgcccagcaccacccctgcggcgcggttggtcaactcgcccccctgaagagacaggtcgccgccgctctgcagggagccgccgtcattatcgaacaggctgcttgctccgccgttaacggcaagggcctgctgcgcggtcagtttgccggaacggttgaggatattgcctgcggcgtcaagcgtcaggcctccgccggactgcagccgcccgccggtattgtcgagcgactgcgcgttggcggtgacctgccggccaccttgtgcggtgccgccctgattgtcccaatcgccatcggtgttgacggcgagtgcgctgccgccttcaagccagccggcggcgttgctcaacccttgcttcgccgtcaggttcgcatcctgcctggcgaccaccttgccctgagcgttatcgaggcgctgcgccgttag

SEQ ID NO: 447549 - DNA, 1878 bp, Serratia marcescens
atgaacgaatgcactgcatcaagcattattacgcgtagatctttgggcttaaagatgctgtcaactgccctggatggcccaccgtggtcagggtttggggttggtgagtttggagctcgaccaagagactatggatacgaacccaactatgatgaacttgtcgaatggcgcagcgcctttattgacgtcattatccaattagcggcatccggagatcctgagcttgaaaggtcggcacgatcaatcctggctgacaaattcaggggaatttggtttcaagaagcaatgcgagacaaactcgtcgatgctgcccgtacattaaatgctataagtccttggggggaaggttggaaagccgttcgttcaacggtctattttgactataccaagcgtagcgatggagatgatgtagagccgttgccggataatcttgctgccttagataaggagttggagcccattgcgttaattccaacaataaagacatacgtgttgagtaaaaatcatgattattgggcactggatgctgattttgatcatgaggactccgttaaatatacctcagccggaaaaagacttgaagctaaagcacttcaattgggacagggcttttctttatcaaatcatgcatttgaagagttaggggcagatctgttctccatcggtggaatgccttatcgtgctgtctttggtcgaggacttgctcgaggggcacatgatctacgtattgtctggcagcgacttgttgaacaaattgaaaaacagccagatgctaacaaagattttggagttattggggggttcatcgaagaagttgactctgtcgatccatcattagcacagaagtttctcgaccaatgtgcgcagcatcctgaacttcgacaggtattggttggcttgcatccttgggtgaaatttacagtaaatgatttggatcgctgcatgaagcatttggatgatccagacattcgccctttcatgtatgagccaattctctggagagaccaatacgccaatttaccgagagtccgtttacttgatcttgctaagcgcctcctaaataaagttagcggcaacgatgttattttggatgcactatccatgaagcttcatggtaaagatgaatctacagatacgcttggtggagactttcgattaatcggtctcgctgcagccatccagaggattcaaaacagcgacagagaccaaggggggacaatcgattatcgcatggaacaagttatcgatgctgcgttgcgtttcgatggtaatgaagcgaaaaaaatagagtggttggacacaatattcagcgtaattgatgaaaattatggatatgtgtctggatttcataaaactatagctacaactgctgcatcgatgccagaagcatttctcaatcgcatttttgaaggtactgaggaacagcggcaaagaagacaattctttattggacgtggtggcttacgtacctatcccctagcaaagataaatataagcgttctaattgcatggtgctacgccagaaatgatccctttgtctggcccgttgtagctggtggagtcaatctttggtcaaaaaatgttgagaagagcgcactgaccatacacgaaacggctttaaaacttctagaggcgtcccctgagccactagctgttctggagtcttttgctgagcgtattactccatcatcctggactggtagccttgcgaacataatgcaagctagatcaaggactctaagtacattgattaaacacgaacgcactgatattgcagaggctaccaaagtagtttgcgaaaaaatgatgcagtgggtggaatgccaaaaagaacgcgaacaacgagaagatagtgaaagggaacagaggtttgaataa

SEQ ID NO: 447550 - DNA, 1200 bp, Serratia marcescens
ttgaacaatcttcttgagaaaataattaaaaaccccgacattaaccccccaattaaatccaaaaaggatttcattagtgatttcaatgaaagatgctccaaactaaatgaatgcatacaaaaattttccgatgatgcaaaaaataaagcaattggattcgagaagcttattgaaaaatccaaggaaatacaaacatgtataaaccaaacattaaataattacttagctggggatatcaaaagtgcctatgacacctttgacaacaccttctcaaaccaatcaataattagccacctacacagaatttgcgtcccattaaaccaattgagtgacaaaaaaacccctttattccgagtgagaaaatctgatcaaccattaaaagaaagagatgatatttttcatattccattttctaaaaggcacttagttaatgctcaacgttactcggttgcaggtctaccatgcctatatctaggaacatctttgtatgtttgttggttggagatgaacaaaccagattttgacaaactttatatatcatcattcaaagcaaaggacgtcagttctaaaatactaaatttagcttctaagtacatgattttgccaaaaaaggaaaataatgatgagaatacaatagtagatacaaacagaaccatagcctcttatcttattttttggccattgattattgcttgtaattatattcgtcaaaaccctgactcatctttcattcaggaatacataatacccaacattttaatgcagtggatcggtagaaaaaccagttcttcaattataggggtggcatatttttcgacgaagatgcccaatacacgctctagtttaagatcagtcaacattgtactaccgcctaaagtcacttatgaccaaacaataaaatttaaatactgccctaagttatcaaatctattcaattttacaaaccctctttcttggcaagtacttaaaactttagaatatccggacccagcaataaaaaatgttgaacaagctagtgctaaaaccttcttaagtagtataactaaaaacaataaaattaaagagatagatgatgatcttgttgttctttatccattgacagatttctacaaattagaaatttgtataaacgatctttttgaccatcagactattaataacgacactacggatggcgacaaactggcggcagagccttaa

SEQ ID NO: 447551 - DNA, 198 bp, Serratia marcescens
atgccgcatccgaaggtggctatcagctttgacagcgacgccaaggcggcagtcgctcaacggctgcgggtgttcagcgacagcgcgcggcagaacgagctggtgggcggcgcgcacctgtcgttcccagggttgggctacctgaaccgccagggagaagggtacggctgggtgccgctgaattacggcgcgctgtaa

SEQ ID NO: 447552 - DNA, 1848 bp, Serratia marcescens
atgattagattaattagcgtgaaaaactttagatcaattcaaaataatgtaattcccatagaagaaataactactttcgttggaaaaaatgacgctgggaaatcgaacatactacggtgcttaaatttattctttaatggcgaaactgatcagagaacgccatatgaatttggcgccgacttcaatatcaatgcaaaagtacataagcaaagggcaaaagaaatagttatagaattaggactcaagctaccaaaatcatatagaaggcctggacatccagatacagtatattggaaaaaggtatggagggagagtggtgaacacaaagatgctgaagaaataaaatattgcaccataaagaataacttgttcaccaaaaagttggaactcccctctaggagcaaaataaaatcattactcgataacattaactttatatatataccagcaataaaagacaagaatttcttcattgaattgcaaggaaaaatatacgatatattggctcaatcagtagaaagcggactacattcctcagcttatggtttcgagatgaaaattcaagaagaattctctgagttgattggcgagattgataacacattcaacaatagcaattcagttgccttaccaaaaaatctgagaggaatattcgaagccttagagtttaactctgataaaataccgctatcccgacgcggggatggcataaaaattagacacatacctgcaatacttcgtttcataggaaataaaagcggaaacaaacataagcaattgattacacctcaaatctgggggtttgaggaaccagaaaacaatgtcgaattcttttcttgcttcgatttaaatgaacagttcatcgatgcagcaaaacataatatccaagtcatactaacaacacattcaccagctatctataacattggtgattcagtaaaagacatacctaatattaaagtaactcgctttcatgttagcaaatgcgattcctctggaagcacagaattagagattattgatgactatagtctacatcaaaatattggtttcattccactcatagctcctattatcgccgaaactgaaaagaaatggaaattagaaaaagaaaatcaatcagcgtcaatcgaacgacttgaacaagagctaaaaaggaataaaaaacataggatattcatagaaggtaaatctgatggtgccattttcaagaaagcatttgagacttacgcccctggattaatggatcaaattcatttcgaactgagtgacaacagcagtgctaactcagcaactgataatgccaaagcgtttcatttaatacataaacataacaacgacgataataaacttaaaggagttctcattctagataatgattcagaagggataaaatgcaaaaataattttcatgaatttattaaccatgccagctcaaatgtgaaaatcttcatgttaaaaaaaccggaagagatttatactttaattaatgatgggtttaaaatttccgcagatctagaaagatgcctacctaatgagatttggcaacatgctctaacacaaaagtggctaaaaaaaagacaagcgaactcagaaaaattcactgaaaaaaaaatatcgaagatattcgatcttcaagaaaatccagacgatataatcaacaggtatgatgaattctcccaaacgttaataaattatgaattttcagacaaaggaaaggagaaagttagcaaatatattagcgacttaagcgctatagaaataaaaagaaatggcattcttaaaaactttgaggatataactgacgatattgcaaatcatattggttatgatgtattaaaacaataa

SEQ ID NO: 447553 - DNA, 678 bp, Serratia marcescens
atgaggaaagtaaagtggataaaaatagagtcacctttccccatgtctgtaatggcggagaaacttgctaaaaacccttatacggaagagcgagggaaaggctttctattagagaaggtaaggaaaaattgtttacatggaagatttgttgaaaaaatcctctacgaggataatataccgtcactgtttggtgaggatacactgattgaacgtattgagtataaagtaacagagttttcttttgatgaggatagttatcctattgcggtaattactaatcccccacgtacactacgtccatttgccaatgcgcttattaagagtctcggcctcggtgttagtttggaggaagttatagtagaaccattttcatggattgagaaaattggagagaagcattcggtgtcggttaaccaaattgatgtttctcagatgcaagtttctgagtatgcgctggcgaaaatgcaaatatctagcacgaaggatttgcggtattattatgagaaggaactatccgaaaaaaaaattagagttgatagagcaagcctttcaataactatgagtggtacctctggaagggtaaagatatttaggaatgggatggctaatattgatataaaaaatgaaaaggaggtttcaaatatgttatttgaaacattgaagttggcccttaaatga

SEQ ID NO: 447554 - DNA, 1074 bp, Serratia marcescens
atgatgaaaaatagcaacatatattatgcaactgataaaaatatatttgatgatctgcatcataagcgagtcacggctaaaatattacatgagcttctttttactaaaggcatacttgtatcagaagagttgggtaaagaagcgttaatagaagaagtgtgtaaacttcccctttgttatcttgatttggaaaagataaaagaattagtgcaaacatacgataaaaaggaaagtaaaacgtatgcgaggcttaatgtttcagtttcacaggctgaaatatcacaggcagcgaatgttgtaaagaaacaatatgcagctaagtcacaggctttgaaagtgcaaactaaaaaagatggttctgtatctattgtattgagctatcaagaagttgatctttctcgaactgagcttaggcaaatagacaatagaagtatttctattgatctggctattaatggtgattctgtcgaagttagaatgccacaatcagagaaatcgaaggaagtcatcgaacttattcaaaaggaattgtctattattgctaacaagcctatagaacgattcgaattaagtcttgaagctattacaaatccatctttaagaagtcagttctttaaagagctaatggagggcttagacggttatgaagttgatgatgtgacaaacatcgaactcaataggatgaagtctgtagattcggaagatgaagatggtaaagatgcagagattgacacaagttttgttaaaaaagtcttattgaaaggtgaggctgtcgacacttcggcaatttttgcagagttgcacaggaaaggatattacataagtagagcttcctgggcatctaagccggagttagtaaatggtgaccgaatattggttgaagcgttctttaaaaatgcggatttatgcagtgaattttcatataacataaaaggtatcaataatttcagaaatgatcgacataatcttggtacaaggtcagctagtgacattgaaaaaaaagagattagtcgattgattgaaaattcagctgaaaacgcctacaatactataaaaaatgtagaggctagttaa

SEQ ID NO: 447555 - DNA, 1002 bp, Serratia marcescens
atgggcggagaaatggccgctattcagcgcacagctagcaaggtttccaacgatatcttctcggtttttaagtggaggcgggctgcaagggaggacatgaattataactgctgttctgaatctcatcagaaggcgacccatcctagtgacgtcgttttttactatgtagacccctatgaagaagattttgtctatttgaatacggatttgaaaagttatggacagggttctatcaaaaaaggcactgtcgagtcggcattaacctcactttccctggctgttgaatgcgccaataccagtgatgagtggcttaataaatatgttgatgatgattcgcaggggtataatgtcagagggttattatttttatacaaccatgaccatttatacgacaaagatttctatcaagatgtgatgaagaaagttgatatggcaaaagtaaagtgcgcgccaaatactaagattcacatgcttaatccatatcaaatttctgatgttgttaatattgcttatgatataaaagcacaaattggttctggttttttaccgcatccagataattttttgtattactatccggatttaaacctaacaagaataaagcacccgataaattcagatactgctgctacaatcgaaatgattacctcaccatatataataattaagcacgataagtttatgtggggtaaagaggaaaaagaagacggctatgtgatctattacaatcaaccaggagctagttctgaggagtttgtttacttttttgatatgttgtctagttttcagatcttgacacaaggcaaaaaaataaaaataaggatgtcttatataaacccacatgaagatgctccacataattttgaaagggctaagcgtaaatacagtgcgcattggttgatgggagaggaggataggttgtttggtaaaatggaatttgatcttatagctaatacagttacaaactatagtttagaaaaaatcggcatggagcaacgatga

SEQ ID NO: 447556 - DNA, 1569 bp, Serratia marcescens
  misc_feature (1293)..(1302): n is a, c, g, or t
atggctcaggcattattggatgcaattaactcctcagagagtgatagtgctatcgctataactgaaatgcttgttaagtccaatgaacctaaaaatatagagctagaaagaaagcaaaaattagtccttgaagaacaatctaaaagatttccagggattaaaaagaaaatagaaagtaaaaaagcagcagaaaaaaacaagaacatacaaagaaaaatttctttggaagacaaggtagtttatagtttatataacctatcctctcaacaggtagtttcaaagaagaaagacattttaaattctttgaaaaataacattcatacaaaaaagaaaatagaatcaatgagagctaccttggtttttcttgataaaattttaatgcaaaggaaccatattgacagacaagcaacatcctcattgagaaaaataaataaaagcacttcatatattcatcaaggctcatatgaatatatctctggcatgactgaagagcaattagaggctaggcttttaagagagaaaagaagaaaagaattgattgaggaagaggctagaattgaattatatagaatgagtcaaattaacaaatactcttcttcatcaactaatttaaatgaaaagcccggcaaagttgaggttgctagtaactttgttctagagaaggcaaccatcaaacatgaagaattaaaaacacataccctgagtttatcaaaagtagttaaaaaccaagagtcacgatatttcaataaagacttgtaccaagaattaattaaaaaaatgccagtgggagatgctgctaggatatgtctcaacaaagaacttacttcacagtattataataatcacgttattgagggagcgtttagttactttaatactttaatgtattttattgagtgtaaagatgcagaaagtaaaattcatgccatagagagggcaagaaataaagagtattctgagagcaagttaagcacgtttatatctatgtatacatataataaattttataatgaaaaattaaacaccacggaaaaaaagtcacaaaataagatacatattttaagagtaagaggcaaaatagaaccgattaattcacgaggtattgtcaaaaaaagaatattctcaaaagtcgtatacgttgagactgttgatgtaaaattaaatgctgagagcgttgttacaactatttcccagcgagaacaatcggctcaaattgattttaaacgtcgcattgcaaataatttcttctaccgttgtgcggttacagggcaggttctcgttagcattttgcannnnnnnnnngcgtgtcatattgaggagtacgccgttaatcataacatggacactagtaacgggatcttactttctgcggattgtcattacatgttcgataatgatgagttggggataaatcccgaaaatctaacagttcatttcaatgtcgagtgtatatattcaaatttgtttgaaggaaagagaataggaaagcattcaattgatttagattttaaaaaattgaataaaaaatgggagagatttttacataacaaacataaaggggtacgttga

SEQ ID NO: 447557 - DNA, 627 bp, Serratia marcescens
atgggaaatcatagcggaaaaaaaagttatgaacggtgggtgcagggagcaaaaaaccgtacagttctctttcattataaaaaccttattactgaccttaaccaagcgcattcatgtagagcatcccttggtgcatattgcccatttcatggagagattcttcgtaaacttgatcaaaagaatgaagttcagagggttaaactctctattgacgttccattcttagagggactgactccaagcgagctctacaaaattagaactgactacgagccgagttttaatgccttccgctctgtactacgtgaagctgcgtatgacatagaagcagaaagtgatccatataagagacaactgataaatcaacattttgtcgagcgcgtgtgggatgaaggattgacagatattgagcaaaaaatacaagcctataagcggaaaagtaataaagaactttttcttaacagtgtgccatcattgataggttttattggtgcaccaaatccagtgtcgttggctacaggagcttttacgattctaaaagatgtttttaatatcacaagccattcttcagaaataaagagccacccttcatatttccttctcatgatgtcaaaagccaaaaaataa

SEQ ID NO: 447558 - DNA, 870 bp, Serratia marcescens
atgattggatcagctcttcagaatgcctttcacatagagtcattggctgctagtggtgaaatagcactattccgtgcattcatccgcgctttcaattcactcggttcaaatgcactgacgcaagaatatcatggtaatcgttaccaagtgaaatttagtgctaaccgaggtacagggcgaccagtcccacgctgtgaattatgtgacgtaatgatcatccattacccagtgggaaaccctagagcagcgcgcgttacttttaatcaagcaaaagtctcttctaacccattacagtgtgctccagtggtgttttcaccatacaaatttcgtgcaaatttagagcagtgggacttgctatcaaatcgaccttcaataagtgctactacagcaaaaattaatttccccgccgatctactttctaacgccctactaccatcagtgggtacatttggagttttttatcctaaaggtcaggggttcgattttgcttactttgttgcgaatggacttagtcccttgaaaaataactataagccgtcgggtacactccagtggaaaactcaattaggtcaagttcgcaaaattggccgttatgatgaaataacagcaacttgctgtatgtatacctttggaaaatcacttgaattgggcttgatagggacacctcttcagcaggttttatatggttcaactggaaccactgaaatgcgaatttggttgggaagtatgctatcgtcactccaggaaatacacccagactctgatctaccaagtgagttggccgaagggtttgaattgacacacgaagaaccctctaggaaagttgagctatcaaccccacgtgctgtagtattggtcagaaccgaatag

SEQ ID NO: 447559 - DNA, 306 bp, Serratia marcescens
atgatcggcacaatgcccttgatgaacggggaagggatcaccgaaccggtgttcgggtcacgcagcggcgcggcctccggcaccaccagagcggcgatgatggcgataaacaccagcgcggcgatgccgctcatcatcagcccccggttttgcaacggggtcagcgcggcgattttgtcttcggcgccgccttgccacttcggcagccggggctcgataaacttgtcggtgagcagcgcgccggcgatggtcagcacgatcacggaggtggccataaagtaccagttgtcgattacgctaacgtga

SEQ ID NO: 447560 - DNA, 624 bp, Serratia marcescens
atgtgtgacccagaaggacggcaaagaaaaattgattcaggaattccgtcagaagaggaaagacatatttccgttgctaatggagtaagatttattgcaactatcaataatgatgcatccacagaacgactttcccccaggttaattgaccgagttccagtgataggtttgaatcataattcagagttcaagtcaaacgtaataaaaactctagatttcgatggagcagtgagtaatgaatgtttagaaggttgttttgatattagtctctatgagtcgtcatttacaactgaagaacaaaacgctcttgaacaggtgatagaaattctcaaagcaccgattaatcgaacaacttcagttcgagtgagccagagaaaatataatgcaataaaacgctactgccacattgctaatgaaattgaaggactaagaagtcaacccatagattttgctatcaatcagcatatcctacccttaatagaaggatatggaactggtttcaaagaaaggttacaaaatcttgaacaaaagcttgtagagttggatctccatatatctaaagcaactcttaagaacatcattaataatggtgatatatatagcgaatcatactcttatttttag

SEQ ID NO: 447561 - DNA, 549 bp, Serratia marcescens
  misc_feature (421)..(430): n is a, c, g, or t
atgagaatcgaaattaaaattctaagaggtaggcggcaaggtaatacctttgaattgccagtaattgattttaaagaaaactcagagatattcgtacttgaagatgaagtattagaattatctttttatagtgacaagttttatgacaaaataaccttggcgctgcatgagaacgaaatagcaccaactttagttgaggattacaatggcgcatgggtttataaatggttacccaaaaggacaggtgcgtatgcgcaagaatgttttttccataattactatggtatagctgagttatctttagagttattttatgagggtaaaagtgagatagttaattttaatcctttggaagtcttagctaagaaaataaatgctgaacgcgtagaaaaaatgctttcttttttggcaaaaacagacnnnnnnnnnnggctttgtgttcgttttttagagttactcgtcgcaaggctggttatcaagatggagacactcccgttgatatactacttgagcaagtggaaaacacagttgaaaaaacatcttctttaa

SEQ ID NO: 447562 - DNA, 1032 bp, Serratia marcescens
atgttactttcaggattcgaatttcctgaaaagaaaacacagaaatttcatggtggtccagacggttatttaagtttcttcagccaaattcaaaaatttcaaaaaaacattaatgcaagaaaagtagaaaaatgcaaaagcattttatccacattacactccgttaaaaaactgatgtctgaaaaaataccttccaaaaaggcagtaactggcatccctatatttacaatgaaggctaaaaaagaatcaatatatctctctatatttagaaaaatagttgactggtataggttcggaagaccagactggagtgtccaagacgaattactatcaatccaaagcattcctaagctattcgaatactatactcttttttatattaagagcattctagatcatcacttttcctttaagtcattacctgaaaacaataatggtttcatgctatttgaattccctataaagcaagagttaaaattaagtttcctatatgagccaaaatattggatggcgaggcattcactagctgacctgagaggccttgttaattcagaaggttggactatctataatgggaaagtatctaaacgctcaagctcaggaaaaaactcaaatcgttctcctgactatgtcataaaaatcagtaatgcacttaacaacgaaaggtatgttattctagatgcaaaatatacgactacagataaagccttcacgcattacctccccgatttaacgctgaagtatatacatggactcaacttaatatccaaaactcacaatcctataattggattaatgattatcaatccggataataaccctcaagtcagagattttcataatagtgtttttgaacttttctccgatactccagcaatgccatttctacagtgtgcaactataacaccaggggaggagtttaggagtaataacaaatttgagaattcattgttaaaaatgttagagctaactgaaattcagttaaaaaaagacatcgggaatagttatcaacaaattacattgcgagcttaa

SEQ ID NO: 447563 - DNA, 267 bp, Serratia marcescens
atgagcaagataaacgggatcatccgtcgccagatccaaaatatgatcgttggcaaacagctcggggctatgtaccgcaaaaccgatattttcagcgccggagaagaattctgtcaaatcgagttccatatcctgatagctcagatggaactcgacgaagtccagattggatttattcttcaacttgccataatcgtggtagcgcactggaatgccgaacggacgattgaaatcatagtccttggcttctatcgccacatcatttag

SEQ ID NO: 447564 - DNA, 519 bp, Serratia marcescens
  misc_feature (238)..(247): n is a, c, g, or t
atgagcaaaaacgcctatgaaagcgctgtaatacaatgctcaaatcagttgaaagacttaatatcagttgcaataaaatcctctgcagatatcacgtcagctcttgatagcacatatcccaatcgtttagtaaaaagtcttcgtgaggaaaataattatacttattcccagctaaatgaagatctttctgatttaaacgaaaaaaggaaaactttatcagctgcaggattggttgttnnnnnnnnnnaccccattaatatcgcattaggcaagctttcctctggtgagcaacatgaacttgttttgttctttaagcttattttcaattcaacccctggagatcttatcctaattgatgagcctgaactttcattgcatatttcatggcaaacgcaatttatagatgacttaaaaagagttgctgctctaaatgaaatttctgcagttattgctactcactctcctgacataatttcatctaattgggatttgagagttgaattgttaggggtaaagtga

SEQ ID NO: 447565 - DNA, 210 bp, Serratia marcescens
gtgctggcgatggttcaggcgtttgaaaaagcgtccggcgtaacgatcccttaccaaatattacctcgccgcgacggcgatttgcctgctttctgggcgaacgccgatctggcttatcaggagttgggttggaaagtcagtcggggtatcgatgacatgatgcgcgatacctggaactggcagaagaaaaatccgcaaggataccgttaa

SEQ ID NO: 447566 - DNA, 261 bp, Serratia marcescens; identical to SEQ ID NO: 198539

SEQ ID NO: 447567 - DNA, 558 bp, Serratia marcescens
atgaaaaagatctttttgctcagtcaatgtcagtacatgtatctggcattaaagactgtttttgagaataaagcagactatacaatagaacatctcagttctggttataaagttgataaggaatgtgccaatgcaactattttgattcatgtaacagatgagaattattccgagttgttggtattaatgagaagtaggcagtttttctggttaagaaaagcaatattcattacgcaaaagcgtctggcggcactcatgaattatttatcaatgaaaacactgaggtttattgacgagagcgcaagcgttgaggcatttgaacgagaaattgtcgaggggagcgggtcggagtctgatgcagcaaaaggtgatctgttatcgcaagctgaatataccgtgttgcggttcgcagcatcaggaatgagtttaacggcaatcgctttcagaacccgaaaaagtatcaaaacaatcagcagtcaaaagatcagtggtttgaggaaactggggttagagaatacgcctcactcactgcttaatctgtttaatttattttactaa

SEQ ID NO: 447568 - DNA, 852 bp, Serratia marcescens
atgcttcgaaccttaaaactacgatctctcatatccatacccgtactggcgtgtgctttctggaaccataactgtgtggctggtgcaactcacggcgcagactgggtgcaaggcgagatacaatacatcctgtcgtgcacagactcaccgtatgattgcacccggggtgttatgtaccaggctaatatacaggcttccatgtacaatgcccctgttgaaatagtacgccctcttgggggtccacgcgcgtacgcggttacatgcaggagtgggaacaagtcggctgggttctacgggtgtgattggacagcgcgcgcgccgacgcacccgaactgtaggttcaagcgatacgggaccgatatggtcgatgcgttcgactgggatctcgggccggagtgcaactctgggtggtccactacctatggacctcattcaggcgctgggcccggcttcgaatgtctggtggtcggcatcttgcaaggtcagggcttacacacaccgtggggggtgctgtcagctcaacaaatggcgaacagcaacagccctttctgtatgcggcccaagagttggccgatggacaaatgcaccatgaagccgctccatgatttcacgttcacccttggcacaacggataatagccgccagggttacgttgtgggggttgattgcaaaagcagttttgtagtgcgcgtggagggcggggccacctttacgttggggccgggtgtgactgggaccctgacttttcaaaacatgtgggaccggatgtatgtggatgctcggctggaagcggaaaatgctaaaccgggaacgtatcgagccagcaaggtgatcgtactggagccatactga

SEQ ID NO: 447569 - DNA, 513 bp, Serratia marcescens
atgaaggcaaggtttagacagtgttatcccggctgcggactggcggtgttggtgttggtgttggtgttggtgttcgctccgcaggtacaggcgttcaccggtaccatccacgtaacggtgaccatcatcgcgcccccatcgtgcgtgattaacaacaacaacctgattgaagtgaattttggcaacgatgtcatgaccacccgcatcgacggcagctacaagaagcagccggtggtgtactcggtagagtgtaaaaatgcgccgaacaacgcgatgaaactgcaaatccagggcaccggcgccggctttgacggcgaggtgctgcaaaccaacaaggacggcctgggggtggcgctgctgcgcaatggcagccggctgcccatcaacagttggattaactttacctacccgacgaagccgacgctggaagcggtgccggtgaaacaggccggggcgaccctgcgcggcggcgagttttctgccggggcgaccatgaaggtggaataccagtga

SEQ ID NO: 447570 - DNA, 819 bp, Serratia marcescens
atgaaatatataatcaaaaaaactgttgttttcgattcaaacgaactgacattgtgcctgtatgaaaatacgcagatcgtggctagactaaccaaacctgccacacgtttactactggcattaatacaaaataatgggatcagtgttacccgggagacattattggacaatgtatggcttacctatggctttacagcttccaatgcaggattaaataattacatcagtgagttgcgtaaagcatttgcgtcgttaggttgtcatcatgagctgatcatcaccatccctaaactgggcttcagatttgaagctgaggtcgatctttccgatgcaggcaccgccgcgccagaacaaaaccagaacgatgaagaaaatgaggtgctaaccagccctgacgaaattgaagaagcagtgctgacaaaaccaccgacttcaaaaaatgaggcgccttcgaagcgcaatcggaattttattgttttagccagctccgcgctatttcttgggcttcttagcgctatagttttaaataatacgcatcacaaaaactatgattatcataaaattatcagcattgatcgctgcgacatttatgtactgaacaaaacaccactgcttgtagatccagcagaaaaaataaacttcgcactaaaaagagaaggagtggattgtaaaaacataccgagcgatgttttttacctagaggatcgtattagtaaaaaaaacgtgcgaacagatttaatctccgtttgcagcaaagcggataacaaccggtacgacacctgcttcaatatcaaaaaccagagaaatacttcaatatga

SEQ ID NO: 447571 - DNA, 468 bp, Serratia marcescens
atgaaaaaactgctgccagggctcttaactccactcttcttgctttttttttcattcaacacgcttgcggaagaaccgttcaaatgcacatcacattacaaaataatgatagaaaatgacaggggccccgttcagttcgatggccgcctaaccttatttttaaaaaatgagaaggaaggttttttttcgttaacgggtaaagtaaaaaccagcaaaagtagctacctgcttttccgcaccagccatttctctctggttccgcaagagatcaaccctgtcaaacaggcaaacattactaaagtgattaaacaccccagcgatacgactccagaggatatctggctggcagacatcttgccggaaatgcctggtatcgattttcagatcgaaatatggcacttgagaaataatctgatcttgattaaatccctgaacagcggatatcttatctgcgccgcagagcgctaa

SEQ ID NO: 447572 - DNA, 219 bp, Serratia marcescens
atgcgtcccaacattacaatttcaatccctgagccgtttttgcccttggatgagtattgccgccgtacaagcatgaaaaggtctaccgcgatgctcatgatcagtgatggccgtttgccgatccgtgaaaagacccaagcccgcgggcttattgaggtcaacatggccgatttgaccattcaagctttgtcggcttgccgcattgctcttaatccctaa

SEQ ID NO: 447573 - DNA, 348 bp, Serratia marcescens
atgtttgaaaactcaaccaacgacatggccaacattaaacggcaaaagctgattgacggtaagttatacgattcaaattactatatgtttgacaaggcttttttgcctcaaaacttgaaaaatcctgtggcaattctcgatggcgaaaccgtctacatcgtggatagctcaataggagaactcagtaacggaaaatggctgatcgaagtcgaaggagaaaccagcataaaagacctgacacgcatccctgtgggccgcgtgcgcgttagtgggaatggtgactctttcgagtgtggtgttgatgaaataaagattttggccaaagtggctatgacctgcgctaaataa

SEQ ID NO: 447574 - DNA, 1029 bp, Serratia marcescens
atgcagtgttttccatttggccgggacgggaaacgcgtccgcaaacagtttgcaaccaaaagtgaagccctagcatacgagcgtcacattatcgacgaacacgccaacaggccctggatcgaagaaaagcgagagtcacgcacattgtacgatctgatccagacttggcatcgtgcgcatggcatcaccctggaagatggggagaaacgaaaaagctcgatggaatttgcttatgagagcatgggcagaccattggctacagaattcacagctaagcttttttcgtcctatcgtgaaaaacggcttagtggcgaaatttcgcgttccaatcgagttgataaagtagctcctcgaactgttaaccttgagttggcctacttccgggcgatgtttaatgagctgattcgactcgatgaatggaatggcccccacccactggagaaagtaagagcataccgaacggcagaaagtgagctggcatatcttgagcttgcccaggcacaacagcttttgcaatcctgcgcagccagtcaatccgatagcctgctgcttgtggttaaaatatgcctagcaaccggtgcccgatggagtgaagccgaaaaactaactaagccgcaaattctgccgagaaagattactttcattaaaaccaaaggcaaaagaaataggacagtaccaattagccaggagctttatgatgagcttattgcgtttgctccaaaaggtatcggcaataagccccttttcaagtcctgttattcagcgttccgcacagctttaaaacgtacaggcattgagccacctgatggccagctaacgcatattttacgccacacttttgccagccactttatgatggccggaggcaatattcttgtgttgcagcgcatcctcggtcataccgacataaaagtaacaatgcgctatgcacactttgccccagagcatctattcgatgccgtggcattgaacccgttagcattgatggaaaatggcagcaaaatggcagcacagcttagtgatatttag

SEQ ID NO: 447575 - DNA, 1041 bp, Serratia marcescens
atgcgcacacaggttgtgatcatcggcgccggtccggccggcttgatgttgtcccatctgctgcacctgcaaggtgtggaatcggtggtgttggaaacgcgcagccgggaggcggtggaatcgaccattcgcgccggggtgctcgaacaggggaccgtcgatctgctcgagcagaccggattgggggagcggatgcggcgggaaggggcgcggcatcaggggatccgcttggcgttcggcggccggcagcaccgcatcgatctggccggattgaccgagcgcgccgtcaccgtttatgcccagcacgaagtcttgaaagacctgatcgtcgcgcgtctggcggcgcagggccatctgtttttcgaggtggagcaggttgaattgaaggcgctggacagcgcgcagcccgaggttcactaccgtcatggcgaccagccgcgccggctccgcggcgactttgtcatcggatgcgacggattccacggcatcagccgcgcggcgatgcccggcgtgcagcgcatgtattttcagtgcgatcctgcggaacaggtcgatcaatggtcggacgatcgtatctggcgcgagttggagcagcggctggaaaaccatgaaggctggacgctgaaaaagggccgcatatttcagaaaaacgtggtgggcatgcgcagcttcgttaccgaaccgatgcgctaccggcgcctgctgttggcgggcgacgcggcgcatatcgtgccgccgaccggcgccaaagggttgaatctggccatggccgatgtttgcctgttgtcccaggcgctggagacgttttaccggcgaggcgactggcaacggctggacgattacagcgacaccgccttgcagcgggtctggcgcgccgagcatttttcctggtggatgacccacatgctgcacacccggcgggaagacacgcctttcgaacaccggctgcaactctcagagttgcagtacacggtgaaatcgcgcagcgccatgacgatgctggcggaaaattatgtcggggcgccattcccggcgatataa

SEQ ID NO: 447576 - DNA, 1713 bp, Serratia marcescens
atgatcgaatatgaacgtaacgggacccgttttagcaccacagcaagcggccgctattcctatcaggtatggaaaaccaatcattacgctttcggtcattacgctggcggttgctgggtaacgaaacattccggcatgtactccgcgaacggcagcggctaccgcgccacggccgatttttgggggacaaagttaaccggttacacagacgccgaatggctggaacttgtttccgcaagtgatgccctgatgttcacacttcatattggcgaattacaggtttattttttcgataacaacggacagaaaattgttgttaagggtgatgacgtagggcggcgacaagtacgtggggcacttgagcgtctcgccaaaacgcgaggtaaagaattaccgaagtcgaaggaggaggccaaagcggccaggcgcgccgcagccgttgcccggacgcaaaagctaatggccaattccgatccgattgcaggaacggctgcgatgttatcccccgttgaatctttgaagacattgccgatagccgaacaggtaaacgtagcaccagagctaaaacgtgggttagaaacatgggaacttgccaactatcgtgcttggtcttctgagaatcattcaaaattaattggtgtgaaaatgatcgaagccattgcgacatatcgcacggagactactgccgcgtcaaaggctgcagttaccatcgtaacatccgcaatggaatcaatagcggaactagtagctaagactgcgacagaacaaccggcgatggtgtccagtgtagaacgcttgggcgagacttggggagcaaccatacgtatccgcaaacagcatagtaaaactaccggcaagttacgcaagccgcttcttaatgcgaataaagaatttgttagtaaaaagccaattactgatctggttgctgtaacaccggaaaaggctgcaggcggtatagtgccagaagagaaaaaagcgctgactgtatcaaataacctggtcttagcaactgcagttgcaaataaacaggaaccccaaacagagcaacccgtcgaaccaataacgggtgctccgatagccaataaaacttattcgaagactcctgaggtgcgagcgggtttattaccagaacaagtgccagcatttcgcaggtgggcgaaggacttgcgcgggctatttaaaagcgcccccctgagtgctcagattgaagcttttttagtaggcggcaaagcggaagattgggaaatcgttttgagtgatgagctggagcacattgccgaatcggttatttttcatgacgcgcacgttttcgcgtatcggcataaccgtgccaatcggattaaagcattacgccgtgtaaccgtccgtgaaggacaagggcgctttcgtacggcagtgctggccaaccataacggatgttcaattaccggacttaaagattgtgtagaagcggcacatatcttgcccgtggcgatggtggaagacatgcggccgggtaatggcttagcactcgttagttggctacacgctgcctttgacgcgttggcattttccatcgaaccagtagggttaaccattcacgtagccccgcaggcgcgccaatggcttaatattgatggcttacagttggtcgacgggaaaatctggccacttgaccgtagcgcgctcgcacaccacttcgagcgttttaaagaggcaggcatcaaaccttaa

SEQ ID NO: 447577 - DNA, 1755 bp, Serratia marcescens
atgtctgacaatcacgaaagtcccgcggacagagcagggcaagaagcacttgaacgcatgttcgcttgtttggatgaaggtctaagctttcgcctagaagcaggtgctggggctggtaagacctattcgctggagaaggcgctcagtcgattgattgaacaccgaggtcctgcgttgatccggaagcgtcagcaagtcgcgtgtatcacttacaccaatgtggcgaaagacgagatcatctctcgcttccaagcgcattctgcaatccgagccgagaccgtccatggcttttgctggtcgttgctcaaagattttcaaacatcactgagaggatttcttggcgctgaagctttttggcgagagcgttttgagccggtgggtggcgtaggtaacaggcgcatccattacgaaatgggtattccacgcgtatcggaggacgaggtctcgattcggcacgaagatgtcctgacattgatggttcaggcgcttacgtctccgaagttcagggccgtattgacttcccgatacccgatcctgtttgtcgacgaatatcaggacacggatgaacattttgtcggtgcactgaagtcgtggtttctagatcgcggtgagggaccgatgattggcctgtttggtgaccattggcaaaaaatctacgacgagggctgcggcctagtcgtgcatgacgcccttcagccgatcgaaaaaaatgcgaatttccgttcagcatcgcggattgtcgatgtgctgaatgagatgcggccaggcctgcaccaggaagtgagcgatcctaacttgatcggtgaagcccgagtattccacaccaacctctggcctggagagcgacggacaggaagcgggggaggacactggactggcgacaccagtcctgaggctgctagtgcctacttcgaatacttgaaagctcagctcagagtggaaggatgggatttctctccgaaaacgaccaaaattctcatcctgaatcacaaaggtattgctcgtgagcagggatattcctcgatccttgaaatttatgggcagtacaatggtccgtggctgaagaaggaagatcctcacatcaagtatttggcagatcagcttgagccagcgtgtgtcgcataccaacagcgccgatacggtgcgatgttcgggcacctggcaagcgatcggccaacgattcgaaggcacagcgataaagccgcttgggctgaggcaatggatgcactcctcgaactgagattgaccggtaccatcggcgaggtgattgactacatcatagccgtgccgcagatgcagctccccaatgctgtgctacggaatgagcaagggttacaggccgccggtgttgaaccaggtgaggacgagccacgcaggattacccagcttcgaaagctcagggcagtatcttacacagagctgatcgcgctagaccaattcattgatgggcatacgccttttgccacaaaacacggggtcaagggagccgaattcgaaaacgtgatcgtggtgttggggcgcggctggaaccaatataatttcgctgaaatgctcgagtggtttcagccggggccaccggcgaacaggcgtgaaaaattcgaaagcaatcggaatctcttctacgttgcgtgctctcgacccaaggtccgtttggctctgcttttcactcaactgctgagccaggcagcgcttgatcagatcaccgcgtggttcggcgctgagcatgtattcgagttgcctgctaaccctggttga

SEQ ID NO: 447578 - DNA, 2079 bp, Serratia marcescens
atgcggatcgagcgcgttgggattgaaaatttcagactgcttcagaacgtcagtcttggcctagaagatggcaccacactgatcgtcgggcgcaacaattgcggcaaaacctccatagctgaggtgttccgccggctcctttcagaccggactccctctttcaggcttgaggatttctccctggggagtcacgaagagttttggacggcattcaatgcgtttcacggcggaatagctcgctccgacgttgctgccatgcttcccgttgtcagggtcacattggacatttcctatgacgtggatgccccagacctggggcagctcagcgaatgcatagtagacctagatccagattgctcttgcgcgcgcatcgtcctgacgtatggaccgcgggcgacagcccttgagtcgcttttcgcagaaacgaatgcccccgaccctgtgcaggaggatcaacgtcctagcttcttcagcctgataaagaagcgtttggtaggggcctacgagccccgtttggaagcggttgaccccaatgatcctacgaaccgcaaggacctcgacctaaaatcactcaccacgttgatccgcggcggattcatcaatgcgcaacggggcctggatgacgatacacaccgagagcgcgatgtccttgggaaggtggtggaggtgctgttccaatcggcattgactgaccccgcagatcccgagaaacgaactacggcggagcagctccatggagcggtagagaaaattcaaaaggagctacatgacggtttcaacgccggactgacttcgctgctccctacgttcgagcttttcggctacccagggctagaagaccccggccttaccactgtgacgaccttcgatgtcgagcgcctgcttaaagaccacacgcaggtcagatacaggggggtaaacggcctgacactcccggaaagctacaacggactcggcgtccgtaacctggtgtacatccttctgcaattactgaaattcttcagagagttccaagctacgccggcagccgcaagcgtacacctcattttcattgaagagcctgaagcacatttgcatccgcaaatgcaggaggtcttcatccgacaattgcacatgatcaagggggcattcgagcagcagctgaatggcagccgtccgtggccagtgcagtttgtaatttccacccactctccacacatggccaacgaagcgcgcttcgaaactatgcgttactttctctctgtgagcggtgaaaacgggatccggcagtccaagatcaaagacctgaggcagggcatgggccaggctcctgcaccggacagagattttctctatcagtacctgacgctcactcgatgcgacctgttctttgcagataaagccatcttgatcgaggggacttcagagcgattgctgctaccaaccatgatcgccaaaactgacgcggctgcggtgggtgaacctcagttggctagtcagtacttgacggttatggaggttggcggcgcgtatgcacaccggtttcatgatctactcaccttcttggaactgcgcacgctgatcgttaccgacatcgactccgtcaaaccgaatgcagaaagaaagcggaaagcttgtctcgtttcagagggtctgtttacgagcaatgcgtgcctcaaagactggtttggggccgaagtcactcctgcccaactgctggcgaaaacgccagcagataagacgatagggttgaggcgcatcgcttaccaaattccggaggggagcgaacccggaccttcaggcagaagctttgaggacgcgttcatcctggcgaaccgtgatcgatttcagctggggcagggcgatgtcgcatccctagcttacgagtatgcggcggaccagaaaaaatcagcttttgcgttgaaatacgcgatcgatgatacgaactggaacgtgcctagatacattgctgaaggattgcgttggctagcagttgggacgccggtcgctgatgcccaaatggctgctcgggccatggccgcagttgtagaggttgttggtgaggcagcaactgctgaaggagagcaaggcgatgtctga

SEQ ID NO: 447579 - DNA, 1062 bp, Serratia marcescens
atggataaccttatctatcaaaaatttagtgatttcgatcacaaagatccgttttttgactctttgaaagctgattataaagaattcccatcttggcttactaaaaaagcaaaggaaggagagtctgcttatgtcttatacggagacgagggactaatagaagggttcatgtatttaaaagaaaatgatgatgggggtggtcttgatcctcaacttccagctggaaatcatctaaagattggcacttttaaattcgaatctaagagaacactacgtggacagcggttccttaaaaaagcatttgatagagctataagctctggttcgaatgatatttatgtaaccgtttttgaaaagcacggccatctgattaggctttttcaaacgtatggattttatcgccatggtcagaaagacactccaaacggaaaggagttcgtctatgtccgctcattaaatgaggttaatggtgatattctacttgattacccattaatattaaaccgcaacactagaaagtatttgcttgccatataccctgagtttcacacacgtttatttcctgactcaaagctagtcactgactcaccagatattgtacaggatgtatcacatacaaatagcattcacaaaatttacatatgcggaatgccgactgtatcaaaaatgcaacgaggggatataatagttatataccgcacaggagatggtaaagggcctgcattctttagagctgtagccacttctatatgtgtcatcgaaagcgtaagaaaaattgatgactttaatgacgaggaaagctttgtaaattactgcggaaagtttagcgtattcagtgaagaggaattaagaaaattttacaaaaacaagcggtatccatatgttctgcgcttcacatataatctagctttacctaaacgtccaacgcgtggtaaaatgattgaagatgttggtttaaatggcactaaaggttttagatggagccattttgaactaacagatcgtcagtttaacgaaataattgatttaggcaaagtcgatgaaagttttattatcaattaa

SEQ ID NO: 447580 - DNA, 174 bp, Serratia marcescens
atgggcacaccacgatttatacccgactttaataaagaagccattcgtcagataacggaacgcggttattccgttaccgaattatgtaaccgtctaggcgtttacgcgcacagcctttacaagtggctacggactatcaagcctgataacggcgaacagcatgcccggaattga

SEQ ID NO: 447581 - DNA, 579 bp, Serratia marcescens
atgaaatccccgtctgttagcatgaaaacgaaagtagagttaaagccactaagaagtcaaatatttgttattttaacagcattaatggcattcgttttttttataattgcatgcttgttttcatggtttgaaaaaaaaggggttatacttccaatcctcggttcaattgtgttgatattgatttcattatgggcatatttcaaaacatatttgaatgctggtctagatgatgctgcgcctttaaatatagcattaaatggacttaatttaagagtggactccaagctggtcgaaacgccagaaaatctaaataagttaattgtattgctccaaggagcgaaagaattgccggcccctgcgggtttggtgacagatgatggtacaataataccaaactctaagggggatgctataaatagagtgaatatagctaatgcatcgattcacaatactattattgaaaatgtcgataggttcaacaagggtgagctaaatagtgatgattcgacattttatagggaacccccccaacaaaaaaatcaaaaagtaatatttacagatattgcagatgctgaatga

SEQ ID NO: 447582 - DNA, 519 bp, Serratia marcescens
atggactggaaagatctggcgacaacggctgtgtatacaggcattactactgaaagtgaaagtatatggaaacgtgttgatggagttgatgttgagttcataggtgcatttcttaccgcacacttaagtcttgagaaatatattagtgactatcttaggttaagatatccttcgttgtcttgggacgatgcaaaactcacattttcccaaaaaatttccttaatacaacatgagcctgctaaagccccatataatgaaatatacgtaagggtaaaagactttaatagtataagaaataaaattagccatgaattaaattatcgtatcaccgataaagagaaaagtaagtttgttgatttttatatgaagataacaaaaggaagtaaaaataaacctgatatagatgttgataatatagtagacttattggaattttttttattgataactaaatcctattttgctagtgcaatatctcattatcactacgatagaattggtcacagacagcaagaataa

SEQ ID NO: 447583 - DNA, 756 bp, Serratia marcescens
atgccacagttatcaaaatttgacattctctcaagtagattagctaacttatctcaggttggattgcttttgttagcaggatttggctatttttatacagtcatccctgtttatcaaaagtcattattagatgaggaaattgcaaaaaaaacattagagattaatgaaaaggataaaaatctagagcgcctcaacacccaatataaacaaaaaatagatgagttttcaaaaatttcggcagaagtggaacaggcaaaaaaagaagcaagtgaaagtaaaagaaattaccaattaatgcggtctaaatattctcatcaatattcagagttgagaacccacttatttggtcagtttataattattggggggatgcgctgtaaagtagatatgctaagggatggttctttatcaagatgtcttgtatctaaagtcgtaaaagcgtcagagttgaaggagttgacttcaagggattctcagttgctggaaagaataattttaaatgaagtaagcattgccgcaaaaaactataaccaaaaacattcaaaagttataagtgaagccaacaaaaaaatagatttaatttctaaagaactagagttgtgccagaaagaaaacgaagggagcaagtgttcaagtttggacataaaatattctcttgagaaaaataaaaaagaatttatgttatttgaatttgattcaaaggtgatggatgatttattaaacagtattgcaacgaaagccgcaaatacgagatga

SEQ ID NO: 447584 - DNA, 216 bp, Serratia marcescens
gtgtatttgccagagttggaagaggtggttattttggaacgtatcgaacttatagcccggttaggtgggggctatgagagtaagccggaagacaaggatattgcgctgacgtggatttcagaactggcaggggagatgaaaaccaacatcgcacctgaaaaatcggaagtggtcaagcaccttgctaccatctcgtcatacctgagtgacatatga

SEQ ID NO: 447585 - DNA, 255 bp, Serratia marcescens
atggctgagctgacagcagcagagcgtaaatggctgaatgacgtgcagaaggtgctgaaccgctgcccgtcaacacgtctgggcttcttcaccatcggagataaggacgtttttgtgtatgacaagcgcctggataaacagatagatgaattacaagacagtggaggcagggatttcggcctggtagttaacgatcttgatgcgggtttcggggagctaacattcccgtcccacgttcactctacagcaggttaa

SEQ ID NO: 447586 - DNA, 177 bp, Serratia marcescens
atgacactaacgactaatctgcggatgtgtatctacacggcattaatctgggcgcttgggtttgggcttggctggggaatcgttaacagcgaatggttccgcctgtccatggcagccggtatcgccatcatcgggttcgcaactcacttcgctatggggaaaactaaatggcactaa

SEQ ID NO: 447587 - DNA, 1050 bp, Serratia marcescens
atgagtaaaatcagagtgttatgcgtagacgattcggcactgatgcgtcagctgatgacggaaatcgtgaacggccaccccgacatggaaatggtggcgaccgcgccggatccgctggtggcgcgcgatctgatcaaaaaatttaatcctcaggtgctgacgctggacgtcgagatgccacgcatggacgggctggatttcctcgagaagctgatgcgcctgcggccgatgccggtagtgatggtttcttcgctgaccggtaaaggctcggagatcacgctgcgagcgctggagctgggcgcggtggatttcgtcaccaaaccgcagctcggcattcgcgagggcatgttggcctacagcgaactgatcgccgagaagatccgcaccgccgccagagcgcgcctgccgcagcgatccagcagcccggcgccggcgatcctcagccatgcgccgctgctgagcagtgaaaaactgatcgccatcggtgcttccaccggcggcaccgaagcgatccgccaggtgctacagccgctgccggccaccagtccggcgctgctgatcacccagcacatgccgccggggttcacccgttcgttcgccgaacggctgaacaagctgtgccagatcacggtgaaagaagcggaggacggcgagcgcgtactgccgggccatgcttacatcgccccgggggatcgccacctggagctggcgcgcagcggcgccaactatcaggtgaagctgcatgacggcccggcggtcaaccgccatcgtccgtcggtcgacgtgctgttccgctcggtagcgcaatatgctggccgcaatgcggtgggggtgatcctcgccggcatggggaacgacggggcggcggggatgctggagatgcaccgcgccggggcctataccctggcgcagaacgaggcgagctgtgtggtgttcggcatgccgcgcgaggcgatcgccggcggcggcgtgagcgaagtggtcgagttggacaggatgagccagcgcatgctggcgcagatttccggcggccaggcattgcgcatttga

SEQ ID NO: 447588 - DNA, 708 bp, Serratia marcescens
atgcgactatccgcaccgatctatcagttgaaacgtcgggccaaactgttgtcccgcgaagacaatatcccgctgcatgaagcacaggaccgcatcgcccgcgaagaagggtttacgacttggagcctgctctccacgcgtctggcgatgagtaagctcgacatctcgctgctgccaaggcttgaagagggggatatgctcctgctcggcgctcggcccgggcacggcaagacaaagcttggattgcagcttctgctcgatgctgcccgtgaaggaaggcgcaccgtcttcttcacgctggagtataccgagcgggaggcaatggagcgcatccggtcgttggatgacgaggtgccggcaaacacgccagaggttgtgacatcagacgaaatcagcgctgatttcatcgtccaacacctatccggcgcgccacgcggaaccgttgctgtcatcgactatctgcaaatcctcgatcaacagcgaagcaagccttcactttcaaatcagatgaaagtcttgcaagcgtttgcgcacagttccggcgtcattctgggattcatctcgcagattgaccgttcctttgacccggagcgtgctccggtgccaggcctcatcgacatccgccttcccaatcctatcccggcaggaatcttctcgaaggcctgttttctacatgcaggcgaagtccggattcagcacataggttga

SEQ ID NO: 447589 - DNA, 2190 bp, Serratia marcescens
atgaggggattgtcgccagcaacgtccacctcccggcaactcgatctgcgcccggttcttgcgtccgccccgttaaagccggggttcgcgcgggaagcgctttcgcgctacggcgatccgagttgggatctcggaccggccgtgtttcgcgagagcgcccgtcgctgtcatgtcaccgtgcatttcggggccgtcgaggatgtaagcgtccgcgaagcgttgcgcgaacttctctatgcccggctgaacgtcgacctgccgggtcaccgcaaggttctttctcccggtagtgtccggcaggtcttcaaccgcgcccgacgcttcttcgagttcgtgcgtgatgaactcggtgtggtcgatctccaccgcgtcgaccagccacttcttgaccgctatgcccgccacctcaaggccgaccgtgctcgccagccggtcattgtcacccacctgctggagatcccgttcgatctctatgcctaccgcgatgaccttccttccggagggttatcattccagccgtgggccgggagacctcctgcgcgcgtcgcgggctatcgtcaggttcacgagaaccggacaccgcggattcccgaggcgatcatatcgccgctgctggcctggtcgatccgctatgtcaccgagttcgcttccgatatcttcgccgcgcgcgaggagatggaccgtctcgaagctcattgcgccgcactcatcgaacaggacaccgctctcgatcaccaacaccgacggcgccaacaacgcaagcgccttgaggagtattttgggcggcttcgcagcgaaggtcgcggagtgccaatctgggcgaccgcgcataacggcacattcctgcggcatccaaagaccggagtggtgtcgccgccggtcaactcgcatctgcttcacctgcacgtcggcatcgacgcgcaagctgagccgaggatgcacattcaactgaccaacggtgcgcctcgccagatcagggccgcggtgcgcgaactgggtgtggaagccggcggaatggatacgccgatctccatcctatcggataccggcaagccatggcggcctcgcttcgacgtcaaagctctcgccaaggaagagaggatgctgcaatcggcggcctatatcctgtgcgcctatctgaccggtatgcgggactgcgaggtccaggcgatgcagcgcggatgtctttccctgacgcgcagcgaagacggcatgatcatgcgccatcgcgtccggtcagttgcctacaagggcaagtcaagtcggggtgagccggccgattggatcaccatcgagcctgtagccaaagctgtcgaggttctggaacgcttatctctccgagccgcatccgcgcgcggactttcaaccctctggccagtgctcgccgccaaatcggtctgcaaggatcacctttcggctgagatcgtccgtcagctcaatcatttccgtgaccatctcaacgacctgttcggcacgcccgaccaacccgcaattcccaatggccccgaggacaagccgtggcggatcacgacgcggcagtttaggcgcacgatcgcatggcacattgccaaccgccccttcggcacgattgccggcatgatccagtataagcatgcctctgtcgccgctttcgaaggttatgccggctccagccgatctggattccgggccgaagtcgagaaccagcgtagtctcggccagctcgacgacctgctgacctatttcgatgagcgtcaggccggagctaggctgtccgggcctgcggcggcacgtatcgcgaagacgctcgacaacatatcggacgacctcggtccgcttccggccatgatcgctaaccgtgcccggctccgaacgatgctcgcgagcctcgcgcggacattgcatgtcggggtgctggccgattgcttctttgatcccggaaccgccctgtgtttgaagcaagcgacggccgtcgacagcaaattgccgctgacggccctctgtcagccaacccgttgtccgaatgcctgcatcacctcccggcatcggccagcatggtcccgttctgccgatgacgccagagcgttgctgaaggagaagcgcctgtctcccctgcagcgcaccgcactgacgcaagacctcgaacggatcgagggggttatagacagcataagttgcgacgcgaacgctgacggcagtgaagtggaatga

SEQ ID NO: 447590 - DNA, 999 bp, Serratia marcescens
atggatattccaccgcttctgaccttcctgtcgctggagaccggtctggagttggaatgctgcaaggcgttgacgatcgactgtctccagaaccctgggcctgggaccatcgcgatctcctataccaagcgacgtgcccgtggagccgagcacaagcatattcgcgtccgtgacggcgggatcggaacaccgggcggcctgatccgcaagctgattgaggtaacggcattcacacggcaattcgttccgagcgagaacctttggctctattattacactgggcgcaagcagcttcgtgcaggtctggagcatcagcaggagctcgtgaccaggtggattagggggcatgatcttgtcgatgacgatggccagccgctccgcctcgttctttcccgcttgcgcaagacccacaaggcactctggtatctgaagaccgagggccatatggcccgctttgccgtggggcatacgccggagattgccgcacgacactacgccgatattccttcattgcggccgctgcacgaagccaccgtggcagaggctttttccgaagtcgccgcggccgccggcccggtgatcttggcgcctgcggatgaggattcctggcgtctaagcgacgacgcttcccaagagcgtgatgaccgcgatggtatcctgcgtggtgaacaggacgtttggctggcggcatgttctggttttgaccgcagcccgttcggagagccaggagcgccttgcccgcaacccttctggggctgtctcgaatgccgcaatgcggtcatcaccgcgcgcaaactgccggcgatcatcgcgttccggcacttcatcgaggagcaacgggccagtctctccgccacagactgggcgatgaagtttggccgtgcccatgcccgcatcgaagaacagattctgcctgcatttcccgagagcatgattgccgcagcccgccgtgaggcggaagtgcataccctttatctacagccggaggcccggcaatga

SEQ ID NO: 447591 - DNA, 234 bp, Serratia marcescens
atgcagaagcccaggctggtccgcgtcgatcgagcgcaaggcgagtatggctttggccagaacagtgtgccggtggatcggggtcatcccgccggcttcgaggaagtgctcatacccatcaatatcgtcagcgcgcagatcggcggccgtctttgccgtggaatgctcgcgcagatacgcgaaaaacttcagatagccctgcaagtgctgtttgattgtactccgcgcacctag

SEQ ID NO: 447592 - DNA, 240 bp, Serratia marcescens
atggacgccggtgagatcaacctcaagcgtcccgccatagcgcgcctcgatgttgaagcgcagaccgagtacccgatccctgacgtgcgggggaacaacgccatcggccggcgcaaaacgcaccgcggttcccttgcgtgggcgccccgtcacagcgtggtctccgaggggatcaatcccaagagctcctcgacggccgcatcgacggtatcggcgcgcgtcgcgatgtggtcgaggtag

SEQ ID NO: 447593 - DNA, 483 bp, Serratia marcescens
gtgcgattgtttgacggcagcgatatcgcgctcgacctgctcggccccgaggagcgctgccggatcattatctgcgacagcgacggcacaccgagcgaaccggcggtattgtggctttcagagatcggcatgccggtgcagccgaactcctgggaagtcattttcgcccgcgcctccagccggtgcagatccttcggcttcgacatcagcatcagtccgcaccagctccgccacacctttgctgttcacatgctggcgatgctcattcagcaccgcctccgcgatgctacgctgcctgccggaccgatggagggataccggcaggtgctcggcgaccctctccagcaggtgcaacggcttctcggtcatgccagcctgacgacgacctacatctacctcgaccacatcgcgacgcgcgccgataccgtcgatgcggccgtcgaggagctcttgggattgatcccctcggagaccacgctgtga

SEQ ID NO: 447594 - DNA, 705 bp, Serratia marcescens
atgaacgcaaaaaccaagtttgacctttaccaacacgttaccgaccgcatcattgccagcattgaggcaggcaccccggcatggcgcaagccgtggactggtgaagccgccacaatgcaaatgccgctgcgctccaatggcgaagcctaccggggcatcaatgttgtgatgctttggcttaccgccgccgaaaaaggctaccgcagcgcctattggttcacctatcgccaagctaaagaacttggggggcaggtacgcaaaggcgagaaaggctcaaccgttgttaaattcggcaccatcgagcgcgaggacgagcaaaccggcgaagaaaagaaaattccctatttgaagggttacaccgttttcaacgccgaccagatcgacggcttgcccgagcagtaccacgccgcaccggcagaagccgcccgcgatcttggcaccgccgccgatcccgagcttgacgccttttttgccgcgaccggcgcagacattcgcaccagcagcgaaccccgcgcctactacaacccgaccggcgactatatccacatgccgccgattgcgacctttcacagcgccgcaggctattacgccacgctggcccatgaggcgacccactggacaggccacaaatcgcgccttgatcgttttagccgattcagcgaccgcaagagctacgctttcgaggaactaattgcattatcttga

SEQ ID NO: 447595 - DNA, 570 bp, Serratia marcescens
atgctgatgttgctacggcggcggtgtcgcgcttggctggaaattcggcggcttgataaagagcttgcgcagtcgagcgggttgcccctcgaattgcctcaaatcgtgccgaatgcttggaatgaggttgtttggcggctgcccgtgccgaaccatcctgacgcctttatgacagcttcaaatgccgcacagtccgatttcattgtgtatgtgaatggcttggctttctatcgagcgtggttggcgttaggcgtcgaggattctcaagcctgcccgttgaagcaggacatgcctaaagaccggaaatatccgtcgagcgccgcgcattttgccgtgggcatcgacagccccgttccgcttgctgacgtaagcccgaccatgattctgggccatttcgcggtgtgtttcactgatggcatgacccgttcaatgtggcttttggcccatgaggtcgccgtgtttccggtgctttcccgtgatgaagcatccgccgttatgttggcagaacacgtgggcgtagcagcgccgattcaggtttcaaagctgcgtgagcaatgcaggaagatctag

SEQ ID NO: 447596 - DNA, 129 bp, Serratia marcescens
atgtttcaggcattcagtgagctgagcgaccagttttcttgcgtcttcaagctgttcagccatcttttttgcctcaaactcaatgtcttcatgcaaattctgttctcctctatgcatccggagaagtag

SEQ ID NO: 447597 - DNA, 456 bp, Serratia marcescens
atgtatgaatggtacgttttatactgtaacaatcaggatgttgaacgcatcacccgaagagtcgagggattggatgtcgaggtgttttgcccccgctatatcaaagtaacgccacgtaaggattgccgggcggtacgtcaggaagagaaggtgttgtttcctaattatcttttcctctgctttgacgtcaacataacgcatacatcgactatcacatcaattccgggcgcgcatggttttgtcagcttcggttcaaccccctgcaccgtcccaaaatcagtgataacagcgattgaatgcgcccgtctgatggcgctcaatcctgaagaagatgctatcgagtgccgaaatattgccccggatttgctggcaaaaattcaagaactctctctgataaggtctccgctccaacgccaggtagccttttcaaaactactccagaaccaataccactaa

SEQ ID NO: 447598 - DNA, 306 bp, Serratia marcescens
atgcaaaaagaagacttatttatccgaaatatacattctcgtaatcaggacaggatatcggtggcccttgtatatgacacgttatctaaagaagcccacagtggttgtgggctgtattatgagatatacgaaagcaggcttatcggtcttttgcgcgatcatctttcagtacttaatgaagctgacgcaaataaattaagacattatgccgaaagcaaaggcacgaaaattgatgatgcgtcctacagtgacgctctggaagctgaaagggagtgcagggctgagatataccgcgagcagatgtaa

SEQ ID NO: 447599 - DNA, 324 bp, Serratia marcescens
atgtctgatgttgaaagtggcaatagagttcaggggatttcattacgtaaatcaatcggaatctatgcgctctgcatagtgctcatgatggtgttctggaacctcaatgctagaacgacctggtttcccggaatcattacgtttatcgcgtattttgtttttgggttcgtgcttaatcgaattgtattgagacggttaattgaatggcatccgatgtataacaccattgctaatgtatcgagtgcaaaattatcctcttttatcctgtggcctatctcttacctgtttttatttatccgccttatgataaataaggtactgtaa

SEQ ID NO: 447600 - DNA, 924 bp, Serratia marcescens
atgtcaaagcaaaagtttaaaatcaccaactggcccgcatacaacaaagcgctcaggcaacgtggttcactgactgtctggcttgatgagtctgtcattgccgcatggaccgacaacgcacagcctgaaggccgtggccgaccacttcactacaccgatatggctattaccactgtcctgatgatgaaacgcgtgttcaacctgccgctccgggctttacagggcttcgttgactcaatttttaagctgatggaactgccgttgtgctgcccggactactctctggtcagcaaacgggcaaagagagtcaacatcagcataaaaacgccaacccgtggtgaaatctcgcatttggtcatcgacagtaccggtctgaaggtcttcggcgaaggcgaatggaaagtcaggcagcacggggctgataagcgcagggtgtggcgcaagcttcatctggccggggacagtgtgacgcacgagattatctgtgctgatttatcgctcagaggtacgacagatgcacaggcactgccggggtttattaaccaaactcacagaaaaatcagggaagcctctgcagatggtgcttatgacacgcgctactgccatgatgtgttattgaggaaaaagctcaggctacttatcccgccacgaaacggtgcgcaatacaggcctgacaagtaccatacccgtaaccacgccgtggcgaatcagcatctgagcggcagcaatgacctctggaaaaagaaattgggttatcacggtcgttcagtggcagaaacggcgatgtcccgaataaaaaccttgctgagtggcaacctgagcctgcgggactatgacgctcaggtaggggaagcgatggcaatggtcaaagcgctaaaccggatgacgttgttggggatgccgcacagcgtccggagcgcataa

SEQ ID NO: 447601 - DNA, 432 bp, Serratia marcescens
atgcgaattctgaaatgttatctggcgaacaacacccgtaatcagtttgttaatgccaaagaagccgctaaggccggtgatgatacagggtactggacatgcgccagttgcggctgtgaattacacctgcttacaggcgaagcaggagaagccccctggtttgaacacatacggcattccattccccaccaacgacttatgaagtgcgcatgggtggatcctgaggaaaaagcacaggcccgggaaaagaagctccgtcaggtggtgtattccgtggacaaaaatgtcagaccacctcagaaatggcattgtgtgctgtgtgataccacatatcaggggaataagtactgcagaatctgtaaatccgggctctacagtacggagccgatactcagggataccctgacgatgccggtgaggtttgcaaaatga

SEQ ID NO: 447602 - DNA, 393 bp, Serratia marcescens
atgacgatttacgccaaatcttttatcacgcttgacggtaatcagcgcctcacgggcgcggccactgcacagcttcacccttacgaccgatacacctgccacctctgcggcagcgctctggtattccaccctgaaaggggtactaacctcccatggtttgaacacacatgggaagacctgacagagaacggacgttaccactgcccgtatgtgcacccagagccgaaagaagcgcggcgggtatgcatactgcgccgttacgtccctgatgtcctcccgttagtgcggaaggctgactggcactgttcggagtgcgacagcgattaccacggcgaacgttactgcctgaattgtcgtaccggtgaccacagtatcgaagtcacggctaactaa

SEQ ID NO: 447603 - DNA, 207 bp, Serratia marcescens
atgactacacctggcaatctgcttaccgacaagttcgtcgatatggcattcattacgcaactcactggcttaaccgataaatggttctacaaactgattaaagacggggcgttcccaaagcccattaagctgggcagaagctcccgctggcttcagagcgaagtggaagcctggctacagcagcgcattgctcagtcccgtcaataa

SEQ ID NO: 447604 - DNA, 615 bp, Serratia marcescens
atgagctaccacgacactaccgatatcaatcttagctacgttcagcaccctacccttagccgaaagctacgacgacatcaagaccagttatttgagcgttattccaagctgctgatgctacgggtggacttctcgtacctcctggacagtgattctcatggtcagggagatattcattcaacagtagcggatatcacgttactgattcaacgctgcggggatatcaacgggctggtgggttacgcatgggtgctggaacaaaccgaacagcatggttatcacatccacgccgcgttttacctcaacggtcagaagcatcgtcgggcatggacagtctttgaagccctcagggatacctggaagtatgtgacgtggggagaagggcatacacaccgttgtgagcctaaagagcattatcgcgtgagaggagaatgggtgacctcttatgacgataccaaggggcgtaagggaatgcagtacattctgagctacctcagtaaacaggcccagaaaaaccggggggttatttaccagttgagtgatattcctgctgcaccagccgctggcagatggcgaaacgccagccaggctcccgttcaaaaattacggcagtga

SEQ ID NO: 447605 - DNA, 705 bp, Serratia marcescens
atgtatgttaatttacataacttgtatgttttaaaaatgaatagctactattcagctcgccaagccaaaagcatcggtaaatcctttacgacattattccagaatctttctgctgacggctcggtcaaggccctgaaattctcttttgtagtaacacctttggatgggaaggccgcttatcctaacgacagaggtgctgagcatgcaaagaaggttcatcttgcactgaagctgtttttaaaccacatgcgggtacttaaatacgggaagtgtgttgccgggtattcatggctaatgtgcaacgaaaagcgcgcaaatcgaccctatatttatatgctgttttacataaccgggagcactagcgccgataaagttgcggaatgcctgcgcgatttatggatacgttcggttgaaaaggcgagcctgaaagaaggctggtacggttacccggtggtgttcaactataatcttgaattgggcaacaaggttttttgcaaaggtaatcatgcactgctggatggtcatgtcgagtgtcagagcggagcatacattttcgatgacctttgtggcggtacggctaattttaaaattagctcagataatccgaaattgttcctgagttacctaggttcactcagattgagcatgcgctcaatttccggtgtgagagcatggggctgctcgcagctaaaagataaaaactaa

SEQ ID NO: 447606 - DNA, 888 bp, Serratia marcescens
atgagaaatccttcaggatatgccctgattcgccgccatctgcggcgctatcctcgttcactacgccagtctcttttaatcgagctcaaccagcttgtgtcctatgagccagtaatcggcattatgggcaaaaccggagtcggcaaatcctcactgtgcaatgcgttgttccgcagtgaagtctgcgccgtgaacgcagtggaagcctgtacccgtcagccacagcgtgttcggctgatttttggtcagcattacctgacgctcgtggatttacccggcgtgggagagagtcaggcccgcgatggcgaataccgtgagctgtatcgcgaacttatgccggaactcgatatggtgctgtgggtgctcaaggctgatgatcgcgccttctccgtggaagagcagttttacagggatgtattcgcacagttcaacggaccacagccgccggtgttgtgggtactgaaccaggtggacaaaaccgaacccgctgagcgctggaactggccgtccgctcagccctcggcattacaggcggaacgaattgcgcagaagcagcaggcggtagcccgtcagttaggaattgctgagcaggacattcttcccgtttcggtccgggggcgttatcgcctgtcccgactggtggaggccatgattacccggctcccaaagcaggcccgcagtccacttgtgccgcacctgcagaacgggtatcacaccgaagccatcatcagcatcgccagcagcagctttggcgatgccgtggtggaagtgattgataagattattgacctggccccgctaccacaggtggctcgcagtgcgctgcaggctataacacacactgtcgcccgcgcggcacgctccctgtggggatttttcttcggctag

SEQ ID NO: 447607 - DNA, 159 bp, Serratia marcescens
atgccgttaattctgttatggggcggtctggccttgttgctgggtattgtggcttccgctaacggacgctcgttctggggctggttcattctcggtctgataatcgacccgatactggcggggctgctgtactggcttattgcaaaggaccgcacatga

SEQ ID NO: 447608 - DNA, 465 bp, Serratia marcescens
atgaaaaataaactgattatttcatttttactggcttcattgctgacgccttctttctcgcatgcgtttggcaaccgtgatagctgggtaagtggctatgcgcagggaacgtctgaatacaccatcctcggtaaagggcaatcgcaactatacctcgcctgcgacagttccggctcacagccggcgaccattatcttcactgacgtgaacggccatcaggtcaggatggacagtggccagacacttaccatgagaattgataacgctgaagaagtgaatatcagcgaaagcgagtctcatgtgggatctgacaatgtgatgtgggcatggaacaaattacgcaccggcaaacgtgttgtggtttcaggtagcggggtaaaacctgtcactttcactttagcgggggctgctgcagttcttcctgcgtttggtgacaacggctgcgtgcccggatttgcactgtag

SEQ ID NO: 447609 - DNA, 342 bp, Serratia marcescens
atgaagaaaatcatcacagtcgcagcactctgtctgctgtcattttcttcgctggccgcgtcttcaccggtcagcgtcagtgttagtcccggaagctacagccactacacatcgattcggattacatcaaaagtcgattcgatagtgattaaacaactcattgtcaaccggggaaactgccaggatgcagaattcgccagcccgtggaaaccggtacgtctgggatttggcggtgctgtatcccatgaatttaccggcaaggggctgatggttccctgtaatgtactggaagtggtggtccagacaagcgaaggcgcatggcagtttgattttgacagctga

SEQ ID NO: 447610 - DNA, 162 bp, Serratia marcescens; identical to SEQ ID NO: 156075

SEQ ID NO: 447611 - DNA, 1008 bp, Serratia marcescens
  misc_feature (961)..(970): n is a, c, g, or t
atggtgatgagaaggacagggcgcgtcccccttcttttgctggttggtctcatggtcgcagctcctgcggcctttgccagtgactttgtgactggcgtaatggtggggcaaatgctctcagatgactcaggcagcaagaaggtagaggacactggcccggagagcaaaacggtcattgattaccatgacggtcagccagttgtgaccaaagtggaggccttcaaaagcaataaatggcgcaaactggatggccctcagggcggctattttgtttgcccaggtgaataccgtagctattcgggaaggctgcgttgtcgcgtccatgatgacgggctcaatggctttatgggcggtatgactgatgctcaggagctaccgctccaagaagctctgaccaagttggaaggtaaacccatctccctgcaaaccattgaagtccacgggaacaacctggcagtcaaataccagttagcaccaccagcacaaacgcacgtcaaaactcaggacctgggggtggttaagcaagatggtgaaatgcagaaggttgccagccaaccaccagcgctatccatagagactgcaccaaagagtgaacctcccaagcagattggtgctgcacaagacaccgaccgcaataccagtgcgtttcaaagtccgttcgaggaggtaagtgactccatgatcggtctaatggatagctctttcgtcaaagtcatagcggggttgatgctggtgtttggggttgctagtggaattatgaggcagagcccatcaggaattgtgatggggataatgcctgcaattatgatcatgaccgcgccaacggttattcgtaccatgttcgatacaggcgcggccagtaccaagccagtggaagatagcggaagctcatttcctttcttcttggtggcaatagtgccggtgctgattttctttgcctatagagcttttatgaacaacnnnnnnnnnngaacaaccggagcgactccgaaattgatgagttgttaa

SEQ ID NO: 447612 - DNA, 264 bp, Serratia marcescens
  misc_feature (233)..(242): n is a, c, g, or t
atgtctcatctgaacaatctcaaatccgtaatgatctctctcgccgccgaacataagctgcctgaaatctaccaggatgacatcactaccgatgtggagtctctggatcgattcgatggtttacgtctggtctggctgttgcggtcttgcggcagcgtattggtgccagcggaagttggcgttaatccgatctatatcacccattggttgtggtctaaccacggtcaacaggnnnnnnnnnngtggatacccgcacggggttga

SEQ ID NO: 447613 - DNA, 360 bp, Serratia marcescens
  misc_feature (325)..(334): n is a, c, g, or t
atgggatctttttcaatccactctatcggtgactctgcttttctggagcaaatcctgattgcagtatcaatgatcaccggcaccggggatttcgagaagatggtcagtattggcctgcttcttggggtcttgatgatctgtattcagtccgtctttcagggcgcaaagcaaatcaacctccagcaagtgctggtaggttggattctatatgcctgtttcttcggcccaaccacaactgtgactatcgaggacgcttatacagggcaggttcgagtcgtcgccaatgtccctattggggtaggctttgctggaggtgtcatatccnnnnnnnnnnggatacaccatcaccaatttgtttga

SEQ ID NO: 447614 - DNA, 1170 bp, Serratia marcescens
atgggcgattatcatcacggcgtgcgcgtcgtcgaaatcaacgacggcacccgcgttatttccaccgtatcgacggcaatcgtcggcatggtctgcacggcggaggatgccgacgcgtcggttttcccgctcgataccccggtactgatcaccgatgtgctggccgcctccggcaaagccggtaaaaaaggcacactggcggcgtcgctacgggcgattgccgaacaggcgaagccggtcacggtggttgttcgcgttgccaccggtaaagacgcggcggaaaccacctcaaacatcatcggcggcgcgaatgccgaaggccgttacaccggcatgaaagccttactgtccgcacaggcagaacttggcgttaagccgcgcatcctcggcgtgccggggctggataatcaggaggtcgcgacggcgctcgctggtatttgccaacagttgcgcgcgttcggctatatcagcgcctacggctgcaaaaccgtgcaggaggctaccaagtaccgcgacaatttcagccagcgtgagctgatgctgatctggccggattttgtcagctggaacaccaccgccaaccagagcgacatcgcctacgccaccgcccgcgcgttggggctgcgcgccaaaatcgacacggaaacgggctggcataagacgctttcaaacgtcggtgttaacggcgtgaccggcatcaccgccagcgtgttctgggatttgcaggcgcccggcactgatgccgacctgttaaaccaagcgtgcgtcaccacgttgatccgcaaagacggctttaaattctggggttcccgcacctgttccgatgatccgttgttcatgttcgagaactacacccgcaccgcgcaggtgctggccgataccatggccgaggcgcatctatgggctgttgaccgcccggtaacgcctacgctggtgcgcgacatgattgacggcatcaacgcgaaattccgcgagctgaaatccgccgggctgattatcgacggtaattgctggtacgacgaaagcgccaacaccaaggaaaccctgaaggcgggcaagctgtttatcgattacgactacacgccggtgccgccgctggaggatttaaccctgcgccagcgtatcaccgatcgctatctggctacgtttgcggcatccgtgaaccgctaa

SEQ ID NO: 447615 - DNA, 828 bp, Serratia marcescens; identical to SEQ ID NO: 28366

SEQ ID NO: 447616 - DNA, 432 bp, Serratia marcescens
atgcgaaaagtcacacaagttgacctcgaaaccggagaggatttaggcgggtttgtcgccgtgatccgtccaaagcaaaaatcatcgttcgagaggcacttcaccatgaatcaggcagcgctaaaaatcatcgctacagaactgaaccatgagcagacaaaagtactcatgatgcttctcgcagacctggattatgaaaactacattcaggtggcacaaatcgacattgcggaatcattggtaatgaaaaaatcagcagtaagcagggctataaggcacttgcttgaatttggaataattcttgaggggccaaagattggccgcagtaaaacctatcgcctgaatcctcaattcggctggaaaggcacggtaagcaaccacaagaaagcgctcaaaaacggcctcagcgtcattcagggtggaaaggtgtga

SEQ ID NO: 447617 - DNA, 1041 bp, Serratia marcescens
atgagttctgaaaaagaaaatcaatacgaacatcttatgaagaataggccacatgtcgttatcctgggtgctggcgcgacaatggcggcgattcctaacggagacaaaaacggcaggaaatcatctgccatgatcggattcataaaatcgctaggaatgactgaaatcctcaaggaagtcagtcttcaaactagcagcaacaacctagaagacatttactccgaacttcaccatcgccctgaatgtgatgccataagggaagacctagacagacgaatacgcgagtatttttcagaactggagatcccagatgaaccgaatatttatgacttgctgctcttggcactgagaaagaaggatcttgtcgcaactttcaattgggatccgttgttgttacaggcgtatcaacgcgcttcgcagatcactaaggatttacccgatcttgcattcctgcatggaaacgtgcttgtaggctattgccgcaagcacaagtgcggtggaattctcacggcatgctgcagggaatgcggtgaaccttttgatccagctcccctgctctatcctgttacacataagaattacgctgcagatccttacattcaggacaactggaaggctgttcaaaacaagctgaaacgcgcatatttagtaactgtcttcggctatagcgctccaaagactgatgttgaggctattgctctgatgaaggaggcttgggggatagttaacgagcgcaatcttgaggattttgagttcattgacatctgcgacgaagacccccttatttcaagttggcaagaatttattcattcgcaccattaccaagtacataaaagtttcttctcgtcgagtttggcacagcatccgcgtcgaacgactgtagaacacttcgatcgcaccatgaattgcatgtttactaaagcagttcgaaagtttattcccggtatgcgatgggaaaacattaattcccttgtaaccgagcttgttaatgaagagaacaagctttcggctgatggctttttggtcacacacaaggtctag

SEQ ID NO: 447618 - DNA, 474 bp, Serratia marcescens
atgttaaaaccgcaacagctccgcgctgagctgacaagctgcctgccgtggctacagcgcaaccctgaaaatctgcaagtgcgggtagaacgcggcaatgtggccgccacgcttgccgcctcgctgtcccatgagtaccgctatacgcttaacctgctgtttttggactacaccggcgatctggatttaatcatggtgccgattcaggcatggctacgggagaaccagccggacatcatggcaaccgaggaaaagcgccgcaccgggatcaccttcgcgagtgacttcaacaacaacggctcttacgatttcagcgtatcgctgcagctgaccgagcgtgtagtggtcagcgaacagaacggcgcactacacgttaagcacctgccggagccgccgttacctgaggatataacgcggccgatgcagctctttgttcacggtgaattagtgagtgaatggcatgagcgagcttaa

SEQ ID NO: 447619 - DNA, 279 bp, Serratia marcescens
gtgtccggcattaaaaccgctgacgtgcaggcgtcggagtccatcaccgccagcaccaaagtggtgatcgttaaggctgacaaaatcacgctcgatgcgccggaggtggtctgcaccaacaagctcaccaccggcacgctggacgtgcaaaaaggcggggcgatgcgcgggaacattgagcatagcggcggctcgttctcatccaacggagttgttgttgatacgcacacccacggcggcgtccagatcggcggcgggagaaccgatgaaccctcatga

SEQ ID NO: 447620 - DNA, 279 bp, Serratia marcescens
gtgtcaggcattaaaaccgccgacgtgcaggcttcggagtccatcaccgccagcaccaaagtggtgatcgttacggctgacaaaatcacgctcgatgcgccggaggtggtctgcaccaacaaactcaccaccggcacgctggaagtggaaaaaggcggggagatgcgcgggaacatcgagcacagcggcggctcgttctcgtcgaatggcgtcgttgttgattcgcacacacacggcggcgtccagaccggcggcgggaaaacggggagaccaacatga

SEQ ID NO: 447621 - DNA, 213 bp, Serratia marcescens
atgtttgtgatcgagtcgatttctgaaacgcactccgagtttttcgccgacggcagcccgcgccgtacagagttcacgctcaacctgaaacgggtcgatgaatccctgtcggcgatgtttggcgatctgcgccagcaggccggggagctgtacgataaagccggagagatggccgggaaggccgccggtgctatgggagggttgttatcatga

SEQ ID NO: 447622 - DNA, 213 bp, Serratia marcescens
atgtttgtgatcgagtcgatttctgaaacgcattccgagtttttcgccgacggcagcccgcgccgcacagagttcacgctcaacctgaagcgggtcgatgagtccctgtctgcgatgtttggcgatctgcgccagcaggccggggaactgtacgataaagccggagagatggccgggaaggccgccggtgctatgggaggggtgttatcatga

SEQ ID NO: 447623 - DNA, 561 bp, Serratia marcescens
atggattttgatactggcgggaaggctgcaatcgatcgcttaatcgaagcctacggatttacaactagacaacagctttgcgagcagcttggtgtaacaaaaagcaccttagcaaacagatacttacgagacacattcccggcggacttcgtagttcaatgtgccttagaaacaggtgcttctatcgtgtggcttgctacaggaaatgggccaatgttcgaggactcaaccagtgacatgatcagcataaaacgtcacaagttggttgatgggaaattgtacgaatctaattactacatgtttgataaagcttttttaccaaacaatttgcaagaacctgccgctgtactggatggcgaaaccgtctacatagtagataactcatcgaaagaactcagtaacgggaaatggctaatcgaggttgaaggcgaaaccagcattaaagatctgacacgtattccggttggccgtgtgcgcgttagtgggaatggtgattctttcgaatgtggtgctgatgaaataagagttttagccaaagtggctatgacctgttcaaaataa

SEQ ID NO: 447624 - DNA, 219 bp, Serratia marcescens
atgcgtgccaatattacaatttcaatccctgagcctttcctgccgttagatgagtattgccgccgtacaaacttgagcaagtcaaccgcgatgctgatgatcagtgatggccgtttacctgtacggaaaaaaacccaaggccgcggccttattgaagtaaacatggctgacttaaccgtccaggcattggcggcttgccgcatcgccttgaatcactaa

SEQ ID NO: 447625 - DNA, 399 bp, Serratia marcescens
gtgaaaggtgcacgtgattttgctcaatggctgattgataacgggcgagaacaacccgaaaccattttaccgctttatacccaatggcgtgatctgccggtttcaactgaggcgggcaggtttgcacagtatcaaacggaattccaatgcaacattgatggccgttatgtaatccgcaaaggcaagaaagattttaccctgtatgaattgaagtcggcatatggcaaagaaccggcaatggtagttttggccatttacgctaatgaagccgagttagttagcgacctgattaatcatagtattcgccgtaccggtgtaatgactgtgacagcgcttattgatgagtcgcagcgtttgggcgaactgtgcgcagccgcatttgagcaattccgccaatga

SEQ ID NO: 447626 - DNA, 1284 bp, Serratia marcescens; identical to SEQ ID NO: 447470

SEQ ID NO: 447627 - DNA, 918 bp, Serratia marcescens
atgaacaattcacccgtcttaaaattacaagacatggcaagttccagtgttacagatattgaagaattgcttctcagagcaaaaatgatatctgtgaaattaaatttgcaagacatagcagcttggcttgaacatgagcttaatggatatccatctaacaatctccttcctgactatcgcattataaagaatgctccggtaagagcttttaacccttatgcagggtggattccatatcagctaggtaatacaactggacaatataaagagatatatgattctttaactacaatccacatcaacaaccccgtatcaatgctcatagaatacgctaaaagtgatagcactctatatagtgacatgccagagttcatgactgatttattacaaaaggctggaggttgtgactttcgcatggcttggaaaataaaccctgcgcaaatcactaagattctctcaaatattaaatcaagaattctggattggtctttagcgcttgagagcaatggaattcttggagagggactattgttttctcaggaagagcgaaaagaggcagcggcaatgactgttaacaatattaataactttaacggcaacgtgcataatgctggtgctattggtgctggtaacacaggagatattcaccaacagaacagtattacttcaggtgattttaactcccttgcgcgtcagctaaaagagcacgggctggatgatgctgatgtcatagaactggagcagcttgttaaacagactgataaaccgacttcaaaaggtgaagttgaaaagggctttggggcctggattggtaagattacgggaaaggctttcactggagggcttaaaatcgctggtgcagtggctcctgctgttcttaccaatgcgctttgccattactttaacattcctgtctga

SEQ ID NO: 447628 - DNA, 291 bp, Serratia marcescens; identical to SEQ ID NO: 179905

SEQ ID NO: 447629 - DNA, 522 bp, Serratia marcescens
atgaatagtcctacacagaaacgaattgaaatcgaatcacatttcatccccaaaattaaagctgcactggaaaatatcgaagatgcaaaggatatttacaacgcagacagcctgaataaagatactcttattgctatcaagactaagcaactaatgtctcagccagtcgaagattatggattcagaatccgacaggttacacacccagcgatggtacagaccattattcagaacatgatgaatgagaactatattgtgtatgagatgggcgctggatttatcaagtttgtacccttacagcagtcaccaaaacataacccgcttgctgagattgaaaaggcatgtaagaaagctgctgagaaatttgttgattccggaatcactgagaaagcgaataaggtaaataatgccatccatgctcacaatgtattggtgaaacaggctgaagaggcgttatcgggaatcaaaccgtttgaatcctatctgtctgtgattgtagccgatgaggtgggtaatgactaa

SEQ ID NO: 447630 - DNA, 204 bp, Serratia marcescens; identical to SEQ ID NO: 162764

SEQ ID NO: 447631 - DNA, 363 bp, Serratia marcescens
atgtttaccgacacgatcaataaatgcgccgccaacgcggcgcgcatcgtccgcctggcgaaggagagcccgctcggcttctggatcagctcggcgatggccggcgcctacgtcggcctcggcatcatcctgatcttcaccctcggcaacctggtcgacccaagcgtgcgaccgctggtgatgggcgccaccttcggcatcgcgctgacgctggtgatcatcgccggttccgagctgttcaccggccatacgatgttcctgacgctcggcgtcaaggccggcaccatccgccaaagccagatgtgggcggtgctgccgcaaacctggctcggcaacctgctcggctcggtgctggggcgctga

SEQ ID NO: 447632 - DNA, 579 bp, Serratia marcescens
atgagtgcaatagacactttaagggaatatgccgaagtatggcatttatttgatgatatgccagatgatgcaaccctaagtgctgaagtttcggctctttatcttggtgttagtgtcaaaaccctcgctcgctatcgccagaatggtaatggccctgcttatatccagtatcaagcagaagacagtaaagcacggaatcaacgagtaaattatctactgggtgatttaagaatttggcgcgatagtcataaggtaagcagtacaatggaggccgcacagatccgaggattggcttttacttgtttgactgattttactaagccagagccattttggtctattgataataaaatttactctcatgccctcactatccctgacgatagatttaaacagttactaactacaccccatgcggaagttatttggatctctgtcgaggatgttttatttaaggattggcacaatgtaggtgtccgacagaaatggcatgaactgcttattggctttttaaatggtcttattcaagcttcgatttcagaaaatgaacggtattatcttaaagatattttatcttaa

SEQ ID NO: 447633 - DNA, 1746 bp, Serratia marcescens
atggcaagtagaacatataacggtagatccaaaatgaaactgaaacgtatcataacacaatacattgttgttttggtcgtactgagttcggcatttttctggatgtatgaccgctatttctcatcaatgcacaatattaactctgctggcccacaggaaaactacgcatgggcgattgcaaaattttcaattcggcttgcagctttcggtgccaggacagaaaggcaattgcgtctaaagattgatgataagcagggtttacaacaagacctggacttactattttctgggtccaatgtgttactaaacaagagcatgtcaactcgttacctatacgaggagcaagggtatgcggagtcaatttcgaaaatcaacagcatattgaatgaaattgaccaagagctaaattcacaaaatacgaattacgagatcatcctgaaagatattgaagatataagtattgagaacaaaaacctgatcgctatatcagatcatgccgaagttaggcaaagaactatccttcatgaggactacctgaacaaatggagttcaataaagataccgattatcaccttatatctcttattgcttattatggtatctctatcttttaggcaaatcattcttattaataaacagttagattctgagaaaaaatcattcaataataaaaatgcattccttgggaaacttggccatgaactaagaacatcattacaagctatcgtgggttcaattgaattaataatgaacacgaaagataagaaagtcgatgaactagtaatacgtagactagaaaacgctgccactcaaattgagagacaaatgagtgatctgtcagagtatgctcagatcgataatggcgcagtaaaaataaacaaatccgattttaatatagcagcacttataagcaacatagtttcagattgcaactcgaaatacaaatcagataatctaaaagcaagtttggtagagtgccccaacgtatttataaaaagtgactctgcaagaatatcacaagtagttgaaaacttgctaactaatgcattcaagtatacggaagcagggttaattacggttacatgccaaataacaaaatcacataagaatagcacacttacgatacagatatctgacactggcataggtatccctaaagagaaatttaaaactattttccaaccattcatacggatagataaccctacatctcggatacctggttcaggcatggggttggctatagttgagggtgttatacgagctatgaacggtaatatccacttgagcagtgagctaggcatagggactacctttacagttcagctcccagtcgaaatatcaaatgttgatgttagcgatattgttctaagtgataacacaattgaagcgatgcataaaggtataaatatattgtttattgatgataatgagttaacttgttccgtgatgacatccactctaaacagctgtgggtatcgtggagagtcaatatcatcagtaaatcgagcaatagagaagttaatgcgaaagccttatgatgttattttatcggatttacaaatgccaatgatgaacggagaccaattattcaaatatataagaagagaggaaggacctaataagcacacaccatttatatttattactgcctactcaaatgaaaaggaaattgatggtgtgccagttcttattaaaccggtacgaacatcagaaattaatagtaaaataaacgagattttataa

SEQ ID NO: 447634 - DNA, 1269 bp, Serratia marcescens
atggcggatataataacatcaaatagcatcaaaaatgaagatgatgtcttaatcaataaagtaataaggacatttatctataaatcaaaaaaatcaaaagactatgtgtctgcttatcgttgcctaacaatattatatgagcggtataaaaatgatatcttccaaggaaatggtgatcataaatgccaattagtgaatttataccatgccagattgttagatgaagaaggaagggagtatcaaggcctgcatgcagtaaattgctttaatgagtccctgaaaaaatataaagcatcaaaaactacacttcgtgggatctttgatgtagatgaagctattacagcattaaaagctatgattagaaaagaaggtaaacatgcctatgagtctatggcaataataaaaacagaaccattagacatttccgttgaagtaaatcgagctatagaacttgtttcagaacaaaaggatataattcattctctttacaatttttgttttattgcccacccagtcaataaaaaaagaatgattaaagatgcggttgacagtattaggaatcacccatttcaaagtatatttccttccatagtaactgatagagatggcagagttcttgctaaaacaaacggtgttgaaattgatgaattgaaagatgaggattatagcttagagaatattataattccattatcacaaggtttttcaatatatatatcgctacaaatacaggcaagaattgctcctgcacttaaacaaatttgtgaagagtattatattgattataaagttattaaagatctttgtgaacattgtggatttatacccgatactaaaatatcccttttctcgcaagccctgcattttggctttgagtacaatttttctgcatcagtgcacctattggcccctcttttagaagatataattagaaagatactttatgatcaaggtgaatactctgcaattatagataagaatgcaaaaagcactgaagtatctatatcaactcttttagataaaccaaaagctaaggaagtttttgacgagaatttcctttttgagttaaaaatgctgttaactaacaacattggctctaatctgagaaatgcagtagcacacgggttattagatgacgatactgccagtgggggggatgttgtttatctctggtggagaatattaagatgggtaatgctatctgtcgtgattggtcataatgaatatcaggaactaaaaaatgctcctgtcattgaggaatctgaatga

SEQ ID NO: 447635 - DNA, 948 bp, Serratia marcescens
atgggtaaatttgtccgcgttgctgagcaggttggccaatattcggtagagcttgtatttatcagaagcaatcaggccggcataagacgaacggtgaatcacgaggcgattgccgcgcccggcgccgatgccggttacggcatcgtccaccacctcattcaaccggaaggtggaaatattgattttaacttctcccatctcaagccgagaataatccattacctcgcgcgtttgttcggcgatcttattaccgtgataggagatcaggcgggcttcttttttcaactcttcctgcgccagctcgtgttccatgatatctgcggcaatgacgatggcctgggtcgagccggcgatctcgtggtagatggaagaaatgaagatgttcttgttcttgatgatctctttcaacgagaaggcattcctcagcaccagaaacatcatcaggaacaccaaaatcagcgaaaagatggcgaacatctcggctttactcgaattgtcctgaatgatgcctttcacttcggtaaagtttttaatctgtatccgataaataatctcctggatatcgaccagcgtaccctcgatatcatccatataagagagaatgtccgccttgtttttctgccccaccagcaagccggcggagagatcgtccaacgtgcggtactgctgcttcagcagcgcaacattcttgatgaactcgtcgtcgtaataaaaagagtcgctgaaggtcgaacggctctccaggatctgaatcttcgagtagaagattttctttttgatctggaaggcgtcgtagtcgttgttttcactgagcagcagcgcggttttggtcctttcaaacgccagaaaaaggatctcggccaccgagtagttgtccagattgggctcgatttgcttgtagcgctcttttacgccgccgaagttaatggcaatcaacaaaatcaataa

SEQ ID NO: 447636 - DNA, 681 bp, Serratia marcescens
  misc_feature (552)..(561): n is a, c, g, or t
gtgattgacagtaaattagtagaatttgttgagaaagatttttgtagtgttgtaaaagaccttacttcaggaaatcctaagataggaagtaaagattaccttatagaaggaagatttccaataattgatcaaggaagcaacttttgcagtggttatacaaactctaaagagcttttatgtaatatagagctaccatgtatcatttttggagatcataccagagtattaaagtatgttgataccccatttgctcttggagctgatggggtaaaagttttgaagccaataaagggattaagcgaaaaatatcttttttattttttaaaaaatttagatattccgtcagcgggatatagtaggcactttaaattcctgaaagaaaataatattaagtatccgttacagctaagtgagcaaaaacgtatcgtatctattcttgataaagccgatggtatacgccaaaaacgcgagcaagctattaaactggctgatgattttttacgtgctacgtttttgaatatgtttggcgatcctgttgaaaacccaaaaaannnnnnnnnnctattactgaattggctgatatcatcacaggatttgcattcaaaagtaatgattacgttggtgattcatcagaatcggtacggctttgcagaggtgcaaatacgcttacggggtatttag

SEQ ID NO: 447637 - DNA, 243 bp, Serratia marcescens
atggccaatttttcaagagcacagatcgaaacgcagatccgcgcccaactggtgcgcgagggaattcccgacgacgtggcgcgctcggctgccggccgtggcgccgatcattacctgtccagcccgaacgtgacgatcgccagcagtatcgctatcgcaaagacgtacgcaaagccgctaaagcgggtaaagggcaagccggatcgacctcatgtacctgggcgccgtatggggcgtcggtga

SEQ ID NO: 447638 - DNA, 462 bp, Serratia marcescens
atggaaatcaaacacgagcagatccgcgaagcgctgcgcggatgggccatcgaaacaacccagcgcactgtagccgccgagatcacacgcgcttattttgacctgcagttacaggcgccactgctggcgcagatcgaacatgccgacggcagcgttgacgatgcagcatggcacaacaacaaacagcagatatttcgctggctggacggcgatagtgtggccgcgcgccgcaaaattcaacagctgcaaccggcgatcctcgctgcgctgccagcagaactgcgcgccaggctgattgccggaaacagcattgaatatcttgcaattcgcgcgctgaaagaacaccaaggggcgatcgccgcggcgctgctgaacgcgttgccgaccgactttgaacgggaatgcgacaaagctgagcgaagcctcaacgagttacggcgcgcctattcaaccctgcattaa

SEQ ID NO: 447639 - DNA, 201 bp, Serratia marcescens
atgcacttgaaccggcttcacaccataaaactgatcccagggttgttggtggcaatatggctggtaacaatatcgttgaccttatccgcgagtttggacaaacaaaacttttacgacctgatatcaaaaaaccggtatggcacaattctctgcgtttaccgcatggagaaaaattgtcagaagcgcaatgggcaaccgtag

SEQ ID NO: 447640 - DNA, 189 bp, Serratia marcescens
atgcgtatgtaccgcgttgcgcgcaaatccattttcccgatgcaaggcggaaatatatttacttatgccaacaaaaacgtctacgcgctgactggcttttttcttcagaaaagatgcgatgtgcactgcagacgactgtacgtccatattttggccatgtttaaacaacgtgccgttcggatggaatag

SEQ ID NO: 447641 - DNA, 693 bp, Serratia marcescens
atgttaaatcgtatgaaggtggtcaccagcctgttgctggtgttggtgctgtttggcgccttgcagttgatttcgggcggactctttttctcctcgctgaaaagcgataaggaaaactttaccgtcctgcaaacgatccgccagcagcagctgcagctgagtgaaagccgcgttgacctgctgcaggcgcgcaactccctgaaccgtgccggtattcgctacatgatggataccaataagatcggcagcggcgccaccattgatgaactgctggccaaggcgaaagaagagctggccagggcggaaagacactatgccgcttacgaaaagatccctcaggatccgcgtcaggatccccagtcggcagaacgcgttaagcaacagtacgacattctgtacggcgcgctctccgaactgattcagctgctgggcgaaggcaagatcaacgccttcttcgatcagcctacgcagagctaccaggacaactttgagcagagctacaacctgtatctggagcaaaacggcaagctgtaccaaatcgcggtcgacggcagcaacagctcgtacaactcggccatttggacgctgatcgtggtgctggtggtagtgctggcggtgatcgtactcgcctggaccggcatccatcatatcctggtgcgcccgctgaaccgcatgattgaccacatcaaatag

SEQ ID NO: 447642 - DNA, 912 bp, Serratia marcescens; identical to SEQ ID NO: 433415

SEQ ID NO: 447643 - DNA, 1245 bp, Serratia marcescens
atgtatttacacgaggttgatgccgatttcttcaaaggatttgatcgtattaaaattccatttaatactagatttacagttttatcagggcctaatggtgtcggtaagtcttcggtgctattcgcgattgctagtgccattactatctcatatggcccattaccattaaatgaacaaactcaatgtaagattgaatttactgatagaaataataatcgcgattgttgcggttttggcccaaattcatacaaaatgatttctcgtcgagtaagtcagtttataggggggcctagggattatttatttggggacggaaacgctaaatatatttttaaaaatgatattgctgaatatttttccccgctttttattgggcctaatagaaatatattctatcaaaaaatagaaggcatgaagtcagaaagtacaccgcatgaatatcgaaaggaatatttgaataatgctattaaaaatttagcaaacggctataccccagaaataaaacaatggatgataaatagatactttatcattgaaaaagattgggctgttgaggaaaagaaaaactgggattatattatatctcatcttgactttatttttggaggggatggccgtttttcttttggtaatattgaaagagatcttgaaccaaatttcactcttgatggagcattggtctatttagaagatctctcatcgggttttaaatcaatattatctattgttctttcaattgttgaatggatagaaaaaacaaacgacagaagcaatatggatattgaaactgcgaccggtgttgttttgattgatgaattagatgctcacctgcatccctcatggcaaacaaaaatcagggagatattacagacattattcccttgcattcaatttatagttacatcgcattctcctcatataattagtagtgcagaggctggtgaagttatagttttgaagcgcgaaggcaaagaaatgggctatgatgtaatagataaaccattggatgcttggaaaactgatgatatttactctctgattatgggagtaagcacagtacatcagcagacactttcagatgttgttaataaaatcgaggatttaattagtggtaaattttttgaagaagctttatctttgattgatgagtattctaaaaaaataccagactcagatcccactgcaatgattttaaagaaacaaatagatttcgttcaattaaaaattgagcgaggtgttaaatga

SEQ ID NO: 447644 - DNA, 735 bp, Serratia marcescens
atgataaagataaatagggggaatgaacctgctgtactgagtgctaataaaggcccttggacccgtgatttattaactgaggtcgaaaagtaccaaggttatgacaaaatcccggatgacgtcaagaagaaagtagtatcacattatcgtaatgaacaaattaagggtgttttatttgcgacctcacatgataaatgtgcattttgcgaatgcattccttctgaaggcggaaattatgtccaggttgagcattttcatcctaagtctacatatccaaatgaatgctttgcatgggaaaattttctcccatgttgtggaatatgtaacaataataaaggaacactagatacaaaaaatgttgagatacttaacccttatgatgatgaaattgatggggctttttctgtaagttatcttaaaattttgccaaatttacagaatgtgaaagcagtaaatactgagaaagaagtgtcgttgaattcagataggctgatcagttcacgtgttggaatgttggcgaaactacagattcagactgaagaaattagacagtggaccgatgtgttattagagtctgatactgacaggaaatatgaaatacgattggggaaattaaaggataaagtaaatacacttgaagaatttactaagccagagtgttctcatagtttcttctgttcagagataataaagggcgatatttattatttaaaagcaaaagagttaataggttaa

SEQ ID NO: 447645 - DNA, 705 bp, Serratia marcescens
ttgcgtatacgattgtgtataactgagttcgatcttttttctatacacatgctgctatctgacatccaaataaaacgagcaaaaccaaaggataagccctacacattgaacgatggcatggggttatcactgcttattgacaccgcaggcagtaaaggctggcgttatcgctaccgctttgcaggcaaacccaagatgatttccttcggcgtatacggtgatgtaccgcttgcacaggcgcgtgctaaacgtgatgaagctcgttcgatgttggccaaagggatcaaccccagcgatgccagaaaggcagaaaaaattgcgttgcagtttgcacatgagaacagctttaaatctgtagcaaaggaatggcatagttcaaaaaaagctacttggtcagaagggtacgcgaaagaagttctcaactgcatggcaaaggatatttccccgtttatcggccaacgcccaatcgaacagattgaaccgctggagctgctcaccgttctgcaaaagattgagaaaagaggtgctttggagcaaaccagtaagatccgccgccgttgcggtgaagtcttacgttatgccgtcgccaccggatgggctaaatataactttgctcctgacctggctattgcactcaacaagcctaaaactcaacacttcccattcctgactgaaagtgaattgcctgctttgtcagcgctctga

SEQ ID NO: 447646 - DNA, 210 bp, Serratia marcescens
atgaaaccacgaattccgcaacgaatcagcgccaaagctgagggggttctatgcgcctacagggagggcaaaaagaaacccaaccggacataccaacataagcatttaacgctgccagtggcccgctgctggcgattgctgtcaaaagacaacggcaactcatgggaagtgatgagccatgagcgctacaacaaccaaatcaggatttaa

SEQ ID NO: 447647 - DNA, 570 bp, Serratia marcescens
atgaaggtgattccgcttcctcctgtggaattcctgaatgaatgcttctcactggaagaaccagaaggaaatcttaaatggaagatcagaccaagaagccactttaaaagtgaccatgtttggaagatttggaacagcaagttctccctgtctgatgcaggagttacctgcatagaccatcggaataagtatcgccgggtaaaggtcaacaggacgaagttccaggcacatcgaatcatctacgcactacggaacggctcagatattccgacagggaaatgcattgatcacatcgatggaaacggcctaaacaatcgcgctgataatcatcgattggtcactgtcggcgaaaacaggcgcaactgcagattggcgctcaacaaccggagcgggattaccggcgtaagcagggtaaagcgatcgaagaagtgggttgttcgaatgcaagtaagtaacgtaaggcattatgaatacttcgataccaaggaagaagctatcgcatataacaaagctatccgctcagccagcggtgctttcactgagaggcatggacatgacactaacgattga

SEQ ID NO: 447648 - DNA, 555 bp, Serratia marcescens
atggacaataagctgagcgaactgagcaagccggtggcgtattcactgcgatttcggaatgtgaatggcgagcctaataaaaccatcaacgccaaaactactttctctacgctggatgaagccaggaagtatggccttggcactcggtatgtaacgctagaaagtggaaagatagctctcgctcgcgatccgtcacaagaccctattgttgagcccctctactcgcaagagtacgtctccgccctgctggcagagctgaaagcgaaagataaccgcatcggctggctggaagccattgccaccgattacgtgggtaaattccagaaagcgcaggatgcgctgaaatatgcggcaatcatgagcgatgaggataagaagaaaatctcagagctggaagccaagctggctacgccggtgcggttgcctgacatacgccaatcatcttccggcgacagatatcaatggtctgatggtgcacataactaccgcctggatgttatctcaatgcttcttggtgctggattcactgtagctgtagagggggatagtgaatga

SEQ ID NO: 447649 - DNA, 624 bp, Serratia marcescens
atgtcatctatacgattgaccacagcgctgcgcgatgcaatcgctgccaacgcgataaagaagtctggtgttgtggccgcagaggccgagaacgaaaaagcatttagtgacctcgccgagaaagtccgcgtcaaagtattgggcggtaaaaagaaagcagctgaggctgacgccaaacttgctgaagcgatgaaaatcgagaaggaactacatgagattggcgcgacaagcttctgcataagtcgcggccttagaaaagaaatttacccatcattcggcggtgctcggacgcggctcgaatatatcgctggcgatagcgtttaccgcctaacgccttgcagagagatttgccttctcgcagctgatgatccccttaccgttgaattccaccgtctggatgataaaaagcgcgcacttggccagcagcgggaagaagtcaaagtcaacgtgtatgccgcgctcaactcagtttcaaccgtaaagcgcctactggaagcatggccggaaagcaaagaattgttacccgccaatcttgatgccgcaagagcggctctcccagcgctcagggttggtgatctgaacaagctgatcggcctaccgactgaagaagaatccgaggcataa

SEQ ID NO: 447650 - DNA, 525 bp, Serratia marcescens
atggcgctactggcgcggactgggcggctggaacctctactttctggccaaattcgccctgctgtggttcggctacctgaacttccacgcgctgccgaacctggtgttcatggcgtttctgctgatgccgatcccgtcgcagcgcctgcatcgctggcgccattacctcgccattccgatcggcatcgcgttgttctaccacgacacctggctgccgggcatcaacagcattctcagccagggttcgcagctggccggcttcagcgcccagtacctgctggagctgatcggccgctttatcaactggcaaatgatcggcgcggccttcgtgctgtttatcgcctacctgttcgtcgcgcagtgggtccgcgtcacggtgttcaccgtggcggcgctggtgtggctcaatattgtcaacatcgccgggccggcagtctcgctgctgcccgcgacctccacggccgcggccggcggcgggggatgctgcgccggcagacagcctgccgccgaccagcgccaacctga

SEQ ID NO: 447651 - DNA, 294 bp, Serratia marcescens
atggtggtacccaaagttgagcgcaaaacaatagacgatctggtagcgtcgctgagttatcagacccaccactttccgggcaccacgctgaccattgctgtcgcgctgatgccagatggctttatggtcagcagtggattcagcgccacggcgcatccggggttgttcgatgaagagaccggcaggaaggtggccatcgctaaagcgcagcacaatgcgactgaagcactgtggcagtttgaggggtacagactgaagtcccggctggcatcggggaaccacgatgacctttga

SEQ ID NO: 447652 - DNA, 123 bp, Serratia marcescens
atgaagatcgttgaggtgaaacacccgctggtaaaacacaagcttggcctgatgcgcgaaaatgacatcagcaccaaacgcttccgtgagctggcctcagaagtgggtagtttactgacctag

SEQ ID NO: 447653 - DNA, 783 bp, Serratia marcescens
atgcaaaaagtaggaaacactacagataccgcagatgcaaatggcgagtatacaaatggtaatgttgctcagggaattccaccaacgattattaatgctgaaatgcttaatacttttcaaagggaattggttaatgtagttgagggcgcgggcatgactcttgatccgcaaagctatgaccaattgcttttgtccataaaaaaaataactcaagagagtggcgataagtacgccaaaataacaggtgatactaatcagaaattctgggtaaagagttcgccaggtgatgcgggctctgcggtacccgtttcactattgaacagcggactgcaagaaaaagcgaacttaaatggcgatgcgaatgttgatttttatgttcggaataacggcgataccagcgcagcggtaaacaatgaacgccttaattttgtgcttagtaactacgcatataaaggtggtgacgcgagccaggggtttgctgtcgcaggcggtagctcagcaaacagcgctgtggcctttaaccaatttcagtccggaaacaacggtaacggggcatgggttaaacttcccgggggcgggcaatggtgcagaaccaacctgaacttgactgcaaatgggaacactacgtggactttccccgcgtcgtttcccaacacccctggaatttatatcaccaccatcaatggcgaatttaagtgctggatgaatggggcgggtccgagtgattgtagcatttacaataacgggccggcattaaatgttaacgttttggctatatggtga

SEQ ID NO: 447654 - DNA, 330 bp, Serratia marcescens
atggtcgattacagcaaaatgagcgacggtgaaatcagcgtaaggctggcctattacctcaagccaaaatacagcgcggtcatcaacccaatcgacaagactggcgcacagctttcgtggaattggtttaacacagtgcagaccactggattcttcccgcttaggcgctcagaagaactattccatgtcatgaagaaacacaaaatcggtctgtcaccgtcaggaaaaacggtatggcaagcgagccatgaatcgggagcgagcgctacgcacaggaacccgctgcgggcggcggcgattgtatatctcatgattaaggagggtgcatga

SEQ ID NO: 447655 - DNA, 366 bp, Serratia marcescens
atggacaatgagctgagcgaactgagcacgcctgttggtttcgcgcgtgaagaagatatcaagctgatgcagtcaggcaaattattttcaggccttactatctggcgaagtggcaaggaggcgctctactcgcaagagtacgtctccgccctgctggcagagctggaagcggcggataagcgcatcgccgagctggaagccaagctggctacgccggtgcggtctccagatgatggcctggacgattgccgagatatgtggcccagtgattgcagcgacgatttcgacactggttataaattcggtctttggcgctacgagcagaacatccgcgccgctggcttcaccgtagagggggatgagtag

SEQ ID NO: 447656 - DNA, 201 bp, Serratia marcescens
atggctaagcgtaagagcaacagagcggcgcggagattgttgggtatgccgtacaaagtcagcaactaccgctgcaggacgccggaagacgacgaaaacggatggcctaccgatcggtatcgcatgctaacccggagtcataaacgcgccgcaagaatcattcgcgcacagcgggccgaggcccaggagaaagcattatga

SEQ ID NO: 447657 - DNA, 648 bp, Serratia marcescens
atgaaagagcgcccagtgattttcaacggcgagatggttcgcgccattctcgacggccgcaagactcagacgcgccgggttatgaagcctcaacctgagccatgctatcgcggcggtcattggtggccaagcaacacgtttaaaacgatgttgcacatcgaagagcagatgcagaacggcgcgggcggctggggcgggctggcaggagatgcctgcccgtttggcgctgtaggaggtcggctgtgggtgcgcgagacgttcatggacttaaccggcaccggcattgaagccacttccgggaaatttgaagggttcgcatatcgcgccgacactccggctggaagttatggcgatgaagtccgcaaagagtatgggctgaagtggacgccttcacttcacatgccacgtaaagcctgccgcatcatgctggaaatcaccgccgtgcatgttgaacgcctgaacgatatcagccacgaagatgcaaaagctgaaggttgttgctacggccgtggtggcggagttcctgactttgcagtaaccccggcagaccacttcccgacgctgtgggcatccatctacggcgaagaaagctggcgcgctaatccctgggtgtgggttatcgagtttcgtcgtgtgggaggtgcgtga

SEQ ID NO: 447658 - DNA, 492 bp, Serratia marcescens
atgattaccgttaagcgctataacccagacgctgcaatgagcatttcccgtgaacacgcctggatgagagaaacacctgaaggcggtcatgttgaatacggcgactatgcatcgctattcgatcagtttgaattggtgaaagctgagcgcgatgcgcagcagaaacgagccgatgcgctggctgtggagaaccaggcgctgaatgaaatgaatagcagcctttgcgccgaacttcgtgaatatgaaagtgatgattgtcagttcggcccaatgcctcagtctgttgttaactgttttgctctacacaccccagccactgacgcagcacttgcagctatccgcacggagtcacatatcgctggcgttgaagctgcagccaatcgcatcggcgtgatttcgctgaaatataacccaggtcaaaagcatgagctgatcaaggcaattggtcgcgaggttatcaagtacgccaccgagctgcgggagggcaaatga

SEQ ID NO: 447659 - DNA, 192 bp, Serratia marcescens
atgagcgaagctaagccgcaagatggcagcactgtaacggggtatcgtgaactgtcatttggcgaaatcgggaagatgaatcaattcaaagatatcagccgcaagttcatcaaacttctgcgcgcgcggctggcgatgtccgggacgattgggaagcaacggattgggctcgccaggctgagatggatatga

SEQ ID NO: 447660 - DNA, 186 bp, Serratia marcescens
atgaagtattgccctaaatgcggttcttctgctgtatccaaggataagcaaagaggcggctggacaggtgactatatctgcgatggatgtggatttaataacgcgcccagcgagttcttatctgaaaaagagcacaagatcagaaaaaacactgggaatttacctggcacgcataccgataactga

SEQ ID NO: 447661 - DNA, 249 bp, Serratia marcescens
atgtcagagactgtagagattactcaggggcaaggaattcgcctcaatattttagaactggttgagtacgatactgccacagcggcacaggctatcacttttgtagaagatgacccatttaaagcggctttatttgaaaaacaatatctccgacatgctggggtggcatttgatgttatcccgagaacactgaaggcaatccaggagagcaaagaagcattggcgctttttgaaccattaacatcatag

SEQ ID NO: 447662 - DNA, 228 bp, Serratia marcescens; identical to SEQ ID NO: 130260

SEQ ID NO: 447663 - DNA, 333 bp, Serratia marcescens; identical to SEQ ID NO: 130262

SEQ ID NO: 447664 - DNA, 309 bp, Serratia marcescens; identical to SEQ ID NO: 130263

SEQ ID NO: 447665 - DNA, 528 bp, Serratia marcescens; identical to SEQ ID NO: 130264

SEQ ID NO: 447666 - DNA, 378 bp, Serratia marcescens
atgtccgatccattaactgcgactggcaccactgcgctggtgtcggccacgattgcggctcctgcagttggcattgattacggggttatctttggcgcgttcatcggtgcgatgttctacgtcacccaggccaaagacattccgcgaatcagacaggctttctcgttcgttgtctcatttggaactggtgtgctcggtgcgagtgttgccggcgccaagctttcagcatggctgaattacaacgataccccgctagagccgttaggtgcgctgatcatctctgccgtcgcggtcaagctgcttaccttcgtcagtgagaagatggaggatccgacatcgctgttttccagattccggggaggcgcgaatggcaagtaa

SEQ ID NO: 447667 - DNA, 300 bp, Serratia marcescens
atgatccatttcgcaggtgagaacaaaccatggaacacgcgtcatgtggatttcttcgataattaccacaaaaatgtcgtggaaacaccttgggctctggaggcttatgagcgtttggttggttcgagcatctcctcgcgtactgtgccgcaagttgtaagtgcaccggcagtgctgtttcaaaccaaagtgaaacgagccttgatgccaatggttaacaagatggcacctaaaggcacttcacgccgcaattttatgactaagtattattacaaagttagacgtgcaattattggatga

SEQ ID NO: 447668 - DNA, 411 bp, Serratia marcescens
  misc_feature (395)..(404): n is a, c, g, or t
gtggaaagtgatctctccgaattattggctgtaccgctaggcgataacctggtcgcggcggttaaagatatcgtgatggaagggtttgtcttgtttggcgcaatgtcgcagtccagcgatggcgtgatgccggcgaaggaatatctgtcaacttcattgggaatgacggatccgaacggttatttccaggcgggcatcttagtgtttaatattaagcagatgaaccaggagaagacgttttccagcctgatggatgcaatgaaaagcaaaacctattggttcctcgaccaagacataatgaataaagtcttccatggtcgtgttcattatttgccactggagtggaatgtttatcatggcaatggaaatacagatgatttcttcccgaacttgcnnnnnnnnnnaaaatga

SEQ ID NO: 447669 - DNA, 300 bp, Serratia marcescens
gtgactaacaacgtggatctcatagcctgcggcctgagccgccagcttttgctgaatgtcgtcgcccacaaagtgactaacaacgtggatctcatagcctgcggcctgagccgccagcttttgctgaatgtcgtcgcccacaaagtgactaacaacgtggatctcatagcctgcggcctgagccgccagcttttgctgaatgtcgtcgcccacaaagtgactaacaacgtggatctcatagcctgcggcctgagccgccagcgctctttcaacccagtgcagttcaaagtaccaatctga

SEQ ID NO: 447670 - DNA, 147 bp, Serratia marcescens
atgagacaactgctgttcctgcgacagcgactgttgcaacgtctcaatacgcccctgttgtacaatgtggttgtcctccattatctgttcgagatgttcagcaagggaatgtgtctgaccttccagaatgttttgctgttccaataa

SEQ ID NO: 447671 - DNA, 870 bp, Serratia marcescens
atgaaactgtctttattcgtgcatatggaacgaacgttacccgacgaaccgcaggaaaagctctaccaggagatgatcgagctgtgtgaaatcgccgatcgcggcggcatgcacgccatctggaccggcgagcaccacggcatgaatttcaccattgcgccgaatccgttcatcaatctggcggacattgcccggcgcacctcgcgggtgcggctcggcaccggcaccatcattgcgccgttcaatcacccgatccgtctggcgggcgaggcggcgatgaccgacatcatcaccggcggcaggctggagctgggcatcgcgcgcggcgcctattcctatgaatacgaacggctgatgcccggtttgaccgcctgggatgccgggcagcgcatgcgcgagttgatcccggcggtgaaaaaactgtggcagggcgactatgcccatcagggggaatactggtcgttcccggcgaccacctcgtcgccgctgccgaaacagcagccgcatccgccgatttgggtggcggcgcgcgatcccaacagccacgaatttgcggtgcaaaacggctgcaacgttcaggttacgccgctgcatcaaggggaagggttcaagaaccagcggccggtgcggcaagggctgattcagccgctgagcgacgaagagatcgccgccaatacctattactccgccgagatgatgcgcaccaacctggctatcggcaccgccaatgaggtcattacgcggctgaaaaaatatgaggcgctggggtatgacgagtttgcgttgtggatcgacagcggcatgagctttgcgcgtaaaaaggcctctctggagcggttcattcgctgcgtgatgccggaatttcactga

SEQ ID NO: 447672 - DNA, 975 bp, Serratia marcescens
atgcagcgcgccgagccgctcttcggccagggcgctgtcgtccagatagggcatgccgtggtgcaggatctggttgggtcgcccctggatctcatagcgcaattcgccgggcgcagcgtcgctccactgcaggctggcgagcgagcccaccacgcggatgctttggctgtccatcgcgcccgcattgacggcggaggcccacatgcggccgacggcgccgttttcgtagtgcatcagcaccatggcgttgtcttccagcggggcgcgggaaggaataaaactctggcgatcgcacagcagggaggcaatcttcatatcgggcatcaccaactgcgagatgtagaaggtgtgggtggagatgtcacccagcacaaaagaggggccggcgattttcggatcgacgcgccacttttgcgcctcgaacttgtctgcgctttcgttggcattgaagccgtgggtgtattgcaattcgaccatgcgtatttcgccgatgtcgccgttcgcgatcatgacgcgcatctgcatcagcagcggatggccggagaagccgtaggttacgccgacgatcaggcctttctccgccgccagcgccttaatttctctcgcctccgccgtggtgaagaacagcggcttttcgcagatgacatgcaggccggcattcagcgcggcgcgcgtaatttcatagtgggtgccgttgggggtggcgatggtcaccacctcaacgccatcttcgcggttggcttcttgcgccagcaactgttgatagctgtcatagcagcgttcggcgggcacgccgagattaacgccaaactcgcgtccgcgtgccgcgtcgatatcaaaagcgccggcaaccagccgataggcggtgttgtcgcgcagtgcgccggaacggtgcttgtagcccacctggctgaggcggccgccgccgatcatcgcccaacgcagcgggcgagggatgcttctttcaccatttaa

SEQ ID NO: 447673 - DNA, 432 bp, Serratia marcescens
atgagcactgagaagctgagcgaactgagcaagccggtggcgactgttgacgttcaacgcggccgcccggatcgaaatatgtttggcgttgcatggagttcggctggccatgcaatgccggatggcccgcacttcctctactcgcaagagtacgtctccgccctgaaacacgaatccgctgttaattggggagcagcggcatcgctgaatgttgaaaatcaggagctgaaacagcgcatagacgagctgtcacgcctgctgacgcacaacatcgagcgcgcagaagcagcagaaaagcggctggctacgccggtgcggttgcctgacgatctggaacccaataccgaaccatgcgtgatttgcggcgtggtatcgagccacccagagggctggcactactgccaccctaagtgcggaaagggggatgcatga

SEQ ID NO: 447674 - DNA, 870 bp, Serratia marcescens
atgaaagagcgcccagtgattttcaacggcgagatggttcgcgccattctcgacggccacaagacccagacgcggcgggttatgaaacctcaacctgagccatgctatcgcggcggacattggtggccaagcaacgcgtttaaaacgatgctgcacatcgaggaacagatgcagaacggccagggcggatggaaagggctagcaggagatgcctgcccattcggccaggtaggcgatcagttgtgggtgcgcgagacatggtctgacgtgaatcttgaaggtattccagctgtggcataccgcgcagatggcgatgtttattcaccgatggatgatgaatcgtttttagatgagtacggagcatttaattacgaagaccaccgtgtcactaaatatcatttttctgcctggtattcagaccttattgaaggaatagagggtgtttggcgcccatcaatccacatgccgcgctgggcatcacgcatcacgctggaaatcactgccgtgcgcgttgagcggctgaacgatatcagcgtagatgatgctaaggccgagggcgttcgagcactcgaaaacaacttcggcaatggccccgcctactgtgattatttgctgcctaatttggatgacactgctgagtggtacaaccgcgcgagcgacagcttcaaaagcctgtggaagtccatctacggcgaagaaagctggcgcgctaatccctgggtgtgggttatcgagtttcgtcgtgtgggtggcagcgctagggaggtggagcccgaaacggcaagatgccccggatgcgggaggcgtggcgaatcaaatcagaaagacggcgggttctactgctacggcagtgaccgttgctgtccatag

SEQ ID NO: 447675 - DNA, 909 bp, Serratia marcescens
atggctatcgctctcaacaccggtaaagtttatgcaggctttcgggagcctctcgatttgtcggcggacattcttgatgccaccgcgttatttaatgcctacaaagcccgcgtgcaggccgatggtggcattatcccgaatgcggcaggttgcaaggaacgctttgagtttttggtcaataacggcatgtatgagaatgccgtgatgtgtgccgctcccgcctttggcgtcaaactgggcggcacagacggcaacgatgttctgaccgtttacagcctgctgggcgagagcaccgacctgattcggacagcgcagggtaccggtgatgccgttcggtatgactcaatgaataagacggcaaccgtgcgtattacctccagcggcggcagctatctgcgtacacgcgagaatgttcgtgttcaggttggccgtagctatatgattgccggacggctcagtgacgcgagcaatgccgatgtgttggggatgactatcggcatttcgttatcaaacctgccgctggcgtacatgcgtacgatgataacgaatcagcaggccatcacggaggcatggcgatttggcacgcgtgacagtgcctggacggggcctgttgccggtggggctgttggtgcggctgcaacgacgtatgcggattatgtgcctgcggcaggcctgttcaaagttgatgaaggggttgtttacgggtacacacgtgggaaactggataagaaggcaacggccaccacgggcatgttggcagacctggtgaactatactgcgccgatcgttgttggtggtggcatggcatccggctccgtatctccatgctacggttcactgcttgatatgttgttcctgcatacggcatcagaaccggatgccgtactggcctcacgcttcggcatgtga

SEQ ID NO: 447676 - DNA, 1680 bp, Serratia marcescens
atgaaaccgctggcatctactgttcgtaatgttgagtgggacgagctgcccgcccgcgccagggaaatcccgttcgacttcaacccgtttaaaaacggtgtgcttatggaccaccaggtggagtgcctcaagcacaacgtctccatcctggccatccccaagggccgccggacaggcatcacttttgcctggggcctcaactcgacactgattgccggtgcgcagaagtccgctggcggcgacaacgtttactatatcggcgacaccaaagagaaaggccttgagttcattggctatgtggccaagttcgcgcgcgtgattgccgctcagcaatccgagtctgtgtcgtctatcgaggagtttttattcgaagaccaagacgataaaggcgccacgcgccaaatcactgcctaccgcgtgcggttcgccagtggttttcaggtggcggcgctgtcatcgcgcccggccaacattcgcggcctgcagggcgtggtcattatcgacgaggccgcgttccatcaggacgtgcagggcgtactggatgcagctaccgcgctgctgatctggggtggacgaattgttgtcatcagctcagagaacggtaaaaacaacccatttcaccagttctgcaatgatattgaggcgggccgctatggcgatgacgcaatggtcctgcgcatcacatttgatgatgccgtcaccaacggactgtacgagcgagtttgtgcgatgaagggcgaggtcgcgacgattgagggcaagaggacttggtacaaccgcatccgcaacgcttatggcccgcgcaaagcggcaatgcgcgaggagctcgacgcgattccccgtgatggcaacggtgtgtgtattcccggcgtctggattgagcgggccatgccggaggagcgtccggtgatacgtctcgcactggatgatgagtttatcaatatgaccgagactgaccgaaccgcatggggtaatgaatggattgagcgcgagttgcgccctgtgatggctgcgaccctgaatcccgaatggcggcatgtattcggtatggactttgcccgccatcgccacttctcctccatcatgcccgtggccatcacgcagaacctgcgtcgcgatgttccatttctgctggagttgaacaacgtcccatcagcgctgcagcagcagatattgtactggttcatcgaccatctgccccgacaatccggcggtgcgattgatgctactgggccgggtatggtgctggctgaatatactgctgaccgttacggccgcccgcgtattgccgagatcaccctgagtcgtcagtggtacggcatctggatgcccaaattcaccagcctgttcgaggacagcatgataaccctgcctcgcgatgaaaacgtcgcgcaggatctgcgaaccgtggagaacatcgacggtgtgccgatggtggcacgcctggagaaaaaagacctgaaagacccggaactggtgcgccacggtgactcggcgattgccggttgcctgggcaactatgccgcgctcaacctggcggcggagatcgcctttgaatccaccggcgcacggccggtttatcaggtgctgtcgggctatggctctacaggaggcggcgagctgacggataccggcttcggtacggtgcgcggattgaatgactttggaggatttatatga

SEQ ID NO: 447677 - DNA, 162 bp, Serratia marcescens; identical to SEQ ID NO: 439245

SEQ ID NO: 447678 - DNA, 1077 bp, Serratia marcescens
gtgttcctgcctgccggcctgatcctggcggcggcggtgatgttgttcatgggcttcgtgccgtgggccacctccagcatcgccatcatgttcgtcctgctgttcctgtgcggctggttccagggcatgggttggccgccgtgcggccgcaccatggtgcactggtggtcgcagaaagaacgcggcggcatcgtctccatctggaactgcgcccacaacgtgggtggcggcctgccgccgctgctgttcctgctgggcatggcctggttcaacgactggcacgctgcgctttacatgccggccttcggcgccatcctggtggccctgatcgccttcggcctgatgcgcgacaccccgcaatcctgcggcctgccgccgattgaagagtacaaaaacgactatccggacgactacagcgaaaaagacgaagaagagctgaccgccaaacagatcttcatgcagtacatcctgccgaacaagctgctgtggtacatcgcggtcgccaacgtgttcgtctatctgctgcgttacggcattctggactggtcgccgacctacctgaaagaagtgaagcacttcgcgctggacaagtcttcctgggcttacttcctgtatgaatacgccggtatcccgggcaccctgctgtgcggctggatgtcggacaaagtgttcaaaggcaaccgcggcgccaccggcgtgttcttcatgacgctggtgaccatcgccaccgtggtgttctggatgaacccgccgggcaacccgaccgtggacatgatctgtatgctagtcatcggcttcctgatctacggcccggtgatgctgatcggcctgcacgcgctggagctggcgccgaagaaagccgccggcaccgccgcgggcttcaccggcctgttcggctacctgggcggctcggtcgcggccagcgccatcgtcggctacaccgtagacttcttcggttgggacggcggcttcatggtgatgatcggcggcggcgtgctggcggttatcctgctgctgctgaccatgctgaacgaaaagaaacaccacgcggaaatcgctgccggcaaacgcggctaa

SEQ ID NO: 447679 - DNA, 597 bp, Serratia marcescens
atgctttctatctatagctttatttttggctttgtttttaaagccaagtgggggctgacaacgacagaaaattacactttgattatgtttaccggtctgctgacacatggttttattgccgaatgtcttggcaaggcgacaacaatatatgtatataatgtcagctatgttaaaaaagttttatttcctcttgaatccttgtgctgggtgtctgtttttggcgcattattccaattctttatgggatgcattgtttttgccattttttgtattttactaaagcaacctgttagtctaatggcattattagttcctattgttattcttccattgattttattatcatatagcattgccttaatgttatttatgtcgcctatattttatcctattactgctgttccagaacaatatcgtatgctgatttatattaatccgttaacgtttattgtcgaagctttacgtgatgtcgtcctgtacggaaaattattcagtcttgaaggctatgcactctattggggtatcagtattgtgctgtacgtattagctataacttggttcaaaaaggtaaagagaggctttgctgatgtcctctaa

SEQ ID NO: 447680 - DNA, 288 bp, Serratia marcescens
atggatattcagagacttttagaagctattgcagacaccaccgaagggttggaccgcgctaaacgcattgttgaaatctgcgatggcgatgttcacaaggtgatgatttttgccgatccagtccgtggcatggactgccgcttgtcagttgagccgttgctcatccgcgaattggctatgaatgagcagcggaaatatgaagcgaaacttgcaactctcaaggatgcaaaaattaccgccgagcgcgtgattgccggcttgttgccggataaccagatcagcgtctga

SEQ ID NO: 447681 - DNA, 849 bp, Serratia marcescens
atgccgatagcggatactccgacgtatcctaaaggacattggacagatgtgtataatattttaagtgaagcagctagaggtgctggttttgaaccaaatatggtaagttttgatgatgatgtaagtgtaattcaaaagcgaatagttcaaaatatttacaataacccaatagttgtatgtgatataagctctcgcaatgccaatgtgatgtttgaacttggtatgagattagcgtttgataaacccactgtaatagtcaaagatgagaaaacaccatattcctttgatatttcatctatcgaacatcttgagtacccgagcgatttacgatatcaagctataaacgaatttaaggcaaagctagccggtaaaatatcagaaacccacaaaagagccgcgaccgatccagaatacaccacattcttaaaacattttggaacatttaaagtggcaaagttggatgaaaaagaagttggagccaacgagattttcttagaggagttaaaggaaataaaggtagttttaaataacattataaaaaatgaaaagaatgcgggctatcatgctagggtttattcccctggtggaattaaaatcaagagaaatgtagctactccatttggcacctatacttatgattttagcgagccaaatcttggcgatagatttgatgagttcattaagattattgatagatttgatcaggtatataaaatgggcttaattagcgcaagtcatgttagtggtgattcggcgactgtttcatataatcgccctcaagatgaggagttatttgaaagtttgcggagagaggttgctgaatatttttcaggggcgagctttaactaa

SEQ ID NO: 447682 - DNA, 375 bp, Serratia marcescens
atgcctggaaaaataatatcttcgttggcgatcctgatggcgctggcggccgttgtcggcgctggtgcctggctggcaggtagacactaccagccaacgattgaccggctcaacgaggcgctgacgcaatgccgcgataccggcaagcaactggcatctacgatcgccagccagaacgctggcattgaggcgctgcagcgcaaacaggaagagctggaaggcaaggtaaaggcagcgcaggaaaaagcccacagggaggcgaagggagattatgagagggcaaacgaggttatggcagagcgaaccactggcgaagcgtgcgcggcggcggcggctgcgtttgacgcagagctgcgccgggagcgtgccaaatga

SEQ ID NO: 447683 - DNA, 693 bp, Serratia marcescens
atggcatcctggacttgtccatattgcggacagatagctactgagaaggcggttcctgcaaaagcagaatctatggtttttcgagaagatactcgatatggcgcagctattatgatgacttccttcatagagatgtgccctaatgacgagtgtaaggagattgtggtttcatcagatctctcaaccgctaaaattgtggatgggaggtgggccccacaagagaggttagacgcttggaagttgcggcctcaagcagcagtaaaggtatttcctgattatatccctaaagcaatccttgatgattacaaagaggcttctcttatttgtcagttatcaccaaaagcttcagcaacactagcgagacgttgcctgcaagggatgatccgtgacttttggggtgttaaacctggtagattggttgatgaaatagaagcgataaaagacaaagttgatagtgatagttgggcggctattgactcaatcaggagcattggaaacattggtgcacatatggaaaaagacatcgacttaattgtagatgttgaacctgatgaggccggattacttatacagcttattgaagtcttgctcaaagattggtatgtcgaaagagaagagcgcaagaaaaggacaaataagattgttgagcttgctaaagcaaagcaggcggaaagaaaggctgtcaaaaactag

SEQ ID NO: 447684 - DNA, 531 bp, Serratia marcescens
atggacatcagactatttcatgaagcttttggttcaaaaaaagcgaatcttcagttcgttaaagcaacgaaatctgatgatgatatcggtactgtattaagagttcacctttatctagaaagggtgcttgaggcatggactgcttgcgcaactgagaacaataaaatatttgatggaaaaataaacttcaacttcgtaacaaaacttcaaattgcaaaaaatttcggaatgccaaatgacatttcatccgcaattgaggaaataaatagaataaggaataaattctcccataacattgaaaatgatgaaataacagaacaaaacatatctaagctagagagtatattacaaaccacacaatatcacgagatgtctccattgctgattaattccatggttacattccaagggagaaaaatagcatacaaagacatgtcactaaaattaaaattatgtgccatatgcatgcatatcattagcaacttgaatttctttaccctaaaaaaatgtaatatagattacaaaatataa

SEQ ID NO: 447685 - DNA, 225 bp, Serratia marcescens
atgaaatacaccaagatcttcaccatgaaaatgatcatgctgttgacggcggtagctgtatcgccagcatatgccggtaggattacgatcagcaatccaactagtgagaagctatccaacgggaaaacgctttgcatctacgaggattcgatccacagcttccagtacgttaccaagggcaaatgcccttatgcaaagacgtttgatactgacgattctcaatga

SEQ ID NO: 447686 - DNA, 486 bp, Serratia marcescens
atgagcactaaaccagtaatgaaaagcagcaccctcgacattctgaaagcacaaatgaaaaacagtctcaacgatcaggttgaaaagtccaaagagaaagcagccgccaaaattgagaaggccaaggccgccggggaactgttggaagagctgatcgcaaaacgtgccgcagagcacgccgcagatagcaccacacaggccgccggtaaggctgaccgtaccattaaatcacgtggaatagcgatggtgcactctgctcaaggcggacctgcaaataaccgcccgaatgcactacttatgaagtccaaaaatggagacggacgccgccgcgtgtggctaaacaaggctacctcattgaaagttaatctgatccgcaaggctaatggctctatcgtggctcccaacggttacaagctggaacaagcgaccattgattacatggagcgtgtgggaatggtggttaatatcgccggtgaggcagaatga

SEQ ID NO: 447687 - DNA, 186 bp, Serratia marcescens
atgaatcaggtcctactgttggaaataaagcacaaagcgttaagcatccaaatagcccagcagaaagcacgcctgaagatttacacgacattgacgctgttgggattgacgttagtcacagcgccgatcctgttgccgctgaccacatcgaacagcctgtacaacctgcacagcttcctcctgtaa

SEQ ID NO: 447688 - DNA, 699 bp, Serratia marcescens
atgaaagagcgcccagtgattttcaacggcgagatggttcgcgccattctcgacggccgcaagacccagacgcggagggtggtaagtgatcggcatctgcacctgatcgacgtggcttcacaaatcggcgaatgctatccgctggagtccggcatcaaccacgccaacagccagagctattaccgtgatttatgtccgttcggatgggcaggcgatcggctgtgggtgcgcgagacgtggggcgttgtcagtcacgattttgacgagaacgagcggattattgattgggtgccagatcgaccggcaacagccattcatgaaatgcctttcggcaatggttactactccggtcacgccatctatgccgccgacggtgaatttatctggggtgatgacgacggccacggcgagcgttcttgctggaagccatcaatccacatgccgcgctgggccagcagaatcacgctggaaattaccgccgtgcgcgttgagcgactgaatgatatcagcgaagaggacgccaaggctgagggcgtgaaagccggtgtttcccctggtcacgaacacatgatgcaccaggtggcattcagtgagttatggcaatccatctacggcgcagaaagctggagcgccaacccctgggtgtgggtaatagagttcaagcaggtcagcgctagggaggtggggcgtgaggcatga

SEQ ID NO: 447689 - DNA, 411 bp, Serratia marcescens
atggataaattcaatgaactgaaagcggccgcaatggccgcaactccggggccgtggcgtgcgatttcgtttgatgagcggttgggaatttctggtgacggtaatgccattctagtatgtgagcacatcacgaaacagcgtccacaagatgcgattttcatcgccgctgctaaccccgctgtagttctcgccctgctggcagagctggaagcgaaggataagcgcatcgctgagctggaagccaagctgacactgagtagtgatgttcgtaagcactatctggctggttacgatgacggccattctcgtggactaaatgctggcaggctctacaaagcagacgacggcatgattatgcataggcatgccagtgctaacgcgtatgccgtagagggggatgagcagtcatga

SEQ ID NO: 447690 - DNA, 936 bp, Serratia marcescens
atgaaacttaaaaagttacagtctcttgattttgtaaatgactttctgagccacctagagactaattttgaaaaagaattattcacagcttgcttacggaactatgcctcacatggaaacccattacgcttccataactttgcattttcaattcgcgaactaataacacatatcatcgagaaaaaatctccgaatgataagttattacaagcatcatggtatgaaagagaacatgaacattacgaaatatctaggaaacagcgtttaaagtactgttcccaagctaaaatttcagatgcatacctagggaaagaattcctagaagagtcgaatgaaagaatagatgagatgcttaaactctatttcttcctaaacaggtacacgcatataacagaaaagtatatgcatccatctcctcgagaattttttgtaaaggccaaacaaatacttcagaccgcaacagagatactaaatggtatacataattgtagagatgaattaatccgtactctcgaaggtaaaatcagagatgcagtgatcgacacagcagtaagcacaatgcctgaaaatcttgtaactatcgcgaatcatgcgtatgtagattacacagaggttgaggaatttggaatcacgtccattgatgatgactacatcaatatctatgcaagcggcactgtctatgttactcaagagtatggttccaggaacgatggggttagcttggacgaaagttatccgttcacgttgcacatgtcctctcatcttgactcccctgaaacattcgaagtcatatctgaagctttggaggtagacacttcttcttggtacgatgatggagagaatgaggctcaaatgatggagatggaaagaaatgaaattcctcaagcccccatctcactctccgactttgagatagatgaaagcacgccgttctaa

SEQ ID NO: 447691 - DNA, 198 bp, Serratia marcescens
atgaaggacagaccgcatgacacggcgatggccgagcacttccgcgcccatccgacgtatgcagcggagctgcttgctgaagtccgccgcgacggcaaccctgctgagctagccattctgttgcggcagatggccacggcctcggcaggtgatgacaggtcggatgatgccgatacagagcgcgctctatctctctga

SEQ ID NO: 447692 - DNA, 1773 bp, Serratia marcescens
atgcatcatatctcacaaattagaatacagaatttcaaatcaatcgcggacggaacatttccactttcgcactacacccccttggttggctataacaacgctggaaaaactaatattattcgagctattggctggataatcaaacgatctagcctcgcgccagaagactttcaccttaccgatcagccaattattgtagaagcagaaatctctggcataagtgctgaagtgctcgatgcgattggtgatgctcaccgtggacgtatcgagccccttgtcgttgacggtcagatacgtattagacgcacgcaagctaccccagggcagccagttgcggggatacgatttgaagtattaagacgagaagccggtcaggatgaatgggttgtcaatccagcaggaatcgacgctgcaataggcgctctgtttccggagcctatttttattggagcgatggaaaacgccacagaggacgtagcgaaatttggtagcggaaccacaatcggcaagcttcttaaagaaataatggctcccgtcattgatcggcactcgcctgctgttgctgaggcactgcaagacgtaggaaggcgtctttcagccaacgctgagaataaagacgaaactttagtcgatctcgacggccgtattcagggcgagctgtccaagctattccccggtgtctcggccaagacgcacatacctgtcccagatttttctgatttcatgaaatcagcgacgatacggattttcgaagaagggttcgaaaatcctgacggaagggatgcctcgtcatttgggcatggcgcccaacggtctatacaaatagctcttattaagtgtctagccgaagttcggagagccggcggtggaaatgctggtagaacgacgctccttctgattgatgagccagagctctatctacatccccaagctatcgaagtcgtacgcgcagctttaagccgactcgctggcgatggctatcaagtggtcattacaacgcattcggcaaatatgatttcgcgggacgatgcccctaatacccttctcatacgaagaagcgcagctttagggacaagatgctatccacgaataaaggatgcggtggcagcggcaattgatgatgcgcagcatcagtcagaagcgttatttgccctttcaaactcgagtaagattcttttctccgagcgagttgtaatcacagaaggaaaaaccgaacgcacaattctccctacaatatttcacaactcttttggaactactcccggtgaagataagattgggtttgttgatatcggaggaactcctaatattccagatactataaaagtattgcggtcgatgggcgtgccttgcaaggcgattgtagatttagattttgcctttaggatagctcctcttaagggtctgctcgcgcccgatcatgctgatctcatcgcatgcaaagcaatactggaagaattaagaaatggcggccacattggccttgatgcagatgggctgcctactagacataatggaatgcctgctgcggcggccttcgaaagacttgcccaagaagaaaacgcaatagactgcattgcaagattgcatgaagagttgaaagcgatgggcatttggctatggacgaaaggcgcgattgaagcgcaccttggtatagccaaaacaagtgcagcccacataaccttcatgaccagcctttctaatgaggaatataaagctggccttccagactaccaatctgttagcagagcaatggattggttgcgcctttaa

SEQ ID NO: 447693 - DNA, 3522 bp, Serratia marcescens
atggatttattaagggttatcctgcgtttgccttttaccctggttaagggcgtttgccgcctgctgggcgggattttgtcgctgttggggcggttgctgagaccgctggtcggcaacctcagctggcgtgcgccggcctggtgggctgcgttgccgcgcggttttttgcggctcgaaagcggcgtggataaacacccgaaagcgatcggtttgggcttgctgctgctggcgggcgccgcaggcggcgcgttttacggctggcactggtggcaaaaccggccccagcccatcgaaccggcgccgatggcggttcaggagatcagcgccgagttggccaaccccgagccgatagactacgccgccgcccggcaggcgccgcaaacggtgagcctgaccttcagcggctcggccgcggcaataagcgcggtgggtaaaaccgtgagcgccggcatcatcctcaaaccggctgcggaagggcagtgggcgtggcgcaatgagtcgacgctggtgttcacgccgaaaaaaccgctgccgatgggcgcgaaatatgacgtaaccctcgagcccgccaccttgctggcgccgcaggtcaagctcgccaaaacccgctatgccttcaccgtgcccgcgttcgattaccgcctggggcaggccgagtattaccgcgatccgcaagatgcgcagaaacgcagcgcgattttcaatttgcagttcaatgcgccggtcgacgtcgccagctttgaaaaacagatttcgctgggattgaaagagggcagcgcttcttccgagaaaaagctgaacttctccctggtctatgacgagaaaaaactgaacgcttgggtgcattccgagccgctgcaggcgctggatcagggcggcgctgtgcatctgaccatcggcaaaggcgttaaatcgacggcggccggcaatgcggtcgctgaggcgaaaagcaactgggtcaaagtaccgacgctgtacagcctggcgctgagcgacgccagcgcccaggtggtggataccgacggcggccaagggcagcgtgcgctggtggtcggcttcagcgatgcggtgaaggataaagagctggcgcgggccaccaaagcctggctgctgccgcagcacgatccgagcgatgccgagaccgccaacgatgccgaagatttctatcaatggacgctcgacagcgtcggcaaaaacgtgctggcgcaggcgacggcattgccattgacgcttaacgaggcggaagaggcctaccagccgcagttcagcttccgtttcgaagccccggcgcaccgcttcgtgctgatcgagatagacaaccagctggtctccgtcggcggttacaaaatgccgaagaaggtttaccgggtggtcgaagtgccggagttcccgaaatcgctgcagttcatgtccgcaggctcgctgttgtcggtcaacggcgacaaacagatcagcgtggcggcgcgcaacgtggcgggcctgcggctggacatcaagcgggtgatcccgagtcagctgcagcacattgtttccttcaaaagccgggaatactcgtccacggaattcaaccggctcaacgacgaatatttcaccgagcatttcaaataccagacggcgctcaacaacgagcggccgggggaagtgaactatcagggcatcgatctctcccgttatctctccaccaacgccagttcgcatcgcggagtattcctgctgacgctgtctgaatggcagccgaaccggaaaccggcggcggaagaggcgggcgccgagccagaacaggaaccggacgagagcgccggggatgaccagcccgacgtcggcgattcgcgctttgtggtggtgaccgatctgggcatcgtcgccaagagctcgcaggataagacgcgcgacgtctttgtgcagtcgatccaaagcggtgcgccggtcagcggcgccaacgtgtcggtggtggccaaaaatggcgtgacgctgctcagccaaaccaccggggccgacggccacgtgcgtttcccggcgctcgacgtgtacaccaacgagcgccagccggtgatgttcctggtggaaaaggagggggatgtttccttcctgccgaccggcagctataacgatcgcgggctggacttttcgcgcttcgacgtcgccggtgaacaaacgccgaccgatccgcgcacgctcggcagctacctgttctccgatcgcggcgtttatcggccgggggatacctttaacatcggcctgattacccgcgccgccgactggcgcgttggcctggccggcgtgccggtgcgtgccgaagtccgcgatccgcgcgacaagctgatgaccaccgtgccgctgacgctgggcgccagcggtttcaacgagctgagctataccaccgatgaaaactcgcccaccggcgagtggaacgtctatctgtatctgatcggcaaaaacaacgatacctccacgctgctcggccataccgcggtcaatgtgaaggagttcgaaccggatcagctgaaagtgaagctggcgctgacgccgaaccgccagcaaggctgggtcaaaccgtccgagctgaaggccagcatcgatgtgcagaacctgttcggcactccggcgcaggatcgccgtgtgagcaccaggctgacgctgcggccgatgtatccgagcttcgatcgcttcccggattatgcgttctatgaaaatcggcaaaacagcgacgggttcgaaaccgagctggaagatcgcaccaccgatgagcacggcgcggccgaaatcccgctcgatctgaaatcctacgccgacgccacctatcagctgcagctgctgtcggaggcgttcgtcgccggcggtgggcgctcggtggcggcgaccgcccgcacgctggtttcgccttacgattacctgatcggggtgaaggcggacggcgatctgggctacatcaaccgcgacgcggagcggcatctgaacgtgatcgccatcgatccgaatctgcaacagatcgccctgccgaaccttaagcaggtgttgatcgagcagaaatacatttcggtgctgaccaaacaggattcgggcgtttacaaataccagtcgaagatgaaggaagtgcagctgtcggaacagccgctggcgctgagcgggcagggcgcggatctgcggctggcgaccgataagccgggcgacttcgtgctggtgattgaagatgcgcagggcaagacgctcaaccgcgttgcctacagcgtggccggcaacgccaacctgagccgttcgctggatcgcaacgccgaactgaagctgaaactgaaccaggcggaataccagccgggcgaagagatcgaggtggcgatcaacgcgccttataccggcagcggcttgatcaccatcgagaaggacaaggtttacgcctggcagtggttccacaccgacacaccaccagctcggtgcagaagatccgcgtgccggccggcatggagggcaacggctacatcaacgtgcagttcgtgcgcgacatcaactccagcgaaatcttcatga

SEQ ID NO: 447694 - DNA, 1521 bp, Serratia marcescens
atgcgtaaaattcgtgaagtgctgcgactgcggctggaagctgacctctctgttcgccaaatcagtatctgtaccaaggtcagtgtcggctccatccagaaactcctcaaaagtgcccaggcgctcggccttacctggcccttacctaccgagcttgatgatggccgactggctgccctgttctatccgcaggccgataccaccatctcggcccgccatgttgtgccggattggccctctgtccatcaggagctcaagcgcaagggggtctccaaacagctgctctgggaggagtacacccagcgctatcccaatagctgttacagctactcccagttctgtgaccgttacaagtcctggtgtcagttgcaaaagcgctccatgcgccagatccacaaggcgggggaaaagctctttatcgactactgcgggcccacggtgcccatcgcctcgccctccacgggtgaggtccgtcaggcacaagtctttgtcgccgtgctcggtgcgtccaactacacctttgccgaggccacctggtcccagtcactgccggactggctgcaaagccatgtccgtgcctttgagtttttcggcgggacaccggtactgctgatccccgacaacctcaagagcggtgtcagcaaggcttgccgatacgatcccgagctcaaccccagctaccagcagttggccgagcactatcaggtggcggtgatgccagctcgcccttacaagcctaaggacaaagccaaggccgaggtgggtgtgcagatcgtcgagcgctggatcctggctcgcctacgccatcagaccttcttctcgcttgccgagctaaaccagtgcatccgggctttgttgaatgagctcaacgagcgcccgttcaagcagctgcccggtaaccgacgcgaggcgtttgagcagttggaccgcccggcactggggtcactaccggtgcatccctatcgctatgtcgccatcaaaacggtcaaggtcaacatcgactatcacgtcagctatgagcagcaccattactcggtgccgcaccagtatgtgggtcagcaactggagctccatgcgggcgataccctgcttcaggtctatcaccagcaacagctggtcgcgagccatccgcgtaaaaccatcccggggatgagcacactccctgagcacatgccggaacgtcacagcaagcagcaacgctggacgccagggcgtcttaagcagtgggctgccgacatcggaccgggcaccttgtgctgggttagcgaacggctggcagagaaagcccatgccgagcaggcataccgactctgcctgggactgctgagtcttagccgggagtatccgccatcacgagtcgaagcctgttgccagctggccaaccgggaaggactggtgcggctcaagcagctcaagtcggtgctgaccagtggccgcgaccaactgtccgcaagtccgctcagttatccagaactgccgcaagagcacgagaacatccgcggcccccagagcttccactaa

SEQ ID NO: 447695 - DNA, 756 bp, Serratia marcescens
atgacccaacaaacgctgacccgcttgagacacctgaaactgaccggcatggcggatgccgtgcaacaacaactggaacaggcaagtacctacgaagggctgcccttcatcgagcggctaagcctgctggtcgaacacgaacaactgagccgggagcagcgtaaacaagctcggctggtcaagcaggcgaggctcaaactccaggccacggtgcaagaggtggactaccagtctgcacgcaacctggagcggtcacaggtggcaaacctggcccaaggagagtggctgcgccggggccagaacctgctcattaccggcccctgtggctgcggaaaaacctacctagcctgtgcgctgggctaccaagcctgtcagcaggggcacagcactcgttactaccggctgccgcgtctgctacttgagctgagccaggccaaggtagatggcagttacgccagactgctgggtcaactggcaaggatagagctgctgatcctggatgactggggactggaagcggtgaatgccgagcagcgcaacgccctgctggagatcatggatgatcggtacgggaaatactcgacggtcgtggtcagtcagctgccaacggaagagtggtacgcgagcttgggggacaacactctggcagatgcgatcctggaccggctgatgcacaacgctcaccggctgtcactgaagggagaatcgatgagaaagaggagaagtgagttgacccaatctgaacactcgagttag

SEQ ID NO: 447696 - DNA, 198 bp, Serratia marcescens; identical to SEQ ID NO: 148333

SEQ ID NO: 447697 - DNA, 195 bp, Serratia marcescens
gtggctgacaatcacaatcaagagtttgccgagcaaatcgtggccgcagtggtgagccttgggaccagtgaggcgttgaactgcatggctcgcgtgatgtgctgggtcgctgctgactacggccaggttatcgagtttgaatgtgatcttggtgtcgtgacagtagaacccaagcagcaaccgctgcaaagttga

SEQ ID NO: 447698 - DNA, 231 bp, Serratia marcescens
atgtgtgccggtgctgcggcctacttgatgaaaataggcaggccgacagtggcgatgcgaattgcctttgcgtttggttatgcaaaggtgtccgactgggacgaagctcaaacgctggtgatcgaacctttggtacaagggggcgtaaatgagtcggcgagcatggaatccattgaatttatcgaacctataactgaggaaaaaaatggacgagaacaagctcaacattga

SEQ ID NO: 447699 - DNA, 216 bp, Serratia marcescens; identical to SEQ ID NO: 198599

SEQ ID NO: 447700 - DNA, 546 bp, Serratia marcescens
  misc_feature (453)..(462): n is a, c, g, or t
ttggcgtgggacagcttagagagaacctctgacggagcccccagtgaccgagcaccttctgggtacaaaataactgcctgccccttcatcaggcataggacttctcccaacgtcgttttgccttccagaacaggcatgatcgcctgttcaagcaacgtcgatgcttccccgtacccagccaacatctcagagagcaaggtctttgcgtctttctcaagctccttaggtttgcccgcatgttgcatatctggcgcgggtattgtttgttctggtgtatcagtcagcatcgggagcggctcaattgcccacgatggcggttcatcagaatcactgaatattgggaagtcaccgttctgcagggagttttgttcttgtggaacgaagtccggttttggttgtttctcttgcttttcgggctctgttatatctgggatttcaaggtttgttgcgtcnnnnnnnnnncctcaggtttctggggttgtttctccgctcttgctttacccggtttactctgctgcttgcccttcttgcttgtgtcaggcttag

SEQ ID NO: 447701 - DNA, 297 bp, Serratia marcescens
atgatccagaacttcgaaaccgttgagttgccttccgggcaagagaaggaggtttgggttgatgtggctatcaacaaaatcccagccgaagtaaaagccatcagcggccgagaattgatggcctctagcgcggagaggtcagaagcaaccgtccgcatttggatgcgttaccgtggcgatgtgtccagtgcctcccgagtgatttttcgtgggctggtatacgagattgagtcagccctaccggatgttcgcctgacgcgtctggagctgctttgcaaaacgggggtgaagatatga

SEQ ID NO: 447702 - DNA, 1164 bp, Serratia marcescens
atgtccgaattagcccaaattcaaaaggcgatcgaagattcgcagaaaaacatgacccaacttttcgatgctcagaaaaaagagattgaagagacgggccgcgtttccaaacagctgcaggacgatctggccaaggtacaggaagaactgaccaagtccggcgctcgcctgttcgatctggagcagaagggcgccactggcgccgaaaacccagacgacaagaaagatttttcggagcgagccgcagaaggtctgattaagacctggaatggcagcacgggtacctttgaggcgaaaaccttcaacaaatcgctgggcagtgacgcgacctctgccggtacgcttatccagccgatgcaggtgccgggtattgttgcacctggactccgccgtttggttatccgtgatctgctggctcagggccggatttccagtaattcgctggagtatgtacgcgaaaaactgttcaccaacagcgccaagccggttaaagagaaggcgcagaagccagagtctgatctgaccttcgaaaagcaaacggcgaacgtgaaaaccattgcccactgggtgcaggcatcccgtcaggtgatggacgatgcgccaatgctgcaatcttacgtcaataaccgtttgatgtacgggctggcgctggtggaagaagaccagttgctgaacggcgacggttccggggataacctgaccggcatcaatgcggtggcaaccgcgtatgacactgcgctgaatgtggccggcgacaccaaagcggacatgatcgcccatgcgatcttccaggtcaccgagtcagaatttagcgcctcgggtatcatcctgaacccgcgtgactggcataacattgccctgctgaaagacggggaaggccgctatatcttcggcgggccgcaagcgtttaccagtaacatcatgtggggcctgccggttgttcctacccgcgcccaaacggcgggtaccttcaccgtgggtggtttcgacctggcctctcaggtctgggatcgcatggatgccaccgttgaagtgagccgcgaagaccgcgataacttcgtgaaaaacatgctgaccattctgtgtgaagagcgcctggcgctggcgcactaccgcccatctgcgctgatcaaaggtagcttcacaccgccggctggcggctaa

SEQ ID NO: 447703 - DNA, 681 bp, Serratia marcescens
atgccagacattaaaaaaacgctgtcgcttgaagaaacggaaatcaaatttcttggtgacggtacgcagggcattttcgaaggctatgcatccgtgttcggcaatgtcgattcagatggcgacatcatcctcgccggcgcattcaagaacaccctgcaaacccaaacccgcaaagtggccatgttcttcaatcatcgcgcctgggagctacctgtcgggaaatgggacgcattgcaggaagacacaaaggggttatttgtccgtgggcaacttaccccagggcatagcggcgccagcgacctgaaagcggccatgcagcacggtaccgttgagggaatgtcggtgggtttttcggtgaccaaagacgattactcgctgacggcaagcggtggccgtattttcaagaacatttcagcgctgagagagatcagcgtgtgtacattcccggcgaatgagcaggccggtatatcggcgatgaagagcatcgacggtatcgaaaccattcgtgatgttgagaactggctgagggattcagtgggtttaagcaaatcacaggcggtggggcttattgcccggtttaagtcagccgttcggagtgagtccgaaactgacgaaaacaaaacagaaatctctgcgctgatcgagcgcattaattcattccctcactcattaggaaaataa

SEQ ID NO: 447704 - DNA, 1269 bp, Serratia marcescens
atggcagaaaataattacagtattgacctgcgaaccaataacggctggtgggcgcgagcggcgtcgtggtttgttggcgggcgcctggtcacccctaatcagggttcgcaaactggcccagtatcagccagcggatctctcggtgactccgttattaccgatgaacggatactgcagatatctaccgtttggcgatgcgttagcctgatatccacgttgaccgcctgcctgccgctggacgttttcgaaaccagcaaggaagatgaccgaaccaaggtgggaatggataactctctggcccgtctgctgcggtattcacctaaccaatacatgacctcgcaggagtttcgcgaggcaatgaccatgcagctctgcttctacggcaatgcttatgcgctgatcgaacgtaatggggcgggtgacgtggttagcctgatcccgttgcagtcggcaaacatggaggtgctgctggagggtaagcaaatcgtttacaaataccggcgcgattatgaatttgcccgttttaaacagcgtgagattttccacctgaaaggcttcggttttaatggacttgtgggtttatctcctatcgctcacgcggccaagtctggtggcgttgcagtggcaatggaagaccaacagagagatttttatgccaatggcgccaagtcaccgaaaattctctctgtcggtgaccgggtgatgacgaaagatcagcgcgatcaggtcgaggagaattttaaggaaattgccggtgggccggtaaaaaaacgtttgtggatattggaggcaaactttacggctcatgatatcggcgtcagccctcaagacgccgaaactatggcttcccgcaaatttcaggtcagtgagttggcgcgtttcttcggtgttcccccgcatctcgttggtgatgttgaaaaatcgacttcattcggtaccggacttgaacagcagaacctcggctttcttcagtacaccttgcagccatatatcacccgctgggagcagtgtattcagcgatggatcgttaagccggccgatttggggcgctaccatgccgaacacaatcttgatgggttgttgcgtggtgattctgcatcgcgtgcaaccttcatgaaagcaatgggggacgccggcttgcgaaccattaacgaaatgcggcgcctggataactatccgccgttaccgggtggggacgtcgccatgcggcaatcgcaaaacgtaccactcaccgacttaggcaaagaaccccgcgaaagcggggtttag

SEQ ID NO: 447705 - DNA, 1737 bp, Serratia marcescens
atggtggagaaaaagaagaagacccgctcaaccagttcttcggttgaccctgcaacgcaatacgcaatggatgtcacatcgggtaaggaactcgccgggcctgatattcgtaatgcttgcgccaggcacctgcgtgatctggaacatggcccggcacgcgggctggtatgggatgcagattccgctcagcgggcgatagatttcttttcgaaagtgctcaagctgaacggtggggagcatgaagggcaaccctttattccgttagcctggcagtgcttcgtcattggttccatttttggatggaagaacagcgacggatatcggcgcttccgaatggtttacgttgagtcaggtaaaggatcgggtaaatccccgctcgcgggtggagttgggttgtactgcctggttgctgacaaagagccacgtgctgaggtctacgcagcggctaccaaaaaagaccaggcgatgatccttttccgtgatgctgtcgcaatggttgaccaatcgcccgcactatcacagcggatagataagtctggtggaaccgggaaagagtggaacctggcatttgttcaaacaggttcgttttttcgtccaataagttccgatgatggccagtctggcccgcgtccgcactgcgcactgatcgatgaggtgcacgagcacaaaagcaaccaggttgttgagatgatgcgtgcggggacgaaaggccgccggcaagcgctcattttcatgataaccaacagcggccacgataaaacgagcgtctgttacgactaccacgaatatggtcggaagattgctgctggcatggaagaggatgacagcttcttcagtttcatttgctcccttgatgaaggcgacgatcctttcaaggatgagtcgtgctggaagaaggccaacccgtcattgggtcacacattcaacgagcgatacctgcgtgaacaggttacccaggcccgcggcatgccaggcaaagaaagcattgttcgtcggcttaacttttgccagtgggttgatgctgctaacccgtggatgggtagcgatgtctggatggggtgcgagtctgattttgacccggacgagatgatcggggaggagtgttacggcgggcttgacctttcagggacgcgagatttaaccgcgctggcgctttattttccgaagcgtaagcggttgatggtcgaattctggacgccgaaagaaacgctgctacaccgtgctaaaactgaccgtgttccgtatgacatgtgggaaaagaaaggttttattttctcaacgccgggtaatgcggtgaagtacggattcgttgccgagcggatcgccgacttggccctccgatttcacatcaaggcgatcgctttcgaccaataccgaattaaataccttgagcctgagctggaagaggccgatgtgagcgtgccgcttattcagcatgggcaggggttttataaggcagcggattctggtctgtggatgccgcactctatcgagttgtttgaagggttgctggacgacaaggaggttgagattttgacgaacccttgcctgcgctggaatgcagcttcggcagttatcgaaacagatcagaagaacaaccgaatatttgcgaagaaaaaaagcaccggtcgaatagatggtgtggttgcgtcagcgatggccattggggcggctgatggggaggttgaggatgatttcaacctggatgatttcctttccagaccgttgagtatgtga

SEQ ID NO: 447706 - DNA, 201 bp, Serratia marcescens
atgactgatgaccaacaaacgttactgatgttcaagggcctgattgcttcgctatcagaagaaagccaggcgaaggtgaaggaagccgaggaaaggttgcgtgacgtgctgcgcagttaccctgacggtgaggctatggtggccttcggtttcatcggtgccgagcttcaaacgggtggtatggaaacgattgaaaagtga

SEQ ID NO: 447707 - DNA, 225 bp, Serratia marcescens
atgtacacactgaaaattgttactgctaaccgaaacgaaattatcaacgctgttgattccattcaatggaagcgagcggagaaagccattcatgccgatacctgcgcgggtgagctattaaagttcgtccttctgcctggtgatacagcctacctggctaacagccacaaccgaacggttgcgacgtacaccaacccggtaacgcaaagcgaggccaccgcgtga

SEQ ID NO: 447708 - DNA, 198 bp, Serratia marcescens
atgttcaaacatgaaatggggcaacgagttgtaaccactacaggcgaagagtgcgccatcctgggacgagctgaatacgtgaacgatccgaacatgtatttgttgagctggccatctgatgacggctcagaggctgagatttggttcaaggaagatgagttgacggctgttgcctcgatgcccgagccctcatcctaa

SEQ ID NO: 447709 - DNA, 285 bp, Serratia marcescens
atgttaataagtgacccgctggtggttctgaacgttggactttgtgccgcaatagtggtgcggttgatgttctatcgtcgtcgtggtgctcgccatcgctggtgggcgtcatggctcgcttacttcctgattatcgcctatggctcggttcctatcggctttctttacaagttgtattttgaaacgagctgggcggtgattgctaccaacctgattatttgtgtggcggtattccgggctaaagggaatgtcgccaagctcttccgagtattgaggccacaatga

SEQ ID NO: 447710 - DNA, 384 bp, Serratia marcescens
atggctgccgatccagcaactgcatcgtttgtagctaaagccttgggcggcgcaggcatagtcgggtttatcactggtgattacggcgtagcgttcggagcattttccggcgctgttttttatgtcaccactgcaaccgacttacccttccacaagaaagctggttacttcgtgttctcgttccttacgggggtaattggctctgaccttgtaggctcgaagcttgcgcaatggctcaactacagtgaaaagccgcttaacgctctgggtgccgtcatcctgtcagtggtagctgtcaacgtgatgacattcatcaacaaacagatggaaaaccccggctcgttcctgtcgcgcttccgagggggaaccaatgttaataagtga

SEQ ID NO: 447711 - DNA, 300 bp, Serratia marcescens; identical to SEQ ID NO: 148263

SEQ ID NO: 447712 - DNA, 297 bp, Serratia marcescens; identical to SEQ ID NO: 148264

SEQ ID NO: 447713 - DNA, 198 bp, Serratia marcescens; identical to SEQ ID NO: 167606

SEQ ID NO: 447714 - DNA, 840 bp, Serratia marcescens; identical to SEQ ID NO: 6027

SEQ ID NO: 447715 - DNA, 351 bp, Serratia marcescens; identical to SEQ ID NO: 146911

SEQ ID NO: 447716 - DNA, 2967 bp, Serratia marcescens
atgccgcgtcgcttgatcctctcggccacggagcgggacaccctgcttgcgctgccggaaagccaggatgacctgatccgctactacaccttcaacgactccgacctgtcgctgatccgccagcgacgcggcgacgccaaccgcctcggcttcgccgtgcagctctgcctgctgcgctaccccggttacgcgctgggaaccgacagcgagctgcccgagccggtcatcctgtgggtggcgaagcaagtccaggccgagccggcgagctgggcaaagtacggcgagcgcgacgtgacccgtcgcgagcatgcccaggaactgcgcacctacctgcaactggccccgttcggcctgtccgacttccgcgccctggtgcgcgagctaaccgagctggcccagcagaccgacaaaggcttgctgctggccggtcaggccctggagagcctacggcagaaacgacgcatcctgccggcgctgagcgtgattgaccgggcctgctcggaagccattgcgcgagccaatcggcgggtctaccgcgccctggtcgaaccactcacggactcgcatcgggccaagctggacgagctgttgaagctcaaggccggcagcagcatcacctggttgacctggctgcgccaggcaccgctgaaacccaactctcggcacatgctggaacacatcgagcggctgaagacatttcagttggtggacttgcccgaaggcctgggccggcacatccaccagaaccgcctgctcaagctggcccgcgagggtgggcagatgacgcccaaagacctcggtaagttcgagccgcagcgccgctacgcgaccctggccgccgtggtgctggagagcaccgcgaccgtgatcgatgagctggtcgatctgcatgaccgcatcctggtcaagctgttcagcggcgcgaagcacaagcatcagcagcagttccagaagcagggcaaggcgatcaacgacaaggtgcgcctgtactccaggatcggccaggcgctgctggaagcgaaggaaagcggcagcgacccctatgccgccatcgaggcggtgattccctgggacgagttcaccgagagcgtcagcgaggccgagctgctggcccggccggaaggcttcgaccacctgcacctggtcggcgagaacttcgccaccctgcgccgttacacgccggccttgctggaggtgctggaactgcgcgccgcgccggccgcgcaaggcgtgctggcagccgtgcagaccctgcgtgagatgaacgccgacaacctgcgcaaggtgccggccgatgcacccacggccttcatcaagccgcgctggaagccgctggtgatcaccccggaaggcctcgaccggaaattctacgaaatctgcgccctgtccgagctgaagaacgccctgcgctccggcgacatctgggtcaagggctcgcggcagttccgcgacttcgacgactacctgctgccggccgagaagttcgccgcactcaagcgcgagcaggccctgcccctggcgatcaacccgaacagcgaccagtacctggaagagcgtttgcagctgctggacgagcagttggccaccgtcacccgcctggccaaggacaacgagctgcccgatgccatcctcaccgagtcagggctgaaaatcaccccgctggatgcggcggtgccggatcgggcgcaggcgctgatcgaccaaaccagccagttactgccgcgcatcaagatcaccgaactgctgatggacgtggacgactggacgggcttcagccgccacttcacccacttgaaggacggggccgaggccaaagacaggacgttgctgctgtccgcaatcctcggtgatgcgatcaacctcgggctgaccaagatggccgagtcgagccccggcctgacctacgccaagctgtcctggctgcaagcctggcacatccgcgacgaaacctattcggcggccttggccgagctggtcaaccaccagtatcgccacgcctttgccgcccactggggcgacggcacgacctcatcctccgatggccagcgcttccgcgcgggtggccggggcgagagcaccgggcacgtcaacccgaagtacggtagcgagccgggacggctgttctatacccatatctccgaccagtacgcgccgttcagcacccgcgtggtgaatgtcggcgtccgcgattccacctatgtgctcgacggcctgctgtaccacgagtccgacctgcggatcgaggagcactacaccgacacggccggcttcaccgatcacgtctttgccctgatgcacctgctaggcttccgcttcgcgccgcgcatccgcgacctcggcgaaaccaagctgtacgtgccgcagggcgtgcaagcctacccgacgttgcgcccgctgatcggcggcaccctgaacatcaagcacgtgcgtgcccactgggacgacatcctgcgcctggccagctcgatcaagcagggcaccgtcaccgcctcgctgatgctgcgcaagctcggcagctacccgcgccagaacggactggccgtggccctgcgcgagctgggccggatcgagcgcacgctgttcatcctggactggctgcaaagtgttgaactgcgccgccgcgtgcatgccggcctgaacaaaggtgaggcgcgcaactcgctggccagggcggtgttcttcaaccgccttggggaaatcagggatcggagcttcgagcagcagcgctaccgggccagcggcctcaacctggtgacggcggctatcgtgctgtggaacacggtgtacctggaacgcgccacccaggggttggtcgaggccggcaagccggtggacggcgagctgctgcaattcctgtcgccgctgggctgggagtacatcaacctaaccggcgattacgtctggcggcagagccgcagactggaagacgggaagtttcggcccttacggatgcccggaaaaccttag

SEQ ID NO: 447717 - DNA, 1416 bp, Serratia marcescens
atggaatgctggactgaccctcaaggggtaaaacattgccctaacaatgatggtggaaatgtaaacagttgcgcggcactagaaggcaatcctaaatgtggcttcatcagctctgagtgtattggtggtgcccaaggcccatcgggccaatgttatgtatttaaggatacttacgattgtggtgtggatgtcaaagtcccaactctcgataagaacactgagtacaagtgtggtggtccgatccgttgcatgggggatgattgcttagcaataaataaatctcagagtaccgatttcgccagagcaacagccttacttaatgctgctcagtttttgacacaagatatgaagtgtaccgatagcgcaaccgaagaggggggggatggaaatattgatcaaggatgtacggtttttggcggcgaatccggtgaatgtaaaatagctgtaggtggtgtatcggattgctgtgaaaagccttcaaatatatctctagctgattacctaaacttgatcatggctgttcccaagctagatggtgcggtaatggggttacaagatggtaatgccatgaagggcgcttatcaggttcttcgagatcctgtaatggaaggttggactgaggtaacaaagccatttacgagctatattgaaaatatatccggttctgtggactcatttatggaaccagtgaaccaggtgatggatcaacttattgagcagctaaaagagcaggttaaagaagtcatgatggacgtctttaaatctgctgggcaagatgccgcgacagagcaagctgctgctgccgcatcggaacaagccgcagaacagatgatgcagaccgcaacgacatggctcagtacagcgatgacaatctatacggtctatgttgtcacaatggtaatgatccaaatgatttataaatgtgaggagtctgagttcacaatgaacgccaaaagggcgttgaagaattgcacttatgttggttcttattgcaaatccaaagtattgggcgcttgcatagaggagcgtgaggcttattgctgctttaactctcctctttccagaataattcaagagcaaattcggccacaactcggccaatcttttggtgatcccaaaagtccccagtgtggtggtatttctctggagaaaattgcagacatagattggaacaaagttaatttggatgagtggttggggattttgcagcaaaatggcaagttccctacgcctggatcaataaatattgactcgctaactggcgctggtagtgacttcaatattaatggggatcgaaagaatgcccaagagagagcgttgcagaggcttgatggaatagacatcgacgccaagaggaaagaggcaacaaatcgcgttaatcctcaaacaggcgcgccaaataataatggtggataa

SEQ ID NO: 447718 - DNA, 543 bp, Serratia marcescens
gtgttttgggttggtggcatcgacgcttatcagatcaatgagctccaggatttgtactggttctcgatggccgagccagaccgtgtaaaaaacaagaagctgcttgatgaatatgaagactactttgagtatcaagaagtagcgaaggccaccaaagatcctgagatgatgagggccgtcaagatcatcagtagctatgatgaaatccctgagcgcctcaccactcttcgacgtaatacagtcaaagaagaatttggggccgacattacagtctcaacagctcatcggtgcaaggggttagagtgggactttgttcagctctatgacgattttccggacgtcctggacccggagctcgacccaatggcccgagacgatgaaataaacctgctctacgtcgcatccacaagagcgatgcgaatcctcgcgttaaatagcgctgttgagatggttatccgctatatcacccaaaagcgcatggtcgagaagcagatgaagatggccgcgatggcaacagaagttgaagggaacacgaccaaatag

SEQ ID NO: 447719 - DNA, 579 bp, Serratia marcescens
  misc_feature (540)..(549): n is a, c, g, or t
atgtctatccttgaaaagatgaaagcagaaatgcttaatctctctcaaaagctcaagttaccggaggtttatgccggtgatgtagagcaagatctaaccctgattgagcagttcagtggctatcaaatgttatgggtgctcagaacctgtggttcggcattgataccgttaaaggccggagttcaccctgttcatgttactcactggatctggggtaattcagggcaacaaatctttgtgtttcatgtcaatacacagcacggaaccatagagaaagttgacttcgaggaagctgaacgtctcatcatgcagcaaccttgccatttgagctcttcaatgaagcgcgaagagataatcagctatgttgatcgtgttctatctaatggctgcaaccttcgtatatggggtgtttttgactcaccgaaacactcttgttcggtcggggactggtcacaatggcaacagtatttcagatcgtcaggtaatcacctgatggccgattttattggtaaagccattcgattcacgaaccctcgatannnnnnnnnntcaaccattaaccctgtggggctccgatag

SEQ ID NO: 447720 - DNA, 705 bp, Serratia marcescens; identical to SEQ ID NO: 8686

SEQ ID NO: 447721 - DNA, 582 bp, Serratia marcescens
  misc_feature (224)..(233): n is a, c, g, or t
ttgctgctgatccctggcgactggacagacaaagccatcaaaagggaatccgtgctggtggagcagagtcttggggtcgaagcaagagactggatacagagcaaagcatctacctggtttagatcgagcgttattgattccggtttctatgaggggatgtaccaaacgctgatcccatcagaagaggaacgccagaagtccaagggaatgcaggatatggggcnnnnnnnnnngggctggtttgtttgggtcaaaggccgcatggaagcttttgtcaacgtcatttaccagttctacacacggttagcgctattgtccgcgtgggctccctatatgctgatcctgttcgcgcctgcggtatatgacgggatgatgacatggcgaattaagcggaccaacttcgattatgcgagtccggttctccatcgttatagcgttcgcggaacgatgtacctgatggtcggattgttcatcgcgttcttcatccccatagcgctcgatccggttgtcattccgataacaatgatgacgtgctgtgtcctcattggcctgacgttcggcaacctccagaaacgggtatag

SEQ ID NO: 447722 - DNA, 630 bp, Serratia marcescens
atgaccactgaaattgcaaaaaataacggcgttcctgaaggctatatgaaagaccgcaaaggccgcctggtgccaattgagcaggtatctccttttgatatcgaaatggacgcctttgttcgcgcccaggtcaaagaggctgaggaagaaagccagcgcatcaaggactttaaaaataagtcctttgacaactgctatgcgtggctcgacctcgtggcggagaaatacggtcgtcagcgcggtggcctgaaaggcaacgttacttttccctcgttcgacggcagtcagcaaatcagcattgccgtgcaggactcgctgacgttcgggccagagctgcaggtggccaaggacattatcgatgaatgcctgagcgagtggtcagagggggccaacaaaaacctgaaagccatcgtgaatgatgcgttcgccgttgaccaggaaggcaagctcaacaccggacgcatcttatcgctgcgtcgcatcaagattgatgatccacgctggattaaagccatggattgtatttctgagtccctgcaggtggcggtcagtaagacctatattcgtttcctgaaaaaggatgaatccggcaagatgaccagcattccgattaatatcgcggcggtgtga

SEQ ID NO: 447723 - DNA, 234 bp, Serratia marcescens
atggaacaattaacggtaaacaataaaaagattgcggcgaagttgaattgtctggcgcgtgtgggattaaaggttgttgagtgccatgttaattttcgccgcccggttattgaagttgaagcaccactgcaagattgggtaaagggtgccgtggaaatcacggaaacacgaaacggaattaagcgcactgtcaaaatgacgatatggcatggcgcacacatcatctggtgttaa

SEQ ID NO: 447724 - DNA, 399 bp, Serratia marcescens
gtgcttatcgatgaggccgaaaacctgccgtaccgtgcgctggaggtcatccgccgcattcatgacaaggcaggtgtaggcgtcgttctggccggtatgccgcgcttgatcctcaacctgaaaggcaagcgcggcgagtatgcacagctctatagccgcgttggctttgctcttgacttgcaggagaaactgccgcaggcagacctgcagcttatcctcaccaacatggtcgaggaagcgaacagcgacagtgttttttccgccttttacaaggcatcaaaaggtaatgcgcgccggttgttcaaattggcacgcggcaccatccgcgccagcgaaattaacgccacgccgattgatgaggcaatggttgataaagtcgccggcatgttaattagttaa

SEQ ID NO: 447725 - DNA, 549 bp, Serratia marcescens
atggaactaggtgccgcacaacgagaattcataaaatccgttgagctcatggtcggccatgagctgtcagcagttcgatactttggcataagcacaggtgacgggagctcaattgcttgcttagaaacagcgaactgccactcagtagactatggcttagatatggagatgcgatctggcgcggttttcgggatcatctggagtggccgcttctggcagtacggcattgacgtcatccccgcatcacttacaactgaagtaaacacttcaaatatagaagatttatcacgtcaccagagttgggctcatctcctagggcagaaaattgccgatgttaaagtccactggagttggtcagggtacatcaacgaaccaaaagtttggtttccgcaagaagtggagttggtatttacaagcggattctccgtgtacttttgcgcatcggaacttcgcgaaggcgtgctaacctttcagcaagacagcattgcggttgtatttggggctctgtctgctcgacgtcatggagttggcccgtaccgtggcggctaa

SEQ ID NO: 447726 - DNA, 609 bp, Serratia marcescens
atgtatgattctggtagcgacatggataatgttggcaactcttctcaggggacactctggtccgatgctaatagctctaatccatcaatttcgggtgctgcatataaagtcctgcttgatgcaacaaatcgttctcgcccggacttttctaatgatccagttttgaatctaagtaaaaaaacatatgaaaatatggatcttattgctggtggttttggtgattgttctgctgaaacaactattaatgaaggaaccataaatgctcacgtacctgagtatgagcgttgtcagcgagtagtaaaacctgctggtgattgcgatattatccattccttgggaataacaagtgatgttcaatatgtatatgtcggttctgtaggtcgaacttgggtcactgttaaatttgaccttaaaaatggtacgtgggaaccaattgcaccctctgatggtgctcaaaaagtcgcgcaaataccaaaagtagatttcaatgccatgtgcagtggtgccgttaactttaagaccgatcttgttggttcttgggattgggctgagcatggcctacccggaaagatcgactcgactgttatcctgtctcttatacacatctga

SEQ ID NO: 447727 - DNA, 246 bp, Serratia marcescens
atgtctcttcctgagttgaatcacaggattttggtcgccgcaaaacgcaacggctgggtcacagacgaagagttcaatcgtacacgcccggtactcaacctagaaaacaacatagccgaacgcttggcctcaccagagctgggctctgacctcaagcagttatcccaagcgagcggtgataaagacaactttgtgccaccggagcaactcatgaagtacatccgggaaaaattacaggagaactaa

SEQ ID NO: 447728 - DNA, 162 bp, Serratia marcescens
atgcgggagctgtcccgcgctgcaggcctttcccctgatacgctcaaaaatgcgctgtatcgctcttacccgaaaggcgaaaaaattattgctaaggcgctggatacacagccgtccgccatctggcccagccgttatccgcaacagcaacaggtggcatga

SEQ ID NO: 447729 - DNA, 198 bp, Serratia marcescens; identical to SEQ ID NO: 273093

SEQ ID NO: 447730 - DNA, 927 bp, Serratia marcescens
atgacttatccaattatacgagttgatgtggtacctcaagacttagaacagcttggaactaaagagaaattttggtttcctcgtgaagaggatggtgggaacttatggctattcaaatattctaaaggcattacaggtgagcactggtcagaaaaatgtgccgctgaactctgccatcttttggagattccacatgctcaatatgagattgctgttgcagcaaaaggctttggtatcctcacaccgaatatgattcctgaaggctatcgtatggtcatgggtaatgaggttttgcactccaaaacctccgattatcctgagccactgcctccaggcgaaaagcctgtaaaggttagagagcatactgttagccgagtcttaggttgcttggataatgaaaagattttgccgcctatttctgactatgatctcggtgatctgaacgctggagatgtgttttgtggttatctcatgcttgatgctttaatcagtaatcaagatcgacaccatgaaaactgggcgataatgcttaataacgaaactggtgagcattttctgtgcccaacttacgatcatgcagcaagcttaggccgggagatgttggaaacagagcgtgaagaaaggcttactacaaaagatgctaaccgacaggtgccattttttgttaggaaagctcgctcagagttatacaagctaaaaactgatagaaaaccattgcttactgttgatgcttttcttcatgcggtcgagcgtaggcctaatgccaaaagtttttggttggaaaagctctctagagtgactgaacaacagattttgcaagtttttaatcaggtcgatgatgattgcatatctaacgcggcgcgaaattttgcggtagaagtagtcttagaaaacaagagaaggttgttagaaaatgtcaatgcttaa

SEQ ID NO: 447731 - DNA, 741 bp, Serratia marcescens
atgtcaatgcttaactcagtctatgttgcttggcagtcgccagaaactcgagcctggcatgtcgttggtaacctacagcagcgcgaatcaggttatgtgtttaattatacgaatggggctatgagctcatctaagttcgttccatttagcggcatggatgacgtgcggaaagcttacgtttccaaggagttatttccccttttcaagaatcgactgctttcatcaagaagacctgagtatccacattttatcaaatggttagggctcaaaagtgaggaggctaatcctattgaggtattaggccgctcaggtggtttaagaagcacagatcagcttcaagtctttaaaaaaattgaagttgatagcaatggcacgtttgaacatttcttttttgttcatgggcttaattacttatctgtttctgcgaaccagcgcgcctccaaattgaacgtaggtgagtctttacagttatgtattgattgccagaacccatatgatgagtttgcagtgattatccgcgctgataatccatctgaaattttggggtattgtcctcggtattttgccaaagacattaaacttatgttgttagataaccccaagtcaattcagttaactgttgagaaaatcagtgatgatgcccctgtaaattacagattactttgtaagctaacgggtagcgtaagtggggatattgctttgcaaatgaaccaacaagatgaatttaagcatattgcttga

SEQ ID NO: 447732 - DNA, 291 bp, Serratia marcescens
atgaaacagcaccggtttgttattccctgccataccacccggttgcagaaacagctggctgccgccggcaaggcgctggcccggctgactgcccaggggtttgtggtagagcgcgtcgaactcagtagcagtactcacgccaccattactgtgctgccggatacccactgccgccgtaagcaggaaaacggtcaggcggtacgttatgcccaaggcgtggatgccggcggacggtttgagcgttggcaattccaggatgcggattgtcgcgtgagttgggaggtcagataa

SEQ ID NO: 447733 - DNA, 372 bp, Serratia marcescens
atgaacaccatcaagcgctacgacattatctgggcggcccacgaagacgggcctgcattgaccgtcgagattgacccggcggtgtgtactctcgacacgctatatcggatgaatgaggcatttgaatacgcagacgagcgtctggcggaaaatgatggcaacctgctgttgacggtgctcaaaatgctgggcgcacactgcttccaccaggccatgaacgacgactggctgcaggccgggctctacgacgcattcagacacggccatgttgagggctggccgccgctggacggcagtgaaggtatcaccatcatcaactgtgacgcgccgtcgattcactacagcaaaatgtacgtcagcgaggtggcatga

SEQ ID NO: 447734 - DNA, 2589 bp, Serratia marcescens
atgagtaacctgaccgaaaaggaccagtgggaagacggtatctaccaactggaaacctcagacccggtgctgggtggcccggatggggtctccaacaagccggcaaaacaactcgccaaccgtacgctctggctgaagaagcagcaggaaaaggccaatgaggcgctaaaggcgcacgagcgttcccgcaatcacccggatggcaccacagcggccaaggggttcgtgcagctctccgacaacccgagccttgacagcagcacactcgctgccacgcccaaagccgtcaaggcggtcaacgatgcgagtgccaagaaagcggccaatctggccgacctgacggataagccgaaggcgcgccagaacctgggcctgaaatcggcggccctgcgtgatgttggcaccaccaagggccaggtcatggaagtgggcgcaggcggcttactgatgggcgcgcgccatcgcgatgatgcctataccaatgacgggcagatttttcgcgtcaatgaattttcgaaaaatgcgccaggtatcagcatctatggagtcctcagcctccccatagacggcggcccttcaacggggtatctgggagtacagaataacggggctgcatttattggttcgtccaacaaacccgagaacggcgtgcgctggtcgcggatttacacgaccgacaacaaacccacggcgggcgacgtcaatgcttacagcaaacccgagtcggataaccgcttcctgcagaagagcggcggcacggtcactggcaagacccagttcaacgccggtattgattttgccaacccgaacaccggcattacgaacggtaccgatggtgccagctacaatggggccaacctgctgctcaaatcctggtatggcattggcttctacaaaactatcggtgaaaaaggcattaccggctttatcgacgtgcgcaccggcgacctgcgcatgcaacgcaatattaccgccgatggtcaggtgattgaggcgggcaagcgcgtctattcgccgaacaataaaccaaaggccggcgatgttgatgccgtctccgcaagcgaaggtggcgagtttaaaaaagaaattcgcgcatctggcggcgtgaaaattcaggtgcagggccgcaacgacaatggcggcggcgtctatcctggcaacggtgacggcgcaagctatgccacctgcaacgtcgacatcaaatcctggcagggcatcggcttttacaacacctgtgacacggtgggcatcaaggggcgaagcctgtttatcgacgtacgccagggcaacctggaagcccagggcattattaaaggcaaaactgtctatgatgccagcgggcgagtctactctccggggaacaaaccctcaccgggtgatatcaacgtttacagcaagtcagaatcagacagccgatactttgcacggggcaccactgcgacaaccaaggatgtggcctggaacgctgcttccggggtctacaatacgcatgaagacggcatgaccatggtggtgcactttgccgccggcggcaccggcagcacgcgcgctgcggattttcggttcaactatggcaacggcggactcgctttccgttcttcccgcgatgataaaggctacgagaacggctggacgaaagtgtacaccgaccgccaacggccgaccgccgcagaggtgcaggcggcagacgtcaggaataattttgcggcgaagatgggcgccaaccgcacgctctccggtgatgccaaaccgaccgcacccggcgtctggagcgtggaaaacagcaaatgggcgccagagggctggggcacgatgctgtacaccaccaaccgcccggacctcaaggccgatatcggcaacgggctgttccaccactacctgttcctgagccacaaccgcaagctgtgggtggcgaccaacgtcaacggcaactggagcggctggcaggcgatgtactccaccactaacaagccgacgtcggcggatgtaggtgcgttgccgctcacgggcggtaaggtcagcggtgaaatccagtccactgcatcggacaactaccgcatcgtggccggtgactacggcacgttctggcgcaacgatggcaacaatctctatctgcttctgacaaatgccaaagaccaatacggcacctggaataaccttcgccccttcagcgttgacgtaaaaacagggcaagtcacgttagctaacgccacggtaacgggcaccctgaaggtcggcaacagcactcacgccagcgacggcaatatctggggcacacgctggggtagtaaatggctgtgggatgctgtgattgagcaagtgaatggccgtgtggattgggggtcgtacaatcgtgatgttggtgcccgggcaaccactgattatgttaacggaaccttcgtcagggatatacgattaggaggagttgagtctgttaaggcctggaacggcccaggttatagagatcaggggccatatgtactcacaggggctgaaaatggcaacggggatgagtatatcgatatcctttatcgtcggccaatgcagaaaaacgttaacaatgtttggtacaacgtatggttcgtatga

SEQ ID NO: 447735 - DNA, 549 bp, Serratia marcescens
atgaccgcgcgtctcggccgctggctgagctctctggatacgctggaaaaacgcatcgcgcgcgcgccgatggtgcgccgctacggtcgcctgacccgcgccaccggattggtgttggaagccaccggcctgcagctgccgctcggcgcgacctgcctcatcgaacggcacgacgccggtgaggtgcaggaagtggaaagcgaagtggtcggcttcaacggccagcggctgttcctgatgccgctggaagaggtggaaggcatcgtgccgggcgcgcgggtttacgcccgcatcgcgccggaaggccaaagcgccggcaaacagctgccgctcggcccggccctgttggggcgggtgctggacggcagcgccaaaccgctcgacggcctgccttcaccggaaaccggttaccgcgcgccgctgatcaccgcaccgttcaaccccttgcagcgcacgccgatcgagcaggtgctggacgtgggggtgcgcaccatcaacggcctgctgaccgtcggccgcggccagcgtgatgcgccgcgcgatatttga

SEQ ID NO: 447736 - DNA, 444 bp, Serratia marcescens
atgattaccatcagagcacgcgcggcggaagacaacgcgcaattggcagatatctggctgcgttcggtgcgcgccactcaccattttttaaccgaagacaacatcgcgcagctgttcccgctggtgctgaacgactacctgccggcggttaacgtctgggtggccgaagagcggccggggcacccctgcggctttatcggcctgaacggcaacaaggtggagatgctgtttatcgacgccgatcagcgcggcaaaggggtgggcaaagcgctgctgacccacgcggaaacgctgcacgatgagctgcagctggacgtgaacgagcaaaatccgcaggccagcggcttctaccgccactacgggtttgtcatcaccggccgctcgccgctcgacggccagggcaacccgttcccgctgctgcacatgaagctggacaaacgctag

SEQ ID NO: 447737 - DNA, 597 bp, Serratia marcescens
atgtcaactaataagtacacagaacgagtacgcatcaaccctggccagggcggcaaagctgctattgaacgccttatagaagcttacggattctccacacgccaagcgctttgcgatcacattggagtatcgaaaagcactttagctaacagatacttaagagacactttcccatccgattggataatcgaatgtgccttggaaactggcgcatccctgctgtggttaacaactgggaacggcccaatgtatgacgaccgtacaagcgatatgacaagcttgaacaagttcaggctgatggacgggaaactagttcctgcaagctatctgatgtttgacaaggcttacttgcctagcgatttagttaatccatacattattacgctgggttctaaaacatatttagttgatggcaaagtcaacgagattaatgatggaatgtgggtaatagaaatagatggaaaaattagtgtaagagaaataattagaatacccggaaataaactacaagtaatttcaggctcaaatcattttgagtgtttattagacgacattaaaataattgcaactgttgtcactgaaaccgaaacattttga

SEQ ID NO: 447738 - DNA, 219 bp, Serratia marcescens
atgagacctaacattacaatcacgatccctgagccgtttttacctctggctgaatactgccgccgcactaatctagacatctcaaccgcccgcgcaatggttaaagatggccgcttgcctatcaagggtaaaactctcgccaaaggcctggttgaagtaaatatggctgctttaaccgtacaggctcttgcctcttgcaacatagctcttaatccctaa

SEQ ID NO: 447739 - DNA, 318 bp, Serratia marcescens
atgtctttaaaagataaggatattaaaggttatgccgaagtggcggcggatctattgaattggcaagaaaccgctttgacgctcaaagcagatggttactgccaagaatttattgaatatgtcgtcaacaccacaccggaatatgtgctcggcttgcaaacgcgttgcgttgagctggaggaaaaactggccgtgcgggtggagttgccggcaggtttggcgcaaaaaatcaaagtgcctggttactacgaggcattaaacgactttatggattgtgttcgttctgcgggctttaaaatccaaggtgatgagcagtga

SEQ ID NO: 447740 - DNA, 162 bp, Serratia marcescens
atgacactggccgactatatcgccgcgaactttagcggcaaccaatccgaatttgcacgacatatgggagtgacgcggcaccaggtgagcaagtggattgcagacggctggatcgtggtcggcgataagctttacagcccaaagcgcgaaattaatttgtaa

SEQ ID NO: 447741 - DNA, 210 bp, Serratia marcescens
atgaccactatcaccatcgcttacgaggtatcagcagacaaagagcaggctatccagagcatggttaaccaggagcaaatgcgtaatgcaaacttcaatggcgaaaccttcacaattgaacgcggcgagttcaccagcattgataaagatgacgccgaatatgtgatcctgctgggtaaagttcaggacatcattctcgggtataactga

SEQ ID NO: 447742 - DNA, 207 bp, Serratia marcescens
atgaatcaggttctgctgttggaaataaagcacaaagcgttaagccttcaaatagcccaacagagagcacgcctgaagatctacaccacaataacactactgggattggctatagtgacagcgccgagcctgttaacgctgaccacatcggacaacagtgtgtacagcctgtacaacctgcacagccttcacagtttcctcctgtaa

SEQ ID NO: 447743 - DNA, 1941 bp, Serratia marcescens
atggaaaacacccttcctacgccggtcttgcagagcgaaatcaatgagtgcgggctggcctgcatcgccatgctggcggaaactcagggcattcgcgcaccgttgacggagctgcgggagcgttatcccgcttcgcagcacggcacttcgctggcgacgctgtgcgccattttgggagagctggcgctaccggcttatccggtggcgttcgagcaccgggatctggcggcgctgccgttaccggccattttgcattacggcgcgggccactatgtgttattggcgtatcgccagggggggtacgtgtgcgtaatgaacccggcgttggggcagcagctgctgccgtatgccgccctgaaagcggaaatcagcggttatgcgttggtgctggatcgcgatgatttgccagccaccgtcccggcccggcgcagccaccgccgcagcgctttcgccagcttaagcctgaaggataccgccggcatcgccggcatctatcgcctggcggcgatgacgttttttatctcactgacgctgttcatcatgccgatgatggtcgccagcgcgatcaatcaggtgttcgccatggccggcgaggtcgcgttcccctacgcctattatctgctggcgtttgtggcgtccacggcgttggcgctgattgcgcgcaccctcaccgaacgcttcatcaaaaatttcgtgttgttgcacggcgccgccggtttttctcgcctgctggaaaactcactcaatttcttcagcaagcgcgcccccggcgagatcttcagccgtttcaccagctggcagatggccgccggccagaaaatcgaactggacaacggcctgcgcaccgattggatcatcggcgccatcgcgttggcggtgatgtgctacctgagcccgatgctggcactggtgccggttgtcggcgtgctgctgatgggggcggtcagcgtatgggccatctaccgcgatcggcattacacccagcagctgcaggtgcgaggcgcggtgcaaaatgacttcatcctggaaaccatccaggggttttcgaccatcaaatcagccggcctggctggccagcggcaggaagggttcgccgaacatgctcgctcgctgttcaattgcctgcagcagcaaaagatctatgaacagataaaaggcagcatttaccagctgatcggcagtctggagatggtgttgttcatgctgctggcgttgccgctgctcaaggagggcgaactcagtctgggggcattcttcgcctacagctttttgcgcgaaatctttacttcgtacagcagcaagatcttttttgccgttttgcagaaaaaccagctgcacgtcatcgatgaacgcgcgcgggatctgtttcctgcagtatccgctcgggcccagtctgcggacgaaagcgtgagccattttgacgcgcggttggcgtatcggagtgtggccttcgcttacgacgccggtcaaccggtgttgcgcgatttgtcgctgacgctggagcgtggcgagtgcatcgccatttgcggcggttccggcgcgggcaagagcacgttgctgaaggtgctcgcctgcctgctgacgccgcagcagggggagctgacgctggatgggcgcgtactggcaagtgccgccgcgcagcggctgttcttcctgcaaagccaggaggacattctgttcaacgcctcggtgttgcagaacatcacgctgttcgcgccgtcggcgccgggccagcaacggcaggtggaacaggcgttgcgcagtttggggctggcggacgcggtggcgcagctgccggggggcgtgaacgccctggtgcgggagagccatgccgggctgtcgctggggcagcggcagcgtctgttgctggcgcgcgccatgtacagccgttgcccggtgttggtgctggacgaaccgacggcgaatctggaagttagataa

SEQ ID NO: 447744 - DNA, 327 bp, Serratia marcescens
gtgctgaacatcacccgcaatgcgctgcaggcgctgggtgaggcgggcggcaccatcacgctgcgcacccgcaccgcgtttcagattacgttgcacggcacccgctaccgcctggcggcgcgcatcgacgtcgaagacgacggccccggcgtgccggcgcagctgcaggacacgctgttctacccgatggtcagcggccgtgaaggcggtaccggcctgggattatccatcgcccgcaatctgatcgatcagcattgcggaaaaattgagttcaacagttggccaggtcataccgaattctcggtctacctgcccattcgccagtga

SEQ ID NO: 447745 - DNA, 303 bp, Serratia marcescens
gtggcaattgatgaactgcgttttgactgggcatttctgcaatgggcagtgatggccgtcgtcggcgtatatacctggctgattggccgtcaatcggccagccagaaagagctgctggagttgcgcacccgcatcaccacgctggaagcgcaggtgaaacaggtaccgacccagtcgcagatcaccgaactcatcagcaagctgagccgcgcggaggcacagatgcatgggatgcaagagcagatggccgcgacctatcgtcgtactgagaacatcgaagcctatctgctgcagaagaaataa

SEQ ID NO: 447746 - DNA, 768 bp, Serratia marcescens
atgaattcgataccgatcataccttgggtagggggtaagcgccgcctggctaaaaaaatcctgcctcaatttcccgttcatacctgttacgttgaaccgttctgcggcgcagcagcactgtattttatgaagccgcccagcaaggccgaggtgatcaacgacatcaacggcgaactagtgaatctgtatcgtgtgatccagcatcacctggaagcgttcattcaacaattcaagtgggcgctggtgagtaggcagatgttcgagtggttacagatcacgccggaggtaacgctcactgatattcaacgcgcggcacgattctactacctgcagaagcaggcgttcggcggcaaggtcgacggccagactttcggcacagcgacaacgtcgccaccgcgtttcaacctgctgcggattgaggaggatttgtcacaagcgcacatgcggctttcacgtacctgcattgagcacatggactggaccaaatgcatccaacgttatgatcggccgcatacgttattctactgcgacccaccgtactggcagaccgagggctatggcgtcgattttgggttcgaaaactatgtgatgatggctgagttggccaggtcgatggcgggcaaaatgctgatctccgtgaacgacatccctgaaatgcgagcagtttttgcgggacttcatatggagagcgttagcattcactatagcctgcagggtgcagggcgaagtcccagcaagcagcatgaacttgttatcagaaattggtag

SEQ ID NO: 447747 - DNA, 519 bp, Serratia marcescens
atgccgataacgttcagttcactgtgggaaaaccacccagagatcaatggagatgccaatccatgccgcaaacccgacggcgataaggcgttcgatgaccaatgtgcaatcagaataggcacagccttagcccgttgtgggtatgacgtgaccaaattatcaggtgttaatttctgctggctgcatccaaaaagcgaggggcatatattgcgagcggaggagttagcgaacgcgttggccagaacgccaattccgggtttgggtcgtatgatcaaggtcacaccagataaattcgataaggtgttgaatgggcagactggtatcgttttctttaaagactactggcgacgtggtaacgaaagttttcgcaaccgttccggcgaccatatcgacttatggaatggttcgcgactgacgtcaaaactcagctatgtgcgtattcaatggggcgtgtcatgggatggcaccatcagtagcttcttcaaatcaagagaagtttggttctggagagttatatga

SEQ ID NO: 447748 - DNA, 213 bp, Serratia marcescens
atgaagcgttttatttccatcttagccggtgcagctgtaagcattggtatcatgctgttgctattcccttatcttgcgtcctggattgtggggcctattcatggtgatgaccaaatgaatgcgaacctagtggtgcttatcgtggggcttttagcctttgccttgattggcggattattgggaaacaagctctattccaaactgagaaagtaa

SEQ ID NO: 447749 - DNA, 369 bp, Serratia marcescens
atgtcgttactgaaaaacctgcgtcaccagcgcctgcgcaactggatcatcctcgccgtcgttctgctgctcgccatcgccatcgtttcgccgatgcagttgggtgtcacgctgtacaaactgtcgctggtctctatcgcagccatcctcggttatcaccttgaccgcgcactattcccgtatgccagccccggcagctatctgatcgacgactggaagaatgccctgggcaaaccgccgatcccgtcagggcgcaacgaaccggagttccctgttgctaccggctacgagctcgtgttcgctgccgtgctgctgcgccgcgcgctgattgtttccgccatctgtatcggcgtcacgatggggttataa

SEQ ID NO: 447750 - DNA, 435 bp, Serratia marcescens
atgacgatgaataaatggtcgctgctgggattgtttatcgggttggccgcatccatctggtacatccgcaacgactcatacaacgacggtctgaccgccggtcgtctggagtgctcccaaggccagactcagcaagccgccgacgccctcaaccagttcattgccggtactaaagcgctgacagcccaggccaatgccgccagccaacagttggcgcagcagatcgctgaccgcgcggccgccgatgaccaatccactcgggagatccgcgatgccctcaaaaaaaccgctggccgtcgcgttaattgcgagtttgacgctgacgtcatgcagcaactcgccgccgcccagcagcgtgctgctaccgccacaaccagcggtattgccagcagaattggcggtacggtgcccgccaccggtgctgccgaacgataa

SEQ ID NO: 447751 - DNA, 249 bp, Serratia marcescens
atgcagttcgaccaggcgctggcggccctggatttcattcagcaggccgccctggacttgcgcctggatactggtttcctgctgggcttggtaggcggacagatcatccagttgcttcttcagatcatcgacgcggattttggtctcggccaccggcagcagctggtccagcaggctgagccccttcgtgttgccgctggcctcaaactcccggcgcatatcggcgaaccgggattgggtctccagtaa

SEQ ID NO: 447752 - DNA, 300 bp, Serratia marcescens
atgaaactgaataaattaatgctggcgaccgccattgctttttctaccgcctccgttgcacatgcggcgccgaccccgaaccagggcagcggcaccgtgacctttagcggtgaaattatcgatgcgccttgcagcatcacgccggactccgtcgatcaaaccgtcccgatgggccagatcagcagccgcatcctggccaaagaaggcaaatccagcgccgaacccttcagcattgagctgaaagactgcgcgctcaacaccatgaaaaacgtcaaggtgaccttcaccggcacgccgtga

SEQ ID NO: 447753 - DNA, 222 bp, Serratia marcescens
gtgcgcggcccacgtatagaacagcgtccgctgacgcacgttgaggcagcgaaagcgctacgggagatattcacggcgcagggccgggagtggcaggcacagcattataaccagttggttcagcgtttcccggacggcgttccggcggacgatatcgacacgattgccggtgacctggctggcaagcacaccgtgacgctgagcgtcgttaacggccaatag

SEQ ID NO: 447754 - DNA, 162 bp, Serratia marcescens
atggatgaagatgcaaattatcttggttccttctcgaaattagaatacaacagagacgaaaagagatcttatgttgtatttgaaaccaagccgggtgaaatggtaaaacacgacagaagaaatttagacatttttaaagttgtcttggggccaccgttttaa

SEQ ID NO: 447755 - DNA, 519 bp, Serratia marcescens
atgaacgtgcctttcagcaagatgccaacgtcgctgttacaaacattggactacataactgagcccggacgttacacccccgcggagcataaacccgcggatgttgttactctctcatttgttggcgcaataatacgcaaagacgttttagccgctaacatcgagtacatctggccagaactttttatttattatgatgatctttacttctcttacaggttgagtcaacaagggtatcggttccgatactcaccggagctgatgtttctgcatgatgtacctgctagtcagggtgggataacgcccccctggaaagtgtactatctggtcagaaacttgctcctttcaaggacgcttttcgaaaaacatgaaagaccctactcactcggagctatcgtgttacgtattgctaaatatttactttcttttacctatcaaggcagaaaaggcgaatatattaaatacgtagtgcgcggtattgttgacggtatatcacgtaaaaatggtaaacaacattag

SEQ ID NO: 447756 - DNA, 291 bp, Serratia marcescens
atggcaagtgtaaatgatgaagatgttatgacttttgtaaaagaagaggatgctgttgattcactgttacgtgctcaaatgttagaaatcattaatggtttcgattattacaaaggtctttatggttcgggtaaagaaaaaaaggagcatatagatatgacagagctattggagagagtaacattttattatgacctttatatcagggatatgttgataagaaatctggaaaaaggacaatccttagttgataatggagtgctggactgggatctggacataaataaataa

SEQ ID NO: 447757 - DNA, 222 bp, Serratia marcescens
gtgcgcggcccacgtatagaacagcgtccgctgacgcacgttgaggcagcgaaagcgctgcgggagatattcacggcgcagggccgggagtggcaggcacagcactataaccagttggttcagcgtttcccggacggcgttccggcggacgatatcgacacgattgccggtgacctggctggcaagcacaccgtgacgctgagcgtcgttaacggccaatag

SEQ ID NO: 447758 - DNA, 525 bp, Serratia marcescens
atgatcgagctggataacggcagcggtatcccggcccgcctggacactgcgcgccgcccattttatctgcagcgtcacacctgggcattgatgggacgcaccgagcaattcgcgctacgccaactgatgtactacctgcgcggccgccagcgcgggttatgggtaccgagccagaatgatgatctgaccccggcgggtgcgctggccggcaacacgttgccggtgatccgctgcggctacagcgaaatgggcgtcgttcctggacggcgtgatctgcgcatcctgctttccgacggccgtatgctctaccggcgagtgaccggcgtggccatcagcggccaggcagaactgctggcgctggatggcgagtcggtcaccgtcccactgagccaaatcgcaagcgtgtcatttatgacgttcgccaggcaaaacaacgattcggttgcctggcagcacaccaccgacgctgacggtttcgctagcgttaccacctcatttataggagtccgggatgagctggagtga

SEQ ID NO: 447759 - DNA, 147 bp, Serratia marcescens
atgttgcaaccgctgcagcagacgctggtattcgatgcggccgatgcgttcgccaaaggggtggagtccgttgagggggggcgcagtcttatgacggtcctgcgcgctaatgtcccaaccctcaagcaaatgctgggggtgaaatga

SEQ ID NO: 447760 - DNA, 219 bp, Serratia marcescens
ttgagcggtaagctgcgcgaggctttctcagttctcacctcccattgttcagaccatgaggtcgacccgccatacgattttatggcgggtctactgtgtcaggtcgaacgtgcggtcaaccagttacgcgatacctatgacctggagtcagcacctaccggcaatgaccggccggactgggttgacctgccggataacaacaacgcaacggtgatgtga

SEQ ID NO: 447761 - DNA, 156 bp, Serratia marcescens
atgccgccgcgcacgcagcagattttccgccttaaccggctcgatggcctgacccaggcgcaggtggcggcgcagctgggcgtgtcgctcagcacggtggaaaaacacttggccagcgcgctcgagcggctgatggcgcggatggaagaacaataa

SEQ ID NO: 447762 - DNA, 246 bp, Serratia marcescens
atgtcggacaccgctttggcctctgaatggttgccgctggcgccagcgcagcttgatttctgggaagaacacaccttgcaccccgggcagaccctgtccaccgtcgcacactgcaccgaactgtgcggcgcggtagaggaagagacgctcctccgccgttacggcacgatccacaacgcataccgccattacaacgcatcgatctgcaaacgcacggcgatccctggcaggcggcgcaaagcctga

SEQ ID NO: 447763 - DNA, 1290 bp, Serratia marcescens
  misc_feature (850)..(859): n is a, c, g, or t
  misc_feature (1277)..(1286): n is a, c, g, or t
atggttaataacaatgttcctcaggggcagagacattatctattaaaaccaggcattaaggatccagaaattaatttgtgggcttcaaaaaaaataaatgctttagattttacatttgaagattttttaaggaaagtgaatgatttaattcctttatctgaaagatttaactatcttattactccaatatcgaataatgcgattcaaaaaatatttgtaactaatgcccccccatcagaagagctaaacaggatacttactgacagtatacaatatatacattctgacatgaatgtagaacatttcaaccctaaggaattttacaaagggtcagatttaggttggtatgcacaaagtgcagaattagccattaaaagaacgttgttagatcgtttcttagaagaaataatattaaagcctgaaactgagagaagtgatattacagagttaattttacttaagggcgaagcaggttcagggaaaacggttttcctcaggcaagttgcttgggaaatgagagttatggatttcggatgcgcgctttgggtcaacaacggagataatttaaccgtcgaaattattaaagaaataatagaaaaaactaatgaaaggatatttatcttttgggatgacgcgtcattgcacgcaaacaaaatggctgcgcttattaatagcgctgtaaaatccgaattaaaaataacaatcataactgcagaaagatataatgaatggagccaacgttgcgatttacttaaggaatcaattactgaagtgtattcattgcgtaacctgagtgagttcgaggtagctagtttagtagaaaagcttgagattcatgattgcttgggcnnnnnnnnnnatcttataaataaaactaaagctgagcgcatacaagaatttattgttaattcagaacggcagttattagttgctttacatgaagcaactatgggtgagccatttgaagatattatctttaatgaatatgaatctatatatcctattcaggctagaacaatctatcgtacaatttgtacgttaaacagattacgtgtcccagttagagccggtctaatcgcaaggatttttggcattaacttttcagatttcaaacaacaattctttactccattagaaaagatagttttatgggattctgaagggaatgatgattaccattacagagctcgacacgccgaaatagcagaaattgtatttaatcgtgcattcggtagtactttagaaaaatataatgaatatacccaaatattagatannnnnnnnnnataa

SEQ ID NO: 447764 - DNA, 204 bp, Serratia marcescens
atgcacgacgatggtaacttccaaggcgcggagagcctcactttggccaggggaggcagaaatttccaagagatctacgaccagggcttgtcggacagtctcatcgagctgtgcagccacagtaaccagcaaatcaatatcactgtatggcttcaggccaccgtccagtgcagagccgtacaaatgcacggccagcaacgttga

SEQ ID NO: 447765 - DNA, 633 bp, Serratia marcescens
atggaaaattactttgacagtcccttcaaagggaaactactttcagagcaagtgactaaccgcaacatcaaagttggtcggtacagctactactctggttactatcacgggcattcatttgatgactgcgcacgatacttgctcccagaccgtgatgacgttgacaaactaatcatcggcagcttttgctccatcggaagcggggcttctttcatcatggcgggcaatcagggtcaccggcatgactgggtaacatctttccctttcttctacatgcaagaagagccagctttttcaagttcaacggacgcctttcaaaaggccggtgacaccatcgtcggcaatgatgtctggataggatcagaggcaatgattatgcccggcatcaagattggagatggcgcggtaataggcagccgatcgttggtgacgagagatgtagaaccctataccatcattggcggaaaccctgcaaagcaaattaaaaagcgattctctgacgaggagatttcattactcatggaaatggagtggtggaactggccgttagataaaatcaaaacagctatgccccttctctgctcttcagacatttttggtctgcacaggcattggcgtgggattgccgtctaa

SEQ ID NO: 447766 - DNA, 876 bp, Serratia marcescens
atgaaaacagttttaaatttttttgtggtgttttttcttgcggtatttccatcaattgcacctgctgatgatgataactcccttatcaaaacggtagagcgaattgctgacgagctaggcgctcgggtgggttttagtgcttatgatgtggagtctgatcagcactgggaatatcacgccgaccagcgatttgcgatgtccagtacgtttaaaacgcttgcttgtgccgccctgcttcaacgggtcgatgcgggacaagagaatctcgacagaaaggtgagtttttcagagtcagatctcgttacctactcccctgtcacggagaaatacgctggcggtcaagccttgagcctttctgatctttgtgaggcagctctgacaatgagcgacaatacagctgcaaacttaattttgcgagtcctgggcggcccggcacaagttacatcgttcgccagaggtttgggggatggtgtaacacgtcttgatcgctgggaaacggaactcaatgaggctgcaccaggcgatcaaagagataccacaactccaaatgcgatggtgaagaatcttcagagtttgctgttaggcgacgcattatctgtaaaatctagagatcaactacgggactggcttgagagaaaccaggttgcagatggactttttagggctgttgtacctgaaggctggattgttgcagatcgaactggggctggaggtttcgggtcgcgatctataacagccataatttggccaccggagcgccagcctatcatagtggctttataccttacggaaactgaggcttctttctcaaaaagaaatgacgctattgcggagataggtagagcgttaattttgacggtgaacttaggccggtaa

SEQ ID NO: 447767 - DNA, 1149 bp, Serratia marcescens
atgcaacaacgacaatccatcctgtggggggccgtggccaccctgatgtgggccggtctggcccatgcaggtgaggcttcaccggtcgatcccctgcgccccgtggtggatgccagcatccagccgctgctcaaggagcacaggatcccgggcatggcggtggccgtgctcaaggatggcaaggcccactatttcaattacggggtggccaaccgggagagcggggccagcgtcagcgagcagaccctgttcgagataggatccgtgagcaagaccctgactgcgaccctgggggcctatgcggtggtcaagggagcgatgcagctggatgacaaggcgagccggcacgcgccctggctcaagggatccgtctttgacagcatcaccatgggggagcttgccacctacagcgccggaggcctgccactgcaattccccgaggaggtggattcatccgagaagatgcgcgcctactaccgccagtgggcccctgtctattcgccgggctcccatcgccagtactccaaccccagcatagggctgttcggccacctggcggcgagcagcctgaagcagccatttgcccagttgatggagcagaccctgctgcccgggctcggcatgcaccacacctatgtcaatgtgccgaagcaggccatggcgagttatgcctatggctattcgaaagaggacaagcccatccgggtcaaccctggcatgctggcggacgaggcctacggcatcaagaccagctcggcggatctgctcgccttcgtgaaggccaacatcggcggggttgatgacaaggcgttgcagcaggccatctccctgacccacaaagggcattactcggtaggcgggatgacccaggggctgggttgggagagttacgcctatcccgtcaccgagcagacattgctggcgggcaattcggccaaggtgatcctcgaagccaatccgacggcggctccccgggagtcggggagccaggtgctcttcaacaaaaccggctcgaccaatggctttggcgcctatgtggccttcgtgccggccagggggatcggcatcgtcatgctggccaatcgcaactatcccatcccggccagggtgaaggcggcccacgccatcctggcgcagttggccggttga

SEQ ID NO: 447768 - DNA, 423 bp, Serratia marcescens; identical to SEQ ID NO: 340372

SEQ ID NO: 447769 - DNA, 555 bp, Serratia marcescens; identical to SEQ ID NO: 340371

SEQ ID NO: 447770 - DNA, 603 bp, Serratia marcescens
  misc_feature (575)..(584): n is a, c, g, or t
atggtgatgagaaggacagggcgcgtcccccttcttttgctggttggtctcatggtcgcagctcctgcggcctttgccagtgactttgtgactggcgttatggtggggcaaatgctctcagatgactcaggcagcaagaagatagaggacactggcccggagagcaaaacggtcattgattaccatgacggtcagccagttgtgaccaaagtggaggccttcaaaagcaataaatggcgcaaactggatggccctcagggcggctattttgtttgcccaggtgaataccgtagctattcgggaaggctgcgatgccgtattcatgatgacgggtttaatggctttatgggcggtatgactgatgctcaggagctgccgctccaagaagctctgaccaagttggaaggtaaacccatctccctgcaaaccattgaagtccacggcaacaacctggcagtcaaataccagttagcaccaccagcacaaacgcacgtcaaaactcaggatctgggggtggtcaagcaggatggtgaaacgcagaaggctgccagccaacaatcagcgtcatccatagnnnnnnnnnntgactgcaccaaagagtga

SEQ ID NO: 447771 - DNA, 1005 bp, Serratia marcescens
atgacactctgctctctgtttgctacctctgtttttgctaatactcaatcccctattcgccttgttattcatggtggtgctggcacaattactaaagacaccatcacaccagaacaagaaaaagaatataaagaaaaactgactgaagcattaaatgcgggatatgctgttttgaatagcggaggtactagtatagaagcggttcaaaaatcaattaacgtaatggaagattctcctctctttaatgcaggaaaaggtgccgtttttacccatgacggacgtaatgaacttgatgcttctattatggatggaaaaacacgtaatgccggtgctgttgctggagtcactaccgttaaaaaccctataaatgctgctattgcggtaatggaaaaaagtccccatgttttgatggtctctaatggtgcagatctttttgccaaagaacaagggcttactattgtagacccttcttattttcgtaccgaacatcgttggcaacaacttcaaaaagcgatagaaaaagaacaagtcgttttagatcatgatggaaaaacagctacactttttattgatccgatgatgtacgattataaatatggcacagtgggtgctgttgcactggatcaacatggtaatttagcagcaggaacttcaaccggtggaatgactaataaacgttatggacgagtgggtgactctcctataattggtgcgggcaattatgccgataatgaaacagttgctgtatccgcgacaggatctggtgaaatgtttatcagaacattagctgcattcaatattgcagctcaagttaaatatcaaaatttacctttagaaaaagcggcacaaaatgcactggacgaagttaaagcgattaatggaagtggtggcgttatcgtcttagataaatcgggcgactatacgatgagttttaattctgaaggcatgtatcgtggcactattggtaatgatggaaaacctgttgttgccatttataaagagtaa

SEQ ID NO: 447772 - DNA, 246 bp, Serratia marcescens; identical to SEQ ID NO: 447762

SEQ ID NO: 447773 - DNA, 336 bp, Serratia marcescens
atgaacactgcatcctgtttaccgattgaagtccgtaccgccgttttccgccgcgccgtggcgcaggcctatctggatacctgcgccttttaccgggtgagcctcgggtacacgctggacgagctgcagatgacgattgccctgcgtctggaggggcattttgtgcgtcagtacggcgcagaggacggcatggacatggcgtgcaccctgctgagcgacatggtgcagccggacgttctggtggctgcgccgcgcctgaccgcgctggggcaaaagatgatggacgaactgtgctgcgagcgcctgtcggcggcacagcacgccaccgtacactga

SEQ ID NO: 447774 - DNA, 264 bp, Serratia marcescens; identical to SEQ ID NO: 429251

SEQ ID NO: 447775 - DNA, 252 bp, Serratia marcescens
atgatcggcaatgccaacatcaccccaccgaacccgcgccgctatctgtaccacgcctacctgtcgtttatggccgcacgggggtatcagcacgtgatgaacctgacggcgttcggccaggcggtgccgcagacgctcaaagagtacgaacacacgctgctgaaacgccgcaccaagcagggaatacaaaccaacctgatattgagtgaagagtgcgaagcggactggctgccgaagtgcggggcggtgtga

SEQ ID NO: 447776 - DNA, 579 bp, Serratia marcescens
atgaacccaccaagcggaatgcagtcaggagtcatcagctgcggagttgtgttgccgcagaacgggcacggcttcagttcatttgctggcatcacgcacctcccagcacacgccagccttaaccaatttgcggcagtgggtaatgatttctcggcgggttacatcaccaagacgccacggcgaatagaatggggattcgtcaacggaatcgtaattttcccagcctgcagcatcatgggctttaccaattccgtcccagtcagtggtttgcaaaatcagtgcgtcatgaagcagataaaacgcatcgtagctgtcagcctcaccccaataatcaacggtggttacttgccactggtcgaaatcaaggcggcattcatagccccaacccatttcaaatgcatcggcgggatattggcgtggcatgagcgccatcagcagccgcatcgcctcggtgctgaatttcttctcaatgcgagccttgcggttgtcgtatgggcgctctttcatttggccccccgcagctcgtcagctttaagttccgcgaccgtagcgctgataagctggcattcacgcagatga

SEQ ID NO: 447777 - DNA, 438 bp, Serratia marcescens; identical to SEQ ID NO: 446489

SEQ ID NO: 447778 - DNA, 459 bp, Serratia marcescens
atgctaacgctcgaacgccagcagtttgaaaaatggtgggaaaccgctatgcataatggctatccgccaagattcggctgggagcactggagagacggcgacggataccgcgatgatgatggtgagtttcaagggctatggcaagcgtggcaagcaagccgcgggttcctggctaaccgggaggcgcagccggtgatgtgggttatgagcgatgacctaacggacgaaaaaatcatatcgaccccggcatatcccaacagagtggaggctgaggagaggacggtaggagaactaaccccgctctacaccgccccgccagcgccagcagtgccgccagaaaagaaactgcctgagctgatgatggcctcttatcatgaggctatcggctggaacgcctgccgtgccgcaatgctggcagcagcgccggagggtgggaatgatcacgatacccgacgataa

SEQ ID NO: 447779 - DNA, 1056 bp, Serratia marcescens
atgagcgtaccgcagacactaattgataaaataaaaagaggaagagttgtactatttctaggctctggagctttgattggcgcaaaattaaaaaagtttgatgtccccaaagggaatgatttaggaaatctaatatctgatcggtttcttaatggtgattataaatatgagtcactaactcaaattgcagacctcgcaatttcagagcatggtatcattgatgttcaggagtttatacgagaaatatttgaagatcttgaggttaatgatttccataaaatcatcccagattttcaatggaaagcaattttctccaccaattatgatcgaatgatagagttttgttacgaaacaaaaaaaaccaatcaaacactctctattcatttatctaataatgatggatttcaagagggtgagaaaactactgatatactgaattttgtaaagctgcatggatgcattaccagaactagagaccccgatttgccacttattttaacggtggaacaatttaatgaatatgaaaataatagaaatttactatttaaatatttatatgaattagcaatagagtatagcattgtatttataggtcatagtttacaagatgccaatataagacatattatatcaatggttaataacaatgttcctcaggggcagagacattatctattaaaaccaggcattaaggatccagaaattaatttgtgggcttcaaaaaaaataaatgctttagattttacatttgaagattttttaaggaaagtgaatgatttaattcctttatctgaaagatttaactatcttattactccaatatcgaataatgcgattcaaaaaatatttgtaactaatgcccccccatcagaagagctaaacaggatacttactgacagtatacaatatatacattctgacatgaatgtagaacatttcaaccctaaggaattttacaaagggtcagatttaggttggtatgcacaaagtgcagaattagccattaaaagaacgttgttagatcgtttcttagaagaaataatattacagagttaa

SEQ ID NO: 447780 - DNA, 633 bp, Serratia marcescens; identical to SEQ ID NO: 30074

SEQ ID NO: 447781 - DNA, 153 bp, Serratia marcescens
atgctgctattattggaactaactatggaatttagatttataaaaaaaatcaaaacaggagatagcatttattgtaattccaatgttaacttcggtgacttcaaggacttttccggtttcttacaaaaaattattggctctatgaaggattaa

SEQ ID NO: 447782 - DNA, 1035 bp, Serratia marcescens
atgaatactacacacgatcctatccgccatataaaatacttaagacaatccttatctcaagataacgaggctatcggttttttcctatccgcaggatgcccgctgtcagttgatatgcccgaaggccagtggccattaataccagatgtagtcaatcttacgaagtatattcatactgaattaagtgatcatgaacaatatgaaaaacttatatcagaattggagaaagcggagaaaaataaaaataatatagaagatatccttagctttttgcgagcacttgtatcagtgtctaaaggtggcgaagttagagggttaactgaagaacagctttcgattctggaaataacaatatgtgaaaaaatagcaaaaaaaatcaacgtgagtctaccaaattccgaaacaccatatcataacttggctaaatggatacgctcaatagatcgcaagattgctgtggaaattttcacaacaaattacgatcttttaatggaacaatcacttgaagaaatggaaataccatactttgatggtttcgttggtgctaacaacccattctttgaccttagagcgttggaagataacctcatccctaaacattggtcaaggctttggaagatacatggttcaatcaattggtgtcaaaaacatgtgggtaatcaaaaaagagtatatcggactcatcccaaccataaagagtcatcacacttaatatatccctcacatctgaaatatgaagaaagtaggaaaatgccatatctagccctactggatcaattaaatagatttatcagaaaaaaatcatcatttctcgtattatcaggctattcctttaacgatggtcatttaaatgatgttatcgttagtgcactaaagtcaaatccaacagccatggttttaggattaatgtatggcgattattatattgatggtaacgaaaaatacccagaagcttaccgattagctaaaaatcaacataatttgaatatatggactaacgatgctgctattattggaactaactatggaatttag

SEQ ID NO: 447783 - DNA, 330 bp, Serratia marcescens
atgaaaccatatgtaatgctttatagtgaaacctatagaaaaccaacccagtcattagagcaaattaatgcaggaacaatgataacgaaagtaaatgaaaatggagatgacgattttatccatatgtctacttttgaaacaagagagatagaaaatagtgatcagaatttctattaccaaagcactgttgtaacagagtcgattgaaaatgatgataatgattacctgtcatgcgcaactttggttacaaatgtggtagaatcgaatgataatgattttcattcgatatacaatgacaaaatagtgagctatgatcatttaataaattga

SEQ ID NO: 447784 - DNA, 1161 bp, Serratia marcescens
atgttattctcactcaacccacagacttctcaatgctctgtattttcattgcttaacgctgagtttcttcattttctgcaatctagtgttaatgcagatatttattcagagagattatttcgtacctttacggaaacaagtcgaggtagacaaagaacagtcccaagtgtttgttggagcaataaaccaacaagagaaaaatttcataagctctggttagctctcccagatacaatagtcaaacgtcaggagttatcagatcagataagtgaatctcagaatatccaaattttttttaatgacactcaagctagattgcccgaattagtgccggcctccttatttgaagcatgtaagtcattaacaactcatctctttacatgcacaaaagatcttgctaaagcaaagctacaatctcaaggttctatagaaaatcattatcaaaactttgtaagagaaaataatcacagccatctttgttctatttgtggtactgcacttctatctcaaaatagagcgaatgtagtagatgaagatcagtatcgttcagactacgatcatgttctttgcaaagataaatatcccgtttacagtgtccatcctggtaatttcattccgacttgccacatttgcaacagcaaagcaaaaggacctaaagatgttctcagagataacgggaaccaacgaagaatagcattttatccacttcccccatcgcaagagtcatgtgagcaatttgcagcggtgtcacttcacctaagtgatcgtagagacttaattgagaataactgggaaacgcccttggagtcagcatttgttttattcccaagagctccagtagacatagtaagtaaaatagaagtgtggaaagaagtttataaagttacagaaagagtagaacagcatcttaaaactcacttttgcgagcgtatagctacagatttgcgaccagtaagttttgatgatttctgtcggcaattagatagatattcaaggcaaatgccaatagactataaaaaatcggagtggagattttggtggcataaagtttatgagtttttatctagtcaaaatgaagcctatctacaagatgtttgggtattaattgactggaagttaaggctatcaaatgatgctgatatggctgacacttttgattaa

SEQ ID NO: 447785 - DNA, 1197 bp, Serratia marcescens
atggtttctatagagaaagaaaacgtttatcagctacgagactattttcacagtaaggtgagcgaatccgctcaccttgatccatttaagtcctgcttttttaatctcctagacggaggtaagagctgcattacgaattttagttttgcggatctatctttataccaacgctgtgcaatttcaggtttgtgtattctggctgaaactgtctcggtccaggatgtttctcgcctgctcgggcaagctcccaagatcgactcaacaccgagaccttgggtatcggacatgttcggtgtaatggcagtaaaatggctaaccgcaaagattcaagatgagagtattgaacacgagttcgaacagtggatttcagggtttctggctcagcagattgaaagcaaccatctcagtatcttcgagaaagatatcgcgatatatgtcagtaacagcgaatcagccacctttagtagtgcttgcataccactcttccttcattatagaaagttactgaagatcaatagccatcagaaccgactttctcttgtcggacgtttcatgagtgaatttcaagcacaagctacagaaaatccttcagtgactctcttgtgcgtaatgctttacgtttttaatcaaattaatcaggaaattgccattgctccaccgtctggatggaccctggatgacctgctaagatttctggaacatatccctgccgggttaaaacggtggacatgggaggacacaggtcgaaccagaggcgcagagcccgtacagtggcaagtcgaaaatgaataccatgttcagaatctgctttatatcctacttgcaccaattttcaacgacattgctgatgaagtgaatcttcagcctgtcgggcaaaaaaatcctcgtattgacctttatctgccatcactgcacacaatcattgaagtaaaataccgaaaagataaaaagaaatcgtttcctgcactaataggagaaattgcagaagatgcgtcactttatcgtgtcgacgaaaaatataaggattcacgcatcatcagtttcctgtgggattgcacgcgtgcaacgcaagaacatacgaaattcaaggagggggtgttgaagataaatggcattgatggttgcgtcgtaataaacgccccctccactataaatttaaaaaaacagcatgacaatattaatcacctgttaaaatga

SEQ ID NO: 447786 - DNA, 372 bp, Serratia marcescens
atgaccattatcgaaatgattaaaaatctggcgcagcgtaacagcgtcgtcgccagtgccgatgttttggccgttttcagggagctggaagcgaaggatgagcgaattggcgagctggaggtcatcgccaccgaatacgccggtaaattccagaaggcgcaggatgcgaacaagcatctgattatcataagcaacgatgacaagaagcgcattgccgagctggaagccaagctggctacgccggtgcggttgccgctgctgtattcgcctgatccgtggatgtcaccagacccagacggaacctggctggataaagaagacgtgaaaaaatccattcgcgccgctggattcaccgtagagggggatgagtag

SEQ ID NO: 447787 - DNA, 285 bp, Serratia marcescens
atgatggacaataagccgagcgaactgagcaagccggtggcgtggactgacgagcgcgggaatctgtgcaccaaccgaaacaaagaacgcgggctggagagtcgataccaccaagactacgagaaatacacgacacctttctactcgcaagagtacgtctccgccctgcttgaagcgctgaaaatttcgcaggcaattgccaatgagtaccagcaactgatgtatcacatggacgccggtggcgacttctacgagtttcagcgggataagacggtggtgaaatga

SEQ ID NO: 447788 - DNA, 189 bp, Serratia marcescens
atgagcaagcaaccgcgcctaactgaaaagcaaatggaagcactggcccataaaacagttcaggactttgtgaatgcctgcaattgcaagtgcaaggatgacattcttcttagtctttcatacctgctgaatatgggcctgagcgcaggtgaagctgttaagcatggtaaatctagggtgctgcaatga

SEQ ID NO: 447789 - DNA, 540 bp, Serratia marcescens
atggttcagagatataaccctgattacgtcatgcatgcggcgcgctttgcgccgtttgcacgcgaagctgagcatggtgagttcgttaaattctccgattatgaagccttggtatcagaactcgccagcagccggcagatcaacgcccaaacgctgcaggtaaagctgggtatggctgacaccatcaaagagctggaaggtcgagttaatgcgctggctgtggagaatgcggcgctgaagagtgccataaccgggaaagcctatatcgacttcgtgacatccaatggatggaacccagggatgaaaaccatcaacggcaagtttgccggctttatggatgcagagatcgatttcgggtgcatggcatatgaccatgccaagaagttgatcgatgcggtcgaaaccccagccactgacacagcacttgcagctatccggaatgaggctaccgcgcgagtcctcaagcatctgtgtgactgccagattatcagcgctacggtcgcggaacttaaagctgacgagctgcgggaggccaaatga

SEQ ID NO: 447790 - DNA, 582 bp, Serratia marcescens
atgggatgcgatattcatttataccgagaaaagcaagttaacagccagtgggtgaccgctgacgtttgggaagaagatgatgattacgaagggggagcttactccgaagtaccatggcaaaacagattcaccgaccgcaactacaaattatttggtctgctgagcaaaggagttagaaccgagtatccattctctttcgagcctcgcggtttaccgttcagcgcttgctgcgaggttaaagcctgtagcgatcgctgggattgcgacggtcattcacacagttatctgtacctgcacgagttaaaggatatgcgggagtttgtgaagaccgcgaccctaaaagtcagcggcatgatggatcgtaaccaactctcggcactgcgtgcatctatcgactcaggaaagcccgattggaatcaactctacccatattgccaatgggcaagcctcgatagctacgacgaatttgaactcgatgtgtctgccgacttcattattggaagcagcatggacaccattatcgccttattcgacggcgttgatggtgacaaccaccggatcgttttctggttcgataactaa

SEQ ID NO: 447791 - DNA, 564 bp, Serratia marcescens
atgaagcaagtggatttaccctgccgtcgagagcatccggcggacaggcataaaaccactgagaggaataacaaaatggcaactcgttcaaatatcaacgttaaagtcggcgaggtttaccactgcatctactgccactgggacggctacccatctcaccactcaccgattctgactggccattacaactcccaagaattggctgaaaagctggtttcgtatggcgatatatcttcactcgctgaaagctgtgagcaaccagaagggcattcatacgactcaccagcagacgggtacaccacctactacggcagagaccgaggcgaaacgaacgttgatttcaaagttcggacttcaccgcttgaacaagaagaatattcatacacctgggatggtgaaaaatggctgtgcgatggcgtcgcaattctgccggtagaaagttccgaaatagacacaaaagacatcatcgcccagttactggaggacgctcgccgcttacagcaaattgagcctaacgcaggaactgcatcgcgtatcgaagcagcagaaaaagcattggcttaa

SEQ ID NO: 447792 - DNA, 201 bp, Serratia marcescens
atggaaaacaaacatcgcagtagtgatgaagattgtggcgaatcgtgggctaccggtagcttcgaagatgcggccaggccgttaatcagatggttggctgaaaacgcacacccgcaccatacagccattgtcaccagcacgcgcgctgaattgctaatggcggagtcggtagtcaacaccgaagactacttgagagactag

SEQ ID NO: 447793 - DNA, 555 bp, Serratia marcescens
atgaaaaatatcgttgaaaatcaaggtataaaaactgataagccgttgcctatgagttatgaggcactgaaggctgagcgcgatgcgctggcacaacgggttgagatgttggctcaaaatcttggaaatgcaatctggggtgagcaggaagcattgcagcgagttaatgcgctggctgtggagaatgcggcgctgaaggatgtgttggaaagcatctgctgccgagaaaatgagcctgaataccatgattgcggcatgggatgtggcctggaagaccgtggaataaccgaccgctatgcagctatggctcatggttgggagtcagctatggagcgggtttatgaagaagttatcccgttcattgaggatctgccagaaaccccggccactgacgcagcacttgcagctatccaggcgcagggagtggagaagttcgctgatgaccttcacaaggtcgcaatgtctttgtgcgcggtcaagccggacaacaccaccccaggcgcttacgcgggaatggctcgctcgttcgctaagaagctgagggaggccaaatga

SEQ ID NO: 447794 - DNA, 177 bp, Serratia marcescens
atgaataaatggatatggcctatcagcaagttctggacgttcactccgcatggctgggttctggctgctatctggaatgtctgcgaactgctgcaaatcaggatgccttatgcggggaaagcatttggcgtaatcatcggaaagaaatgtaacaagtcagtgcgggaggccaaatga

SEQ ID NO: 447795 - DNA, 495 bp, Serratia marcescens
atgactaatctgagtgaacttagcaagccggtgatgtatgtcgtgcgcaccctagacggtagcgtggcgtcggtaaaatcgcatagctacaccgcgccaaagggattcacaagcgagcccctctactcgcaagagtacgtctccgccctgacacaacgcatcgccgagctggaggccatccgggcagcagctgaaaaactggtgcgctgcaagggtcgctaccacagcgaacaaaactacctagccttggccgcgctgtttggcgttaccactcctgacctccaaccggctgacggggatagcgaggcggtaatcgctgaattacgtgccaagctggctacgccggtgcggttgagccagcgatacgaaaccgccgggtattgcattgatgagcattactgccaagaagccgcggatggggattatctcgatcgcgatgagttgatcgcctcgttgcatgagcagggcttcaccgtagagggagaggatgcatga

SEQ ID NO: 447796 - DNA, 2745 bp, Serratia marcescens
atgaccgtatcaactgaagtcgatcgcgaggagtacaccgggaatggtgtgacaacggactttgattacagatttcgcgtgttcactgaggatcagctttctgtatcagttgttgatttgtcagagaatatcatcaatctaacccttaatactgactactctgtcaccggcgcgggtctgcgatcgggaggaaaagtgaagttggccagcccgctcgctgcagggtggcgaatcaatatcgagcgtgatttaccactcactcaggaaacgaacgtgcgcaaccagggaaacttcttcccggaagtgcatgaggatgcctgggataagctgacgatgctgatccagcaaacctggtcatttgcatcattggcactgcgaaagcccaactggttggcgaagttctacgatgctaaagggaaccgcatttctaaccttggcgatccagtagataaccaggacgctgccacaaaacgttatgttgattccgaagtttcagacgcggaagctggagcatcagaagcattggaacaagagcgacaacagcgaattgccgctgatatagcagaatctgccgcgcgccaacgtgaagacattgccatacgaaatgagattgcatcctcaaacacgcgaagcgtcagattcccctatggtgtacagcctctcccacaatcaggaacggcaaataaattaatcggcatcaatgctcaagggcagccggttgctgtttcagctgacagtggttctggtaccgatctttccctagaactggctgatcagtctatacctggcggtgccggcatgattggctggaacggagagacagccgctgacgcgctggcaggtgcattatcatgctcggtgtctcgggtttcggatacggggtggggctttgctaactggccacaagggaaggcggtggccattggcggtcgggcattcatcggctataacctgggttctgatcacacatcgattaatatggatgcgatgtgtacgtcgacacgcgacggccagaattttagccagcctagacgcattgctgcgcatacatcaaacgaatctgctgctgcattctcgctcggtagagatgccgccggcacaaaattatttgcgtttgttcgcttcagaaaggggacgaatgataatgcagaaatccgctacgagatttacgaatcagctaacagtggggtgaattggtcattcgttaagaattttaattttcttagtgatgcgggtaatccagccattgccttgcatggatttgaattgacaggtgatggcagggggatcgttggctatcattctattgatggtgagtttggttgtctggtattcaacacatcaacgtatgaatatacaaaaattaagttgctagattcgtcaaacaacttaaatgctggaaatattattcatgttgaggctaatttcttaaagcggtctgatagtggtaaaattatcattatctccagaagtcagttcgctggcgttcaaaagccgctgatgtgggttgcgaaggacaacttaacttcggttacggggcctgtagaaacatcagttccgtttagtgtaaacccagttagcccggtattttcacctgatttcacgaaggtactttttttctactgctatcggttcgaccagcaaaaccccaacgcagagcaggccggtctttgggtttctgagcttcctgttaacgatgcttataacctgaattggtctaacgcacgcacgttttgccttgtgcgcatcgccggtgaatataactttgctgcggcaactgctggtgtgcagcatgccgttacgctaggcaacactgtgctggttccgtttgcgagcatggttgaggataatctagatcgttcagatgtgtattgcctgaagatagattataacggatcccgcatgcagaagggggccagcactcatcacttaggatcgctatcggggagtcaatttggtggccgtgctgaaatgcgactaaatgatgtcgggccgttttcagcacggattaggtttaatgggcgctctgttttaggtctcgatgacgtattgagtattggtacatatggagcaaacttcacccaagggattgggatgtacacatataacggcggcccacaaaccccagcgttatttattcagccgtatacggtttcatatgatggctcaactggaccgctggatatcaacagggatcttagaattcttgcagcaaataaaacaattcacctcggtaaaggtgcacgaattcgtattggtggagatactggaacagtaggcccgagccttctttaccataacaattcaagtaacacgatcgagatagggacgacgcagagcgcttataacgtgcagatggttatgtattcctctaacggatttacattcaaacggtcttcatttgctgggccatctgctgcggttaatttgattctcgaggatagcagcggatcgcaatctgttatttctggcggtgggtcagttagcggtattgcattcagcacgcctggggcatcgcaaggcgtaaaagttaccaatgctggcgggttaacttcaatcagagatttaacaccgggtaattttctcgttgcagaacttcccgccggcgaaaataagggggctttcgtgtatgcgagaaacgcgaggaaggctggtgaatcggctggatctgggactggctgccccgtgtattgggacggttcgtcttggagaacattctacgacaactcagtcgctgcggcttaa

SEQ ID NO: 447797 - DNA, 798 bp, Serratia marcescens
atgagtgatttttattacggtcaagggaaactttacctggctcgccggaatgcggcgggccaggctttatcgtggcgatgggtcggcgatgtgtctgcattgtccctcgaactagaatttgatgagaagaaatcgaaggcgtctatcggtggacagctggttgactcaacgcgttatgtttctgcaatcaatggaaaagtaacctcaacctggcacgaatattcaaaagagaatttagagcttctgctttattcaaacattatcaacaagacgcctaacatagtgaaaggcgagattttaccattaggaattaaagccggtgacaatatcagcttgcgttacccaaatgtgtttggggtttcagtcgcttcactcaccgtaggcgatgattacatcgttgaccctctgtggggagtgattacttttttaaaaacgcctatgcaacaacctgttgttgattatgcgtatgttggccacgtttctttaccattgattaattcgtcaagtacagaattctcattgcgttacgagggtgtcaatctggcagaacaacagtcccacatactggttgagttgtatcgtgtcagttttgacttgatttctaatttgtcactaataaacaacgactccaatctaagcgagttggaaacctcatctgttattttacatgacgctaccaaattatctgattcagaattggggcaatttgggcgaattatgaagtttaatcgcctaaacggattaacacacaacggggccattaaccatgatggccgttatctgcacggtgggaactaa

SEQ ID NO: 447798 - DNA, 360 bp, Serratia marcescens
atggcgttcaacggcctgtttcatcgcgacacgctcagcattggtgtgaaccttgttgccgcgcaggtcatagaactgaaagcgagaacgtacaggcaaacgcggatactcgatcaccgtggctttattggtcaggtgataaatacgttttgcgccagcatcaaggtgttggcagcccgcaaccgaaaggaaagtagccatttattcatcctcccctcgaccccagccagcagcgatttccgccacttcatctatggcctcagtaaaaccaaaccagttactccattctggacggcggccagttgcggcttcatacatgtccgccagcgctacctccgcctcatcccgctcctgaattag

SEQ ID NO: 447799 - DNA, 432 bp, Serratia marcescens
atgaagcgttttaccccagattgttcaatacatatgtcgcatgaaatggcctttatgcgagaaacccctgacggcgcatatatggaatatcaagaccacctcgccgtaaaaacgcagcgggataatttggctgctcgggtttctgaattggaattggtacttcaaggcttgtcgcaagcggctattgatggcggttggacagctaagggaatcagtgaatatgcctcaaaacttgagaagcaagtaaaggagctgaatgtcagtgaaacgaacctaattcaggagcgggatgaggcggaggtagcgctggcggacatgtatgaagccgcaactggccgccgtccagaatggagtaactggtttggttttactgaggccatagatgaagtggcggaaatcgctgctggctggggtcgaggggaggatgaataa

SEQ ID NO: 447800 - DNA, 597 bp, Serratia marcescens
atgcgatttatttcaaaaccagcgcctcaccaaagttggaatttggtgccattgaaattatggggtctgaatattccgctgctgctgaggattatcaaaatggaaaataaatctaaaagcgaacagattcgcctggcgttagctgaacgcggcccgtccacggcggcagagttggccgaaggtgtagacattgagattaaaaacgttggggcgttgctggcttatgatttgaagcatggccgcctggttcgtgggtggcgcgggaaaattcgtatttatgggctacctggcaccatcgataatccgtcgccatctccttctctggttcccttgcgcagagccaagcgctatgtctcacgactggctcgccaacgtcaatctgttgagctgcagatgccagatattgagccaggcgacaattttacaatattgtcggaaaaagcccgtcaatgcgagcaggccaataacttcaccgacgccgcaccgctttggttaattgctgctgactttgccaccaaagaagcgaatcaattctggtgccgtagccgttctgatttctgtgtgcgcggctggaaatatccggaggtgaaccaatga

SEQ ID NO: 447801 - DNA, 630 bp, Serratia marcescens
atgactactacagtcgcatcaaataacacaattcctgaaggctacatggcagaccgtaagggtcgcctggttcctgttgagcaggtatccccttttgatatcgaaatggacgcctttgttcgtgcccaggtcaaagaggcagaggatgaaagcgagcgcatcaaggcgtttaaaaataagtcttttgatgactgctatgcctggctcgatctggttgcggaaaagtacgaccgtcagcgcggcggcctgaaaggcaacgtcacgttctcctcgttcgacggtagccaacaaatccgcattgccgtgcaggactcgttgacgttcgggccggagctgcaggtggctaaggacattattgatgagtgcctgagtgagtggtcagagggtgccaacaaaaacctgaaagccatcgtgaatgatgcgttcgccgttgaccaggaaggcaagctcaacaccggacgcatcttatcgctgcgtcgcatcaagattgatgatccacgctggcttaaagcgatggactgcatttctgagtccctgcaggtggcggtcagtaagacctatattcgttttctaaaaaaggatgagtccggcaagatgaccagcatccctattaatatcgcggcggtgtga

SEQ ID NO: 447802 - DNA, 225 bp, Serratia marcescens
atgtctaattatttgtcggtttctggctgccagcaccaggatgatggcgctaagcgtatttatcacctgaccaataaggccacggtgatcgagtatccgcgtttgcctgtacgttcgcgctttcagttctatgacccgcgcggcaacaaggttcacaccaatggcgagcgtgtcgcgatgaaacaggctgttgaacgccataaaaaactctggaggttcgaatga

SEQ ID NO: 447803 - DNA, 222 bp, Serratia marcescens
atgggtaacgacaaaagcaatatcgtgaaacacatgcaggaaaacgatgcgttggcacgcaagattgccgatttgatccgctcagaattgagcgatgaagagctgtattcactcattcggggggatgggatgtggctggtgatgcagatgatttgcagccccagaggagccgcaaattgtattagtcagtcttcggttaactgcgtttttaatcgattataa

SEQ ID NO: 447804 - DNA, 1197 bp, Serratia marcescens
atgaagccggaagccgcgctgcgttacctggagaacaaggggctgcgcatccgaactgatgcagacgccatgcaagcagtggatcatgcgcacgcattcggctttgccaatctggcccgcctggatattgcccaggatttggtgaacgggttacgcgaaggcctggccgccggccagacgccggaatggttcgtcaagaatctggagccggtactgcgtaaaaagggttggtggggcagcgaggaaaatatcgacaccgataccggcgaaatcaccacccgccagctcggcaacccggcccggctcaataccatctatcgcaccaacacccaggcggcctacatgtcggcgcgccatgagtccatgctggccaacgccgaaaaccgcccctattggcggtatgtggcggtcatggatgcaaagacccgtcccagccacgccagactgcataaccgcgtcttccattacctcgatccgatttggcagtacatcttcccgccgaacggctttaactgccgctgccgcgttgaagcgctgaccgagagagaagtgaaacaatggggttatgtgatttcgcgcaccgacagcgaagttatccagcaagtgatgaccggcgaagacgagaacgggcgcccaacgttcaccccggtgaacggtgtacggttcagcggcccggatggccaggcggtgaccttcttcccggacgtgggctttgatgtcaaccccggcaaagaggtctggaaagccaacctggacaagtacgatgtggagctgtcgcgcccctatgtcagtgcgggattggccggcccggagttgacccacatgctgagcgatgtagcccagggcacccgcaccggcgagatactggccgccggcgtgctggatgccagcgagatggcgacgctgggcaccgccggccgtaccgcctggctggctgagcaccagcttgccgcccaggccggtgccggcacgttgccgactcagcagcaatgggcaggcgtgcagacggttatcgagtcatccaccgtcgcggtgcgtgccggtgagctgctgcacctgttccggcagctcgatgaggggcaatggtggctggcgacgctggacgcgggcctggtggtcaacacctttgcgcctgtgcagacgtcaaccctcgatgccacaatccgccgtgggacggtcttgaaggatgcacgctga

SEQ ID NO: 447805 - DNA, 531 bp, Serratia marcescens; identical to SEQ ID NO: 32891

SEQ ID NO: 447806 - DNA, 558 bp, Serratia marcescens
atgaatgcggcggatgacctcaagcgcacggtacggcaggttttcggcctcatcgataagcacagcacgccctgtgccgctcaatgcagtaatgcagctctcgctcagctcatggatggtgccgcgcttgctgaggcccaggcggtcacacagctcctgcaggagcaccaacgcggtataaccggggtcggcctcaatcaagatggcatcacggtagcggcgagcgtactccttcaacatcatggttttgcccaaaccggccgcgccgtagatcacgttgatatcgttctccaggtgcgccatgcgaatgacctcaaggccgcttttggcggtaattgtcggcacgaaatcaatattcagatggtgcagacggtctttatcagattcacgctgaataaagccggacagttcggattccagggttttaatatcaccgctgtatttcccactcaggaacgtgctgatcgccgccgggctgcggccaatggcgcgcgccacatgggattgcgtgtagcccttacggctcatgatttcttcaagctgtacgcttatttttga

SEQ ID NO: 447807 - DNA, 339 bp, Serratia marcescens
atggcgtatgtgatgtacctgggcgataccgtcaacacctcaaccgccgccaccggtggcagccagcgccggctgcagttcgtgacgcagctctgggccgtggtggtctgcgtgtatttcgccgacggtcgcggcctcggcgcagatatcagcaccgaagccggcccgctgatgttgaaaaccgtcgaggccctgaccggttggtcaccgctcgaaggggttgcccggccgctggccaggagcaatcagagcctgccggcacagtacgagtccggctatggctattaccccctggtgtttcaggtggaggttcccgccgcgattggaggctatcgatga

SEQ ID NO: 447808 - DNA, 561 bp, Serratia marcescens
atggctaccccaatcaaaaagaaagcggaagaaaaatacgtcaaggacgataaaaagccaggtgacggcaccgagaccgacgcaggttccgctgcaggtgacggcaccgaaaacggcgcgggttcggctgcaggtgacggcactgagaccgacgcgggttcggctgcaggtgacggcaccgagaccggcgcaggttccgctgcaagcgacggcaccgaaaacggcgcgggttcggctgcaggtgacggcaccgagaacggcacgggttccgctgcaggcgatggcaccgataacggcgcaggttccgctgcaggcgacggcaccgataacggcgcgggttccgctgtaggtgatgacaccgaaaccggcaccgatgcgaaaccccattggttcaccgtacaggtggtgcgctcaccgagcgggcggcgtttccgggcaggtgttgagttcaccgccgagccaaaaccctacgatttctcgctgtttagcgctgagcagctcaaagcactggctgcagatccgttcttgcgcatcaagcggattacgccggctgaggaataa

SEQ ID NO: 447809 - DNA, 222 bp, Serratia marcescens
atgggtaacgacaaaggcaatattgtgaaacacctgcaggaaaaagatgcactggcgcgtaaggtcgctgatttaatccgttcaggattgagtgatgaagagctgtatttgcttattcaaggggatgccatgtggctggttatgcagatgatttgcagccccagaggggccgcaaattgtgccagtcaatcctcagtaagctgttgctgtaaccgagcataa

SEQ ID NO: 447810 - DNA, 189 bp, Serratia marcescens
atgtctaaaacggaacagaatattgaaattgccaaacttgcaatggagctgatgaaagcgatgaacagctcctcatcaaacctgccttattccggaatagctgaggatttaaacgcgtataaccctcagatgatcgatgttttcgacgcgctttatgctcggttacagcaacagcttactgaggattga

SEQ ID NO: 447811 - DNA, 168 bp, Serratia marcescens
atgttgaaaaccgtcgaggccctgaccggttggtcaccgctcgaaggggttactcggccgctggccaggagcaatcagagcctgccggcacagtacgagtccggctatggctattaccccctggtgtttcaggtggaggttcccgccgcgattggaggctatcgatga

SEQ ID NO: 447812 - DNA, 183 bp, Serratia marcescens
atgcgttcctggaaaatcagcggcttcaatgcgcgcttggtacacatcagataccacggggccggactggccgggtcggtgcctgccggtttcagcaggttgctgaccggtgtgatcgcgccggtgccgtccacgttcgccgcaacggggtgttcggtatcaaagaagttttggccgtcgtaa

SEQ ID NO: 447813 - DNA, 183 bp, Serratia marcescens
atgcgctcctggaaaatcagcggcttcaatgctcgcttggtgcacatcagataccacggggccggactggccgggtcggtgcctgccggtgtcagcaggttgctgaccggggtgatcgtgccggtgccgtccacgttcgccgcaacggggtgctcggtatcaaagaagttttggccgtcgtaa

SEQ ID NO: 447814 - DNA, 174 bp, Serratia marcescens
ttgttcgaggagaaaaccggcaagccctataagtacgacgctcccaacagttacctcaatgttttcctgggttctgatccggaaattcgtcgtgcctggaaactgatgcagaaagatattgtgtcaacccgccaaggcttcgccgacagggtaaggagagaacgtgacaactga

SEQ ID NO: 447815 - DNA, 549 bp, Serratia marcescens
atggtaaaagaaccacaaggtgcttttcagcctgaaggaaaagaacctgtaattgataggctcacacaattggtaagacggtacgcctcaagaagtgcggctgctagagcctgggggattagtgttaacactcttaacagctactacaaaactagcgttgaaccaccaatgccgcgagaaaatctcttagctaacattgccgcgcacgaaggggtcagtcttgaatggctgaagactggaaataccagcgaaccaccaaaaacaccagtaatagtaaagggaggagacacgcaagatgaactatcacggatgttatcgtttctgactcaggatgaacgagagcaattaacgatgacactagcaaggaagggggttgagacagtcctgtatttactcgatgaaaaaaatatcaagcttcttcaatgcaatgatacagagaaggaaaaattcctggtcggcttggaaagcggcatcaaaaaagagacacttaacgctggtcaagatgtagaggctccagacctttcaagcaccggcaagaaggctggctag

SEQ ID NO: 447816 - DNA, 1200 bp, Serratia marcescens
atgccagcaggcacgataacccttaaaaacaactcggcggcggttaccggtagcggtactgcgttcagcacagaactcaaggccaacgacttcattgtggtgacagttggccagaccgtttataccctcggtgttaagtcggtggaatcgaacacggcgcttactctggtgcgtaatttcgatggcccatcttccggcggtctggcatggacgccaatcccctatggggcgatggtcacgattacagcgcagacgcatgcctataccacagaggcgatacgcgggctgctgctggataagaacaactggcagcaggtattcagcggcaccggaaacattacagtgactctgcctgacggcagcacttacaccggcccggcctggaatagttttaccgctgcattgaatttgaaggcggataaaacagaagttgataaaaaagccaataaatctgaccttggaaattcggcatcgcgtgatgttggttcgactgtcggtaccgtggcggatggtaacgataagcggctgaatacaattgatggaaaatccggaggtaagttatccagcagcattgaactggatggaaaacagaaaggcgtgaaaataaagaatcagagcaatgctcagtatggtggtatgtacgcttatgctgacacagcaccatttttcactgatataagcaagccagcgaatggagatttctttccactatgggtgtcgaaatacttcttttcaggtcgccacgctggtgcattttggaaaggactcctgattgaaaatacggagcctgcattaattaccggatttacaaccgaaggggataaatcacaaggactaatcaggcagtctacagagggggatttatcatggatcagaaatgtatcatgcgtttcactaactcaaacatctgaccgtgacttaaaaaataacattcaaaaaattgatggtgctctttataaagtgcaacagctgaatggggtcacttttaattggaagaaggatggatacccatcagcaggtgtcattgctcaagatgtaatggaagttttaccagagtgtatcgcttcgcaaattaacccgattactgaagaaaggaactatgcggtagaatatccggggctgattgggcttttggttgaggctgtcaaagaattgtctatgaaagtcgaagcgcttgagaatgaaaaaccaaataagtga

SEQ ID NO: 447817 - DNA, 300 bp, Serratia marcescens
atgaggaatgtaatatttatgattttaatgttaccgttgtttgcttatgggaatgtcaataaaatcgaatatcctaaaagagcacaggctttgaatttcacaggttttgttgatgtgttgtatgacatatcaattgatgggaaagtagaaaatgtaagggttactgatgcaaaacctagagatgtttttgatagatcagttatgcaacaattaggcagatggacattcgaaaaaggagaggctaagaaaaatgtgcctctcagaattatttttgaaaacaaaaaccagttaatttactga

SEQ ID NO: 447818 - DNA, 648 bp, Serratia marcescens
gtgagcgggtttcaatactggaattccaatggtgctcttatgattgattcgaactacaaaggcacatattatcaggatagtatggagtatcagaatattactgatattggtttttaccaaattgaaacaaccattgggaatagtctcgatatgggatatgttttcaataaatttcctgaaagtgatagcctcatgtggtttaaacctaacaacggttcaaaaatggttttcggcggtactgacttgatgacagccagcgcaggaagaatggcaaggtcacgtagtgatttacctgttgaaagtggttatcgtgacgtgtttaactccgctggtgaattagtttggtctgttgtgcacgcagctaaaatccctcgagtcattgggttctatgatattcctgtgaattttgatttggataatacagcatattcgcagtatattggggcggatacttggattttatcaagcaatgcacctggagccataacctttgacggtggagaagcggggtatagcgggctattttttcgattcattaatggaacattgtcttgccaatggataagtaagaatcagagttcttggctgtccacaatgaaaccttatgggctaagaataccgattgcaaaactgtcgaatcttgtgtga

SEQ ID NO: 447819 - DNA, 846 bp, Serratia marcescens
atgacaccacaacagcaagcgcagcaatggctgcgcgacaacgtcctgattatggacaccgaaaccaccgggcttggcgatgacgccgagatcgtagaagtcaccatcatcgacactgccggccggattctgctgaacacgctggtaaaaccgcgaagcgtgatccctgcctccgcgacagccattcacggaattacaaacgaaatggtagcgactgcgccatcttggccgcatgtgtgccgcagtctttacgacatcatcagtgggcgcaagatcgtgatttacaacagtgatttcgacacccggattcttgatcagaccaatgatgattgggggatcactattcactttaaaatagagcgaccaacgtttgaatgcgcaatgctggcctacgccgaattctacggccagaacagcgagcgcggcgggtacaagtggcaaaagctgaccgccgccgctgaacagcaaggcgtcattatcgaaggaacgccgcatcgtgccctttcagactgcctgaccactctcggcgtgattaaggcaatggcggcaggtggttatcaccgcgcatcacacggaataacggcacagaaagctgtcgatatccttaacaggttattgcaggtagaccacgccgcgattacagcactggttaataaccgtgtcttttgctctgagaaaatggctaaagaaacatcggttggcttttatgatggccactacctcataggcatggtgggcatcatcaatgctttggttgcgcccgacaccatcggggcaatttatgacggcatggtgctgatcggcttcgagattgtcgattccagcgtcgaaggcggtgacctatga

SEQ ID NO: 447820 - DNA, 843 bp, Serratia marcescens
atggcaaagttacctgctttcaacctgtatgaaaaaggcccaactggcgaggtattcagcgccaatattccgtgttcagtaacccctaaaacgggctgcttcgaaatgatcattccccaggaaatccacgacacgctgaaggcgttggatctgcgtccgacacagaattatgcagaagtcgatttgggttctcgctggccatccaaagcacgaagcaccgatgatgaagcagaatattttattcgatgcctgcatttgccaacattgaaaatgcgtgttgcagaagcggccaaggcgctgctttcaacaactgtgactgaacaattggtcattagatacacgttcaattctacatgtcatttttggcaaaacgccgatgacagcatttatccgaatggtaatagccctggggctgtaggcggcaacgatcgcgccttgggtgactgggctgaatccaatgccaaaagcggtgaccatcaagatgtttatagcgttggtgtgggtgccaccgttctggttaagcaaacgcacaccaccgtacgcggaagcaccatcaaatacgtcgctctcagcagatccaaggattatttggacaaagagaaatatcagcatgcttatcggttagatagctttgtccggctgcgtaaagagagtaccggttatacagagatcccctatagcgatgaggcagcagcatttttctttgacatggtcatagggctatgtcgagcagcacaaagaatgaatgcgttcttctctgacgaggacgctgtcgttcaagcgatagagaataaggcgggtgtcatgctgcctttcaaagagcaggggccagcaaaatgttga

SEQ ID NO: 447821 - DNA, 1122 bp, Serratia marcescens
atgagtgagattttaacagatgtaaaggaagttattaaagaaagggtttccgggccgttctttggatatatatttatttcatttttcctttttaattgggactggttctatttttttatatttagcgatcttagtgcagaaaaaaaactaagtagcattagtatatcgtatcagtatttcaggggaataattgcgcctattgcctcaggttttataatgtgcttagcagtgccatttatcaacgcatttataaaaaaactgcattcaatagctgtgagaattaccaaggaaatagattatgacaatgaaaattctcttgaagcaataaaagcagatagagagttgcaaaatagtttgaaaaggcaaaaggcttcaattatttcagctgaagtagatgaattggaaaacaagcataaatcacttacttactctactgaaacactacgtacagaagtggcgcagttaacagctaaaggattagaacttaaaacgcatgagcaagtaatcagtacaagtttaacaaaattgaaaatcgagttacaaaataaaaatgccacagctgaaaactttgagagactgaacgagttaattaaagagaagaacaatgaaaacattaagttatcatcatcacttgatgatctagaactcctaatggcagatattgtaaaatatattgagtttagagatggaaatcgtcctgatagcattctattaacgcataaagttgaagaagcattagaaaaatacggctataaaaagaataaagtcgaaagtaaaaaatcaacaggtttgggtgctgagtggggactgccaactaataaaggattggggataggttcatggttatctaataataactcaataactaaagcctggaacactggccttttaggacaaatgggcggtctaagtggttctgttatggaaccaatgcccgctgttaaagaagccgagaaaatgggcaacctcacaggtgttgataaactatttaatccgccagaaaactcgtcgatatttaaagcagccgcactagccgaaaaactgacaacaccatcgtcacttatgcaaaaaaagatagataagaccgacgaggatgttaacaaccctcccaagggtgaatga

SEQ ID NO: 447822 - DNA, 2442 bp, Serratia marcescens
atggttagccggttaaagcaaaaggtggtaggtgaccctatcagtgtcgataaggaaatgaaaatatcggaacttccctcagcagaaaattcgttaattgatgatctcctggttatttctcaaaatgacggcgatggtttgttgcgaaccaaaaaaatattaatgtctttgttaataaaatcactcatttcagaaagagatggtaatcttgtaaatctagttgatgggtttaagttatttgctgataagggtgtccttgatgctgctgttatccgagccgaagctgcagcagaagtcgcacagtcaggcgctgatgcttatcctgatgccgctgctgcacaagctgcgatcgatgccggcacagaaactcggcgttatttttctgttcgctcaacaatttcaacgcagtgggttgatgaatatgagaacgtcaacggtgtagcgacgccaaccggccgctatctgagcaatgggaaatacgttgatgagattgccgcatcggttatttcgctgctggcgagtcttatggagacgaataagagaactgccgccctgagacaatatcaatcagagcagtggcagtggacagtagaaagtgcgctcggcccttctcagacggcaatggcattagataatgattttggtctatggcttgccggtttaaagtcatccatccaggattacgttgagcagttaattccgaaaaatattgcaaatcgttatcaaaatatgcagttcgtcctcgttgccaaaaacggggttgatggcttattaacaattaacgataacggcgatgtaagagttgtcggcatggatgacgttctgcaagacagattagaatccatatgctcgacaaatttctctcgtcggattgtcggcttccagtatgtgatttttgcgaaagacctcacgtcagcgctgtttgcaattgatgacgatggcggggtgcatatacccggaattgatggcccacttcaagataatcttggcgagtctctggcatcggtcaagactgtcggcggtgttccagccgcagcgtggcgcggtgatattgtgtggtcagagcgtccggtattaacggcgcaaaagctgtcagcatcaggatttgtattcagttacatgccaggcggcgaggcaaccgcgggggctggtgtgatgtatgtcccgtccctgcgtgaaatgcccgttgacgctgaagaatcacatggtggtggttcagcgggccaatcgctgaatctttcagccgatttagccggttcaaacatcgtcaacaggaaccccgcttttcgtggccgcttattagcgggtgcgcgaggcaaaccggaaggaaataatattaaccctgtgacagttgatgatgtctcgacgatgaatgacatgagcgacccctcatatcgtcaggggaacattctgccaatgtataacgcattgatggatatgggggtgggcaatatcatctttatccatgccccgttcgccgccggtggtcgctcatttgtgcaaattagccgaggtacagtgccttatgagaacggcctgaaatacgtgaaaatggctaaatccgcatctgatgcagtaggcaagcgctatgtattcaagttcctcggattcgaacatggtgaaactgattcagataatggtgattgccccaatcctggggattatctcgcaaaagaaaatgtttatttctccggcattcaaatcgacttcaaaggcattaccggccagccggatgatttccttatcgtcatcggacaggtcggaagccgtatcgacacaaagaccggcgcagttgatgaggatggcaacccgacaggcggaagcgtcgttgtccagccgtattctgtgcctgccgttgatcagcttgcctatgtgcgtcagaacccggccacggcgattatgtacggccctaaatacccgttgaactggctctacaacgacaattcgctgagccatcttaacgccaagggtaaggttttgcagggggagtacacagcccaggcgattcactggcatctgtataacgcagataaaaaagggacgtggactggcttaaaagtgaaaagtctcactgtctctggaaccattgccgatctgctctgcgacgtcccttacgcgccgatcgttattgataccacgttcatcgctgactgcctgaatcgcggcattagcctggaaaaaaactcggcatcggttcaaagcgtcacgatcgttgacggcaacattattcgtgttgagtttgataaagcccccgcatcagacgattacatgctgattggctttactaataccgcgcttagttcaagtggccacgtgtatccgcttacatgcttccgtgattcgtccccaattaaatcgcgctggatcatccgaaataacgaacctttccccctttataactggctgtgcctcgatcgcctgccaatgaccggagaattttaa

SEQ ID NO: 447823 - DNA, 249 bp, Serratia marcescens
atgaaagagcgcccagtgatgccagcaagtgaactgaaaccgtgccagaaaaagcattatgcaacctggagcctttctctcgatgtcgaatgcccggaatgcggtgagtattttgacctcaccgacgacgctgatttttgggatggcgggaagatgagttgctgtgagcacaacactccttccacgactgatgttcgcattgaatgcccgaaatgtgagcatgaatttcttgtcgatttcgattactga

SEQ ID NO: 447824 - DNA, 909 bp, Serratia marcescens
atggtagcagtaaaccaaactgggaaagcctattacggttttcgcccagcgttagatctatcagcgtctattctcgaccctcaggctctttttgctgcatacaaggcgcgtgtggtggccgatggcggctatattccagacgagcctggttgtcttgcacgatttggtttcctggtaaataacgggatgtacagtcgagcgacgttctgcgcagcacctgcgtttggtttgaaagttgacggcgttggaaatgtccaaaccgtttataacctgttcggcgatgctggcgatttaatcgcaggctcccagggtacgccgccgttacccatgacgtacgatgctacatcccgcgcggttataattcagatcacatcaggtggtgggtggtatctcaaaagccgcgcgagccttgtcattcataaaagttcgacttatctgctcgctggccgcatgagcgatctgaatcgtgcagacaataacggcattactgccggatacaatctgacaggtttgccgatggcatatcttcggacaatgataacgaatggacaaaaagagacggaagcctggcgttatggaacacgcgatagcgcttggccagctggtagcggtggcgcgctcaatgccgcaacgaatatttatgctgactacgtgccatctgcgggccttttcaaagttactcaaggggttattgagggttacgagaaagggaagttgcttgtgacctccgcacctgcggcaactggaaaactggccgacttgagcagttacacttcaccgatgttgatcggtggtacgcagttggcgaacaacatcgtcagtgcgtgctacggggcattccaggacatgctctgtcttcacaccgctgacgaatcagacgcgattcttgcgtcacgactggggatgtga

SEQ ID NO: 447825 - DNA, 240 bp, Serratia marcescens; identical to SEQ ID NO: 428179

SEQ ID NO: 447826 - DNA, 378 bp, Serratia marcescens
atgaaaaatatcgttgaaaatcaatgtataaaaactgataagccgctggcgatgagttacgaagcactgaaggctgagcgcgatgcactggctgtggagaatgcggcgctgaaggaatcccttgaatcaatttgcaatgcatacaacgaggagctgacagatctactcgatatcgcagtaaaaatggcagtcaaacttcaaaccccagtcactgacgcagcacttgcagctatccaggcgcaaggggtggagaagtttgcagatgagcttcacaaaaccgctatggctatgtgctcagtcaagccggagaacactgctcccggcgcttacgcgggaatggctcgatcattcgctaagaagctgcgggaggccaaatga

SEQ ID NO: 447827 - DNA, 1029 bp, Serratia marcescens
atgtcgattaagaagctcgatgatggtcaataccaagtggacattaggccgaacgggcgtgaaggacgtcgcatccgtcggaagtttgacaggaaggcagaggcagaagcttttcaacgttatgtgctgaccaatgccaataacaaggaatgggcggagaaacgtgctgaccggcgcacgctgaccgagttgctcaatatgtggtggctcttttacggccaaagccaagagaacggcacgattgaaaaacggcacctcaagaagacgataaaggcgctcggcgatataaccgtcaacaagctgaataagcgtgttctgacattgcatcgcagccagcggctaacagatggcataagtgcggcaaccatcaaccgagatatgtaccgactttccggcatgttcacggccctgatagaactgaacgagttttcaggtcttaatccggtgcgcggtttagccccgttggccgaaaagaacccggaaatgacatttcttgatatggacgaaataaatgatttgctgagcagcacggaaggcgatgacaggctgtttgcgctggtaagtctgagtacgggcggccggtggagtgaagtctactccctgaagcggacactcatgacacgcggccgcgtgacgtttcttaagacgaagaacggcaaaaaacgcgtggtgccaatttctgatgaacttgaaagagaggtgaaagaaaatgccgaggggaatgatgacggaacgcttttcaacgttgattatgaaaagttctgtgggatattgcgacgggttaaacccgaccttccacgcggacaggctacgcacgttttgcgccacacattcgcgagccatttcatgatgaacggggggaacattatcgcattgcagcagatactcgggcacgccagcattcagcaaacgatggcctatgctcacttggccccggactacttgcaaaatgctatagcgctgaacccattgggcggtagcatccacgcaaaagagcgtccacatcccgtccacaccctagcaatttag

SEQ ID NO: 447828 - DNA, 273 bp, Serratia marcescens
atgaacattgaagattatgcgattcgttatccgattgacggcgtaacggtagagaaattcgccgagttgctgggtaagccaagctcggcagtttccgagatggtgaagaaaaacaagctgcctgttatcgagctgcgtgacccggaaaaggttggtgcgcgtgctggtgacaaatttgtctacattcctgcgtttaatcagggactgcgtgaagcattcatgaaccggccaacagagcagcgcgatgcgtggctgctctggatgggcttataa

SEQ ID NO: 447829 - DNA, 552 bp, Serratia marcescens
atgaacaacttaatgctcgacatagaaaccttaggagtgtcaacggaagctcctctgatttcaatcggcgctgtgttctttgaacctttaaccggtgagtgtggagacgagttttatagagttataactctcccatctgcattggaaaattgtcttgtagaaccaagaactttgcagtggtggatggctcaaagtgactctgcaagggctgtttttaatgacccgtctgctgtcgatttacaagaggctttaaaggaattttctctatttgtacaaagtcgtggtagcgatgaggtacaagtttgggggaacggggcaagctttgataacgctatattagccgcggtctaccgtaaacacgcgcaaaagctcccatggcggtttcggaatgatagggacgtacggaccatcgttgagctagctaaatgtctcaagaatgttgatgttagggcaagtttttctattaacgcaagtgacgcccatcatgcgcttcgagatgcgaagttccaagtagcttatgttagtgctgctttccgtgccttggcagggtaa

SEQ ID NO: 447830 - DNA, 1560 bp, Serratia marcescens
atgctgtggtcacctggtgatgcgcctgaagggataaagcctgagtggccttaccttttcaaactctcaagagaagcttatcccgaccagtattggatggaaactgttgcctatattgtcgggaatgttatgggagtacccgtccctaaagcgttaccggcgcgaagagctatggaaaacggtgaatacgaatacggggctttgcttgagtggttttacgatcaaaacagccagctatttgtccatgcttctgatttttttcatatgctcatcacggactttgatgacgtttctggaagacatcataacattgctgatctacgcttaatttgtagaaattttagtatccgtagcatgatttctactgattgggcgctatggctttacgatatgctgctttttgatgcactcatcggcaatagtgatcgacatcaggagaactggggatttgtctttgtacctgcatctgctccgggtgtaaccccccctaaagttagggggtatcttgcaccatatttcgataatgggactagtctggggcatgaaaggtatgtcgagaaagtcaggggatggacccataaaaagctagatgattacatacagcgtggctgccatcatttacggaaaaatcgtaaagacacgcgcgaacgcttgggccatatatcatctatacaagacttggctcttgatgaacagccaaaagcgcacttagcccagaaacttgcattcaattttcaggaactggtcgacaagatagattcactttgcgagattaggtccgatgtgccgttcactcgggaacgagcggattggacaattcgtttattgaggcgtagatacctaaggttatcactgattctaaatatgcgtactataagcagaataatggagcctacacggttgcttctgacatggcagccaactacaggcggcactcgttatgttgtcggtcagattgatcgtcagcagggggatgcttacgtcttcacataccattttcactcagatgattatgctagagcccaagagaaagggttcgcaggacatccggcatttagcctgaaaagtgaagaacatacgaacaatgtacttgatccgtttgttcgccgtttgcctccacggaaaagaaaagattttgcggagtatttggctcaacatttgctcccctatcctttcgaaggctctgattttgctctgctgggatatacaggtgcaaaatcacccggtgatggtttctgtttggtgccggatccagaaatttttaatggcgaaggagagcttctttttgaagttgcaggaactcgatatcaggaagggcttgatttatctaaagtaatggttggtgattcggttgagcttgttcccgaattagataaccagtttgaccctcatgctatagcagttgtacatgagagcgggagacttggttatataaacaaagtgttatgtaaagagctgaagcaaaaaatcacgagacatacggtttctgcttttgttgctaagaagaatggtacggcagagcggccattagtgtaccttctggttgaatgtagagcttag

SEQ ID NO: 447831 - DNA, 375 bp, Serratia marcescens
atgtctggcaaaataacatctgctgtggtgatcctgctggtactggcggccgttgctggcgctggcgcctggctggcagctcgacactaccagccgacgattgaccgtctcaacgaggcgctgacgcagtgcaaaggcaacaacaagcaacaggcggcgacgatcaacagccagaacgccggcattgatgcgctgcagcgcaaacaggaagagattgaagccaaggccaaggcagcgcaggaaaaagcacgcagggaggcgcagggcgattatgagaaggccaattccgttatggccgagcgaaccacaggcgaagcgtgtgccgctgcgtccgctgcgtttgacgcagagctgcgccgggagcgtgctcaatga

SEQ ID NO: 447832 - DNA, 390 bp, Serratia marcescens
atgaatcgccaattagtagttgtggcaatgctcgtttttgcacccttggcccaagctgatactcacgcacaaacggagtctttcataaagttttatatcgatgatctgctttgtcattccgataagaactacaacaccccgagggatgagttggtaaaagagatacgcacccagctcaatgccaatacggatatcgctgacatcgacacagtcaggggttaccgtccagagtttactgttgctgaatcgtttaaagaagcagacgttactggtggagaagaaagttgcacaaagttcgtggagagcaaatttgaccagcagtatgcgattcaatctgtcaaataccccataacgggccacatggcccgtgtactaggaaaacgactctga

SEQ ID NO: 447833 - DNA, 390 bp, Serratia marcescens; identical to SEQ ID NO: 447832

SEQ ID NO: 447834 - DNA, 261 bp, Serratia marcescens
atgaaaaagctgatcgtggtttctgttctggctttggccagctgctcaagcactccgccggcgccgtcatatgtcgaagttaaagttccgatcgccgtgccttgcaatacggcagacgttgcgcgcccggcgttcgctgttgaccagttgccgatcggtgctactatcgacgcccagatgcgagcgctacgcgcagagcgccaccagaggattggctacgaaagagagctgatagcagccaacgaagcgtgcaaaaactga

SEQ ID NO: 447835 - DNA, 375 bp, Serratia marcescens; identical to SEQ ID NO: 447831

SEQ ID NO: 447836 - DNA, 516 bp, Serratia marcescens
atgagcaagctgaataaaacaggtgccgccggcgcaatctgctctgtcgcggtaatcatcggtctggtgctatcgaacggggaggtaaaaaccagccgcgccggacttgagctgatcggcaatgctgagggttgccgccgcgacccgtacaaatgccccgctgatgtgtggacggatggtatcggcaacacgcacggcgttaaacaaggtgtgcgcaagacagatcagcagatcgccgccgactggcaaaataacatcctggcggctgagcggtgcgttacaagctatgccgccggtggcaagctgcagcagggtgccttcgacgcggcggtgagcatcacgtttaatgccggttgcgcgacgatgcagaaatcgacgatgttccggctgttccgccagggtcacactgaggccgcctgcgatcagttcccgcgttgggtctatgccggcggcgtaaagctcaacggtctggtgatccgccgagacaaggagcacgcactatgtctggcaaaataa

SEQ ID NO: 447837 - DNA, 234 bp, Serratia marcescens
atgaaaatggaaaagttaacgacaggtctttcttatggcgcctccggtggtggcgccgcattctggtttactcggctgctggatggctattcacctgagcagtgggcggccataggcgttcttggcggtctgtttttcgccttcctcacctggctgatgaacctttatttcaagattcgcgaggatcgccgccgcgaaagaatggggaggattgccgatgagcaagctgaataa

SEQ ID NO: 447838 - DNA, 2601 bp, Serratia marcescens
atgaccgtatcaactgaagtcgatcgagaggagtacaccggcaatggtgtgacaacggactttgattacagatttcgcgtgttcactgaggttcagctttctgtgtcagttgttgatttgtcagagaatatcatcaacctaaccctgaatactgactactctgtcaccggcgcgggcttgcggtcgggtggcaaagtgaagctggtaagcccgctcgctgcagggtggaaaatcaatatcgagcgtgatttaccacttactcaggaaacggacgtgcgcaaccagggaaacttcttcccggaagtgcatgaggacgcctgggataagctgacgatgctgatccagcaaacctggtcatttgcctcattggcgctgcgaaagcctaactggttggcgaagttctacgacgcccaaggcaaccgcatttctaaccttggcgatcctgtggctaaccaggacgccgccacaaagcgttatgttgactccgaaatcgcagacgcggaagccggcgcggctgatgccttggcgcgcgagcgtgcagaacgcatcgcatccgatatcgacatccgtactgaaaccggtgtcgctttggggaaaactgtcaggttcccgtacgcgcagccaatcctgaccggagatacggcaaacaaggttttcgttactgactcgcaggggttggtaaagcttgtcaatcttgacgacacaacgcgcaccgacctggcagccgatcttgcttctcgcggcaatccaggcggggccggtttgataggtcacaagggcacaacgcttgccgagatcctcaatctgatttcttcggttaccgctgagcctatcactgacgcggggatgtactgcgcctggccgcaagggaaggtattcagccacaaaaacaaggcgtactgcctctataacgtcggtaatacccacagtaacgcctctcttagcgtctatcagcagtttacagaggatggttctgagtggtcgcgtccggcgccgaggctctcgaactctgacgcaacaacctggccgcaaggtgtatcggcatggggtgccggatctgacggcgcaaatatttggatggccgcacgcttccgtcgcgtttcagacgaatcacaaagcaagtgcgttctctacaaaagcaccaatgatggctcgacctatacgccggttcttgatccggtcccattgtatgactccacaggcaaagctcctgttctcatgcattcatttgccgtgcttcccaacggcaacattgctttcgggtatcacttctacgacggtgaagtggggatcgttcagttcaacccaaataacctggcatcaatgacgaagtcggtcattttcacggctgctgaaatgaacaacacgccaatgcttgttgagcctactatgcaggtttacggttcgcgagttgttgggtttcttcgtacccaaagcaatgcaacgcgctcggccgtcatgtggtacagcgatgacagttgccagacgtttcagatacgtgagatcgacggcgtgccaaaccaatcgccggtttcgatcacgtcatataacggcaagacctatgttttttactgcggcagatatcgggacggcaatacaaacagcgcgagaacaaacagccccgtgttaaccatgcgcgttggcaacgatgatgacgcactaaatctactctgggaaaacttcgtcgaaatccccatcgcagcagtgccaagcatttacaacgatgttggagcatcagccactggtgttcaggatgtttgcgtgcgcggcacaaagctggttgtttgcctctcgatgaacgttggtagcaatgttgaccagtctgacgtttgttctgtgactatcgatctcggagagcctagacagaacaagtttttcctcagcgagggcgcatttaaaaagcctcgcgcaactgactacccatctaactatcgcttcggcagcgtaaatattgtcggcctgggtaatacctacgcgacgctgcgcatgaatggacaggtcattgttcaagacttaacggatgccgtgagatttggctcaactgttgccggcggcagtaaatcccatgtctggaataacggccccgcaccggcatatatcgacgttgcggcaagcagcactaacgtgagtatttctgcctattcgggatatgcgcggcttcgtgccggccgtgatccggaaggttacgcttctattgagctcaaccgagatacgaaagcggtcacaatcagcaaccccaataacgtcggcggtttcggtttgactaccgaggggtacatcgcgctttcatgcaactggcagcatccgatggtactggacggcggttccggcgggaaaatttatctctgggtttccggcacaaacaacatcatgaagcacagcatgacgccaccgacgtcggataacgacggtgagtttttggtgccgaacaaaacaaccactgttgcggggttgggaacggggacggacaccgcgcgctatgcctacgcaacgaacgggcgtaaggcaggggaaggcgcaggggcgggaaccggtacgccggtgtattgggatggttcagtgtggcgcgtatatcgcgatgactcgatcgtagcggcttaa

SEQ ID NO: 447839 - DNA, 249 bp, Serratia marcescens
atgaagaggtacagctatccggccagcaggatgctggagaaaagcgttaacacgcgcgaagggatcgcgggattagctaaggcttcactactggaaacactgctgaaggaactcgatgaggacggctcagagatcggcggtgctatgctggaactgaatgctttagtgaactatgtcacacaaaatgaaaaaatgaaggaacaaatcaaaacacattcgcaatttattactcaccaattggaacaatag

SEQ ID NO: 447840 - DNA, 3390 bp, Serratia marcescens
atgccgacgtatgagatgaagcctgatgatctgctgtctgctgatgtacagagcatacctcagcctgatgatagttctgcatatatggaaacgccgtcattgctttcggcgttcaatccattcaccgataatcagcaaattcagcgctccaggcaggccgcattccgcctggacaactccctgggtagttttatcgctacggcgccatttagccaattcgataaagtcgacgggtataacccctttgacaatgatgcggctgagctgaaaggatatgaggattacgcagattcattcatcgattcaggatcctcagaagagacgcgcgccatccagcagaggattgatcagcaaagaaccgatcgacaataccagtctgaacttgggtgggcaggaacggtgtcgagtattgggatggggttgattgatcctataaacctggctgctatgtttgttccggccggcgctgttgttcgtggtggagaggttgcggctactgcaggtaggtttgcccttgccaatgccgtcggcggtatcgcctccgaggctgcgcttagcgccacccaggaaactcggacattggatgagagcgcggctaacgttgccgttgacgcaatggttggcggaatactcggggctggggcgcagttgcttgccggtgccggtcagcgtaccgcggtatctcaagcggtcgccagtaacctacgaggcaatgattcgccgcagagcatcggtgctgcgcaggtcttcaacacaacgctggatcaggaacaactggccggagttgggttaatcaacaaaacgctgagcgttaatcctggcggtcgcctggctcagtcgccatcccgtgcgtcgcgggcaatcaatcagcaactggcagagaacaactatttctttgccaagaacgatgaggggttggcaacattcaccgcggctgaaaccaagatcaagcaatatgatgccatgctgtacaagcagatggagtcaacgaaggacgcctatcaggcttacagcaaaaacatccgcgcatccggcggtaagcgaatgaactttgttgatttcaacgaggccgttggcatggcaatgcgccgcggcgatcaaagcgacattccagaagtagcccaggcagccgcacagatccgcccaatgttcgaagcaacaaaggtgcgcatgcaggaacttggcattctgcctgaggatgtcgacgtatcaacagcgcaaagctacctgcctcgcatttataagttcgacaaaattctctctgatcgcactgagttccgagggcgcattgctaactggattcagggcatcagtgcaaaaggcgcggatgcggccggcgcgcgcattgagaaaatcgattcaggtctgtctgcagcagcagaagccgagccgcgcgcaaaatcactggctgacgaaattgccgcagcagagtcatggtctggccgtaaaactgaacttatggacgaggttggcaacaggacgaaactgatcggccaggagcaggacttaacagccagactggagaagcaacaggcgcaactggccacagccaaaaatcagaagctgatcacccggcttaacaaagaggtttctgacttgcgcaccaagctggatgacgttgccagggcaaaggaggaacttccaaccctgcagcgccatcttgagttgctggataatccacgcaagcaccgctcagagctgcgcaagctgcagaagaaggccaactccacgaccagactgaatgcaagccgtgagcgcgcgctgaaggcgatggagccactttcacgagaggaagcagaggatgccgcagatgaaatcgtcaacaagattattggcgctccttctggcctggttcccgctcagctgctgcctgaaaaaataatcggccgcgctggcttcactaagagccgaagcctgcttatcccagacgaacagattgaggactttttggagtctgacatcaaccacgtcatggaaagctatctgcgccaggtaggtccggagatcgaactaaccgcgcaattcggtagcaaggatatgggtgagcaaatccgacaggtatcggaggaatacacccaactgatcaaagatgccaagacgccaaaggaacgcgcgaagctggagaagcaacgtgaagctgaccttcgcgacattgaggcaatgcgagacaggttgctcggtacgtatggcgcgccaaaggacccgcggagcttctttgtccgtgccggccgcgtcgcgcgaaacgtcaacttcctgcgcctgctggggggcatgacaatatcggccgcaaccgatttgatgcgtcctgtaatgcagcacggtttaagcaaatcacttcgcccaatgggcgccatgctacgaaacatggccgccgtgaaagtggcaaccaaagacctgcgtgaaatggctgtcggcctggattatgtgctgtctacccgaacgaaggccattgctgatctcactgacccatacagccggcgctctgcttttgagcgtggacttaactggggtacgcagaagtttggcaactggacgctgatgaaccagtggaacagcgccctgaagtcatggtcaggcctaatcgttcaatcccgtatcctggacaatgctcagctgctggacgcggggaaggaattgccgcagaaggaagtcagaaagctggcgcaaatcggtatagatcagagcatgctgcgccgtattggtgagcagtttgcgaaacatggtgaggatatggacgggcttctgactggccatagccacctgtgggacgatcgcgcagtgcgtgaggctttccaatctgccgtattgaaagacgttgactctaccgttgtcacgccaggcgttggcgatacgccgttgatgatgagcaatgaagtaggcaagatgatcctgcagttcaagacgttcatctttgctcagcataaccgcgtgatcgcctccggtatccagcagggcgatgcggcgttctacctcggcgccatggggactatcgcgctcggcgcaatggtctacgttatgaagcaaaagctcagcggccgtgatatagactacagcccgaataacctggttaaagagggcatcgaccgcgccggcatgatcggctggttgtcagaaccgctgaacgccgtggagaatatcagcggcggccggttcggacttggcgctatgtttggcgcgccgccggtatcccgcttccagagtcgtaacgcaatcggcgctctgttaggtccaacgttcgacatggccggcgatggggcggtgatcgccaatggcgtacttaacggagaatttgacgacaagcagacacatgcggtcaggaagttgctaccatatcagaacctgttttatatctccccattgttgaaccgggtagaagagcaactaaagtag

SEQ ID NO: 447841 - DNA, 2757 bp, Serratia marcescens
atgcctacagtaccggtatatcagcgccaatcgcaatcacaagcggcgccggttaatacgcaggatttgcgtatccccaaagacaacgctttcactgcgctggcagacgttggttctaatgcgttgggcatttatcagcagcagcgtgaacgcgaagatctggcgttcgctcaaaacgccctgatgcaatttaaccagcaagccgatgacctaatgaataaccctcaaaccggattgctgacaaaacagggcgccaatgcaattgggcaaagtgagcaggtagcaagccagttaagccaaatggccagcacggcttttgactccattcctgatggtccggtgaaagaacgcttccgtaatcaattttccgccgctggccagccaattgcgaatcgtgcgcgccagtacgagatcggccagcgtcagcagtttgaggcaggccaacagcagggtctgttggcgaacctgcagcagcaggctgaaaacagcttcgacagcaacgaaggattcgtaaatgccaacctactggccagagagcagatcatggcatacggccaggcgcatggacaaagtccggaagagattgaagccaactgggtaagcttccgggaaaactcggccaaggctgccttgaatgctcagcttacggctggccgctatgatcagttcctggctagaaatggcgagccgtcagacgttggtggcgtgtctcgattcactgcgcatggaaattcatctgctgcgcgaggtctgcgaaataacaaccctggcaacattgaggccagtgataaaaacccatgggaagggcagacaggcagcgatggtcgctttgccaagtttgagacgccggagcatgggatcagagcgctgggtaagaacctgctcgcgtatcaggctaaggggttcgacaccgtagcagagatcgttaaccgttgggcgcctgcatctgatggaaacaacactgatgactacatcaaggcgctgtgcggcgcgttgggtgttggcgccaatgatcaggttgatatgagcaacccacgaacccttgcagcgttgtgtgccggcatcgtgaagcatgagaatggcagccaaccatacaccgatgagcagatcggcgctggcgtcagtgccgcgcttggcctttctgcgttggaatcctcaaagcgtagaaccggcaatgccgcttttgatgccgcaagccctgcaactcaaggcgcctatttgcgacaggcgcaggccatgcagaatgagcagcgagcattatacgcacagcagcttggcacatcgctgaaagatgcgtattcagctcttgatgaaggactacagccggcacagcttcccacgcaagcagatctgataaatgcctatggcccatcaaaaggcatgcggcaatggcaagaccttcaagatcagcaaagttatggtggcgttattggagcagccaaaagcatgtcgccggcagcgcggcaggacctgcttgaacgcttgcggccaacggatccgaatgcatctaattttgcagccaaccagcagcgctgggacaaaatgcaggcgaaatttaagcagctcgatgccgaatgggagaagaaccaggggagtgcacgattctcttcatccttgcaaaataatttccccttggacccgaacgacaaaaacaatcaggcggcagctgatcactactttgatcaggaggttgcccccggtttcaatatcaacaacgcggacagcttgaaccaggttgcagagataacaaccaaatccggcatgctgccgacgcagatcaagacgatgctcaccgctggggcaacatcgcgcgatcctgctgtcgttgttcctatggccaagatgtacggacagatttttgacaacaatccggctgcggccacaggcgttgataaaggcgcaatggcgttttactcgaaagtttatgcctatgaccgcgccggcgtgcctgcagagaaagcggtcgatatggcctacaaccaggtctatcagcaggacgatcggctaaagcagatgattagccaacaggtcagggataaagactacatcaaggctagagccaccgcagcgcaggataatatcaatagcctttcgccgtcgtggaccagcttcggggctccaagcatcagcgccgcagggcaggctaatcagttgtaccagcgcgactaccagaccatttacgatgcgaactttgcacagaccggcggagatgctgatcaggccaaggcaatgactaacgctatgattaaaaaggtgtgggcggtatcgaccatcaacggcaaagaagaggtgatgaagtatgcccctgaagccgtttatggcgtgactaacggttcaggcaactggatcaaaggtcagtgggaggaagagaaaaaagctttgaaaagttccgcgtttggcggcatgcgagatgataccgatttggttttggttcccgatgctgttacgccacgcgatcagacttacagcgtaatggtgcgccagaagaatgcagaaggctatgacgatgttcgcccgtattacggcgaaaatggtatgccgttgcgattcaggcctgagcaaaaaacctcgccgatgtacaagcaaactatggatatccagcaaaagagggttgatgcggcgcgagctgctcggcaggaagaaaaacagccggcattcacaaaccagcaaggatatacaccgcctgattttactaaaccatttggcgccggcattgccaatcaattgccgagcaacatcaccgcaggaggtcagtaa

SEQ ID NO: 447842 - DNA, 570 bp, Serratia marcescens
atgtgtgagccaaccacgattatcgcaggtgcctctcttgccttggcggcagtgagtgcatacgggcaagttcagcagggacggcagcaggcaaagatcgccaacgccaacgcagatgcacaagagatcgccgcgcgcgacacgattaatgcgggcaatgatgcggcctatcagcaacgtcagcaaactcggcagttacagggccagcaggcagcagccttcggcgccggcggaaccgacatgaccagcggcagcgcgctgaatatcttcggcgatacagcggccggcggccagcttgatgctctgaccaccgtcaataacgcagagcgacaggcggctggccttaacttccaggctggtgttagtcgcgcccaggggcagatcgatcgcaactcgtccaaccttggcgcggcaacgacaatcctgaattcctcgcttaccgcatatggtgcttataaatcttctggcgcgctggataagccagctaccaaagccggtagtggttccagcagcaacatgtttagcaatgcccgcagcagtcgctacggctctaacgcattcacgttttaa

SEQ ID NO: 447843 - DNA, 2502 bp, Serratia marcescens
atgacaaccagcctcattcaaccgtcctttgctggtggcgaggtatcgccaagcctttacggccgcgttgacctggagaaataccagacgtcactgcgccgctgccgtaacttcatcgtgcgacaatatggcggtgttgagaaccggccgggaacgcgctatgtggcaccggcaaagtttcccgatcgcaagtgtcgtttgatcccgttccagttcaacacggagcagacctatgtgctcgaagtcggcgatcattacttccgcgtgtttatggatggctcacaggttgtctactcatccggcgccagtgccggccagcctgtcgacgtaacaacgccgtggtccgctgcagatatcgacctgctgaaatacacgcagagcgcagacgtgatgacggtctgccatccgaactacccaccgatggaaatccagcgctatgcgcacgatgactggcgcactgcagaggtggccacagtcagcggtccgttcgctaacgtgaacattgacgagtcaatcactgtctatgccagcgcgacaagcggaacggtagaccttaccgccagcgcgtcgatcttcaaaagctggcatgttgggaagctgttctacatggagcagaagaacgtagacaccgttggtcgctgggttaccggtgagcgggttagcgttgggaatatctgccgataccaggagaactattatcgttgcgttgatgccggagagcgagggcatactggcccggtggcgccaactcatacaactggtgatagctgggatggctgggctgtagccggttctgatgcctatggagtcaaatggcgttacttgcattccggccgaggcatttgccgcattacggccgtaagcggcgacgggatgaccgccaccgccgaagtggtgatccgcaaggatggcgagatcgagctgcccgggcaggtagttggctccgagtcggcaacatacaagtgggcgcattatgcctggaatggtgatgctggctatcctggcaccgtcgtttacttccagcagcgcttgatgtttgccggatcacgcagtcagccgcaaacagtatggaccagccgcagcggtgactataaggacttcggcacatcaaacccgaccgttgacgatgacgcgatcacctatacctacgccgggcgtcagctcaatcaaatccgtcatctgatcgacgttggttcgctcgtcgcgctaaccagcggtggcgaatacaaggtgaacggcaaccagcaaggtacgctgacaccttcggccttccagttttcaagccaggggcagaatggcgccagccacgtgcagcctattgcgatcagcaacgtcgcgctgtttattcagcagaagggcggcgcggtgcgcgacctggcctactcgttcgacgtcgacggcttccagggttctgacctgaccatcctggcaaaccactttttcaccggataccaaattaccgattgggcattctctataacgcctatgtcgatcgtttggtgtacgcgcaatgacggagcgctgttgggattaacctacctccgcgatcagcaggtggcagcgtggcaccttcatcctggcgccggcagctatgaatcagtgtgtagcattgccgaaggaaatgaagacgcgctctattgcgtggttgaacgcactatcaatggccagcagcgacgctatatcgagcgtatgcagagccgtctttatgatgtgatggacgatgcctttttcgttgactgcggcctgacgtatgatggcaggaaccgtgacgccagcaaaaccatgactctgaccggtggcgcaggtgactggccatacgacgaagagatgactctgacggtggccggggccagttacttcacggctggtgatattggcagtgaaatccacatgccgtatatcgaggatgatgtgagcaaggtgctgaagttgctgatccgtgcggtggccagtggcaaccaggcaactgttaccagcaaccgaaatgttccgccgcagttccgcggtacgccagttagcgactggagcatggcgcgcagcacattccatggactcgatcaccttgagggtcagaccgtaaacatcttatcagatgccaacgttgagccgcagaaggttgtcaatgctggcgctattacgctggagaaggctggtgccgttgtgcatgcgggcctgccgatcgccgcggtcattgaaacgctggacgttaacctgaacggcaacgaaacactgctggataaaaagaaactcttcacggccgcatcgttgctggtgaatgagtcgcgcggtgtgtttgctggtacgcccggtggcgagatgtacgaatacgcgcagcgcaacgatgaattttatgatgatccagtagaaccgaagacgggaaccattgaattacaattggatgccaactggagcaagaacggccggctgattgtggaacagaacgacccgttgccgatgaccattctcgcagttatcccgcgcgtaaccgtagggggcatttag

SEQ ID NO: 447844 - DNA, 609 bp, Serratia marcescens
atggcatccgttatccagatctgcaacgtggcgcttgggcggcttggcaacagccgagtgattgccagcctgacggaaaagagcaaagaagcgtcggtgtgctcgctgttttatgaagactgccgcgacgcagtgctggctgatttcccttggaggttcgctacaaagcgcgtggcgctcgccgatctggatatcgagcagcctgattggcaatacagttaccgttacccggtggactgcctgcgcattgttgcgattgtctctccagacggtgagcgctttattacgccagaacggcgcgtgccgtatgaggtcggttctgatgagaatggcactggccgtttgatattgactgacctgccgaaagcatggctgcgctacgtgacacgtgtcaccgaccccaacatgtttgacgcagagttcagagacgcacttagctggcgcctggcagcagaaatcaacatgcagatcacaggagatgccagtctcggtaatcgcgccgagcagaaataccaactcaccatttcatctgcgtcaacgctgagcatgaatgaaacccaggagccgccggcgccgtggtctgaggtttccgacgcgagggcatcataa

SEQ ID NO: 447845 - DNA, 324 bp, Serratia marcescens
atgaaaaccgtaaacctcaagatcggcacagacacctacgaaagcgaaggcggaaagccggagactcgcgacgaatatccgtgggggcttcgcttcacgctgaacaatgacacattggaaaagctggggatcccactgccaaaggttggcgaatcactgacaattggcggcctggctaaagtgctgtctgtctccacccgcaccgaaggtgataaagcggaaagcagcgttgatctgcaattcactgatattggcgtagagccggcggcagcgccgcagcgttctgctgctgacacgctttatggcgatgcaggaggcgagtga

SEQ ID NO: 447846 - DNA, 294 bp, Serratia marcescens
atgtcacaactgaaaatgtaccgcgtcacacggaagtcattcatcaacgggcatctgttggaagaaggcgacacaatcgaatacggcggcagggctggagacaacctgcagctgatcgatggtgatggcaatctgctggaagagggcggcggcgacagcgacgacagcgcgaagctggccgcgctgcagcagcagtatgaagaaatctttggcaccaagccgcaccacaaagcgggcatcgccaaattgtcagaagaaattgaagccaagcgcaaagagttaggcatcaactaa

SEQ ID NO: 447847 - DNA, 447 bp, Serratia marcescens
atgatcctcgactatctgaatatgttctcgcaggctcaggctgttacggcaaccgcgccttccactgacgttatcgacctcgggccgctgtatgctggcaatgatgtgcgcgatatcggacctggctacccggtggagttcttcgcccaggtggcttccactgccgcggctggcggtgcagctaccgtaacgatcagtctgcaaacctccaagaccagcgatttcgccagtgcaaccacgttgctgcagaccggtgcaatcgcagttgctgatctgaaggttggttatcgctatgtggccactgttccacacggtgtgcagcgctatttgcgcgtcaactacaccgtggccactggcccgttgaccgccggtgctttcactgctggcctgctgctggatgctgatgcacaacgcagctatgcaagcgccttcaacatcactgtttaa

SEQ ID NO: 447848 - DNA, 984 bp, Serratia marcescens
atggctattaaaagcaccaacgcgctgacgctggcagactgggcaaagcgcactgatcctgatggtaaagtgccaaccatcgtagaactgctgtcgcaaaccaaccctgtgttgaccgatatgctgtttgttgaaggcaaccttccaactggccaccgcaccaccgtgcgcaccggtctgcctgcagcaacctggcgcctgcttaactacggcgttccatcaagcaaatccaccacagcacaggtaacagacagcactggcatgctggaaacctatgctgagatcgataaagccctggctgatctgaatggcaattcggcagagtttcgcctgtctgaagataatgccttcctggaggcaatgaatcagacgatggcagaaaccatcttctacggtgacactcgtattaaccctcagcgattcaccggcctgtcggcacgttataacgacaagtctgccaagaacgcgcaaaacatcgttgatgccggcggcaccgggtcaaacctgacctctgtatggctagtggtttggggtagtaataccgttcatggaattttccccaaagggcagaaagcaggcctgaaccatcaagaccttggcgagcaaaccctgaaagatccgaatggcggccagtatcaaggctatcgaacccactacaagtgggacaatggcctgactgttcgtgactggcgctatgtggtgcgcattgccaacatcgataccaccaagctgggcgccgacgatggcccgaacctggctacgctgatggtgcaggctctgcatcgcatccctaacctgcagatgggcaatgcagtgttctatatgaaccgcgatgcggctgaatacctggacattcaggcaactgaaaaagcttctcttgcgatcagcgttaaagaaactgaaggcgtgtggtggacttcgttccgaggcgtgccagtgcgtacctgcgatgctctgctgagcactgaatcacaggttaaataa

SEQ ID NO: 447849 - DNA, 711 bp, Serratia marcescens
atgaacttgttcgaacgtttgatgtatcgccgcctgtgttctgaagctccgcctgaaggcggtgatggtggcgcagctcctgcagcaaccagcgataccccggcagcagctgacaatgcagctaatccgggggaaggcgacaaccaggaaggtgaaggaaaacaggaaggaagcaaatcggccgaagaacttgctgctgaaaaagacgcaaaagagaaagccgataaggaagctgcggaaaaagcggaaaaggaaaagaaacccgctgcgccggagaaatacgagttcacaccgccggaaggccaggaactggatgccaatgctctggctgtgtttgagccgatcgccaaagagctgggattgagccaagagcaggcgcaaaagctggtcgacatctacccgcagatccagcggcagcaggcagaagcctggagcaagcaagttgctgattggggtgagcaggtcaaggccgacaaagaaatcggcggcgacaagttcaacgccagtgtaggcgctgcacagcgcgctctggatcagttcggcaacccagagttgcgcgaatacctgaatgcgagcggcctgggtaatcacccggcactggttcgcttctgtgcaaaagtcggcaaggcgatggctgaagataccttcgtcgtgccaaatcaaggcggtcagcgtagcgcggccgacattctctacggcaagaaggagtaa

SEQ ID NO: 447850 - DNA, 300 bp, Serratia marcescens
atgatgactcgcgagcaactccaacagcgccacgctgatgatgtgaagaaggtgatggcaacagagagtggccgccgttttgtgtggggacttctcgatcaggctggtgtgtttcgcatctcattcaccggcgaggttaacagcacaattttcaatgaaggtaaccgcaattcagggctggcgctattcaacgatgtgttgaagttctgccctgaactgtacctaaagatggccgccgaggccgagaaagacagagaggctaatcatggcaacacaacgccagaaattgatccggaatga

SEQ ID NO: 447851 - DNA, 1686 bp, Serratia marcescens
atggctgagcaggaatcccgcaagcagtttctggaaaagcagctatctcagctcgtaaccgcgcgggcgtcgtatgactcgcattggaaagagctgagcgatttcatcctgccaaactgcgggcgattcctgacaaccgacgccggccgcaacaagcgcaacaccaaggttgttgaccctaccggcgggcttgcttcgcgcactcttgaatctggcatgttgtccggcatcaccagcccgacgcgcccgtggttttctctgagcactcccgacacgcaattgatggatagctggccggtaaagatgtggctttctcaggtcgtcgaattgatgaacgacgtgatgaacaaatctaattggtatcagtcccttaccgttctctatcgctaccttggcacatttgccaccggtgcgatttccatcctggaagatgaagaggatgtgatccgcacgcacgtgctgccgatcgggagctactacatctcgaacagcgatcgcctgcaggtcgacactgtattccgcaaattctccatgacctgccgccagttggtgacgaagtttggaaaggagaacgtgagcgatgctgtggcatccgcctgggataacggttcgtttgaaacgtggttcgaagtcgtgcatgccgtattgccgaacactaaccgcgacaccggaaagctgaacgcgaagaacaagcgtttcagctcgatttattacgaaccaggcggctccggtgacaagctgctgagcgagtctggtttcgatgaaatgcctatcttggtgccgcgctgggatatcaacggcgaggatgcttacggctcatcatgccctggcattctggctctgggcggcgttaaagcgttgcagcttcagcagaagcgcaaagaccaggcgatcgacaagctggttaacccgccaatgatggcgccaagttcgatgaagaatgaacgcctgtcgttgctgcctggcgatgtttcctactacaacggcgccggcgacacggctggatttaagccggtttacgagatcaacccccgcattcaggaactgctcggcagcattcaagacgggcgccagcttgttaatgagtgctacttcgttccgctgttcaacatgttcagcaacatcaacacccgcagcatgccgatcgaagcggtcaacgagatgcgcgacgagaagatgctgcagattggcccggtgctagaccggctgaacgatgagctgctggacccggctatcgatcggattttcaacatcatgatgcgccgcggaatgttgccaccacctccggatgaactgcaggggcagccgctgcgcgtggaatacacaagcgtgatggcgcaggcgcagaagtctgttggcattggctctattgagcgctttgtcggattcatcgggaatatggctgcggcagggttccaacaggccgctgacaagcttgatgttgaccaggcgatcgatgaatacggcgacatgcttggcgtgcctacaacgatcaccaagtccgacgagcaagtgcaggcagagcgcgaacagcgcgcgcagcaacaacaggcagcgcagagcctgcagatgggcgctggcgccgctgacattgcgaagacactcagccagtcaggaactgcagatcctaacttactgaccagcatccagcaggctatgcagcaaggccaaggggcgcagcaatga

SEQ ID NO: 447852 - DNA, 1473 bp, Serratia marcescens
gtgagtgatgacgaagagttactcgagcagcagcttgttgaggatatcgccagcttcacacatgaccctcacggctacgcgctctatgcgttcccgtggggcgaggagggaaccgagctgcacgactccgccgggccgcgtcaatggcagggtgaagcatttgatgagatcggcgcccaccttcaaaacccagctacccgccatcaaccgctgctaatctgccgcgcttcaggccacggcatcggcaagtctgcctggatctctatgctggtgaagtggggcatggacacctgcgaagactgcaaggtggtggttactgccaacaccgagaaccagttacgcaccaagacctggccggagatcgccaagtggcagcgcctatctatcaccagcgactggtttaactgcactgctaccgctatctatgccaatgacccagcgcacgcgaagtcgtggcgagctgacgccgtaccgtggtcagagaacaacacggaggcattcgccggcctgcacaacaagggaaagcgcatcatcctcatttttgatgaggcatcgaatatagcagatctggtatgggaagtggcagagggtgcgctgacggataaagacacggaaatcatttgggtggcgttcggtaacccgactcgaaatagtgggcgtttccgcgagtgcttccgtaaattccgccaccgctgggattgcgagcagattgacagccgtaccgttgaaggcattaacaaagaccaaataaacaagtggattgaggactacggcgaagacagcgacttcgtgaaggtccgtgtgcgtgggatattccctgacgcctcggatgcgcagtttatcccaacaggcctaactgacgcagcgttggcgcgggtggttaccgagcgtgatgtggcgcatgcaccaacaatcatcggtgtcgaccctgcatactccggcgccgacgacgcagtgatctacatgcggcgcgggctgcatgcgaagcttctctggcgtggcaataaaaccaccgatgaccttatcatggccaaacgcattgctgacttcgaagaccagtatcacgccgatgctgtgcatatcgactttggctatggcactggcctgcactcaatcggaagcggctgggggcgttcatggacactggtaccattcggtagcgcgtcgagcgatcctcagatgctgaataagcgcggtgagatgtacaacaacgccaagacctggttaaagcttggcggcgcactggatgagcgcgagacggcagaggatttgtctgcggccgagtacaaagttaggacggatggcaagatagtgctggagccgaaggaagacattaaggagcgactcggtcgctcccctggctgcggtgatgcctttgtgctgacgttcgcttatccggtgacgaagcgccagcacgcgataccgggagagaggcgcggcggagcggtgacagactatgacccatacgcataa

SEQ ID NO: 447853 - DNA, 549 bp, Serratia marcescens
atggcgagagacggtaagattaacgcgcagatggaacgcttctgccaggaatacatcaagaacccagacaaccagactgcggccgccgccgccgccggctataagaatgcggccgtgtctgcgtcgcgcaacatggacaacccaaaggtgctagagcgtatcgcggaactgatgaagtatcgtaataagcgcaccaagataggcgctgactacgttctcaagcggctgattgaaatcgatcagatggacgtgctggacatcttaaatgatgacggcggccttaagcctatcagtgattggccaaaggtttggcgcacaacactcagcgggctggacatctcaacgacaatcacaaacttcgatgaaaccacgcttgagaacatgctcaagaagataaagtggccggataaggtgaagaacctcgagctgattggtaagcatgtcgatgtgcaggcattcaaagacagggtggacgtcaatgttaacgtaaccctggccgatcgcatggccaacgcccgccggcgtgcactggagaaaaacaccaagtga

SEQ ID NO: 447854 - DNA, 258 bp, Serratia marcescens
atgagcaagaaagcagacatttatcaggtggtctacaggggagagtggctgcagcagtttgttccaggcggatgggtgttctttcaacgtaatatcgaatatggcggtggctattggcttggcaggacatacgagaatgtcttcatgatcgagtatgagcggcctgtttcgcttaacgagggtatccagtttatccttgcgataatggcgatagaacgcaactcgccgacatttgatgatgacttcgagctggtgtga

SEQ ID NO: 447855 - DNA, 387 bp, Serratia marcescens
atggctaagagcgacgaacaacgcaaggctgatgcgcgcgaccgtaagcgcgcccagcgtcaacgcgaaagagaagcggcgagcagcgccgctgtaagcggtcggcgccggattacgtttgaagtgagcgatcacatcttcgagcagatcaaggccaactgtagtgcacggcgtcccggcaaagaaccgtacagcgttgatgaatacttcgaattgctggcggtgcaggacatcaatcaactgaagcgccagcttgcggaactggccagccataaatgccagtgcggcgaatctatgcctggacctgccggcgggtgttaccgcaacggtgaagcggcgtgcggtcagacacagatctggcgagagctgatgctcaagacgctgtag

SEQ ID NO: 447856 - DNA, 762 bp, Serratia marcescens
atggttcagagatataaccctgattacgtcatgcatgcggctcgctttgagccgtttgcccgcgaaaacgaacacggtgagttcgttaaattctccgactatgaagcactgaaggctgagcgcgatgcgctggctgtggagaaccaggcgctgaagcgcgagcgctctgaactgagtgctatcggcgagctaatccgcacccaagataaccgtataactgaccagccattttttgcagtcatgaccaagcgggaaatcgtcgcctctgaagaccacgactgcgatcgtatttgctgggttgaaaaccagagtggcaattatgtcgaagccacagagacgcagcatcggcgcctggaggctatctatcaggccaaatatgaagttagggatggctgggatagatacgccatgaaagagattgatgtgtttgtgaccggctgctttaccgagcaaggttgcaaagactacatcaataaaaatggtcacaacctcaataagccgttcatttacgcctttggaagctatcgcaacgatgaatatcagacagtacgtaaattcatcatgcagattcctgaaaccccagccactgactcagcacttgcagctatccgtgagcaagcgtgcaaggcgttgattgatgcatttgtcaggcaagtagatgcagcaggccttgatgatagtgactcggttacgatttttgaatgtcgagacactatgaaatatgcagctgaacaagtcatcaatcctcgggaggccaaatga

SEQ ID NO: 447857 - DNA, 204 bp, Serratia marcescens
atggaatcgaattggcaagacgaacgaccagcgtttatcgttggcgagataggcgaggcagtgctggagctggtgattgaaggtaaggtaatcaaccgcgacaatgtagctgactatcttgaaggtaagtgtaaatcagtgggcaacgtgattcacaaggggatcctgcgtgatgcggcagcggctgtgaggcaggggaagtaa

SEQ ID NO: 447858 - DNA, 168 bp, Serratia marcescens
atgcggctgctagcgcgggaatcgctcaatctggcacggatgcctatactgatgttgccgaagctcaaggagcaattgattcaggaaaggaaactcgtcgttatttctctgttcgctcgaccatttcaacgcaatgggttgatgaatatgagaacgtcaacggtgtag

SEQ ID NO: 447859 - DNA, 741 bp, Serratia marcescens
  misc_feature (203)..(212): n is a, c, g, or t
atgctcatgcaacgcaacccactgattcagtttgacctttgctttattgctgtcgacttcccgatcgggatcgtccagtttctgcagaagcttataggccaccttatagttggtgtaattcttcaggacatcgagaatgaaaccctcttcaatcgcctggcgcatggagtagacgtgaaatgcttccggcttattggtttttnnnnnnnnnncagtggaaccgctctgagaagagtgcgcttcatcagcaatcaccgcatacttacgctgcttaaggctgacgctgttttcaatcgccttcagcacatgcgggaaggtttggatggtaacgataataattggctgcgagttttccagcgcgctggccagcttctccgatttagaaccgtcgccttctttgttattgatacggccgaccacgccatcctgatgctcaaactggtagatggtgtcctgcaactgatcgtccagcacggtacggtccgtcaccacaatcaccgagtggaactgcttctcaccatgctcatcatgcagccgagaaagttggtgggcggtccaggcaatggagttagatttaccggagcctgcgctgtgctgaatcaggtacttattgccagtaccctcttccgccacagcaataatcagtttgttcacgacatcccactgatgataacgcgggaagatcagactctctttcttgcccttgaggccattccactcttctttctcttcgatttgtag

SEQ ID NO: 447860 - DNA, 165 bp, Serratia marcescens
atgatcgccggcggctatgagttcgagctgccgcccattccttgcaccatccgcctacgcgacgtgctggagcgcatgaccgatgctgagctagcattgcagccgggcgagatcgccgaccaggagcgtgaacgctgccggcgcaagccgtgttcaacctcatga

SEQ ID NO: 447861 - DNA, 1089 bp, Serratia marcescens
  misc_feature (521)..(530): n is a, c, g, or t
atgtatgtggataaagcgctgggcggcgtggaatgcgtccagacactctcacggctcaaccgcacttatccagggaaaaaagaatcaggaacctttgtactcgatttctataatgagccggatgacattctggcggcatttcagccttactaccaaacggcagaactgactgatgtcagcgatccgcagctagtctttgagctgttcgagaaacttcgcaccagcggcattttcctgtggaacgaagtggagcaattctgcgaagcgttcttcaccaagaacaaatccaatgctgcaataagcaatatctgcaagccggcggttgaacgctggaagcaccgttatacctcagcgattgatgcctatgtgttggctaaagagatgtttgaacgcaccaagaagaccggcgatgtggtgctgataactaatgcagaaaacagctttaagacgtgcaaacaggaaaaagacaagctggatatcttcaaaaaagatctcggtagctttgttcgtttttatgagtnnnnnnnnnngtttatgtcgcagatcgtagattacgatgacaagagccttgagaagctgagcctatttgctcggcatcttcgcccgttgctgcatgaacagcgtattgaagacgatgagattgatttaagtaatgtggatatgagccattaccgcttatcgaagcttcatgaacaacatctgaagctgcaggaagatgcggaagaataccaaatcacaccgggtaacgatattggtaccgcgaagccaaaagacaagaaagaagagtttctgtccaatattctggcgcgcctgaatgatctgtttgttacggataatcttagtgataaagacatgatcaactacgcctttaccgtgcgtgacaaactatcggaaaaccaggcggtgatgacgcagatcgctaacaatacgcgtgaacaggcgatgctgggtgatttcccgaaagcgatcgatgatgcagtgatggacagcaacgaagcccagcatgagatgatggtgcagtatctgtccaaccctgaactcgccagggggttcgcccgcgtggtgtttgatatgctcaaaggtgcttaa

SEQ ID NO: 447862 - DNA, 684 bp, Serratia marcescens
atgtttaatggtggtaatgatattctggatttctgctggcttgacagttttgctaatgccgtactcggtagtgctgaggagaatggcaaggctggaataaaaattatagatttttcagaagttccatcggatgttttgccattgattgtttctctggtcgctcgtgtcaccttttcaattcagcaatggactccatcaacgttgcgtcatccaattgctctcctatgcgatgaagcccatctatacatgccccagcgcaatatggcagattcagcggatgacatttccctagatatttttgagcgaattgcaaaagaagggcgtaaatatggggttagccttgtggtaataagccagagaccttcagaagtgaataagacaatgcttagccaatgtagcaatttcgtatccatgaggttgaccaactctgaagatcaaggggttattaagagattactaccagatagtcttgggggatttagcgatatacttcctactttagataccggtgaggctttggttgttggcgatgctagcttgcttcctagtaggattaggattgatgaaccgaaaaacaagccaaatagcggtacggttaatttttgggatgaatggcaaaagccagtcaaggagcaccgtttatcagttgcccttgaaaattggcgtaagcaaagcattcaatga

SEQ ID NO: 447863 - DNA, 1572 bp, Serratia marcescens
ttgcccggaccagcacaggttgcccgccgcgtcggtcacttccagcggcgcgctgttcagatcggtgtgataccagtaaatatctgccgagcggctgtcgcccgcctgctccagcgccgccagtgggctccacgggctggccggatcgtagctccagctgcggcggctgccgtcgtcgcgctgctcctgcagcaaccggtagccctgccacaggaaacggctcgtctgttcggttttgcccttgtagcgcaccgccttgcggctgcggcggcccagcgcgtcgtaatggtactgcgcctcgaactcgccctgcgggccgcggccgtgcgcctgcaccagccgattgtcggcgtcgtagcggtagtgctgttcgtaaaggccgttgcgccggctgatcaggttgccccaggcgtcgtaacgataaaacagtttttgccagtgcgtcagccggttatcggcgatcggcgccagcggcagatgcgcgtcgatgtcgctctgcgggctgcgctcgcccagcaggttatccgccagatcgtacaccagccgcgcgcccggtttgccctgattaggttcgcggtgttgcagcaggcggccttcggcgtcgtaaccgtagtgcacttcgccgcgcagcgcgtcgctcaccccggccagctcgccgcggccggtgtagcgataagcgcgccacagcacgccgtcttccggccgggtcagtttgtcgtggccaaaggcgctgctctgccagctgcggcggcccatggcgtcgtaacgccgctgctgctgcagcgcgccctggctgcggccggtttcccggtgcaggcgatcgcgggtgaactcgctcaccacctgctggttgaatttaatggcgctggcgtggccggagccgtaatacagccactgcaggcgatcgccctgcggcagcgtcagcgcctgcagattagccagtgcatcccactggtattgcagctcgccgttcacgccctgctcgccgagcagccgcccggcggcgtcatagcgcatctgcacgctgtccggctcgatgcccagcgccgcgccgctcgccgtcggcaggcggttcagctcgcgcagccgccccatggcgtcgaagcggtaatgccattccgcgctggcgttgccgcgccagaccagctgcccggcctcgtcgaagcggaagcgctgttcgcgctgcgtcagctcgcccgtgctgcccggcaggccaacctcgcggtgttcctccagcagcccggccgcgccgtagcgataatagtggcgggtgtcgtccgggcgctcttcggccagcacgcggcccaccgcatcgtagctgaagcggtagtcgccgccgttgccgttctccagccgcgtcagccagccctgcgggctgtagtgatagcgccgggtgcggttgatgcggtcggtgatgctgaccggcagccccagggcgttgtactgccagcgggtcaggctgcccagcgcgtcctgatgttcggccagctggccgtgcgcattccagttaaagcgctcttcgccgccgtccgggtggatcagggtgtgcaggcgcccgccgttatcccatag

SEQ ID NO: 447864 - DNA, 660 bp, Serratia marcescens
atggcgatagaacaagcggtgcaatgtgaatggattgacttactgcaaagtagcttatctagcggagcactgattccagcatctgcagttgtagcaatttgcctttttatactaagagaaattctcgagggacggcgcaagtgtagggtgaggaaaaatgagattcgtgctctgaaacggatctttgctcgcgaatgtcagctagcttggtacagagcggggcaaatcaaaaaactatctgaaatattcgcgccattcgaaaaagcacctgaggatgaatgcccatttgagcttaaggtgttcaaaactaccgctggaaaaattcgctatttgatctccaaaaatggggctgaacgcttaggtggaatgctccctgagcaatcaactactacatttgaaaaatacttatacgatacatctaaaattgattcttctttttatgaaaaagtgaatgcggcatacacagctgtcattgaaataaagcaccttcatgaatctttaattgatcatcaagactcagcagaaataataggaattcaaaatgttatgcttggtttttcgagttacgctcttgaggaaattgcctggattgaaaaagagataaaggctctctacaagacttgtactggtaaagagctaactagtggtcttctgcgataa

SEQ ID NO: 447865 - DNA, 1785 bp, Serratia marcescens
atgccgtacacgtcctttgatgaaagtcaattcattcaagctttaaaccaacgtgatgatctcgatccatttttggaaaataaaatcgcagcttttgggatggagttgtgctttgggattgatgatccgattgcaacgttgatgcctgctgtaactggtgggggcggtgatgcaaaaatagatattctttacgtcaacagagatatggggattatcgttgtctgccaagcatatcaatcgaaaaacctgcgggtaagtgctaaaggtaacaaaggtactgatttagggcatgcgatggcagtaattctttctactgatgaggctaatttacctgctggggtttctccgcatatattagatgcaagggaagcgatccgtgaaggaactattcgggctatacacgtatggtatatccacaattgtcctgagaataaaacaatccaaagtgacatggggctttgcgtcgcaggtgtcagaaatcaattagataaatatggtgaagtagcaaagaatattgcattacagtttagagaggtaggtttggaaactctagatagtttctatagatcttcctctcaggctatctctgttgcagataagtttgagtttgatgtaccccgaaagggcttcttgatgcaagatgctgcctggaagacatttataactacagttaatggggagtggcttgcagaactgtataggaattatgtaagtgaaggtctttataatcctaatgtgcgtggatttatgggggctaacaataaggattctgataaggttattaatgctggaattcaactttcggctcaatcttcaccacatgatttctttgttttcaacaacggaatcacagcgttggtccatgattttgagttagataacgacgtaaaaattaaatccatcacgggcataggcattgtaaacggagctcaaactactggttctttaggtgaattaggacatgacatagatttatctaatatagaagttggagttaggtttattaaatgtgaaagtaaagatacagttagatctataactaagtttaataatagtcaaaataaagttattcagtctgattttcgtgcgaatgacaatattcaaacacggctgagaagtgaatttaaaaaattaaaagttgctgaatatgacggaggcttacgtgggcatgtatttacaaacaagaaacataaaatcgaatcacataccgcagcgcaagcactaacggcttggcacggaagtccctatgacagttatcataataaaatgcaaatatgggagcaggatgaccattataaagttgcatttaatgagactatttcagcacagcatatattatttgtttattctttaaatgaggctgcgaaccttttgaagtctgagcttcaggaaagcagtaagcaagggcaattgaaacaagatgaagaaaacttattatcatttctgaatgaaaggggaagtgcattcatgactgttcatgctatgagcggtcttttggaaacattactcaatggaaaaatactttcgccatatcagataggatttaatacaacagtttataaggaagctgcgtgcatgctttggaaagatctgttgaaattatttgctagatacatatttatgctcaagccaggtgtagctggaagattatcaaataaaggtgaaatagcaaaggcaaaagatgattttgttcgtgctgctggaactattgctgaggttatgaaggaaatgaaaggtgttaatccttataagttttttatcagtaagatagagaataaaatataa

SEQ ID NO: 447866 - DNA, 1041 bp, Serratia marcescens
atgaaaaaattactgtctctgtggctgctgctgtgcacgacggccagcgcatcgccttatcagatcgccatacatgatgaagcgttctcccggggttcacgcacgctcgccagccgtatttattatcccacggatgccgaaggcccacgacaaagtgtcggagccaatccggtattcaccggtattgccggccaagttgacgcaccaccggccaagggcacctttccgttggtagtgttcagtcacggcagcggagggaaccatgccagccaggcctggctggcggcagcgctggttcgccatggcgtggtggtgatcgccgccaacgcacccggcagcaccaccggcgactctatcccggcgcagtccgtcaatctttggcggcaaaccgaagatatctccacgctgattgacgctatccgcgcctctcctcgctgggctgcgctcgttaaccccgatgccatcggcgttgtcggccactccaagggcggttacagcgccatcgcggccatcggcggcagagtcaggctggcagatttcatcgccggttgccggcaacggccgcagtcacccaactgccggttctatacccaggccagggttgacctgacgcaggtcgccgccgatcggttcgatgccgattataccgacccgcgcatccgctttgccgtcgccctcgatcccggcatggtgccctatctgcagccggagagtctgcgccacctaaacgccccattattgattattgaaccgaaagactatctgccagacgagaaaggcacgcgtttgggtggcgcgtcgctggcagctgacggcggtgaacagcctatccgcgcacagcgattaacccacggcaatcatttcgatttcttgcccatgtgccaacccaacggccgccacattttggcgtccgaagaaaaagacgcggaagtcctgtgcgcaaccacgcctgcccaacgggaatgggtacatcagcaaacggtggcggccatattgccgttcattcgcccctggctacccgcgcacgcagaaaatcgataa

SEQ ID NO: 447867 - DNA, 1005 bp, Serratia marcescens
atgccgctcattcccgttacctttttgttcagcctgctgtgctgcgggctgttgcttcgccttggccggcccagcgcccggcgttgggtttttcagctgttgctgctgctgtgcgcatggcaaagcctgctggtggggttgcgttacggttacgacttaacgcagttcaaccgattgcagcctattggcgccgtcatgatcccggtgctggtctggctgactttccggatgagcacacaggggcgattgcggctggctgatgtttggcatctgacgcccttgtgtctgacgttgttggccagtcggtatgcgccagtttggttggatgcgttgattattgtcgccgatgcgggttacggcgtggccttgtggtatgcactgcgtggcggtgagaatagtttgaagcaggtggcgttggcggaaagctggctctgctgccggctgtggcgtgggttagccattttattgttcaccgtcgcgatagcggagctgatcattaccctcgattttgcctggtttggcgggcgacatgctggcctgttggtgacggtcgacactttcctgcttacgttgggtgtgtacctggtcttgtcccgcacccggccggcggagcaaccggtcgaggaaacgccggagcctgttaaagccggcgtggtgaacgatgacctgatccaccactggtttgttcaggtgcaacagcgattgctgaaagacgatctttatttgcaaccggagctgaatttggcgctgttggcgcgcaaaagcggattaccggcacgccgggtgtcgcaggccatcaatcagtatgccgggatgaatgtctcgcaatacgtgaaccaattgcgtatccgtgaggcggcgcgaaggctgcttgtcggcgaccgcccgataaccgaaatcatgcatgagtcgggatttaccaccaaatcgaattttaatcgcgaattcttgcgcgtatacggtgccaaccccagcgaatggcgcaggcagcaaacgcttagttaa

SEQ ID NO: 447868 - DNA, 2805 bp, Serratia marcescens
atgccaatggagagctgtacgcaaatgaacgccgtagaaattgaacaagctatcacggatcttgcagagcaaccctttgatcccatagattttccttatgctttccttgaagccttcggtaacaaggaaacgactatcaaacgcttacgcgctggggcgtcgaacaagtccgatttgggcggcgttcttcagaccaataacattcacattttggctagtgaagaagggcaagtaacacaaatgctggcttcactcaaagccagcccggcaacaggcaaggccaaggccaaattcatcctcgccacagacggaaaagacttcgaagctgaagatctcatcagcggtcagactgtcgcttgcgcctttaaagactttccagaccacttcggtttctttctgcctctggcgggtatcagcactgttcgccagatcagcgaaaacgctttcgacataagggctaccagccgcctgaaccgcctttacgttgaactgctgaaagacaaccctctgtggggggctgcgggacgtcgtcacgacatgaacaaattcatggcgcggttaattttctgcttcttcgctgaagataccgagatctttatcggtaaggggtccttcaccgacaccattgcacagatgagtgagcgcgacgcttctaatacgcacgatgttatcgctacgctgttttgcgctatgaacaccccgagcaatgagcgcgcagccgcaggtattccgcgctgggctatagagtttccttacgttaacggtgctttgttctcggggagtgatgaggttccgcgttttagccgtattgcacgttcctatctactgcatgttggcaatctggattggaccagaatcaaccctgacatctttggctcgatgattcaggccatttccgaagatgaagagcgcggtgagttgggcatgcattacaccagtgtccccaatattctcaaagtgcttaacccactgttccttgatgaactgcgagctaaacttgaggaagctggtgacaatccgcgcatgctgctcaatctgcgcaagcgcatggcccgcattcgcatattcgatcctgcgtgcggctcgggcaacttcctggtcatcgcgtataaggaaatgcgcgcgatcgagtcggagataaacaaacggcgcagtgaaacagatcgtgcatccgatatcccgcttaccaactttcgcgggatcgaattgcgcgacttccctgcggagattgcgcggcttgcactcgtcatcgccgaatatcagtgcgatgttctgtaccgaggccagagactggccttggccgagtttctacctttgcgtgacgaaaactggattacttgtggcaatgcgctgcggctcgattggttgagcatttgcccgccaactggaaccagcgtgaagatgcaatccgatgatttgttaagttttcctctcgatcaatctgagatcgactttgagaacgaaggtggcgaaacatatatatgtggaaatccgccttataaaggtagcaagtaccagactagtgaacagaaacgcgatcttgaacaggttttcagtaacacatccgcgagctggaaatctcttgactatgtcaccggatggctaattaaggcaaaacaatacgcgcaatacagcaaagccactttcgcctttgtgacaactaattcgatttgccaaggtatacaggtccctgagctgtggccgagccttctcgatcaagaatttcgaattacattcgcttatacctctttcaagtggagcaatctcgccagcaacaaagccggagtaactgtcgtaatcattggagtgtccaacaattactcgggtatgtcgaaactattctcaagtgatcaagctggcgaaaatcttattcgagaggtcgaaaatataaatgcctatttggtacctggctcgaatatctttgtgcaaaaaaagcctaaaagaactgacggcttatcaaatatggactttggcaataaggccgtggatggcggacatttgtacgttgatcgagacgacctaggaaaagtcgaagtagagcacaagcgcggatgggttagaaaaatttttggggcaactgaactgatcaaaggaattccccggttttgtctttggattccggatgatgctgtcggcgaagcagtaagaaatccattcatctcttcacgcctagagctagttagggaaatgaggtcagcgagcaagaaactcccgacgcaacgtggtgcggatgagcctcacaagtttgaagagcggcgccaacgtggagatgagcagataattgccctgcctcgtatcacatccgaaaaccgtgactatttgcccgttagtgttttggatgcaggtgtgataattagcagccaattgtttgccttctacaatacggacatttttcacctttcactactagtttcacggcttcattctgtgtggatggcaaccgtttgtgcgcgaatgagaaccgacttctcatactccaacaccctcggctggaacaccttccccgtaccaatgctaactgaaaagaataagtccgatcttacacgttgtgctgaggatatcctgttggcgcgggagcaccacttcccagcgaccatcgccgacctctacgatcccgagaatatgccagctgacctgcgcgctgcgcatgaccgcaacgacgaagttttggagcggatctacattggtcgccgcttcaagaacgacaccgaacggctggaaaagctgtttgacctctataccaagatgactgcttcggttgaaccggccaagggtaagaagcacaaagcgagagctaacatatga

SEQ ID NO: 447869 - DNA, 1563 bp, Serratia marcescens
atgtcggtaataaaaaaaatcgtgatcaagaattttaaaagtatcgccgacctgactcttgagttcgacgcaggcaagaacgtattgattggtgacaacgaaacgggtaagagcagcgtgctattggcattagatctggcacttagcgcaagccgcagtcgagttgaaaacataggctatgaagccctgctgaatcagggggcggtgcagaatttcttggcagggccagcaagactggatttgcttccagaagtcatcgtggacgtttttctggaagagggagacgaccaaggtttttacggtacccaaaacgttcttggaatacagacagatggtctgcgcatggcgattgtccccttgatcgaagagttcggccagacaattgtcgatctgcttaaagcaaacaaggacagctttccttttgagtattacagtgtcaagttctcaacgttcgccggggcgcctcacgtcagctaccggcgtccggtcaaacacctgatgatcgacagttctcgtatcgacagtgaatatgccgctcgtgaatacacccgagcgctgttcggattccatgtaaatgtgccggatcgctaccgcctcgaaaatcgctatcggcaaggtaaagaagttttcagtcgagacagtctgaaggaattgaacaatgcgctcggtgattatcagttttccttgcgaacaagttctcgcgccaaccttgaaaccgacttggtgatcactaaagacggcatccctatagagaatcgtggcaaaggtgaacagtgctttatcaagaccaatttcgccctgaagaaatatgaggaaaaagggagcttgaacgcgctcctactggaggagccagaaaaccatctaagccaaacgaatatgaaacgcttggttgaaagactggctgatacgacgggcactcagctgttcattacgacgcacagtagccatatctgtgctcggctcgatctacgccacgcgttactgcttggagcagggggggcgggacgcttgaaatacctgtcggagcccaccgcaaacttctttatgaaagcgcccgataacaatgttcttgagcttgccctctccaagagagtcatattggtcgagggggatgcagaatttatcctcatggagcacttctacaagcagttggcaggccatcctcctcaggttgataatgtgcacatcatctcgatcggtggtacgagcttcaaacgctacctggagctcggaaagctcctgagtatcaggatcgccgcaattcgggataacgacagcgattaccaacagaactgtgtaacgaactacgaaggttacctgtacgaatcggcccagatctttgccgatacaaatcctgaccgaagcacctttgaaataggtctctacagagacaatcagcatctatgcgacgaccttttcgctgcaggtcgaaaaagactgaccgttcaagagtacatgttaaaaaataaagcggatgccgctttcgagttgctaactaagaagtccgctgagctgatcgtcccgaaatatatacaggatgcgattgggtggataagagcgtaa

SEQ ID NO: 447870 - DNA, 1032 bp, Serratia marcescens
gtggataagagcgtaattttttccgtcgcaggatctggaaaaaccagtctgatcattgaaaggctcagctttgatcagcgggcattgatcgtcacttacacggagaacaatcaccggcacctgcgcaacaggatcatccggaagttcgggatgatcccacccaacattacactcactacgtacttctcattcctgcatggattctgttataggcctttgatgcaattgaagctagggaccagaggcataaatttcaggcgtccgcccaatagacatttccgcttagacgatttcaatcggtatcgcgatggcagcgggaggctctatcactgccgcctcgccaaactgctacaggtcttaggggttataccggatgtgcgtgctcgcctggagcgcttttacgaccacctctacgttgacgaggtacaggattttgcgggccacgacttcaacctgctgctggagatttcacaagcgaatattggtgtaacgttcgtcggtgacttccaccaacatacctttgataccagtagagacggtacgataaacaacaacctccacgacgatgttgtccgttacgagaaacgctttcgtgatgtcggcatcacggtagacaaggaaaccttgagctgtagctggcgatgcacaaaaatggtctgcgacttcattagtgcaaagttacaaatccctatgggtgctcatgagcaaagggtcagccggattattacggttgatgaccaagagcaagcgagcttgttgcacgctgatcccaccattgtgaagctgtttttgagcgaacactacaagtacggctgctactcagagaactggggagcgagcaagggcatggatcactttaatgatgtttgcgttgtgatgggaccgggtatctggaaagactatttggcagaaaggctacaccaagcaaatccgcaaacgcgcaacaagttgtacgttgcctgcactagagcgcgtggtgacctgtatttcatgcccgagaagctattgaaagcatttaaacagaggaaatag

SEQ ID NO: 447871 - DNA, 828 bp, Serratia marcescens
gtgaatgatttatcgaccaaacaaaaaaaactcatatataaactcagcgcaattttaattggttcgattttatttttttctgccttttattggctggcaggaaactttgaaggacatggcgtaactaagaacaataaatctgctgatatttatgagttggtttattttagcgtggtttctattacgacgcttggttatggtgattttacaccgaccggtatatctaggctctttgcctctctcgaagcaatatttggcattgtgttcataggttattcaatttcacaagttttgtccctgcgccagtccacgctagtagaatactccgttaattatggcatccatgaggcatataatcaatgcattgaatatcttatcgacgccaaagaatccataggagacaaaaggagggaaattcaaaatggcattatccctcaaactatctctttcatatacaacagatccaaccctttttattcatctacaaaagcgttgcggattacaaatggatactcctctcaccttgttaatataggaaaaattgaagaactcgttaagcatgtggaacgcgcagcacatcatgttgaagagcttgcgggatttacgagaaaatatcttaacttgctacaaaataaaagcatagactggaagcaggatagaaccattttaattcttctaacactgtgtgatcagatcgattatttcgtagatcagtttatcgaaaaaaccagctatgcgattaaaccatataagggtggcggcatgtatagggatgtagttaaatccataacgaatgacattcggaaaaagtgtaaaaatcttaaatag

SEQ ID NO: 447872 - DNA, 384 bp, Serratia marcescens
atgcaccaatttatagagttggccaggatcagtgcgccggtcgagccggatgagccccttagagaggcatccttggatggaacgcaacatgatggtgtcgcggcagatgccaagcttcgggagatcaaagagcgatttgaagaagccctgtcgttgttgatggtcctcgctttcccggtgcacagcggaaccgaacaagtcgtacgcgatgaactcaatcaggcactggggcacgagcagcagatcgactccctaaagatgcgcgtcgggaaccgaaaactcagcttacgaagtaagttgggacgacgcccgacgaaaaagcaagtcgcactgcgaaatgcattgctcgaatttctcccccgacagaccctggaggaactatga

SEQ ID NO: 447873 - DNA, 756 bp, Serratia marcescens
atgagtactacaactgccgcaacgtcaggcaccaagaaaaagacgaagcagccagcgccgccggacctagttaaagctgtaggtgcgctctttgatattgcggcaaaggcgtcgtcgccccttcaattgcaagcaatgacccgagacaagttatacgaaatgctggtcctgtctcgaattctgagagcctttcggcgtgcgcatcccaaaggttcaatcattcaccagccgccgtctaagggaggtaaaccgtcggaggtgatcgtggcaagcaagcccgccctggccgatcgcaagcggttctcgcactttgagctgctcgatgccgctggcaccaacttgggcgaagcatggacctcggtcgaatttgaatcattgagttgggatcgttgcggtggggcacccggtaaggcccctcgcgaagcacggcacgaactcgacgtttgtgttctagagccaaaatcaggtgaacgcccagcacattttcaggtctatgcaggaatcagttgcaaggacgttcgtatgtcatcaaaagagaatgtgcgagaagcgttggggttacgtcgagagactgcgctgcttcggaattcagtcccaagccacaccccatggctggtgcagtcggtccccgcaactccttgttcaccaatctttctggtgagctccgacttagggatcaggaaatacgcttcacctgttgacgaaatgggtgtttacattagattcgtgcgtcggccctgggcagcagaatcgtga

SEQ ID NO: 447874 - DNA, 216 bp, Serratia marcescens
atgattgaggccgtgatcgggttaatgccagagtattgctctcaacttcaaataacttccgtgtacatgtttttggcaacgcaggaaacccattcttttggacttggcaatctatctctgtttgtatatataccgaacattgccattgttaattgccttttattggtttattcagtggttttagcagagaaaccagattactttactaccatctaa

SEQ ID NO: 447875 - DNA, 1494 bp, Serratia marcescens
atgcagaaaaccagatatgcgccaccgaaagccaatgcaatgatggaggccctaagagggcttggttattcaactgcagcagccttggctgatgttgtagacaacgctgtatctgcaggtgcttccaaagtctatctgcgatttgaatgggatggaacgcaaagccgtatttcaatactagatgatggtcatggtatgactgatgccgagcttgaagctgcgatgacccttggggcgataaatccgttgaatgaaagggctgcgactgatctcggacgtttcggtatgggtctgaagacagcctcgttctcacaatgtcgtaggctcaccgttgcctccaagcgagaaagtggagatctggtttgtttacgctgggacttggacgctatcgctacagatccactggttgattggcgtatattcgaggggccagctattggttccgagcggttcattgaaccgctaaatgacttgagttctgggacgcttgttctttgggaactaatggatagagttgtcacgcttgactcggacttggatcacttttctgacttaatcgataatgtggagtcccgtttatcgatgaccttccatcggcttattgaggggcctcgcccagatttccgtctgttcatcaatggtaaaccggtgatcgcttgggatccgttcatgattggtcaccctgcgaaagccttagaatctcccgtggagcgtaggatcactcagtcaggagttttagaggtccaatgccatgttctcccgcacaaagataaattatcgagcgaggatcttttcaaggctggcggccccgacggctggatatctcagcaggggttctatgtctatcgtaacaaaaggctccttctggccggtagctggctagggcttgggagaggacgatcatggagcagagatgaatcgcaccggcttgcaagaattcgggttgatataccgaataccgccgacgcagattggaagatcgatgttaagaagtccactgcccgaccgcctgtctttgtccgtaattggttgactgggctagcagagaataccagggacaaagctcgtaaggtgttcgctttccgaggatcgccgacttcaaggttgagcagtgctcctatcgagcagacttggcgggttgaacatctgaagagcggcgttcgataccgcatagatgagacgcacccagctgtcgcagcagttattgaggtttgctcagaccgaaagcatcttgttaaagcgatgctccgggttattgaggagactgttcctgtccaacggatatggctcgatactgccgagaacaaggacactcctagaacagggtttgatggggagccgaacgaagctgttatagaggtagcgcgggtccttttcaatgatttgattgagcgtaagggactgagtgttgaggaagcccgtaagtcaatgctcaagactgagcccttccaaaaatatccctcattaattgcaaatttacagagagatgaatga

SEQ ID NO: 447876 - DNA, 2901 bp, Serratia marcescens
atgatggaagaagttggcttgcaagccgaactgctagaaaacgttatcgccacagctcaacggttagtaaaggcagagaaagataaatctaagataaccccggcgttcattgctgagaaggtaagttttgctgcgaaagtgtttgctgatgattcacctcactcggtggatcaaaatcaggctaccaccatactgattcaacgtttcagtcaccgaatcggtaagccaaccacgttgaagaacgatatagaccatgtcgattggctttccgcggcgaggaaacgtgattggcgctattggcgtcgatatgcagactacttggaatccaagctttccgacgctgtagtcgaggggcttaacgagaccactgatgacatcctcagtctccttgaggatccagaaagatcagactcatgggatcgtaggggtcttgttgtcgggcatgtgcaatcaggcaagaccagtaactactcaggactaatttgtaaggcagctgatgctggctacaagattatcatcgtccttgcaggtatgcacaataacttgcgatcacaaactcagatgcggctagaagagagctttcttggctatgagacgaccactgatcgtgatgtcggtataccaataggtgttgccgagtacggtgatgatctgaagaccaattctgcaacaacgcgggctgaaaacggtgattttagtaaggcgattgcgaagcgatttcacggtatatccccagaggagaggccatggcttttcgttgtaaagaagcaaaagaccgttctcacagctttgttagactggattcaaaaacgagtagcggatagtaccgattcaattgatggtcgcaagcttgtgactaagcttccgcttctaatgatcgacgacgaggctgataacgcatcagttgatacaggagagcagatatttaaggatgatggtacacctgacgaagagcatcaccctaaaaccattaacagtcttattcgtcagatccttcataccttcactaggaaggcgtatgtcggctatactgcaacaccttttgccaacatttttatccaccacaaaggtgcaacagctaaggaaggtcctgatctttttcctcgctctttcatcataaatttagccgctccatccaattacgtcggtcctacgcagatgttcgggaagatgacgaaggatggccgtacgaaggggctacctctagctagaaatattcttgatcactatgatcccgagtcagagtctggatggatgccaccaaagcacaagaagactcatttccctaattacaaaggcgaagatgagatacctccatcgttgaaggaagctatctacacgtttattttgtcatgtgcagcacgtcaattgcgggggcaaggtggccaacatagctccatgttgattcatgtgacccgtttcgttgatgttcaaaaacttgtgcgcgaacaggttgataagacagtgcgtcgtatgcggcagcgtattacccgaggaatagggactgaggagattctcggacagttacaccaaatttgggttgatgactttcttcctgttcgagataaagtcgcaacgctcctcccaaaagaggagtgccctccgaaaatgccgatttggaatgatattctcgctgttttacctgaggtgctggaggatattgaggttcgttccattaatggtactgccaaggatgctctcgattatgcaacaccaggtgcggctctgaaagtaattgcaatagggggtgacaagcttgctcgcggactgacgttagaagggttatgtgtaagctactttgtgcgcacaacgaagatgtatgacacgttaatgcaaatggggcgctggttcggctatcgccctagttatctggatttgtgtagactatacacatctcctgacttggtgagatggtttgggcatattgctgatgcctcggaggagctccgtgatgaatttgatttcatggcagaggcaaatctcactcctgagcagtatgggcttaaagtgatgtcacatgaagttatgacggtaacttctcctttgaagatgcgtaatgcgcagactctttcatttacttacagtggagcgcggtcacagactatcctttttcatcgcgataaaaaaattcagcagcaaaatctcgatgctacagatgcattggtgatgtcacttggctcttcttggagagaatcaccgaaatatgaacgtgaaggaacccctgattcgtggcctgatgcacgtctttggaaggatgtagacgtttccaacgttcttgattttctcaacacctattcaacgtatcctgcgccccgtgcgaatgcggctgtactgtccgaatttatctcaaaaatggttgggatagggcaattaaccaaatggagtgttgctctattaggaggcggccttggtgatggggatagccatacattccctggaggaaggccctcaaaaactttcttcatacgtaaaacagaagatctgggaatgcttgaccaacaggagcctaagagttttgctattggagtgcttactgatccgaaagatgaaggtatcgatcttaacgacgacatttggcataaagctttggctttaactcgtgcggcttggaaagaagattctgctcgcggtcgcgacaaaccaccggcttttccaagcgggaaaggcatccgtgagattcgtggaaagctcggtggtgagactgacagaggattactgctgctttacccactttccccctattcgtacaaaggtaaacagcaggaaaggttgattgttcctggatggaaaaaaccaattatggcctttgctatcgcttttcccgctagcgacaaaactattgaggtggagtacaaagctaaccttctttattggatgcaagaatatggcccgtcagagtga

SEQ ID NO: 447877 - DNA, 1014 bp, Serratia marcescens
atggcccgtcagagtgaagagttcgttttagcttggctgtcactctccagtaagagtgaagtttccggctggcaggttatctcactaccgtgttctggacctgttgggattcaggctggtcggcgtttaccggataacgccgaggcagttttgttttctttccccatagcgcgtttggcacgtgccgagaagttgcccgggggtaagggatttttggtggagaaagcggaggctgtggggactaatgacctcatattggcactgactcgacaggaggaagggaatctcgagttgttcacttcgatggtctgcgacgttgttggtgcaatagatgagggcgctgcagagggtgttgcagagcctggcctcttacgaatcttggtcaggcgtgtgcttgcttggcagcagtttatgtctcgtggttcgagtcccttgggtcctgaagcagaattaggccttgtgggagagctctattttatgggcgttcttcttgattcacagttgccgcccatggaggttctgagtgcatgggtcggtcccgatgatgcacctcaggacttccttctaggtgatggggcaatcgaagtgaaagcgaccatgtcttcctctggctttcctgtgagaataagttcactggaacaattagatgatgcagtggcttctccgctgtttttggcggctgtcaggttcgtcaggctggaggaagggtttaccttgccagagataattgccgagattaggcagcgtcttaaagaagagcccacagcggtcaacttcttctgtgagcggctcatgcttgtcggatactccgaggcccatgagagcaactacactcgaagatttaaaccaaaagagaaactttatttctctatatccgaaggttttcctcgtttaactcttggatccgttcctatcggagtgacgcgatcgctatacgaaataaacttggaccatgccgaggacttccttactgagcttgatgtggttctcaaaaaactaggagttagtggatga

SEQ ID NO: 447878 - DNA, 1785 bp, Serratia marcescens
atgacccttgatgattttctgtctgaaaccagggctgaaatagcggctcaaatgagcgatgtttcttccttcacggaattgatcttttgtgaggtggtgatgcaacacctcatggaagccggaatgacttttgagcccgtcgtttgtcattttcaagggaaagtcggcaatgcgaatctgagactgagtggttacaccatttctgaagatcttgaccaacttgacctgtttgtcagtctctacgagggatttgaggttctaacgtctatccaagatcaagataccaagatggccgctcagcattgtgttcgctttcttgaactttgtgcaacgggccgtcttctgaacaaactcgacccatcaagcgatgtctactcgctcgcccttattatcagtgagatatatgatagcttggagcaagtacgtgtattcgtgctcactgatggggttgccaagtccaagaattttaaaccccgtgacgtcggaggaaagacagttaggctcgaggttatggacatagagcgactctttcgacatcgttctgagggcaagccacgtgacgagcttgttatcgacttcaaagatgtttcaggctccccactcccatgtgtttacatacctggagatacaggcgattacgattacgcactgaccgccatcccaggcgaggctttgcgctttatatacgagaagtttggtcctaggctcttggaagccaacgtacggtcttttcttagcgtcaaggctagaggcgtgaatgcaggtatccaaagcaccttgcgctcagcaccagagcggtttatggctttcaacaatggcatcgtccttgtcgcagacgagatgaagctcgaacgggctaatgacggctctccaggaatcatttggttacgtggaatgcagatagtgaacggtggccaaactactgcctccatctatttcgccaagaagaaatacccggataccgacttaagccaagtcagggtccctgcaaagatcattgtcatgaaggagtcggaccctacaaaagaagaatctttagtatccgatatctcacaatatgctaactcccaaaattcagtgcggcagtcggacctctcggctaataagcctttccatgttgaggtagagaggcagtcactggcaatttattgtccagatggcgttgggcgttggttttatgagcgagcggcaggaagctacaacacacttctcattcgtgagggaacaaccccagcccggcttcgtgcactgaaagattctgtgccaacatcgcgtaagatcaccaagacagagttggcgaaatattttatggcttgggatgttagaccggagatagttagtcttggaacacagaagtgttttgagcgctttatgacgatgctcaacgaggctgaagcgactgggaatcctatcgtatcggattcactttttttcaaagcgttagttgccaaagccattgtgttcaagatggttcacaaaacggcccgcccgcaagtttccgctttccttgcaaatgttgctgcttacaccgtggcagttgtggccgattactatcgcgacacctttgatttggagaaagtttggcttcgacagaacgtttccccgcaactcatagagcaagtcaaggtttggtctcttgaggtgaataatcgtcttcaccagactgctaacggaaagatgatatctgaatgggctaaacgacccgaatgcagagaggaaatgtttgctcgtcctttctcctcaccgttagtagatattcctgaattgcgtcgatctgaatcatga

SEQ ID NO: 447879 - DNA, 1572 bp, Serratia marcescens
atgagtagcattttgttgccgattcctgtagtagacctttttgccggccctggaggattaggggaaggtttttcatcatttgaaaatggtaacgcttttcaaattgctgtttctgctgaaaaagatcctatcgcccatcaaacccttcgcctcagagcgttctatcgattgttgactaacaatagaccagataatcttgatgactattatcgcttttgtaatggtgaagtagacacaccattcagtggtgaaacagaagatctctgggagcttgctggtaaagaagcaatgtgcattgaaatcggtagcccgaaaggaaatgcagctcttgatgatgccattctggaaatgctgtcaaaacatgacgacaaccaaccgtgggttttgataggcggccctccatgtcaagcttactcactagtaggtagagctcgaaacaaagggaaggccgattacaagcccgaagaagatcatcgtcattttctctatcgtgagtatctacgaatcattcaacgctatcagcctgatatttttgtgatggaaaatgtgaaggggattctttcttcaaaaattaacggcgaaaaaatattcaatcaaattttaaaggatctaaccaacccaagtgctgcactccaatcatcctcaaatgagcagtgctataggatcgtttcgttggtaagcgagcaggaattttgtgatggtgatgatccaaacttactcgatgcgacaaaatacatcatccaagctgaagagtatggtgtacctcaagctcgccatagagtgattttgttagggatacgtgaagatcgctacaaagaaaatctaccgaaattattggctcaagctccagtaagcgttaaagaggcgattggaaatctcccgcctttaagaagccttttgagtagacaagaagatactagcgaacaatggaaaaatcaggttcgctggcaattacaccagcttgccaaacacgcagccaaatttccaggacacgaaagaactttatcaagccgattggaaaaagcttcgcatgacattggatcttttacaaacactggcagtgtacgtatgcctaaaaatgcctattctggtaaaacgggccatgactacctagataaatggttttttgatcaacgaattaaagtgtggttaaaccatgaagctcgtggccatcgtatagacgatctggcacgctatggctatgcagcatgctttgcatcaattcataagcgttctcctaaagggcacaaagaatttaacttgccaggtttggctcccgcgcacaaaaactggaaaacaggtaaattttcagaccgatttagagtacagattgagaatagcccttcaacaacaatcacgagtcacatatcgaaagatggccactatttcatacattacgacctattacagtgtagaagcttaacagtaagagaagccgctagattacaaactttccctgacaactattttttccaaggagggagaactcagcaatatcaccaagtcgggaatgccgttcctccatttttggcaaaccaaattgcaggaattgtagccaagatcttgtcataa

SEQ ID NO: 447880 - DNA, 222 bp, Serratia marcescens
atgaacccttatttgtaccttctcacaatgcagaccttcgttttttggttcctgcttctgggtatgggcaacgtccctgatcccagaacgtggtttaaagacaagggcaaaaacttcatttcagcgttgccattcatcttcacctcagtggtgttggtggtgtgcttatatcatgttttttcaagatatttttcaggaattggggggcttcactatgagtaa

SEQ ID NO: 447881 - DNA, 2604 bp, Serratia marcescens
atggagccaaatgaaactaaatactttgccaatcccggactagacggcaagtttaaccccgactatcagtttaactgggccgatttcaataacgaacccatgaaccactggaaagacattgcctctaccctgctttctatccctatggcgcatcagttgatcggattttataccgtcgccgacgataccgacggcgtgcttaaggtaatgcgcagttatcagtattacgccgctaatgcgatatctgacaaagtggccaaaaccaactggcagcaactgggtagcgcggccaataatcccgatcgcctcgggggatatgtgtggcataccacgggttcgggtaaaaccatgaccagctttaaatcggcgcagttgatcgctcaatccaaagatgccgataaagtaattttcttaatggacaggattgaactgggcacccagtcgctcatggaataccgcaattttgctggcgatggcgaggacgttcaagccaccgaaaatactcacatactcattaccaaactaaaaagcaccgccccagccaataccttaattgttagctccattcaaaaaatgagtaatatttttgaagcggaagatggtgaaggcgtgaccacaaacaccgcggatattgaaaaaatccgcgctaaacgcttggtgtttattgtcgatgaggcgcaccgctccacctttggcgatatgctgattacgattaaacgtacctttccgcgcgccttgttttttggctttactgggacaccgattcaagaagaaaacgaaaaaaacggcaataccaccagtaccgtatttggcaacgagctacaccgctatagcattgccgatggcatacgcgatggtaatgtactcggttttgacccttacaaagtacctacatttagagacagtgacctaaggcaagcggtggcgttagagcaagccaaggccggttcagtgaacgaggccatggataatcctgtcaaaaagaaaaaatttaaccactttatgaatgatgtacctatggctggccatagagatgctacaggaaaataccacaaaggcattgaagactatgtgcctaaaagccaatatttaagcgatactcaccaaactaaggtggtggaagatattctgcataaatgggacgtgctcagtcaagggactaaatttcatgccattttggccactaacagcattgccgaagccattgactattaccgccgtttaaaagccgccaaacctgaacttaaagtatcggctttgtttgacccaaatattgataacgacggcagtggtgaccgtggccccacctttaaaggcgatggcctagacgaaataatgaccgactataacgcgcgttatggtcaagattttgactttgcccgccatgcggcgtttaaaaaagatttagcggcacgccttgcccataaaaagccctatgagtgcattcataccgagccttcaaagcaattagatttactgattgttgtagatcaaatgctcactggctttgactctaaatggcttaacaccttgtatttagataaggtaattaaataccaaaatattattcaagcgttctcacgcaccaaccgcttgtttggtccggacaaaccccacggcatcatccgttattaccgttatccacacaccatggagaaaaatatcaatgatgcggtaaaactctattccggcgacagacctatcggcttgtttgtagataggttagaaagcaaccttaacgccatgaatgaattagtgttagagattaccgggctgtttgtcagtgcgggtattgagaactttgaaaaactgccagaagatatagaaacctgtgcccaattcgccaaattatttaacaactttagccaccacctagaagcggctaaagtacaaggtttgcattgggagcagtcgatctattcatttactgaaaatgatgtagaacatgaggtaacgctgtccatagacgaacaaacttatctgagcctggttctgcgttacaaagagttggttgccaaaggtgatggtactggcgtaggtggcagcgatgtgccttttgatatcagtggctatttaaccgagatagataccggaaaaatcgatgccgactacatgaatagccgctttgataaatacttaaaagagctgaacaaacatcaaggctctgcgaacattgaaatcacattaaatgagctgcacaagtcgtttgcatcactcacccaaagcgagcaaaagtacgccaagctcttcttacacgacttgcagcgcggtgatgcgcaattaattgaaggctatacttttagagactatatcaacgcctacaaagacaacgctgaaaatgcacaattaaacgctgttgttgatgctcttggtttagataaaaaactactcatagcattaatgactgatagtgttaatgataagaatctcaacgactttggtcgtttcgacgcattaaaagaatcggtagataaaacgaaagccaaggcctactttgaaaaacaagacggcataaccatacctctatttaagctgcatattcgcattgatcagtttttaaagcagtttatttttgcacaaatggatgatttcttaagtgactaa

SEQ ID NO: 447882 - DNA, 1239 bp, Serratia marcescens
atgagtgtggataacaaggtgccagagatccgctttaaaggatttagtgagaagtggcaggagagagagttttcaaacatcgctaccagagtatcaacacatcatcaaagtacatgtctaccttgtgttgaatacgaagatatagtcgcagggaaaggcagattcaataaagatattcatcagaaaaaatcctttaaaaccggcttaaaatttgaagctgatgatgttttatttggaaaattgcgcccctatctgaaaaactggtttttagctgactttgaagggctcgcagttggagatttttgggtgttacgtgccgacaatgttgcaagtacgtttttattttctttaattcaaaccaatgaatttgaattggtttcaaacctttcagcaggctcgaaaatgcctcgttctgattggggacttgtatcttcctcttgcttttttgttcctaagaatatttatgaaagcaatgaaataggccactacttccaaaagctcgacacgttaataaaccaacaccaacaaaaacatgacaagctaagcagcattaaaaaagctatgctggaaaagatgttccccaaacaaggtgaaaccattccagaaattcgctttaaagggtttagtggggagtgggataagaaaccatttggagcttgctttgttaacgtgccgaacaatactctttcaagagctgatttaaactacaaaactggattggcgaaaaacattcactatggcgatgtactaattaagtttggtgaagttcttgatgcacgcaatgagttgttaccatttattacgaacgatagcatagccaataaactaaataattccggtttacgagatggtgacattatcattgctgatgctgccgaagataacactgtgggaaaatgcacagagttattcaatataggggatcagttgattctttctggattgcacacgattgccgttaggcctattttcccttttgcctccaagtatcttggttaccatttaaattcatcttcataccatgaccagcttttatcattgatgcaaggcacaaaagttttatcaatatcaaaggccgcaataaaggatacgaacattgcgtttccaaagagcttggaagaacaagccgcaatcggtacctactttcaaaatctcgatagcctaatcaagcaaaaccagcaacaaatcaccaaacttaataacatcaagcaggcctgcttaagtaaaatgtttgtctaa

SEQ ID NO: 447883 - DNA, 258 bp, Serratia marcescens
atgaaaaaaaataaaacatatgagctttttaccctaatttatcgctgcttttttgtgttttttgtaatttgttttatggcaagtgttttgggcgcgttgctggtttattttaaaatcggttattttgaattaaactggaaagaaactatcctgctctcgcttcaaaaagggggaattgtcggctcagctcttggtctggggctatggataaaagcgaagatacaagaacgtaagggcagtaaaaagccgaataagtaa

SEQ ID NO: 447884 - DNA, 402 bp, Serratia marcescens
atgaacgaaacaagacagcaccacgcctatcagcgtggagtacgcatggcaagcctatggaaacgtcttaaaggtacgattttgaaatgggactcgttctggctgacaaaggctcgtaaatacaaactacctgcctggttaggccatatgcctgtcgccgtcgcattactgggttcactcatcattatgttggtaggtggcgcgatcattacgggcgctctgcttttcatctgggcgatcgcgttcattcttcaacaagtcgatcaaacagactctcatgagaatgacgccaactattttgattcacacaccgacaatgacgctttggcagaatacagagatggcgatcaaggttatggattatattgcggatcttaccgaatagatctcgatgatgattga

SEQ ID NO: 447885 - DNA, 1068 bp, Serratia marcescens
atgaaagtaccttcatcctttcgtttccctgagcgattaatgaatagtttaaaggctcgtgcagagtcacgaaataaatcgctgactgaacatgttcagactgtcctggaagcaagcttggacaacgaagactttgagaagaaacattactttgagcttatggagaatccagataaaagcatttccgacatttacataaaactcttcagtacaataaacactcagacaacgcgcttaagcctgtctgagctaaagttcattatacaccactgccatcaggcctatctctttcacagccatgctgttagcaatgattatatcaaggtaattattgacatatcattagagctggttactgtttcagtacgtgaaaatatcacctttgataaacattatgtctaccgctgttttgatctatcagatgaaaacctggatgaaactatcagcagtatgaaatcagttattaataaatgcatcgatggcacctacgccgaatatttaacccgccctttggaaagtggagcatttaactttgcgcagtacccaaaagaaactatagatttaatatttaccaaagcaaggttgcaaaaactattccctcttgttacacgcggaatcattcaaaaaaacaaagataaatggagaataaaagaacttactcaaaacatcccttcgtatagagtggatttttgcgtcgatgatttaaatttttctatagtttgccatggcagcgaactaagatatgatgaccctgcatccgttttctttgttatcgaaggaaagcactttatcaagccatattcattaaagcccctacttgcgatcattcgcttagtaaatcgggacgaactagacgatttttccagaacgtataatgactctgataaagtaactatctggccaccacactccactgataataacggaacgatagacatagattcactcagattaatatacacatcagagctctacaatgaatttaaagataagttcctgaaggctatcggggacgaaaaaatgtcagttatacttaacgcaatgaagataatgcatggggatatttga

SEQ ID NO: 447886 - DNA, 810 bp, Serratia marcescens
atgaactcatttgtaaccacacgaactaagaaagtatttgaaaatattaaaatcagtaagtacatagtccaagaccctttgctatctgactgcattggtatgggaagggcaaactctggagattacagtagggttcagggatttaattgtggaaaagattttggctatgcgctactcacctattttacatcaagggcgcttaatatccagagaatgccttactgtgaagaccgtatttataataaattccacttccgaaataaacatgaaaatgaaattctacaatccctggatgaagaaagggtcagtgagatttgcagggaaattcatgaaatttatatgcatactcaaaggcatcttcagcaagcaggactagatgatgtgaacttatgccgtgaattaagaggagacgatgcaaataactacattaaaagcatactagtaaggaaggctgcatcagagatgttgggaaaggaccacatgcatatagaaatggactctctgaattcttttggtgacgcaggtgaatatttaggggccatatccctccagttaggaattccggcaaaagatattctctactgttataaattcatagaatcaaaacatactaattcttggttggttgaacctggggagtgggtggtaataaacagatcaccgaacggactagttaagctaccaacatccagtgttattgtcagagatgacaaatggtataatgatatattgaatggaataaatgtaaaatcagcagtggattacttatccaaggactcacccttggtattaaggggtgactatttgtaa

SEQ ID NO: 447887 - DNA, 1644 bp, Serratia marcescens
atgtatgagcaatacttttccacgcgccataatattaactcagcgggtccacaagaaaactatgcctgggcaattgcaaagtttgctatccgactggctggattcaatgccaaaattgaacaccagttacggctagggatcgatgacaaagacgagttgcaaaaagaattggatattcttttctcaagctctaatgtactgctccataaaagtatatcgaccagatatttatatgacgaagctggttatgctagaacggttgaacaaatacattcaaatcttgagaaaatcgatatcgaattaaaaaagaaaaacacgaactactcgaacctgcttgaaatcattgagttaataggtctggacaacaaagagctcatcgttatctcggaccatgctgaagtcaggcaaagagacattatacagcaggattatattaacaaagccaactcgatgcggtttcccattgccatcctgtacgttattttttcattgatgcttttcgtttcatatcggcaggtaaaatccattaacaagcagctggagtccgagaagaaatcatttaacaacaagaatgcattccttggtgtattaggtcacgaattgagaacttcacttcaggcaataatctcatcggtggaggtgatcacccaacaaaaagacgtcgtagcattctctcactttgagcgattagagaatgccgccatgaaaatggaacgtcaaatgaaagacctcgcagagtttgccaaagttgacaatggcaatgttgaaataaaaatctcatcattcaacttacataagctcgtgcatgatactgttgagcaaagtatcactattttgaacaagaaaaacatcaatgtaagcatagatggaattgaaaatatatatgtaaaaagcgatccttccaggattatgcaaatcatagagaacattgccaccaatgctataaagtatactgagaatggaaatgtacagataagcgcagtcatccgcgacaagtccagactggtcattacggtaagagacacgggtcggggtattccgaaagataaaattgatacaatcttcttcccgttcatcagggttggcggcgataacaaggttccaggctttggtatgggattggccattgtccacggtgttgttaaagccatgaacgggactattgatgttgaaagtgaggtgggcaaagggagcacattcaccgtttcattacccattgagttttcaaaacatgaagaaacggtcattcccaccgatatggataatatcactttttcagccaaagggatcagggtgttaattatcgatgataatgaaatggcctgtgaatcattggtgtcaattcttcagcatgagtttacagtcgagtatacgacctccccagaacgggctttggagaagttatataggaaatccttcgatcttgttttgagcgatctgcagatgcctataatgacaggtgatgatttatataaaagagtcaaagagaataaaggaccaaataaaagcacgccattcatattcatcagtgcatatacgagcgaaagccccattaaagatgttgagatcttaaccaagccagttagattgaatgacatcaaaaaagccatagagtcagttctggccaggaacatggacttataa

SEQ ID NO: 447888 - DNA, 504 bp, Serratia marcescens
atgcgtaaattgatgttatcgggaatattctgcttagttactttattcatttccctcccttctttctcgaaaacaggagatatctatattgacggagatataacccacagaaattatggagcaggatacattttgacagcggcggaatttaacacactggaaaaataccacataaaaacaacaacatcctggactgagttgggtcacgtcgtggatttcgaaggagtaaagttcaaagatttgttaaatgtggtcggcgcacgtgggaaaactttaagaatgagggcattaaatgattactgggttgacattccggtctctgacgtcgaagaattcgatatgctgctggcaaacaaaatggatggaaaaccattgaaagttagagactttggcccgtacttcgtcatttaccccatggacaagttttacggtaaactcaatacgcccgtttatcaagctcgtcatatctggcaggtaagcggcataacggtactagataaatga

SEQ ID NO: 447889 - DNA, 987 bp, Serratia marcescens
atggatgattatttgttgacgtatacaggcagtctattgctggacggaagatacatcgtatcgccttatggagtgagtaaagaaagcccctgtggtgatctttccccactgaacaaccctgcgattttcaataactcaatcaatgaagtttccgtagactattcaaaggtcaaaagcctgactgtcatcaatgggttaggcgtaacgctaggtgactcagttgttggaatatctgccctacatgcaataaagaaaatcaatccaagaattgcaatcagagtcattcgccccgaaaattgtcctgactatgttaatgaaatttatacgctcgcgaagcatattatagatgacatttcctatatgccgtttgacattaccagtttttcagacgcagacctcgttatagatataggaaatcagttgtactggaaaggttttgacacattggagatgcacgatttctttttaaggaatctgggtgtcgagcacagccaggtttcaacctcattaaaaagtaatgcctggctcaggtactcgcccattgaagatctgaacctgggtgagtatgtactcttctgtccatatgcaagcacaaagataagaagcatccccacgcgataccacaggaacatcatctcttatctgagtggaaggttcagagttaaagtccttggtttcagtgaaatcagccatgaaaactatacgaatatcacaggattgtcaaaaaacaccgtttcctttgcctccatcattaaaaatgcgaagcatctttacacatgtgactcagcagccttacacattggcgcaggatttaacacgcccaccacgtgtatattcaccacagtgaaacctgagcttcgtagcttatactataaaaactgcgaatccatttacataggaaataatgaaacagaaggcgttcataacagtgaaaatgtacgcttacttgacttaatcaataaggagtttgaggtttattatgcgtaa

SEQ ID NO: 447890 - DNA, 834 bp, Serratia marcescens
atggcaatcaacaataaaactgccctgggggaagtcattgccaaagcgatgacgatgaaaggcattccaaaacaaaagcatattagccacaccagtcgcgttctggagatcaccatagctgcagcacagaaaaagatgagcgacgcatcaaactgggaggtatcgcaactggttaaagtagttgactctatcggtatgacaacgagtgacttcttcgacatctataattattcaataaatgaagtgcatgatgccgtctggaatgatggcaagacccatgttaaatgcaaaatatatttatccgaagtaaaaaccaatgatgcaactgaatactcagccgtgaaaatcaacgatgaatgggttgtttttcacactaacgatataaaggacgatgtattgtttgagtcgaagcgcaacattgatataattcaactctaccctcaaaagcagagtctaaaaaaacaccgaatcgcaattcttgatgatgacaaaaacatcgtagacagtctcaaagaaataattgccaataatgaatatcttgttgatgcattttatgacattgagtcattagaagaacgtctgataaacaccccttatgatgcatacatcctggattgggtcgttggggaaaaaaccgctttcaatacgataaaagagataaggaagacagagaataataacgctatgatactggttcttaccgggcaacttcctggaattgtagatagtgagatcgccagcgcaataaatgattatgatatcactggccctcacgaaaaaccgataaaagccagtgtaataaagtcattggtggataaacatttccctgagtga

SEQ ID NO: 447891 - DNA, 1710 bp, Serratia marcescens
atgctgaaggctatcaaagaactgctggttggaacccgggttatgtcggcaaatccaacggcaagcatttcagcctctcaatgtcctgtaggttattttatgccggcatccgcagagcagcttttgagcacggcctctcgtcagcagtgtttacagcagctgtgggagaacagcgcactgcccaaagatctctatgaacatttctatctgcaacccttgaagcagcttgttacgctgatgcaggtacttccggccgcgcctcagggggagtatgccagggaaggagggttagtcgatgttaccctgcagacgacgacgtatgcggttcgactggccaaagggcacatgttgcccccaggggccgcgcccgaagaacaatccgcccagaatgtgcagtggaatgtcgtggtgttttatgctgcgctatggcactacctgccgctgttgactcagctgcagggcgagttccaaagtggtcgcgcttggttacccggcttgacggtaccgggtgaaccctaccgttttcgcttcagagccactccgttagccccgactctagccagcagtcagagcgcaatgattgcggcacgactgctgcctgaagaacttattgaatggttgtcaacactaccagcggcgatacattcgttgatgacgatagcgtccaggcaaccgagcacattacctgcaattgacgacattactctggaggcggccaaactggcgcgtggcgatggtttggccgtatcgcttttgccgatatccaactccaacacattggcaataaccttaccgtcagtggcgccggcgacagaaagtatcacctcttcagtacccgagactgatttgcaaagcgcagtcagcagtatccgtccccctctcgctcaggagcaagtgccagcagagacattagatcagcccaacgaaaatgcaccgttagtcacggaagtgttacttagctcggcactggatgcgccggtcaacgataagcctttggatgagatggccctggcaccagaaacggtggctggtgtagaagaagatatgcaggctctgttgtctttaatggcggttgagatgtctgctccggggaaccggtctgaacaggagctcggggacgcccctcacgaagatgaaggcccactgcttgccgctaatcctgcgcttactgctgaagtgactcaggcagttgaagctgcagaactaaaccaggagtcagacaccattgatgatatcgcttcggaagcggcattttcaactcccgaattttgtgtccctcaaactacagatctcgcttcttcgcaatcacagaaactgagtattgaaggcgatgaggggataactcgcggggaagtcttttggcgttggttagtcgatgggctcaattctaatcagatcctcatcaacactgtagaggcgagggttcatcttgtttctggttttgtttttatcactgtgcctggaattttttatctgtatttgaagcagtttggtttggatggttctaaacgagaggctctccaggaggattttgaacgtctggatatacatcgacgaataaagggtaagcgattttattttgctcacctgtatgaaacatcagaacatacaggggaatttaaacgaaccaaaggttacctcgttaaagcaagtttgctctatcgaggggggaacctacctgacgacagtccggtgctggtgatcccttaa

SEQ ID NO: 447892 - DNA, 192 bp, Serratia marcescens
atggttgcccgttttgatgtcaacaccgtcaaagaggttgaagtgagtattcgttgttttgagcaaaatggagttgaaatcaaaggcgtcattcttaacgcgatggtcagaaagttgggctcttactattcaaattatggttattaccaatatgaatataaaagtgacaacaaaggtaaggataagcactaa

SEQ ID NO: 447893 - DNA, 252 bp, Serratia marcescens
gtggcaatagctattatcatcggcacacacggggctgcagcggaacaactgctgaaaacggcggagatgctattgggcgagcaggacaacgtcgcctttatagacttcgttcccggtgagaatgccgaaacgttaatcgtcaagtacaacgaaaaaatcagtgggttggataccagcggcggcgtgctgttcctggtggatacctggggcggcagcccgttcaacgccgccagccgcattgcggtcgactaa

SEQ ID NO: 447894 - DNA, 1101 bp, Serratia marcescens
atggcacaagtaatcaacactaacagcctgtcgctgatggcgcagaacaacctgaacaaatctcagtcttctttgggtactgcgattgagcgtctgtcttccggtctgcgtatcaacagcgcgaaagacgacgctgcgggtcaggcgatctctaaccgtttcaccgcgaacatcaaaggcctgactcaggcttctcgcaacgccaacgacggtatctccctggcgcagaccactgaaggcgcactgaacgaagttaacgacaacctgcagaacatccgtcgtctgaccgtacaggcgcagaacggttccaactcttccagcgacctgaaatccatccaggacgaaatcactcagcgtctgtctgaaatcaaccgcatctccgagcagactgacttcaacggcgtgaaagtgctgagcaaagatcagaacctgaccatccaggtaggcgctaacgacagtgaaactatcgacatcaacctgagcaaaatcgattctactactctgaaattagattcattcgatgtgagcacaagaactggcacccgtatcggttcttctgtagctaatggtgcagtcctgggcaaagatgataagggcgcggatgttacttttgataaaactaaagaagctgctagcggtatcctgaagcctgcttccgacaaagaagtgaaaaccttagtctccggtactgcacaagatggcacatcaggtttctatgtgaaaaccgttgataacaccgacgctgcaaatccaaagaccacgtataacaaagtagatgttgctaccgatggtaaaatttcagcagcgactactgcagaaactaacatcgaagatccattggcaacattagacagcgctctgtctcaggttgataaactgcgttcttccctgggtgcggtacagaaccgtttcgattctgttatcaacaacctgaacagcaccgttaacaacctgtctgcttctcagtcccgtatccaggatgctgactacgcgaccgaagtgtccaacatgagccgtgccaacatcctgcaacaggctggcacctctgttctggcacaggctaaccagtctactcagaacgtgctgtccctgctgcgttaa

SEQ ID NO: 447895 - DNA, 1785 bp, Serratia marcescens
atgtatctgtctaatttaaggataaccaacttccgaaatttcgagacggtagatattccactgagtggcaacgttgttttactgggcgaaaatcgtgtaggtaagagcaatctgctgttcgccatccgcctagtgattgaccccactctgcctgattcagccagacagctaaagctgtcagatttctgggatggctgcgatttatccacggctcctcaaattgagatacatcttgagttcgctgattttgacagtgacccctcactttcagctctgctgaccgattttcgtatcgcagaaaacccagccttggcaagactcagctacgtctttcgaaagaaggatgatattgccggagaacctagctcgagtgaggattgtgagtttatcgtatatggcggaggtcaggaatcacgtgccattgctagtcgcgttcgtcgtcggatagccatagatatgctggatgccttacgagacgctgaagcacaactcgcatcatggcgtagctctccgctacgtcctttacttgaagatgcgttcgcgtcattaagccgtgtagatctgaacagagttgccagcgcccttgaatccgcaacggacacaatggagacattcccacctattaaggagcttgaggaatctctgcgtggcggcatacttaatcttgccggtactgcccacgatcttgatgcacgtcttcgttttgcaccgacagacccgctcagattgatgcgctcaatatcaatgttcattgatgatggaaaaagaggaattactgaagcaagtcttggatctgctaatgtggcattaatttctcttaaactggctgagtttgcttggcgtcgcgccaagaacgaacgaagtttctcactactttgtattgaagaacctgaagcacacctgcaccctcagcttcaacgggctgtttttaataagctcttcaataatgccgatgaaacgcagtccctgattgtaacaagccattcccccactctggcaagtattgctcctctccgttccgttgtacgtctttgcagggatcaggatgggcgcactagggctttttctttggctaaacttcctgtaaccagtgatgaactcgatgacattgagcgatacctcactgcaaccagagcagaactactttttgcaaagggagttatatttgtggaaggagatgccgaggaggttttaattccgggcttcgcggaagccatggggatcaatcttgacgagcttggtatcactgtatgcagcgttgcaggggtgaattttgaaccttacgttaagctggcaggaagtttggggatcagcattgctgttatcactgactgggacccactcgacggaagcaaaccacctttgggtaaagcacgagctattagtatctgggattcaatctgtgctgtccgtcctgatatacacaagctgactgctgatgagaggatctggtttgtggataaaggttttgatgagtgtagcgatgtatggaaaacagctggtatatttcttagttcacaaacatttgaagtttctgtagcaaataccccgagactaaaagacgcactgcttaatattctcgatgaacagggttttggatcacttcgctcctcaagaattgcatcctggcgagccggccagactcctgaccctgctcaactcctcgcgatgatatctgatattggcaaaggtcggctggcagcgaaactcaagaaaaaaactcccgggcttgcaccaccggaatacatcgcagcagcaattcagtatgtggtgtccaatgtctga

SEQ ID NO: 447896 - DNA, 1794 bp, Serratia marcescens
atgtggtgtccaatgtctgaccggcacgcgctgtcaatggcgttaagtgagctcttaccgaacaaagagcagtacggcgctgcaaccgagcgaggacactgcgttgtcattgccgggccagggagtggaaagactaaaacactgacgaccgccatggctcgcgccctcatggatgacgtgactgatcctcgtggtgtggcctgcattacctacaataatgagtgtgcaactgaactcgaggaacgtctggcctgctttagcgtagccagcagcgaacgaaactttattggtaccgtgcacagctttgctttaaaccaggttttaatcccctactcgcgttgtataccagacttgctatccaatggctttcgtgtagcgacccgagatgagtgccgtgccgcagttgaggctgcttatctggcaaagttcggtgcaaacggggagcctcatgcccgatggaagtttgcagaagaaaaacggcgtcgggacgtgaaccgacttttaccctcgtggcgaaataacaacccggagctggcagatttcatcgaaacgtatgaagcacatcttcggcgtttaggtcttattgattttgatgatatgccgctcatcgcctttcgtatgatcagggaacatgactggatccgtaatgctatccggtcgcgctatcccgtcttattcgtagacgaatatcaggatctaggacatgcccttcatgaactagtgctgctgctgtgctttgacggtggaatacggctgtttgcggttggtgatgccgaccagtccatttatggattcaatggtgcaaatccgcggttactggacagccttgttttaagggatgaggtgaaaacgttccgtcttcgtttcaactatcggtccggcgcgaaaatcatcagggcatcaatgggggcgctgggagaagagcgtgattatcgtggaccagacggaacggcagaaggggaaataggatttcacggggtcataggcgattatgaaatacaggcgcgttatatcgctcaggatttaatcccctcgctgacagcccggggatttaagcctgaacgcatcggagtactttaccgggcagcctggctcggagataaagttgcggatgcgcttaaggccgaaagcatcgccctcatccgtaccgatactaatgcgttaataaaacgcaattcacgtcttgcccgcttcattgaagcctgcagccagtgggttacagggggatggaaagaggcgtcccctgcatttaatttgctgctggttcaagcactttctgtagtttatggccgtcgtgcaagcagtactgaagaacaactgctcaccatacaactcatcacatttttacgaagcggaattgatcaggctgaaactgcccatgaatggcttcggcgatttgacaaagaacttatttccagctggcggatcattgcgcagaatccccaggtggagtgggacgtcgttactgaattactgaaacgaaccgatcctgcattaaagctggatatggctctgatcgtatttgcaggaaaggaggaaagtgccagacgagttacactgagcactcttcacagtgcaaaaggccgcgaatttgatgtggccattatgtttggcgtcaacaagtatgattttccgggtaaacgcgaccttgtttcagataatgcattacgtgaggctcggcggctgttttatgtaggcgttacacgcccacgcaaagagttgcacatggtttataaaaaaggtgaacattccccttggattgctgaactctatcatcgcagccagcagacgtag

SEQ ID NO: 447897 - DNA, 2100 bp, Serratia marcescens
atgaataaaggtagaatcaaaaaaatcctggaaaaactcgatattgggcttaaccaccgtgttccggttatacatcaaacagagtcttccgaatgcgggttagcgtgcctggcgatggtttgcggctactatggcaaaaatatcgatttaatctcgctgagacagcgattcaacctgtctgctcgcggcgctacccttgcaggcctcaatggtatcgccacgcaactggggatggctgcccgggccgtttccttaaaccttgaagaaatcgaggtgctcaaaacgccatgtatcctgcattggaattttaaccattttgtggtgctggtcagcataagacataaacgcttcgttctgcacgatccggcgcgcggacgcagaaccgttagcctcgacgaaatatcgcaatactttaccggcgtggctctggaagtatctcccaatagtgaatttacagccgaaacggttaagaatcgccttcaactgagaacgttgctcaacagtattcacggcattaaaggtgcgctaggtaaaatattccttttgtcgttagtgatcgagaccatcaatcttgtcatgccgatcgggactcaactggtcatggatcatgccattcccgccagcgatcgcgggctactgacccttatctgtataggcctgttcttctttattctgctacgaaccgcagtcagcatggtacgtgcctggtcatctttaatcatgagcacgttaataaatgtccagtggcaatcagggttgttcaaccacttgctacgcttgcccttaggctattttgaacgacgcaaactgggtgacattcagtcgcgattcagttcattagacaccctgcgtacaacgtttacgaccagtgttgtcggtgccatcatggacggcatcatggtcgttggcgtcctcgtaatgatggtcttgtacggcggctatctgagttgggtcgtattaggatttactgcgttatatattctcatccgcctgttaacttacggttattatcggcaactgtcggaagaaactttggtgaaaggaggcagggccagctcatattttatggaaacgctctatgggatagccaccgtcaagatacagggaatgggcgctcgacgaagtgccaactggctgaacctgcaaatagacacgatcaacagtgggattaaagtcaccaaaatgaacttttttttcaatggggtaaatacgtttattaccgcttgcgatcaggtcgtcattttatggttaggcagcagcctggttattgataatcaaatgacgataggtatgtttgtcgccttcggcgcattccgcgggcagttttctgaacgggtggcctcattaacgagctttgtgctgcaattgagaatgatgagcctgcataatgaacgtatagcagacattgcactgtatgaacgtgatgctcaaaaaccggacatcccatatcaggcaacaatgcaacccatatcgctggagagtcgaggtttgagctatcgctatgacagccaatctccccccctattttgcgatctcaatatccatattgcgccaggtgaaagcgttgcaataacaggcccttctggagccggaaaaacaacgttaatgaaagtgttgtgcggcttattcgaacccgatgctggcatggtcatcgctgatgggatggatatccaacaattgggattaaataatttccacaaaatgattgcttgtgtgatgcaggatgacaaactgttttccggctcaatacgcgaaaacatctgtgggttcgaagaggatatcgacgaggagtggatggtcaaatgtacccgcgccagctatatccatgatgtcattgtaaaaatgccaatgggttatgaaacgttagtcggagaattgggtgagggactttcagggggacaaaaacagcgtctttttatcgcccgtgcgctctatagaaaaccagggattttatttatggacgaggccacaagctcactggacaaagacagtgagtattatattaacgaggccatcaaacaaatgaacatcacccgagtgattatcgcccacagagaaaccactatcgccactgccgaccgcgtgatttcactggcttaa

SEQ ID NO: 447898 - DNA, 1794 bp, Serratia marcescens
atgagaatcatgccatttgcttttgctgcggccatgttgcccggcaccgcgttcgctggcgataccctgatatccccaatggtcggtggtcttgatgtatgccctgcggcgataaacaaggggatcaccagcacatatgacgcagccgcctactgccagtcattgaaagagacgtctgcagatctaattgagaagaaactttctgagttcggcccaaaggaaagtgcagacggtaaattccagattggctacacgcttagtgtgccgctgctgtcatacgtcgatgtgaaaccagatggctcattctctatcgataaagaaaaaattcgttatcggctacagctgctaaaagataccgatcgccaggctgtagtatatatcttctctaatcacttctctgtttcggaaaatgcccgcaccgaagacgcaatcgcgaaagcggacagtgctagccttatgcagcttagcgacggaaaagtgccgattgacggatatttctcaagcaaaacatacccgtgggctattaatgcagagggttcgctgattgacagggtgcgcaaggttgcgctgcatgaagtgctgacgcagatttgtgaaatggataattcggataaaaacaaaatccgcgccgttactgttctgggcgaggtgcattatactttcccagatttctttaatggcatgggttataaaggcaagatgcagataacagactactcaccagaatcagtgaaaaggttccgtgagtatctgtctgctaaatacaaaaccattgaggtgcttaacagtaagctaggctccgagtttaaatcgttcgatgacattaaccctccatcaaaagacattaatatagaccacctgaataatttctttgaacatatggattatgcttcttcaggcaagcttgctatttatggctgggctgcaggaacagacggcaagccagcgaagattaaaatattcgtcgacggtaacgatgcaggctacgcagaaacaggcctgaacagaatggatgtttatcaggcaataccatcactcggaacctcagccgttggctatcgctactatctggacttccgcaaaatgagccacggcattcacactgtcgacgttgtccacgacgatgcaggaaagctgacaatgcttaagcatcttgatgtgccagtaatggatcgccagcagactgcacctcggtcggttggcaggactgtgacattcccaccagagcagaagatgcgtttctggaacgactaccctgagtcaatgaaagctgtctactacaatccgctttctgaggagttttacgacttcagaaagactgctgtcgccagcgaaatttctgagtatgcggatatcgtcagctcctcatgcatagggaagaaaaagacattctctcaccagatcgcacctatatttaatgctgactggaatcaggaaaaaatagcggctagcgactcactgaaaaataacagccactataatatcggtatgaatacctatggagcggcattctatggggattacacattccagtggataaaaaaattaggaataactaggtacggcatccctgaagctcatccgatggtaggaaacgaggatattattcgagatgcacttgagcgacatcacagtagtggagcggtattcatcagcccgtattacgtcgatattaagcctctcaattttggcgtagataaagaccacgccaagtttgagataaaagaaagtaataaacagtatcattcagacgcttattttaacgccatccgtgacgtgatgaccagaaattaa

SEQ ID NO: 447899 - DNA, 123 bp, Serratia marcescens
atgagtattcataaactaaaactaatccaggtgaaccatttccaccagatgcggaaccagatccaccacctgacgtaccgccggaacctgcagccccaaaacctgaaccgtctaccccattga

SEQ ID NO: 447900 - DNA, 264 bp, Serratia marcescens; identical to SEQ ID NO: 352461

SEQ ID NO: 447901 - DNA, 810 bp, Serratia marcescens; identical to SEQ ID NO: 169898

SEQ ID NO: 447902 - DNA, 1632 bp, Serratia marcescens; identical to SEQ ID NO: 169900

SEQ ID NO: 447903 - DNA, 1143 bp, Serratia marcescens; identical to SEQ ID NO: 169901

SEQ ID NO: 447904 - DNA, 1002 bp, Serratia marcescens; identical to SEQ ID NO: 169902

SEQ ID NO: 447905 - DNA, 225 bp, Serratia marcescens; identical to SEQ ID NO: 169903

SEQ ID NO: 447906 - DNA, 393 bp, Serratia marcescens; identical to SEQ ID NO: 169904

SEQ ID NO: 447907 - DNA, 870 bp, Serratia marcescens; identical to SEQ ID NO: 169905

SEQ ID NO: 447908 - DNA, 1170 bp, Serratia marcescens; identical to SEQ ID NO: 169906

SEQ ID NO: 447909 - DNA, 786 bp, Serratia marcescens
atgcaggatcgcaattttgacgatattgctgaaaaatttgcgcgtaatatttacggcaccacgaaaggaaaaatccgccaggcggtggtttggcaggatctgaccgggttgctggcgcagttgccgcagcggccgctgcgcatcctcgacgccgggggcggtgaaggccatatggcctgccagctggcagaattaggacatcaggtgttgttgtgcgatctttctggtgagatgatccagcgcgccgcgcagctggctgagcagaaaggtgtgagccagaacatgcaattcgtacaaagttctgcgcaggatatcgctcaacatttggaacagccggttgatctgatattgtttcatgcagtgcttgaatggatcgccgagcccgaagcggcgctgcaggcgttgtatgactgcctgacgccgggcggcgcgctgtcgctgatgttcttcaacgccaacggcctcttgatgcgcaacgtggtgttgggtaatttccaactggtggatcccgaggtcaggcggcgccgcaagcgttcgctgtcgccgcaatatccgcacgatccgttattggtctacggttggctggaacagctgggcatgcgcatcggcggcaaaaccggcgtgcgggtgttccacgactatctgcagagcagacagctgcaaacacaaaaatttgaagagttactggcgcttgaacagcactattgccggcaggagccgtacgtgagtttggggcgctatattcacgtcatggcgcataaaccaaacctgaaggacgaactatga

SEQ ID NO: 447910 - DNA, 720 bp, Serratia marcescens
atgaatgccaaactgaacaagtaccttcaaatggcttttaacaatgccaacggcaatgaggccgcgcaggcattgaaaatgctggccattacgatgcaggagcagggtgtaaacccggccagtttactccaaatgaagagcgactcggccagcagcgcgcaggtagtggaattacgtcgtgaactttccgttctgaaaacagattacaacggcatggtagaccgttataacactgttgtacgtgcctataaggcccgtggtgagaagattgcagctctagagtcgttgtccgaaaatggcaccgcagagacgcaggagggctctgagcagcaacaggaagcatctgccgcatttgagggatctattgctgatcaaatccgcaaaatgaagaatgtcacggcggatctggctaatcacccgaaagcaaaagccacgagacgcctgtctggtgacttggctgcgcagaatgagcagtttaaaggaagttggaactatcaggaacctagtcagaacagcaagtatggtgatgcacactatagctataactacggcgacaccctgcatatttggatcagtaaatcggaaactagcgacgggttttccgtgtctgtcgtgacgattggcccgcgtggcggccgaaaggaccctagttatcaatcttttaaagatgaggccgcactgatggactggttactaaaaaagtggggcgtgttgaagtga

SEQ ID NO: 447911 - DNA, 291 bp, Serratia marcescens
atgatgaaagtgttgggcttgctgggtggcatgagctgggaatctaccattccttattaccgcaccatcaacgagcaggtaaaggcgcgcctcggcgggctgcattcggccaaaatcgtgctctacagcgtcgattttcaggaggttgaacgcttgcagcaccagggcgattgggacggcgccggccggctgctggcctccgccgcagtggctttgcgcgccgccggcgccgaagctatcgtgatctgcaccaacaccatgcacaaggtggcggaagcggcctgccgctga

SEQ ID NO: 447912 - DNA, 852 bp, Serratia marcescens
gtgaataaaataaaatgcactaagaatgatgataacctaaaagaaatttgtaattatcatgttattccattcaatgaatcatatggtcagggaggatatgcaatccgtactattgaaatatatcgattgcataaaatggagcctcttttgaagcagtttgaaaatttaactggatatatgcctccgcgtgctaattgtacagcgaaagaaattcatgctctgatagagcagggtgagaaaatttgttttgatgccgagtcaaaagtatccggtatcgaaaatgaaataatgctctgtgagcgcgaattgggcaatgccaagcgtggtgtaagtgacgcatctcgttggaatggcagcatgaaagaagctattgtacaggcaagcgccaaactcgaacgggcaaatgcgaagttggttgaagctaaggccgctgtcgctgctcgtcggggactactagggttactgcgcgagcctgtagatcagatgttaatgtgcggggaaaaagggtttaagggtaaggtgttaacgcatatcccgttggagcctcttcctgcctacacctaccgtaaaggagtgtatagcgatgggctacgttctcatatctatgcctggggagtaatggatgccctggaaaaagcattacgtgaaatagtccaaagatgcacaccaccaacagataaatacgcgcttaacaatggcgggttagaacgtgcggctttggctgtagagtattacaatgtatccggtgaaaaatggcgggaattaatgacggtaggtgaatataccgatcttatgatgggtggagaattatccttaaagtctaaacaacaagaaatgtgctcatccctttaa

SEQ ID NO: 447913 - DNA, 630 bp, Serratia marcescens
atgtattttattcttgcttggctgaatatggcattcagcctattgactgtcaaccttgagcgttcggataaaaacggcttgcgcggtgctgtgtggtcacggtatagttttatcgttgtcgcaaaatcggcaaccgggcgtaggaacccgtgtaatctaacggcgataccagacgccctttgcgtctttttttgtatcgtagctttgacacacctaaagtttttggtgtggtgctcacaggtctgtatgggcgtcattctggcctgtgtgcatcatatccatcgcgttatggtagtccaggcggggcagctttcgggctggccggtatccgttagagccggtattcctacccccgtttgggctaccaccaatcttgggcgtaggaaccctggtggtagctgtttcagctatctaacggaggttgccgctatggccactaccccaaccaacacacatttcaaatttacctatctgtttttgggcgttcgtcgcgctgatctcaaggctattccctgccgcttacaagttactgccgattctgaacaagccgcacaccgtgcgttagtcagagagtatgtgctggcgtttgctggccgcctgccgtcacgtcctgcaactgaatggcgttaa

SEQ ID NO: 447914 - DNA, 600 bp, Serratia marcescens
atggccactgataaaaaagattggagtgcgataagacgcaaagtggatttatatatattgtctctatggcttttgtttatatttttcatcattatcacggtaaaaatacctatttgttttggtgagaaatgcaagtttattggttggaaagagctaatcagttctaatgttgttcctataatttctcttgtttttgtaatgtatgggattgtggcttacttcaggtttaaatttgataccaaaggatccgctgacattccatttgaaataaaaaaaatagaaggaataaattacgaacatttaactttccttgccacatatgtaataccactaatcaccttcgattttgagaaggcaagatatatatatgtactcgcattattacttgtggtcatgggagtcatatatataaaaacagatcttttctacgcaaacccatcattagccttgctaggtttccatatatataaagtcgatggtgagtttaagcatggcgaactaagggagggcatgatagttattgctcgaaggcatttagaagtggaaagcaaagttagctatattaaacttgataagcgcgtttattactctgatcattaa

SEQ ID NO: 447915 - DNA, 981 bp, Serratia marcescens
atgcaacaggatttaataaccaaagaatctatcaatgatagtttgagatattttgtagataataaggcggatataggtataactgtctatgctttacttaaagactctttaattccaatgaaaatggatattgaagctgatgctcaatcaggtttaaaggatctttttctagataaaattgagagtagtatcattgataacgatgagttaggagttattaaattatcatcatcagatgagagaacgaatgtaatttatcaatacgacttggatattcctcaagatcttaatgtcatcaatattgttttggaaagtgatgagcaccccgtttttaatattgctcaagatggaattgagaatatcaaagtgttattaatagaaataggtgataacaccgaacagattgttctttataagacaatggcgccagttaatatttttacgcggtcaaattttttccttaaaaaatccagaacaagatttgagaagattgatgaagattttttccgcataagtgatggttttcaaataatgcgattatcttcaggtctttttgtaattaaccttgagactatagaaaaatcatttggttttcatgaggtcataaaaagagaagcaactcaaggaatggctgccattgaagctaaaagtataattgccaatatggatgctttaagagagttaatacaagatgtaaaatacgcaagaaaattaacaaaagttgcgaaggcatcacctgttttaaaagctggtgtggaaaataataaaataatagaattttgtaaaatttatccttccctaaaaggacgtataaggtttaatgctgaccaaacgcaaatagttttagatacgaagatatctaaggatctgtttataaaaatattgatggatgattttcttacatctcaacttacagatttctattataatagtatagctaaagatactgttgaagttgaaggcaatcaagacgttgcataa

SEQ ID NO: 447916 - DNA, 1020 bp, Serratia marcescens
atgagctacataccggttggcgttgatattgcgaagcacgtgatgcaggtacacatgattgatcggcacagcggcgaaattattgacagacagattaagcgtgcagtttttctggagttttttgccaaccgtgagccttgcctaatcggtatggaagcatgcggaggttcccagttcttcgctagagagttggaaaaactagggcataaggtaaggctgttaccgggaaaattcgtcaaggcattcgtgatgggtaataaaaacgatgttatggatgcgcgcgctatctggatggcagtacagcagccaggaaagtcggttgcagtaaaaaccgaggaacagcaagcaatcatggcgctgcataagctacgccgccaactggtcaagttcaggacggcgcagactaatgccatacatggcttgcttttggagtttggcgaaaccattcgtaaagggagggccgcactagatgccaatctccctggcgtactggaacgtatgagcaaaaagcttccgcaggcactgattgaaatgctgcgagatcaatggcaccgcttaagtgatctagataaccaaattgacgatatcgaaaagcagcttaaaacatggatgaaacaagatgaagcctgtcaaaaagtcgctgccattcccggcattgggccgatgattgcgacggccgcagttgcggccatgggtgatgcaaaggcgtttcgcagtggtagagagttcgcagcatggcttgggctcgttccaagacagacaggcactggcggcagagtgaagctgctggggatcagtaagcgcggtgacgcgtacctccgaactttatttattcatggcgccaggagtgtgatgacccatagcaaggagccgactgaatggatggagcaactatctcagcgcaggccaaccaatgttgcaattgtcgcgatggcaaacaaattggcacggactgtctgggcggtactcgcccatgacatcccgtaccaaaaagggttcgtaagcgttaggccatattag

SEQ ID NO: 447917 - DNA, 1299 bp, Serratia marcescens
atgcaacaaggtagcacaatttcgtctgtttttaaggcatcacgagatcttcccgagaactatgtcattagaaaagatatagatgatagattcattgaggcgctgacccaagaaacacatgttgtaatttatggcagttcaaaacaaggcaaaacatccttaagaaagaaaaatcttcttccagaagattatatcgatattacatgttcaaataattggaagctggaagatattcatgttgcaattttaaaaaaaattggttatcaagtttcgacttcacaatctaaaaccttaaaaggttcagctaaggttaaaattggaataaatattccattcattcataagacgtcacttgatttaaatggtgacgcagcaaaaacagttaacaagaaaaatattgaactagatcctgaagatgtaaatgatataatcacttctttggatgaggtcaatttcaaaaaaattattgtcatcgaagactttcattaccttcctgaacagacacaaattgatttctcagtggcattaaaggcttttcatgaatcatctaaactttgcttcatcattgttggagtatggctggaagaggataaactgacaacatttaatggtgacttagcaggaagaattgtttccatcaatgctgatagatgggacaaagaagacgtatataagctatttgaaaatagcgagaggttacttaacattaaatttgatgaggaatttaaatcagatattattgagaaatgcaatggaagtattttcttagttcagcagttatgttttcaggcatgtgaatttgagcaggtaaataatactcaaggtgaatttaaaattgtaggcaagaattttttagttgaagagaaaattaaaaaattaattaacgaacaatactcaaggtattttaaatttttaaccgattttagctgtgggttcgatcagactccacttgaattatacaaatggattttgtatgttctgattactgttgaacaacgctatcttgaaataggcgttcctgaagcagccatcagacgattaattcaagaaaaacaccctaaaaaaatggaggcctcacaaaaaaaactaagacaggcattacgaaagtctgttgatctccaagtaaaaatatctattaaacctattgttttcgaatttgacgctagctcatctcgaattaagatagttgataggccatttatattatggcgctcatatcaaaatcaagaagacttatacggatacgcagatctatcggatgatttaaaaacaaaaataataactcctggatattattaa

SEQ ID NO: 447918 - DNA, 1434 bp, Serratia marcescens
gtggcaaaggcgaaaacttcatcaaaactgatcaaaggtaatatattcgaatattacgtacctagaacacgcggggcaaagccaagacctaaaaagataacggacaaaaaagatccgaccaaaaaggtttacgataaaagcaaaccagcaaattttttaaaaaattcttttaagaagacaaaaaacgtcccattcggaaatggctctaaaaaaaatctctcaacgcgttattccgcactactcctgccgcaaattgtacatgctgcgcttgagtgtgggtacggccgaacaggaatgtggtcctctcatcttcttctgaatcataaagagtcacttgaacttgcgtcttatttactcaaaagattattaatggtggcttcatgcatcaaagtcgataaaaatgatgcttacttcacgcaagaattttattcaaaaatagaaccttcagaaaaagttgcaatctcatttatagctggtggtataggaagtttcattgcagcatatcattggcttgctgccgcaggtgaaaaaatcaatgttatgttacataccagtatttatactaaaggcttgtctccctctgtaaaaacaaatcctttaaccactaaaaagtcacccgactatcttattgagtctgacagtggagaatggcatatttttgaaagtaaaggtggcacgggtgtcgggcgtaataaaaggattcaggagggtttactgcagcttggaacaataacacaacttgcatgggcttcacctactttaaccctaaagcaggtgcaaacaaatgtatgtacacacacatgcattgattctggcagccttgtgaaggtactagcctatgatcctccgggtgagaatactgaagaagggaaaactatcattcttgatgaggccgtttgcaagctacttaaaatcgttgaaagtctggatcagttccgtgtacttggtacagaagtgagtcctgaagatggctgggaatggaagacggtgccgcagataaaaaacttgcgggtggctttaccatctcaatacttcgaccttgaagaggagcttagaacaaggcttggcctatatttccttgccactgaaagcgtgggtaaatctaaaaaaagagaacagtacccagtaaaactcactatcaaatccattgtcaaaaaaatagcatcgtatgaattcaaagataacagtcaggcgatagcagagacgtttgctcattttgttttagaactaaataaagttgaagaacctgctattttcattacatactgtcgccagtatctaaatcttgatgaaatattttataagttcattattgcattagaaaaacttattattcaaccgaatttttcggccctccccaacaatgaaattaaaagctctaccgttttgacctcaagcggtatgttaatcagagaaatgaatgatgtagaataa

SEQ ID NO: 447919 - DNA, 3069 bp, Serratia marcescens
atgtcagagatcggcgcagcgcccgagcagggccaaatcgtcaaactgcgccacaagatatgggcagtaaccgcagtaaacatcaccaaagctcaaacaaagcatgtgatacataggctctctctggaatgtctgagtgatgatgcgcttggcgaaaatatccaggtgatttgggaacgagaaatcgctccagcagttgtcgaatcaacctctttgccttgtatcacaggtcacgacgatccgatcctctttgatgcatttattcgttctcttcagtggagcgcaagctcgttggctgttggcgatatgctgcaagcacccttccgtggtggtgtccagatggaagagtatcagttggcacctgttatccgcgcgaacaatatgcccagggttcgacttttgctggcagatgatgttggtctgggtaaaaccattgaagcgggcttagtcactcaagaactgatccatagccatcgagcaagaagtgtactcattgtttgtccggcgcacttacgaattaagtgggttgatgagatggctgaaaagttcggcctcgagttcaagatcatcgatcgagattccgttctaaaaatgcggaaggagtacggaccgagtattaacccttgggccagctttcctcgtcttgtgacatcaattgattatctcaaaacagagcaccctcgccgtttgtttgatgagtttattcggcgaagactagaggaaagccctaacaacaggccctgggatttgctgatcctcgacgaggctcataacgcagcaccgtctggcaaaaaacaatatgtccgagactctgagcgcacatcgctgttgcgttcaatttctgaacaattcgaacacaagatgtttctcaccgctacaccccataatggttatcgcgagagttttacaggcctgctggagattctggacaatcttcgtttttctcgtggcactggccttgataagacgcagctctcagccgttactattcgacgtctgaaagaagacatcaccaacccagacggctcgctgcgttttccaaagcgtgtaatcatgcctagagatgaaataatagacccacagctgtatgtcacactagaccgtgaagaacaacgtctattcaatcttctaaatacttacactgaaagccgattgacctctgtcgacaaacgttctgaacgccctctacagttcatcctaacgctgctgaaaaaacgagctttatcttcaccattggcgctacgcgagagccttatcgtacacacagaaaatgctggcattaagggtgagcttgatattggcgaatcattgtttaacagcttcgagcaaaaagaattggaagactggagcgatgatgaagataaagaggacaacctagaggctgcgacaagaaccgcctccaaactgatttcagagctgtcagcagatgagaaggaaatgcttcagcgtatgtttgaaattgttgatacgcaggtatcacatttttcaattcaggaagatagcaaagcggcagcgctaatcgggtggatcaatagaagtcttcgcgatggcgatcaatggaatggtgaacgtgtcatcatcttcacagaatataagcacacgctcaattatttagaacggattcttgaaaagcatggattccttgatttcaccagaaccatcattggcggcatgaaagactctgatcggcaaaagatcaacaatgaatttcaatcaccaaataacgaaaccaatatccgtatcttactcgctacggatgctgcctctgaaggcgccgatttccagaagcattgccgtaatctgattcattatgaaatcccctggaacccgactcgacttgagcagcgtaacggccgcgtagaccgtcatgggcaaaaagcagacgaagttcgcattcatcactttgtgtttaaaaaccaagaggactccgagtttcttaaacatatcgtcgataaagtcgaaactataagaaatgatctaggcagcgttggcgctttaatcgccgataacgttagaaagaaggcgctgggacaagctgttaaccttgctgccattgatgatgacgctcgcagacggcttgcacgagaagaaatggcgctagaagctcgggataatgaaagcatcacgcaaatggtcgatgctttgaaccgagctcgcagcgcacttgatatgtctgaaagtaatcagctcgacctgttatgccaagcgttgagtctggaaggctgtactgaagcaatcatggatttgggtgatggcgagttttcattaatacatgtgccaacggcttggacagaatgtaaagcctacgtcagcacagactacctacaaaagcgtttttcatttaatcgagacaaagcacgttcagatgatgcagtgggtattgttcaccttgatcacccactcatgcgacgggcaatttctacctttcgtgtgcagatgtggggaactcaatcaaccaaaaaccagttaagccgtgtaaccatcacagagtcctccgagattattgtacctgttgtcattgcctggggacgtttagtattgctgggaccagaacataatcgcctccacgaaggattagtccgctgttcgctcttaattcagggaaatactcttgtcccgcaagcagttactcgaccggatgatgcgctttattttacgggccatctagaaagcataaaggaacttatttcaccgcttattgaagctattacgcaacatctttctaacgctgccacagaagaagctaaagtattaatcactactctaaatgagcgtggcgaggtggcccgtaaacatgcacaaagcctatcgacagaacgagttatggcaattcgtaaggctatcaaagattggcagagtcgctctttggacatgcagttacagtttgtgtttgatgacgaagagcaagatcagcgagagcaggatttaattgccctacaatacagacttgaacagcttgaacaagaacgagaagctgagccaaaacgcctacgaaatttgtataaggttacaaacaaaaaaatgtatccggttgcactagaggtaattttgcctaaggggatttactga

SEQ ID NO: 447920 - DNA, 3924 bp, Serratia marcescens
atggcaattaataagcgtatcgcaaaccggcagcaccgctggctttccagtgttgaaattaccggtgtcgtattaagcgaacccgttctcgctgatgtaggcaattttcgctcgctcgataaggcagaaattgcagtattcagaaagcagcgggaaatctggaatctgcctaagggtatggtggcaggaaatggccagcccgcctggattaagtttatcctcgaagactttctcggtctaaaagacaaagactactggcaggtaggggcggcaattccagccgacagggtggttaacctgcacgaacagcaggaagttctacgtccaactcgcgtattgctcgatgaaggcaacacggttatgttggtgctggaagtgccacgcgagcaatcactggataagccttggctgcaagacaaaggtcgctggaaggcatcgcccaccaccaaattcgaacgcttattgcgtgaaacaggtgctgaactcggcttgctcaccaatggcgaagcctggcgcttggtggtggcgtcaccttcagaaaccacctcatggatgacctggacagttcaaacatggaatgacgacacaaatactctagcggcgtttaaggatttattaggtgaatcacgtttctttgctgggccgcgcgatcaggtcattcttgaactgattaaaaaaagccgtcagcgccagttggatgtggcagatcagttgggtaatcaagtacgcgaagccctacaaattctggtgcatgaactggatagaacggatgccgagttgggcggccaatttctggagggatacagcgaagaggaagtatttgagtctagcgttgcctttatcatgcgcttgctgtttaccctctatgccgaagaaaatggtttgctgccccatggtaatgtcacttacgactgggcctatggcgtattgcacctactcaccgagcttgaggaaactagccgtctggcgccagaaaaactaaaacattcctatgctgcctatgcgcgcctgttagctagcgcgcgtatattacatgatggcagtgtagacccggatatccgcattgctgctcacggcggccaattgtttgactctgaccgctcaccattgttggagggccgggcgaagaatggtaaatggctaacagaggtgccggaaccgcctaaggtcagagatgcggctatccgcgatattctgcgcagcctgaaatatgccaaagtcgatggtgtgcgccaactggtgagttatcgtacgctggccgtcgagcaaattggccatatgtatgaaggcttgcttgatcgtcgtgtggccagagcccccatcaaccaaactctgctgctgttgcaaggaggcccgaagatcgacgaacccgtccccgtgaatgcaagcgagtttgtcgggcttaacgaagctgcgctaatcaaagtcatagcccagttcaccagtaaaacggcaggcactattaagaaggtattggaacgcaacgaagagcggcaaacattggtgaacctcggcaccgatgatgctgagttgctagcgcaagcaaaaccggttgaacgctttctacaacctctgggcatagtgcggcccggtggcctatacgtcacccacggccaagaacgccggtccagcggggctcactacacgccgccaactctgaccgagccggtggtacgccgcactttagaacatcaggtctatgtgaacgtggaagaaaaacccggtttattggttgaaccaaggttaattaaaaaaccgcaggagattctggcccttaaggtctgtgacccagccatgggctccggtgcatttttggtacaagccacccgttatttggctgagcgacttgtggatgcttgggagcacatagcagctgcacagccagacagcattttaaccatgccctttggtaccctttcgcagggggaggccagcgaaaacctgatgccggaatctcgtgaggaacgtgttgtattcgctcgtcgttatgtggcggagtattgtatctacggtgttgatatcaacaagctcgcagttgaaatggctaagctatcgctttggttaacaacgttatccaatgatcgcccttttacttttctagatcattcactcaaacatgggaactctcttgttggtcttactccggcgcagattagtgaattcacttggaagcaggttagtaataagttcggcccgctgcttgcgagtaagcctgagcaagaagtcgaggaggcagagcaacaccgcaaagcgattcataacattgccgatcaagatttcgtcagcaaagaaaaagaaaaccgcatggccgaagaggctcttgcctgtattcgcatgaaggcagccttggcgattgcggctttttttgatggttctaacaccaagcagcgtgaagccaaattaatcgaataccgttactggatggaggtcttggaaaagaatgaaaaggctcatgctgaaatagagagaataattttaagacttactaccggtgacaatcctattaatccattttgttgggaaacagagtttcctgaagtttttcatcgtgaaagtggtggttttgatgctctgattggtaatcctccatttattgggggaaagaaaataagcacaaatcttgggaaggaaaccgctgactatctaagtctatacaaaaatggaaacaaaggtgcttgtgacttagtcacatacttcttgcttagatgttccttcgacttacttagagtctcgaaactctcgagcataggacttattacgacaaacactatttctcaaggggatactagagagctggggttgcttcggatgttgaactcaggtttcgagctgtatcatgcaataccgtctttgacatggccaggaaaagctaatgtaattgtttcaatcattcacgctaaaagagggccatggtttggtgatcggactttgggggatgtcaaatgtgagcttatatcttcctacttagattcgatcgcgtgtaacgaaactccggctccaattaataggaattccggcctgtgcggaacaggggtatacgtttatggcaaaggatttgttttatcacatgatcaagcagatctttttctggttgatcaaaaaaataatgatgtcattaagccatacttagtaggtgacgacataaacaacacatccggatcaattccaagtcgtttttgtatagatttcgtggatctagatatagaggacgcaaagacatatgaacaagtatttaaccatgttacaaaaacagtaaaacctgagagagataagttaaaaggtcaaatacacgagagtcgctactggattcattgggatcgtcgagaagaattttttgagctgttaaaaaagaaagagttttctttcggtcgttcaagagtcagtaacttacatcttgtggaaaaaatcgataatgcatggatcccttctgacgctgtcgtaattttttccacagatgagtactctgtgtttggagttttgcagtcagtttttcatcaggtttgggcggaaagattttccacaacaatgaaaaatgatttgcgctattctattagcgactcttttgacaactttccctttcctgaccgagatgcgttaaattctatcgaagacaatgctaaatctttctatttcaataggagaaatattctcggagaaaaaaaactatcccttagagagctacaaaaattggtcgatgaccactcttgtgaagatgaggtgataaaggattttcgtagatctatagtctttcacaacgaacttgtagctaaggcttatggctttgacgatttggatttggaatttgatttcagaaatgctggatggcttccccacaatccgtttggctataccattaaaatggctaccagagatgaaattatcaaaagactgctaggccttcacgaaaagcaagttcatcactga

SEQ ID NO: 447921 - DNA, 822 bp, Serratia marcescens
atgtctgctatcagagataaatctgcctatgttttagcgcaggcagtacgccagttgataaatgcaggtgcctttggcgaggtgctctctggggtggagagctgtgtactaagcgcacagtcgggctccgccaccatcgccaaacttgcatctgggcgtggtgcagtgcaaagcgcactttcaaatgtgatcgccatttgggctaatgaatgttcggcactcactaatggtgcctttgccctgcagttggctgcgctgaaagaggctgtgctgctaacagaaggcgaagctacgcaaaccgaagtagtctggaccggccccaaagtggaaggttcgtacctgcgcgccacccgtcaggtggtacaggatattatctctgccgcggagtcagaacttttggttgtgggctattggctggcgggaaaggaggattacgaaggcatcatcaatgacatcatcgagttgatagctcatgccgtcacgcgaggtgtaaaggtcaccatggtgctggacgagggcgaaaaaggctacggcaaaaacaaccgcgataccttaatcgccttgtggcccaaaggggttgccttgccaaaactgcttacgtggagaatccccgctgacgataagcaccttaaactacacgccaaggtgctagtcgccgatcgtcacgacgccttagtcacttcagccaatctcaccatgtatgcgctggatcgcaatatggaaatgggcgttcgggcgcaggggcaacccagtgaacggattgccgatcatttcgaattattgaggttgaaacaagtactcatcgattatttaggtcagtga

SEQ ID NO: 447922 - DNA, 939 bp, Serratia marcescens
atgtttccagcgctaacagagttcaaagccgaagatatttggcaaaccctgttgaaagagcgtggcgaaatagaaactgatgagattgatttgcgtctgccggagtggaacgccttccgcaatatcgaaggcagcaaccaaggcgatcaatccgacttttttctcgaagccggcgaagtgcccgatttcctcgctgataaagttgatcgcatcgttctggcccgcaaacttctggaagtgcgcgcactcaccagctttacccgcatcgattacgcttcgggcatggatgacgacggtatgggagcctcgcgtgcgcccatctataaagagcggcaggattggttgccagccgtcgaggtgcgtggtgaaggtatcttcttggagttaaaagaagaagccttaactgcctgggaagaggagcctgccgtacaaaagcgcgctgccgccatcgagcaaaaatacaaagaatgggccactgagcggggtgtggatgcagatgacttccccggcgcgcgttatgtgttgctgcacagtctggcccatgtactgatgcgccaattggcgttggattgcggctattccgaatcgtcggttcgtgagcgtatctacagcagtaccgatcccgagcgcaaaatggccggaatactgttgtacaccgccagcgcggattccgaaggcagcttaggtggtctggtggatcttggcactaaagaacgtttcccgaatttaatacacaacgcattggaaaatgctaaacgctgctcatcagaccctctgtgtgcagaccaccaacccgatgtacatgccaccattaacggggctgcttgccatgcctgcgtgctggcaccagagacttcttgtgaggcatttaaccgctttttggatcgcaacttcctggtgcccaccatggcatacagcaatatggcctacttcaaataa

SEQ ID NO: 447923 - DNA, 3444 bp, Serratia marcescens
atgcctgatagcagcaaacgagagtcgcgctcacgaattctagaagctctcgagcgggaattaatggggccaacaacagttgacgaatcaatcaatgaatttccgacaacccgatatatcataggtcgtttggcgcccctcaagtctgaaattcccgactatgaaaaagatgaactagctgcgggcaatgacgatgatgagggtggagggtacgaatcacaacctccgctcattgtaggctttagcccttcatctatgggcctgtcctttctggtttcgctggaaacaaaaaccatccatgcaaatgctgtctggggcgactatcgccgcgaaaaacattcatctgaaggccgcacctattggaaacgctatcagcgatccgttttagtagagggcataccggttgataaaattggcaaactgagtccgattcccttatcaaaatccaatgcgcccgcgtcagtcactgttactccagatggctttagacatcaaggagaagatggcgacggtgatggtcaggtttttctggagggtgttgttcaccatattgatggcgccaaggcggtcagtttatttctggtaaatcgccgacctaaaggtgacgattctgacaaagcaaaagatcaacaatggttaatgcaaccaaaactacaggtgtttggggctgacaaatacccgatcttcatcgccaaagatttcgataaagacatatccaaggatcctgaaattgcagcagccaatatgctctatcgtgatgccaaagaattcgccacagggcacggggtcgctgcaggatgggatggcctaaacgtcacccgtgaccgcgccagcctattattcacggattttattccgaacttcgaagtgccaagcctgatagcccaaagtggagcgatttccggtcttaacttggatatgtgggagctaagccaatgcgcaacgcccaatgatttgttccaagctatcgaaccgctcgtactgacctacgagaaatgggtggccgatagaaaagcggaaacgcagagagtgccctttaactcgacgcctgaaaatattgatacgtctaaggtgcttattgagtgctgcaaagatgctgcccgaagaatgcgtgaaggactggagctaatcagagacgagaataatgcgtttgaggcatttttattttccaatcacgttatgtgggatcagcgcattcacgccatttgggcaggccgcacaaaagatagtgctgatggaaaaacagttggatcgcctttcgacgaagatattaataattcgggcaaccgtacttggcgtccgttccagatgggcttcatcttgctcaacatcgccagtatggtgaataaacccaaatccggagagaaagttgcagcagaccgcaaactcgttgacctactttggttcccaacgggtggtggtaagacggaggcctatctcgggctcgcggcatttacactggcctatcggcgcttgcgcggcgatgttaatggcctagactccagcgctggcgtttccatcatcatgcgctataccttgcgcctacttacggtccagcagtttcaacgagccacggcactaatctgcgcctgtgaattggtgcgtaagagcaattctgaaaagtggggacaggagccctttaaaattggcctttgggtgggtaaagcaactacgccaaacgatgccaaagcatctggaaaggcgttggaggatttagacgaaggcaaaaaaccacgagatggtagtccggttcagttggtgtcgtgccctcgctgcggcaccgcactggtaacccagcaaggcaaacctgaaaatcaaacttacgattttgataatgtgcggctaagaacacttgttcggtgccccaatccaaagtgcgaattctgtgcacgtaagtcaaatgatcaaggtttaccagttgttgttgtcgatgacgaaatctaccgcgagtgtccttcactggttattgctacagtggataaatttgctcgcatgcccttcaagggcgaaactcaggcactcttcggcctgcgcgacagatatagcccaacctacgggcatctaacgccagggcatggtgaaaagccaaaccagcgtgtcgtcaaagacgctcagcgagcacgtcggttggtgccaccagaattgattattcaagacgaattgcacctgatctctggcccactgggtaccatggtcggcctatacgagactgcagtagattttctcacccgggtggaagtcgaaactggtgtttcgataccggctaagattattgcctctactgcgaccattcgccgagctcgcgagcaaattcgtcagctctacaaccgcgacctatcgatctttcctcctagcggtttgtcatccaaagattccttctttgccaaagagcaggaaattaaagaggatgacgacaaaactgctggccgcctctatgtcggattgaacgcccctggctccagtaccaaaaccttgttggtgcgtgtttatgcagcgctgttggcagcgggtgaagccgaaattacgcgagaccatgaagccggagacccttatgcaacagttgttggctacttcaacagtctgcgcgcattgggcggcgctcgtcgtctggttgaagacgacattaagaagcgtcttcgctatttatcccagcagcgaggattcccgcaacgctatatcaatgatcctgatgagctgaccagtcgactggattcctggcgtatccctggtctgttaaaacgtcttgataacagatttccacgcgagcagggtaagcagcacccagttgatgtcttgctggccaccaatatgatttcagttggtgtagacattgaccgcttaggtctcatggtcgtaactggccagcctaaaagcaccgctgaatacattcaggcaaccagccgcgtaggtcgcaaacacccaggattggtcattaccatgtataactggctgggtgcgcgtgatctttcacattacgaacacttccgaggctaccatgcagcgctttaccggtatgtggaagccatcagtgtcacgcctttttcttctcgcgcattagatcgtggtttgcgtggcgccttcgctgcgatgcagcgtttgggtggccaaaatatggcgagagaagtgcaggcccagaattttgatcctgcagtgcctggaacagatttgatgatcaccgacattaccttgcgcgcagctgacttggtcggcaagaaaaacgccaaactggttaacgaacgcctgatgtccagccgagatgattgggcacactatgcagatgacctgctgcgctattcttggctgaaaagtggcgagcgcccaccaaacaatgcccgggttttgctgaaaacgtcgggtactgataacgaaggccaatggtatacccccggatcactgcgggaagttgagccaacagcggcattttatctgagtgatgaggagtaa

SEQ ID NO: 447924 - DNA, 1248 bp, Serratia marcescens
atgagtagtaagcaggcaaaaaccatgatttccttgtttagcggagccggaggcttagacttagggctgagcgcagccggatttactaacaagctctgcgtagaaattgatcccattgcacagcaaactctcgctttaaaccaccccaagtggaaacttgcctcaccgggtgacattcatgcattggctcccagtgaattgttaagacagtcagggctaaagcccaaagagttgaccctgcttgctggtgggccaccctgccagccattttccaagtctggatattgggttacaggcgatactgatcgactaaccgacccgagagctaaaaccctgaaggcctatctcgatatcgtccgcgaagcacagccggaagtgatattgcttgagaacgtcaaaggcattgcttattccgacaaggatgaagggttacaactgttggtaaatgagctgaacaagatcaatcgagcaaaaaaaaccaattaccggccacatgtaatatctctaaacgcagctgactatggtgttcctcagtcacgagaacgtgtatttatcgttgccaacagagatggaaagcattttaaactgcctgcaccaacgcatttcgactctgataaactaaatggtcatgggcaacctcatttaactacgtgggattcgattggcgatttggatgtcgatatttggttggatgaggttaaaccttcaggcaaatgggcggagcttttaccaacaattcctgaaggccaaaactacctctggcataccgagaaaatgggtgggcttcccttattcggttggagaactcgcttttggtcatttcttttaaagctcgcgaaagacaaaccaagttggacgattcaagctcagccaggcccagcaacaggacctttccactggaaaggcagactactttcgattcgtgaactagcccgcctacaaacttttcctgataattttcagttttccggagatcgacgtgcggcgcacatgcaaattggaaatgcggttccgccggcaattggcgaattttttggcttggaaattcggcgccagttctttggtgagcgtgttcgtaaaaagctgaatttgattcctaaaagacgtaacgattgcccaccaccggaaaagcctaaagcagtaccgaaaaaatacttgtctttaagtggcactcacgatgcccacccaggaacaggaaaaggtccaagagcacaaaaacgcgaacaaaaggaacaagccaatgcctga

SEQ ID NO: 447925 - DNA, 693 bp, Serratia marcescens
atgggtaaaccacctgagaggtggttacagcgggaggagttgcaaatgttatgggaagcattggaagaagctggaaatggtggcggttctattgccgcgggagggcaaggtatcgcatccagcgttatcctttcccaagctgttgccaatgcattacgcctcgttattttcacaggagttcgtcgttctgaagctgtaaatatgcgctgggagcaaattaatggcgctcactggacaatacctgaaaccaaaaacggtaaaactcatattgtgaccttgcacccgcttgctatagccctactgaaaacccagcgcatcatttcaacgggggtttgggtattcgaatctctcagcaaaccaggattccccatcactggtgatgccataactcgtgctctcgaacggttgagaacaaaatacatggcagaaacggccacattttctccacacgacctacaccgaacagttgccacaggttgcgtggaatatctggatgcgcctaagcgcttgattgagctacttctaaatcatattcctaaagaccgcttgatcagaacctatcaagttggtcagcaagcagagaaattgcggaacctgtttctaaggtggggggatttcattgagcatgaaataatccagcccagtcatgatgtccctgataatgttgtcgagtttagttttagtaggaaatag

SEQ ID NO: 447926 - DNA, 654 bp, Serratia marcescens
atgatctacgccgtcaacaccggcttgattgatgctaatccggcttctggcatcggtaatgcctttgaacggcctaagaagcagcacatgccgactatacgacccgaagaattgcccaagctgatgcgcactatatcaatgagcaatctatcgatacccactcgttgcttgcttgaatggcagttgctgacactgatacgtccggcagaatcctccgcaaccgcatgggctgagatcgatatagaaaaccgtgagtggcgtatcccggcagaacgaatgaaggctaagcgtgatcatatcgtcccactgtcagaccaggcattagaggttcttaaaatcatgcggtctatcagtggcaggcgtgaacatgtattccctagccgcaatgatccgcgaaaaccgatgaacagccaaacagctaatgcggctttaaaacgaattggttatggcggtaagcttgttgctcatgggttacgttctatagctagtaccgccatgaatgaagcagagtttaatccagatgtgatcgaggtagcacttgcccacagtgaaaaaaatgaagttagacgggcctacaatcggtctatttatttggatcaaagactcgcattgatgtcatggtggggaagatttgtatatgaaaatatccgctaa

SEQ ID NO: 447927 - DNA, 597 bp, Serratia marcescens
atgaaagaagataaagagtcaatgagtgcttttgcacgatactggaaggtatacggtggctttcaggctgtatttacaagccgctacttttggtgtgcatttttaatgaccttgattctttatccatcttggactcattcagggtggtggaatgacattttatcactgatgccaaacttacttgggttttcacttggtgggtttgcgatgtggattgctattggagatgacaagtttaaaagaattatatctggagacgagattaacgagcatggagagttggagtactctccttacatgactgtaaattcaactttcgttcatttcatacttcttcaattgttagctattatttttgcattgctaactaaatcatatagttccattctaagtaatagtgcctttatgtactattacttagggatatattacaagtacctcctttttctcatgagttttattgcttattttatttttgtttactcattgttttctgccattgccgccgttatggctatattcagagtgtctagttggttcaatgagtatattactattgaaaacaaaaaaataaattctgactccaaaaaagattag

SEQ ID NO: 447928 - DNA, 894 bp, Serratia marcescens
atggcaagaacaaaaaaactcacgtatggagctgtgaatattactatacatccccattcttctgaaaagtatattgaactattcaagatggctagaagaattgctgagaatgtacatttgagaggcgattcatatgcagccttatcatatttttcagcatataaaagaggccagtctgacaaagagccatttgaaggggaaattttaaagtttatcgatattgatataaatggcgattggttcaatatttctagaaaagatatcgctactgacgaggaaaaaaataaaatcagcatacctgataacttgaaaccgaatgttggaaggtttacttttatattcttgccggttagtcatttgcttgtttacgaaatgcaagatggaaataaaaacctttcatcaaaacaggttgagttattcctaaataaaatattttctgatgaaaaaatagttaagaaatttgggcgtgttaatgttacggtgttaactgaacctgatagtgtggagaagattctttcattaaaggggattacatgcattaatatggttacacgacgacctaacccggatgatcttgctacagccgaaagtgtaatgcaaaaaagatttaggcggttgggagttatcgaggaagataaaacgtataagtcagataggggcgaagaaataaaacctgataaagagttaaagcaagatgctctgattgcttctagaaatggagaagtgagtgtaagacgaattaatgatgatggatatgtagaggttcattcaacaaatacactaccgcttagacgggttgaaccatttgatgccgatgtaacatctgtaaccgaattactaataatgaaagctcaatctcttagggatgagttcaaaaggctgttgaaaatataa

SEQ ID NO: 447929 - DNA, 255 bp, Serratia marcescens
atggaaatcatcaatccagaatttaccaagtttgtacaagaccttgcagactggcacgaaaagcaaattgataacctgcaattgatactggcacacccagaagctgacattagtttagggcctgacttaacaatcgaagccggttccgataaggctaaagggatacgtgtcggtatcatgcttgcccttaattacctgggtaagttgccgtttagccatatcgaatgcgaggataacggcgatgacgatcaataa

SEQ ID NO: 447930 - DNA, 438 bp, Serratia marcescens
atgacgatcaataaagcgcaatgggcagctgtcgaggccagccttaaagccggtgcgcgcattcattttgcccatcaaggcaatacgatttacgttaaccgcgcattagtcaccgaaaccaaattagtttatgtcgtttatatcaacaacgaaatgccacgttattggctcagtgaaggtgacgagggttatgaaccattggttacagtatattgccggaaagtgacctataaccctcaccaaagggcaatcaacaaaattaaaaagatgcgtggcggaaaatcgtatttaaagcgcaaagaaaacgcttatatgcatgaaaccattgtgcgctatgaagcgtttttcccatcggccaggtctgcagtctgtcattttaaaaaaatagaagggctaaccattactgcccctgacgaagatggcgggcgcgaattatag

SEQ ID NO: 447931 - DNA, 789 bp, Serratia marcescens
atgaacaacatcatgatcgatatcgaaaccttaggcaaaaaacgcggctgccctgtgctctccatcgctgccgtacagtttgatctgcagaccggcaatgtgggagagaccttctatgaacgcatgagctgtgatgcggccctcacctatggtttaccggaaataagcaccctggaatggtgggataagcaaagtgctgaagcgcgggatgccgcgtttaacggtgagcgtcaccccgtcagcgtcgccgctcaactgcgagcctttctgcaacgtgctggcggtggtcgttgcactccctggggcaatggttcagtttttgatatcaccatattggagggctggtttgaccgcgtagacccacaggtcgacgccaaaggggatgacatctatccctggaagttttgggacatcgccgatctgcgcacgctggtgcgactgtcggggataaatgtcaaagctatcccattcgctggtgaaaagcacaatgcgctggccgatgccctgcaccaggtgaaagttgcccatatggcatatacccaaattgagtcgcgtaagaaggtgttaccgccgctggatgacgaccttatcgcaattttggggagaccaaacttttcatgcgctcgccttgcacaagcgttgcgactgttaggccatgaagtaccgaggcgtagcgaaaatgagcaagctgcagtgcttcattttctgcttggtcattattttgttgctggtaagcaatggcgggaaatggcggaaactgagcttagtaaggtggccaatgatggctaa

SEQ ID NO: 447932 - DNA, 513 bp, Serratia marcescens
atggatatggattggttaattcaagatcaagttgtgttacgaacagtagagtatgaaagacacgaccgtgctgagctaaaaaccgaggcaagagtctgtctcgccactggcgcaaggtggtctgaggccgagagtcagagaaaaagccagcttgcgaaatacaaaatcacatacaccaacacgaaaggcagaaaaaaccgcaccgttccaattagcaaagagctctatgagtctctgcctgatgataaaaaaggccggttgtttagtgattgttatggggcgttccgatctgtgctggaaaaaaccggcatcgaattaccagcagggcaacttacccacgttttgcgtcatactttcgccagtcatttcatgatgaatggtggcaatattttggtcttgcagcgagttctcggtcataccgatatcaaaatgacaatgcgttatgctcacttttctcctgatcatcttgatgacgcggtaaagttcaatcctatctcaaaatttgtattttaa

SEQ ID NO: 447933 - DNA, 786 bp, Serratia marcescens
atgactacagttgaaaaaataatgcaagcaatcagagcgcataagattgcatcattaatcgcaatccttataaccacactgattttcctagcacctttactcttatatttttacacattccattactctctatcgtccgatccaaataaatggtcagtatttggctcttatttcggtggtgtatatggcccattagctacaatcatcagcgtaattgttctagtaataacagtaatagagattaatcaatccaacaggataagcatcacagaatcgaaaaataacaaccacatcaatgatatagtaaatctttgcgagattttagataaaagaattgataaaaataatcttattccgaatagaaattatcaatttgaatctcttagcgacataataagaagaaagatcactaacgatgtttcattaaatgaatatgacatctggaaagaaagtattagaaagttcgacaacagtgaattccctctctttgaaaatgaatcaaaaatcatggaggagattttaataagaatcaattcaagtgaaacattagaattaaaagaacgtgcaaaaagcattttttatgggatcatacccaataatgaacgattctggctagaatgttatatgcatcgttttaaatctccagagcgggagcctttaataccttcatggggaacttttagccaagttccaacccacctgaagtatcatgttgaactaaatgaattaaacaacgaattcgctatagaaagtggcgataaaaatggcggtagaaatggcgaataa

SEQ ID NO: 447934 - DNA, 873 bp, Serratia marcescens
atggcggcacagcgattggcggagaacaacgtcgcggtcgaaaaggcgaagttggctgagaatgtttacaagaccaccgattcactaggcgaactacctggagtaccggagggctggcaagatatcagtaatgacgagcgagctttaaataggcttggtctggacagtaaaatgctttatgacaagccgataaatcctgattttttagcccgagtttatcaaccagacgagagtatctttggtaaaacgatgagcccgacggtggtgtttcgaggatcgcgtgcgcctgagttccaggaaggaattagcactgcagttcaaaaagctttattaaaaggcgatctgtcaggcattaaaaacctgagcgactggacaaacaatggtgctcagggaatagggcttaattctgaatactacaaaaaagcggttaatatcggtaaagcaatcaaaggcgatgttgggatatctggccattcgctgggtgggggcatggcgtctgcggcctccatggccagcggtaaaccggcatggacgtttaatgcagcaggtctgaatgcgggaaccgtagaaaaatacggcggttcgataataggcagagccgataatattcaggcgtatcgtgtaaaaggggagctattgactaagctgcaggaggttgatttgtgggaggatgccaaagacctcaatttttatccgcctgcggtgatggcgaaagagcggttgtccatgttggcgcctgacgccgtaggggttaaacacacgcttcccggtggaacaggctcactgctggataagcacggtatagaccaggcgatacaatgcattgaaaatgaaaaagacgatgacattgccacaatcaagggaagaatatga

SEQ ID NO: 447935 - DNA, 975 bp, Serratia marcescens
atgaatccaataattattgatgcagccactatatatgatcctgctcgcttgcttgcagtattagcctctgttgatatcagatactctgaagtttgggtttcccaacgatatgatcatttcaaagaaaaggatttcttaactggatggggtacagatgcccgcattgggcttcttcctgcgctggatggaagctataaagcaaaacctttagaaactccgtcccttgatatgaaattaaatccaaagcattgcgatactgggccacagatacttcgctgggctcttgataaaggtatagttgtacctaaggatttgtttagtcttgaagaacttgctatagagcttgaagagaaaaatggattagcaaatctttccgaggcaataatgcttggtccgccttccgcttacgatttaagggctggcgaagaacaaaccaaagagtatttgaaaaaagcagggaaagaaagcttagggccagaatatgcctggaggctagaaccatatggaattggccacggtcttggtttgatgttggctgcagcggaagaatactcagtggagccatttttcagtcatccattttttcgagatggaatatctagatataactatacacattataaacgcgacaagtatattggcgagttatctcaggcccatgcgagtcaagaaagaggcgatgttgaaataggtaactccatcatagaggctaagaatcttttaaaaagccctgagtcacttacgcttgcagaagtagctttctatttggatcaaaaagaacgtattgactctattacaggaatcattaccgcttcaaaagatctcgaaagtcgcggaaaagatattggcataatagcaagcaaatatgttggcactattgcggcagataccttgcttttcggaggtctacctgtatcaacgtcaattgtttcactatatgatatcggaacaagattctttaagtcgagaaagtaa

SEQ ID NO: 447936 - DNA, 630 bp, Serratia marcescens
gtggataatattctgggactacagttcaaagatgctattatgacaggtgctgtcattttaggaccaatttttgccgtacaagttcaaaaatacttagaacaattcagagaaaagaaacaaagacgattaaatattttcagaagtttaatgtcaacacgcgccgaacgcctcaatcgtgagcatgttcaagctttaaacatgattgacattgagttttatggccgtatgttacctattattagaataaggtaccaaaataagttggaacaagctgtaactcatgcatggaaaagttataacagccatttaaacaagtcaaatgaatataatgacactaacatttggatagcaaaaggcgatgatttatttaccgaactattatatgcattagctcaagcgatgaactatgattttgataaggttcagctacaaagggactgctatcgcccactagctcatggaaaccttgaaagtacacacatgaacattttgaccggtatcgagaaaattttagccggagatagctcactaccaatgcgttttacgaacatcccgaatacttctagtaaatcggatgatattacagcaggtgacaatacagaaccggctgatacaccaagcccccgttaa

SEQ ID NO: 447937 - DNA, 129 bp, Serratia marcescens
atgactttagaacaacgaattgaagtccttgagaatgaaatgcaaaaaatgaaagaagcgatccacgtggagatcgctccatctaatattgataaaggagtggtaaataaattgaaaactaatagttag

SEQ ID NO: 447938 - DNA, 753 bp, Serratia marcescens
atgacaattttcgtcgtcactcataaggagtatgcatttccagcaggggggtgctatgtacctatcagggttggaaagtcgaagtttaaccttacgcgaggggtttccgatgatactcaagataatatctcggagttcaactcttctttttgtgagctaacagctttatattggatttggaaaaatactgatgacaagtttgttggcatgatgcactatcgccggtactttaaagggaatgggggtggtgagtttattaatgggaagtcgattttaagttgtgaagaaattagtaagctaataagtaagtatgacttggttgtggcggagccaagaaattattatatcgtttccataagaaagcattacataaaggctcattatgaagcagatttgcagttactagaaagtgttctgcaagagaaacacccccagtatatgagttcctttaagcaagtcatgaatgggcgaaaattgtctctctataacatgttcctggcaaagagagagacgttagataaatattgcgagtggctttttcctatgctttttatattggaaaaagaaataaaatatagagattatgatacctatcagaaacgtgtgtttggttttttagcggagcgtttatttaatgtatggatcctttacaatcagagtgagttaaaaataaaaaaaatgccaataataaatattgagggtgagaatgtaataaaaaaaggaattggaatgctaaaaagacagtttttatga

SEQ ID NO: 447939 - DNA, 1134 bp, Serratia marcescens
atggtaatgtattgggtggttggttatacgcttttcttatttagttgctatgaagtgcttataactaacgggatggaagttaaagaaaggaaaaaagatccgttagtaatcctattgtttatcgcaggtgtcgcacttctgattgtctttggcggtattcgcggtccgatgagtggtgttgatgatgaccagtataagcagttttactattattttatccagcagatcgatattgattctctaggagatataaaggataaatatagatatgagccagtatttatatatcttgcctatcttagtagctttataacaaagaactctaactggtttctcttatttgtttgcttttttgcggttagtattaatgcgataacatttaaaaagtactcgccgttaattttggtttcactttgcttgtattctgtacacttattcataaacaaagacatgaatcagataagattcggaattagtagtgcatttgctgttgcgtcgttttgttatctgtctcaagataaatatactaaagctctcattttattcttgtgttgtatactctctcacaacacagggtatgcagctattttaatggttccttttttatttataaaagaaagaagatatttgccgttaataataatactatgtgcaatacctattggtatcgttggtggaaaaagtttgtttcttaactatttttcgcttataccaggggttggtattatggctcgaaattacgtgggcggagagtttgatggtgagttgagtgtatttggtctggctaatctaaaaaacattctcttcattgccgttttttgtttctatattctaagagatataacggaacctgagaagtttaagctgtattatatcttaatattggcctatgcaatcggtggcgcgatacgcattatattttcagacttttcaattatcggtggtagagtaggtaatctttttttacatgcagagccgatactcatggctatattcctgtccaaactaaaaaataaattcatggccctaggcttctttttcttatttattagctacttcttaacatacaatacaataatattccctcagtcgatatttggttatagtgtatcccaaacatttgatgcgttttaa

SEQ ID NO: 447940 - DNA, 2541 bp, Serratia marcescens
atgatgttgtcgcctgctgggaagctatttcgttttcaggtgctggggttatgtatcacgctggcgctgggaagttcatcaacgtgggtatatgccgaagacggtattcagtttaatgccgacattttggacgtgaacgatcgcaaaaatatcgacctaagccaattttcccgcagtggatacattatgccgggaagttacagcatggtggttcatctcaataaaagcgagttacccgagcagaaaatccctttttatccgccggacaacgaacctgacggcagccgcgcctgcgtcggcaaagcgctggtcgatcagctggggctgaaatcggcggcgatgcaaacgctcacctggtggcatcagggagagtgtctggatgagtccagcctgaaagggatggtgtcgcgcggcgatctggcgacgggcgcgctgtatttaagcgtgccgcaggcctacctggaatacagctcggaagactgggatccgccgtcgcgttgggatgaaggcattccgggtctgctgttcgattacaacgtcaacgcccagagccggcagcagcagcagggcggcacgcgggggtacagcgtcagcggcaacggcaccgccggcgccaacctcggcgcctggcgcctgcgcgccgactggcaggggcaggtgaaccatcagaccggcagcgggcaatcgaccgacaaacggttggactggagccgttactacgcctatcgggccgtttccgcgctgcgctcgcgcctgacgttgggtgaggattatctggattcgggcattttcgacagcttccgcttctccggcgtgagcctggtgtcggacgacaacatgctgccgcctaacctgcgcggctatgcgcctgaggtggtcggggtcgccaaaaccaacgccaaggtgacgatcagccaacaggggcgggtgatctatgaaactcaggtggcggcggggccgtttcgcattcaggacatcaacgacgccatcagcggcgaactggacgtgcgggtggaggagcaggatggcagcgtgcaggcgttcaaggtcaacaccgccagtattccgtacctgacgcgccccggctcgtggcgcttcaagctggccgccggcaaaccttcggattggcagcaccattcgcgcgggccactgttcggcaccggcgagttctcctggggcgtcagcaacgggtggtcgctgtatggcggggcgctgctgggcggcgactataacgcgctgtcgctggggataggccgcgatctgatgatgttcggtgcgctgtcgttcgacgccacccagtcgcgggcgcggttgccgcagcgggatgagacgctgagcggcggctcttatcgcgtgagctattcgaaaaccttcgacgagctggacagtcaggtcaccttcgcaggctatcgcttctcggaggaggacttcatgagcatgggcgaatacctcgatgcgcgctattacggcagccgggtcggcaacaacaaggagatgtacaccatcaccttcaacaagcagttccgcgactgggggctgagcagctatctcaactacagccaccagacctattgggatcgtccgtccaacgatcgttacaacctgacgctgtcgcgctatttcgatctcggcgagataaaaaacctgaatctgtcgctgtcggcctaccgcaaccgctacaacgaaaccaacgacgacggcgtgtacctgtcgctgtcgatgccgtggggcaacggcgccacgctcagctacaacagcacggtgaaccgcaatgacaacacgaaccgggtggggtactaccagcgagtcgatgagcacaacaactatcagctgagtgccggcagctcgcgccgcggcgccaacctgagcggctactacaaccacgagggcgatgcggcgcgcctgagcgccaacgccagctatcaggaaggacgctacagcgccgtggggctgtccgcgcagggcggcatgacgctgacgccggaaggcggcgcgttgcaccgcgtcggcatgattggcggcacgcgcctgctgctggacaccaacggcgtggccggggtgccggtacgcggctacggcagcaccgtcagcaccaaccgcttcggcaaggcggtggtggcggacgtcaacagctactaccgcaacaaggccagcatcgatctggacaagctgggcgacaacgccgaagccacccgctcggtggtgcaggctaccctgaccgaaggcgcgatcggctaccgtcagtttgacgtcatcgccggcgagaaggcaatggcgatcgtcaaactggcggacggcagcacgccgccgttcggcgccacggtgctgaacgcccgtaaacaagaaaccggcatcgtcaacgacggcggcagcgtctacctgagcggcatcaacgccggcgagatcatgacgcttcactggagcggcgcggcgcagtgtcaggtgcagctgcctgccacgctgccggccgacatgctcacgcgtacgctgctgctgccttgccggccgatcgccgcggcgccagcggagccggttgaataa

SEQ ID NO: 447941 - DNA, 975 bp, Serratia marcescens
atgaagctgctctctctcttttctgaacacacggcgccggaaagtttctcccggatactcaccccgacacaagcgtgccatgagctggaacggcattatctgttcggcggcgcagccggcatatcgataagcagccggtattccataacccgtaatactcaatccggtattggcgtcaccggttatcgtgaggacgcggctgtgaagcgcagagtgttcgatgatctcaaccggggcggcttgctggcgattgatgaggaaataggcgcctggacgccgaccaaatacgcgttttacgtcgacgcggaaggccgattacagcgctatcccggcagctctcttcctgccttttatcctacagggcgcgtgatcgcccgctatgaagaaatggtcagccgctatggccagcgggcaaaaccgacggtgctgccggcgaggcagaatacgacccggaatccccctctgcagcaagctatcgctaccgcagtggcaaccgttgccgccacggtacaggccatccgtccgatgaccaaggcagagcgctggcaagaacgccaatacctgatagggcgaggcaaccgcagcatttacccggatgcgcgcatggcggcacagcgattggcggagaacaacgtcgcggtcgaaaaagcgaagctggctgagaatgtttacaagaccactaacccactcaaggacacgatagacatccctgagggctggaaggacatcagtaacaatgatggggcgctgggtaaactcggtttaagcaaagatatgctctatgacgatgaggatacgccgggctttctggctcgggtttatcagccagatgaaagggtctttggtaaagcgatgaatccgacggtggtgttccgtggatcgcgtgcgcccgagttcccggagggaataagcaaggctgcccagaaagcgttactgaatggcgatttgtcaggcattaaaaatctgagtgactga

SEQ ID NO: 447942 - DNA, 1773 bp, Serratia marcescens
atgtgtataagagacagcgttcagatagcgcaaacgaaacgcgatcggatcctcaccggcgcgccaggccagctcgtcgatccaggactcatgggcgaacacgttgggcagcgccgaaacgccgcgcatccacgaagcccgcacgatcggcgcggcgtcctggcagaccacccgcatgtgcggatactcgtattgcggaatggcggtgcgatcgcccatctgctgcacgtcggcccggttggccactttgccggtcaacaccagcggcaaggtcacggcattgttggagggatagctggttttcaattcgtaggccgccacccggttttgcgcatcgaggccgccgcgcacccgaatcagctggccggtgcccttcggctcccaaccggattcctgttcgcgcatcagctgcacgcgcaccggtcggccggtggcccgtgccagcagcgccgcgtccgccgagacgtcgtcggcgcagttgcggccatagcagccggaagcctccatgcgggtgatgtgcacctgcccaggcggcagctcgagcagcctggcgatatctttgcgcagatcgtgtgggttttgcgtgccggaccacacctgcgcccgcccgtctttgacctccgccaccgcgcaggaagggccgatcgaggcgtgctgatggtaaggccagacatagtcggcctgcacttcggtatgcagcaatgccaacgcggcgtccgtgcccgcgtcgtcgcgcagcacgcggtcggttttcggattggcctccagcgcggcgggcagcgcttccggcgacagatccggcaatccggcccagggttgccaggtggttttcagttggcgcatggcggcgattgcctgctcctcgcgctcggccacgatgccgatgaaatcgttgatcaccaccagtttcacgatgcccggcaggtgcgcgatcgagcttttatccaccgacagcaggccactgcccaacggcgcgctgctgtcggcgcctgcgtatggcgggcgcaccacgcggccatgcagcatgccgggcaagcgcaggtcgtgtacgtaggtcagcccaccgctgaccttggccggaatatcgacccggggcacggcgcggcccacatactggttctgccgttcactgttcagctgcacgtttttatccagcatcacgtgcagattttgcccactcgccagctgcgcatagctcagcgatcgccctgggttcccggtcacaaatacctgccccgccgccgccgtcagctgttcggccggcagttcgaaggctttggccgccagcgccgtcagcaggtcccgcacctgcgccgccgcctgtcgcagcggcaccgacgtcacctgaagggtggcgctggcgatggtcggcccctgatccggcgtgcgttgcgtatcgccaaggatcatcgtgacttgctcgaacggcacgcaaatttcatcggcgacgatctgcgccagcgcggtgcgaatgccggtgcccagatcgacgtggccattgaacgccgtcacccggccgtcggcggtgaggctgataaagctgtccacccgatccagcggcagctcggcgggcgatgcaaccgcctcggcggcgaaggcgttaaacgacgcgggcagcaggctgctgaccattaccacaccgccggcctgcagcagctggcggcgggtcagttcgaggcggctcatgcttgcctccgcgcggccagcagatcgcgggcgcgctcggcggcatgcaggatctcgatatgcgtgccgcagcggcacaggttgtag

SEQ ID NO: 447943 - DNA, 291 bp, Serratia marcescens
ttgctgcccaccctgctgccgttggccctcctgctctttttgcagctgcgccagctgctgctgcagttcgcccgtcagcctggcagcctcggccttctgctgttccagctcagcggcggccgcttttttatcctgctcataacgctggcgcgctttatcgttggtggtctgggccgccgccagtttctcctgccaagccttatccgcctgttcaggcaacgccgccagccgttgttccagcaaggcaatgcgccggtcgcgctcctcggtttgctgcttttgccgcgctaa

SEQ ID NO: 447944 - DNA, 483 bp, Serratia marcescens
atgttggctaagttgtttttcggccgccgccgccgctggcgtcaggcccaactgcccgcgctggcgcaactgtcgccgccgcccgccgcgcaggcctggcgacgactgcgtcgccaccggccggcgatgatctcgctggcgttgctggtgctgttggcgttgctgtgcctgattgggccgtcgctgtcgccgtggcgcgacgacgccggcgatgtgctgaatatcaatcaggcgccgagcggcgcgcactggttgggcaccgactttctcggccgcgatatctgcacccggctgctgctggcggggcggatatcgctgaccatcggcctggtgtcgatgctgctgtcggtgacgctgggctatgtgctgggggcgctcgccggttatttgggcggcgtggcggacaggctgatcatgcgcttcgccgatctgctgatgaccattcccggcctgccgctgctgatcatcatggggcgatgctga

SEQ ID NO: 447945 - DNA, 468 bp, Serratia marcescens
gtgacgaaggatttcaccttcagcgcggcctacagttataccgacgcgaagatcaaagacaatctgtacagcgaaaaggattatcaccagcagctgtccggcaccgcgttgacctggcagccgaacaactggtacatcgtcggcaccgccagctattacaaagattatgtgccgagcacccgccagcgcacgctgtcgcacttcttcgccggtgacggctacgggctggaaggctttgtcggttacaccttcaatatcgacaagccgttcctcaaatccgtccagccttacgtggcggcggactcgctgcggctgaaggaggacgaggcgtatcacgccaaccacgtttacctcggcgcgggcaccaccatcggttacggcctgtcggtgtatgtggagcgcacgctggccaacagcagcgacaacgagccggactccacctggattacggtgttctacgacttctga

SEQ ID NO: 447946 - DNA, 579 bp, Serratia marcescens
  misc_feature (414)..(423): n is a, c, g, or t
atgctggctatttttttaccgtcttatccttttcgcggcgtaaaagctccctacctgtgggtgttttatcggttgttgagcactttgcaggaaaaaagcatttttatcaccggcggtgattacttgcgcgagcctgggctatggagtgaacaaggacgctgggagttcgatgtacccacgatgaataatctgggctattcgttgccgactcaggatatatttgatcgacatgagtttgaactactggatgatggcctgtttgctcgattgttgaatgaaacgcacgaaaatccaatggctgcgttcaatgtgtttcttactcagcgcattcccgagttggagtctgagcttaaggggcttttacatgcgaaaataaaatgtggcattgaagggattctcagcatttgtaattgnnnnnnnnnngaatcccttcaatgccacattttattttcgcatgtaattgcccttcgctggaacatgttgcgcaagagctggcgattcccgttattcacattgaggtgggccctctacgttcgccgatgtatctgggaaccggttacattgattttcgtggcgtaa

SEQ ID NO: 447947 - DNA, 303 bp, Serratia marcescens
atgggggataacatcaattggatcttgaaggtcaacgtcaattgggataatggcatctccggtagcagcttccaagccagcaaacagtgcgggctcttttccgaaattccgggtaaagttcactgctttaaccttggggtcattgatagccagcgaagaaattatttcttctgtcgtatcggagctgccatcgtttacgaaaacgatctcaacgtctatatgctcaaaaagcttgaacttacggacagactgatagaaaagaggaattgcttcttcctcgttgaatacgggaactacaagtga

SEQ ID NO: 447948 - DNA, 423 bp, Serratia marcescens
atgggaatgatgccaaaatttgccagcccggcagcagactacgttgagcgccgtttgagccttgacgagatctgcatttcaaaaccgagcgctacttatctgctccgtgccgccggccaggcactggcggtcggtatccacgctgacgcgttgctcgttgtcgattcgtcggcgacgccggtgcacggcagcattatcgtagccgccgaggaaggcgcacatgtgttgcgccggcttcgtctttacccgtatcgcgcgcttgagtttctcgatggctcgggccgggaaactgaactcggtaatgaagattcgaaagaagggatcgaggtgttcggcgtggtgatgtactgcgtgaacgatatgcggagttgtgagtgggatgatctgcctgttatttggagggatatgagaaacgtttcatag

SEQ ID NO: 447949 - DNA, 915 bp, Serratia marcescens
  misc_feature (841)..(850): n is a, c, g, or t
atggcaggtaaggggtggagcgatacagggataataaataacaaagctttactttttgattctgaaggaaaagccttttctctggcagccaaaaacggtttcttttccatcgaaagccttggaggcggaacgggtaaagacgatagtgcgctgatggagatagctcaacatttatcaaagcaacccgtacagttggttaaagatagagtttattactatggtaggccggtcagtcattctggagcagctggatggatcggaaataatgcgacgataaaatgcctccctacatcatctgatgctcctcggtttccatttatcacttctccagtgacagctgaaaatgcacccaacgatattcggcactctagctcaggggtgcgaggtgcagtgtttaaagatctgactattgatactgattatcacgatacagctggaaaggttggattcctctatgcagagaatactctacatgattggagcggttgccttttcgatagtgtgatttttaagaatgctaaatttgataatcttgccatgcaaatgaattgtcacgggataacatttaaaaaatgctcattcacgaactctgggcaagatagtgtcgtggtcagaaaaacatgctataacatcaagttcatcgatgggtgttttttttcagatactgcaaaagtacagtctggtggtgatggtgttgttattaaagggcggggtgtcagcgttataggttgccgatttgaaaatatcggcctgggtaaaaaaggggcggcgattgccaataatgctgaagatgcggataacgcacaagagtccagtaatggcgtgtttaataataactatnnnnnnnnnntttctcaactgctatggtgggcttggaattggtacggtaaaaagctcactggctttctcaaataa

SEQ ID NO: 447950 - DNA, 330 bp, Serratia marcescens
atgtttttattagggaaattgtttggcggcaaggatagcgccaaggtgcgcgcaattaaaatgttgccggaggtttacgccgatatggttggtggggcgggccgttgccgattgaagcatttgcggacggaaatcggctttttcgagctgcatttttccaccgcggaaggcgaaaaatacgtttgccagatgaccgcctgtgtgaccggcatcgatctggtttttgccgccaacaaccgctccatgctagtttcatccccctttacagccgaaaaactgcgcccggtgctcgagctcgccctggcctgttgcacggaatcgtcggcctga

SEQ ID NO: 447951 - DNA, 747 bp, Serratia marcescens
atgtcgattccaaaagcttttgtatcctactcacacgactctcaagaacataaaaaatgggttctcgaacttgctacacgcctacgtaataatggtgttgatgctattttggaccaatgggatcttaaaccaggtgatgatcttccacattttatggagaaaggtttaatctctgccgatcgcgtattaatgatatgtacagacaattatgtcgaaaaagctaatttaggtgccggtggcgttggatatgaaaaaatgatagttacagctgacttattaaaaactatcgactctaacaagattatcccattgattcgtcaaagaggtggtcatagtgttccaaattttctgcgctctaaattgtttttagatttttctcttgaagatgagtttgagttttcatttgatgaattggttagaactttacacaacgcaccactttatgaaaaaccaatagtcgcaaataacccgttcgttcctgtctccaaaacaccaccaaatcgtacaggtgatggtgtgcgggaagtaatgaaaataattgttgaagaatttgagaatcaatcatttaactatatcttatatacaaatattgtagctagaattcagatgtcaagaattatgttagacatatatatagaggaggctaagtctttggggttaataactcaagatcatgattctgacatttttataacaacccgtggtaagcattatgcaatagagaacaaaatcattaggcaaagataa

SEQ ID NO: 447952 - DNA, 1314 bp, Serratia marcescens
atgagtattatagataagattttttcctccgttgctgggaatgcaaagataagaataagtgaccctcttatcggcacattcgtgttgtcctggattgtatgtaactggagttatttgtcactacttttctggggtgatggaaaggctagtgaacgcattaaaatttttcggagctatctttccgaggctcctttgtggggatggagttatatactgttaattccacttacaatcacctttttttatttatttatctttccctgggtatctcttttaattaattactttcagcactgggctaatgaaaaactacacaaacaagctattgatgtagagctaattaagattaatcaacaagaaaaattgaacaaagaaaagctaaaggcaaatccaaacaaacagtttttagaacagctagtacagcaagatattgataaacgcagtgaaatacaggaacatattaggcaaaggacttctcgcctagaggcaaaaacgctagaagctaaagaaaaggccaaagaacaacaagcaaaaacacatgaagctgaaagtaaagctaacttggcaagattagatttagagaaaaagaacaatcaagcaacgttggaaagaataaagtttgagagtgacagtgcgaaagcaagggctactcgtgcctctaaccgctttccatcaatatattttttaatgttgaaaattgaggaaagtttaaaagatgacgacatagacatctccattaaatccttaggagctattgtttctgcactttttggctataaaaatcttgaagaactccttggtgatagtaatttcaacaatgaaaacctagagaaagttaaatatatttattatgatgggaacttagctaagcgactggatgaaatagtgctgaaagaaaaatctaacaatgaagatttttcagcagatatgatttttggtcatttggaaatgttgtttgaagaagaacctttcaagctaatatctggatatcatcttgccgaagaatgcagggaagaatttgagaataaccgttatgacatattgaatctcgatggggtttctggtgctatcgcagaatcagatacgatttttgaagacatagaagatattaatattgagcactttgattttgataaaggatttcatactgagttatctgctaatgcaagtggctatcattacagggaggagggagttcccggtcggagcatgagcatttcagtcaaaatgcagtgtaatgtagtcgttggccagtttggcctaacttcaattgaacagggcaatgtaaatggtactttagatgattatgactag

SEQ ID NO: 447953 - DNA, 774 bp, Serratia marcescens
atgagcaagtggataatggcaatggcgttactgtttactgttctcatgatgcaaggatgcgaaaaaaacatggaatatgaaccacaggatttttttgaaggccgtcaactggaagtcgcacagctgatttatgatggcgacgaagtgaaactgaatgagaagcttccatcaataagcaaggaagaactgaatcgaccagtgaaagcagacatgaccctgctgttttggtcggtgctaaacgcaatctatgataaaaatacgcctaaaagactgagcattattactgacttggttaaagcgggtgcagacccattgcaacccagaccggaaggaggaagcagtccagctgagtttgtcctgcagggcgataaaggcgtctggataaaagcaatgttggatggtgggttaccaccgaattctagagataaagttcataacgagccaattatattcgaagcattagacgcgaaaaacactgaaacgttaaaggtgatgctggattatggtgcggatataaacacaagggactcattgggaaacaccttgttaataagctctctggattctcgttcgtttgatcatactatactcctgttggagagaggcgcagataataaaatcaaagggaagtttggttggactatgggcaatcagcttcagcgctttatagatagaggcgtaggcgatgccgaagataaagagaaaattaacaagataaaagagttgttaattaaaaatggtggtgactggcctccactacctgtagaaaattga

SEQ ID NO: 447954 - DNA, 1503 bp, Serratia marcescens
atgttttcccgtttgaaactgctgtatatcgccgatgatattatttcgcctgatgaattcccccgtatagtcagcccttccagcgcctgtcacggcctttcatacatgccggacaatgacattctgtcgcttttttctggttttcgcggtggcgaacggatccgccgtgaagtcggcgttacgcaaaacggaataagctctaacctgcgcgcaagagtgcagagcgacctgatgagcggcgttgtcgtagcggtcgaaacccggcccggcgtgttggcgacgatggggccattttacgccgacatcgacggctacctgataccgcaggggagacaagagcccaactacccggtggacaggatagtgaagcggtacgaagaggccgtgaagtcttatggcggccgccgggcgcgcccgtccgtcttcccagcacaagtcacgcgggccaaaccggcccttggcccggatatcccggcacaaggtggaagagcctcgcagtcggtcgtgtctggccccttgaccaaggcgcaacgctggcaggagcgaaaatacctcattggccgcgggcaacggagtatctacccggacgcccgaatcgcctcggaacgcctggcggcaaacaatgtcgccgtcgagaaggcaaaactggcggagaatatctacaagaccacgaatccgctaaaggagactcccggcgttcccgaaggttggaaagatatcagtaacgatgacttggcgctgaacaaactggggcttaaaagctcaatgctttatgataacaatttatctccagattttctggcccgagtatatcaacctgataaaggtatttttggtaaagatatgaacccaacggtcgtgttcagagggtcaagagcgccagaattcccgcagggaatcggcagtgccgcaaaaaaagcacttaaaggtgatttatctggcattaaaaatgtaaatgactggataaataacggtgctcaagggattggtaaaggttctgagtattataaaaaggctgtcgagattggtgacggcatatcaaaaacccccagcattgatatctctggtcattcattaggtggtggaatggcctccgcagcatcaatgaccagtggaaaacccgcctggacgtttaatgcagccggactccatcatagaactgtaggaagatacggagctgagatgattggttcagccaagaacatacaggcctatcgagtggaaggagaactgttaaccacgttacaggaggttaataacgaaagtgactatgagcttataaaaaatgccctgcccgatgctttgcaaaaaccctggggcgtagcattgcctttcaccttgaaagagtggtcatcactggcgctgcctgatgccgccggcataccgcacactcttgcaggtgggacaggaaccttgctcgataaacacggtatagaccagacaataaagttgattgaagatcagaaagacgaggatgtcgccaccatcagggggaggatatga

SEQ ID NO: 447955 - DNA, 561 bp, Serratia marcescens
atgtcaacctatcccactggagtagagagccacggaggctctctgcgtttgtggtccatctatcaagggaagcgggtaagagaaaatcttggcgtccctgatacagcaaagaacagaaagttagctggtgagcttcgctcatcgggctgctatgcaataaagactagtgtctttaactacgctgcacaattcccacagtcagtcaacctcgctaaatttggttttgtcactactggcataactctaggcgaggttgccaagcggtggttggaactgaaacgcatggagatcagcttaaatgctatcagtcgctatacctcctatatcaaggttgccactgagatattggggccagagcggcttatttcgtcaatagcacatgaggacattttaacgacaaggaaggaattgctcactggtcatcaaatatgcggaaaataccagaagacgcgatgtgcgaagaagaggcggacggttaggacggtaaacgtttatattgcctgtctttccggcctcttcgagttcgtagccagaaacggttatgttggtaagtcaccatga

SEQ ID NO: 447956 - DNA, 261 bp, Serratia marcescens
atgacctatcaactcatctatgcagatccgccgtggagttatggcaacacaatcagtaatggcgccgccggcaatcactacagcacgatgagtatggcagacctgaagcgcctgccagtatgggctctttctgcgccggatagcgtgctcgcgatgtggtacacaggcaaccacagcctggaagcgatcgagctggccgaatcatgggaatttagcgttagaacgatgaaagcgttcacctgggtgaaactgaaccagtag

SEQ ID NO: 447957 - DNA, 375 bp, Serratia marcescens
atgaatacctcattcagcttccgcacgatggcgatcgggttgctgctggtggcgatgattgttgccagcagactggcgttttacttccacagcaacgcagtaaaggtcggtgagcaggttaagcagcttcagaacgataacggcttacaggcgaagacaatcgccacacaggcgtttcagttccagcgcgccaacgaaatcagcaacgtggcgaaccagtacggcatcaacactgacgcagccacccaggagaaagaaattgaataccgaacgatcctcaagaatcagccgacgtgcgatcttgctgttcccgctgctattgctggtgggttgctcgactacacgcaccgtttaccggctccactgagctggtaa

SEQ ID NO: 447958 - DNA, 657 bp, Serratia marcescens
atgctatcgattgaccgtattttggcctcatatggtgggcaaccgttcggcaacaggcacctggcgattgataaatttctcaacgattacttctataaatcgttcaacaacacggtgcgtctgacaaaaacaaacactaataacctaccctcggatttggacaaggttgagccatatcgcgggatttcacaccgtgcttttgtgaatctatcacgctacgctcttgggaacgccaatgtgcatatctacgaggctaaaatttttggctgcaccaggacgccgttttggtcgccccacacgcagggaaccgattactacggcaccttgcacgccgggttttatgagaatgtcggttcatgggatgcgggaaaatactctgtagaaaccgagcattacgccaaaggcaacgacatttataacgctgaccggcatctcatcaaatttggtgtagttgagggtgtgatgggcatcggtcgcacaccctatgcaaactccgtccagcgcctgcccgccgagaaacaacgcgtgtcgtttgatagacgaggcacgataatcaatgcacgagatatttctgaactagatatctttcaggatgacggcattacgagcgataagctgctgcggtcactagtagtttggactggcaataagcaatga

SEQ ID NO: 447959 - DNA, 1002 bp, Serratia marcescens
atgaagttttcaggacaaataaattcagttcagatactgaggggaattgccgcactagtggtaattctataccacaccaatcacaagactattcagttgggaatgcaggccgataatgttttttcatggggtgaaattggcgttgatattttctttatcatttccggcttcattatgatgcttgtgactgaaaaacaaatatcgaaattgaagtttttcaaagacagggtaacaagaataatcccagcctactggaccgttacgcttattgcattaatcgcattccttttagctccatccttagtcaactcttcaggcggggaaactggcgtagtccaatcattcacgttaataaaaatcccttacgatataaaattccttgtacaaaatggctggacattaacgtttgaatttttcttctatataatacttgctttctttataaaccaagaaagagtaagaaaattaggcttctccctgctagcatttattattattgacatgttatttgcaaccattaataaggatgcagaatccttcttaaacgacccaataaaatatgaatttatttttggcgcatctctttaccttattctcagtggtacattaagagagaagttaaccggaattgccttcataataatcgcggcattgtcggctacctctatgtcatttacgtataccagaacgatagaggctggtctaccggccttgattttcgttctaactatcataagcattgaaagggttctgatttctcataaagataaagtgaaacctatgctgtatcttggagaaatatcatacagcctttacttggttcaccctttcgtcattcaggccattgctatagcagcaaaaaaaattaaatatctacaaaacacctcagtatttttcttgctggttattgtggtatcaataatcgcatcacatgtcttttatatgattatagagaaaggacttacaaaaagaataaaaacgctctcaaccgctaaagcatag

SEQ ID NO: 447960 - DNA, 921 bp, Serratia marcescens
atgcctcaagccattgttactatgctcccggttgagttcacagacacttcaatgaaaactattttgggtgacgatattttatctaaaggtagtttgatgttagttgacccaaccagccctatctcggcgtggcctgccggagttccagaagacaactatcgcttgcctaatttggccgacgcaacggcatcaagaattatttctggcgacattcgtccattcgtaaaaaaagaggccaacatggcggccggatcatttattgaaaggactgctaagggcggtttaagggtgggggttgcctctggacagacagtgctgagtggagctaatctcgtgatgccagatcctatcttgcaatatattttgaataatcaaagccatgaattttatttctctacgtggtcatatgtaactcagtccgcgcaatcaacgtcaacagatgagcctcatttgcacatttaccgcggcgtagatcaaggctatccgaggggtggggttgcatcaatatcagcgcaggggaactgggacaggccaacaggaggaaatcagacggggagatattctaacaatccaaacaatgtgggttctcagtttaggaatatagccggccatgtttttggacagaaaaactcggcgggtgatccgttaacaatttctgattttcctcagaacaaacataagtctctggcatcgtttgggccagctaatgacgagtcactctatacagcgtcaagttctgttggccctggtgttggccgtaagttacaaagttggaatatgtaccgcgtatacatagaagacctaactgtttcaaacagaagttattcaactgtgcataatattgatattggattgtttaacaaggaggtggtcaattcaggggggcgctattttggtgatagctggacagcaaatccgtaa

SEQ ID NO: 447961 - DNA, 1785 bp, Serratia marcescens
atgaccactcacaacacaggaaaccctgtcgggcctaatggctcagctgatccgcgcgatttatatgataacgcgcaagttatggatttgttactaaattcaatattagaaaaggttaaagggcgtcttaataacgatttaataacttgggcggggttagtaaaaaacctatcccctcttggtaaggcatacacacaagaacaggccgctgccgctattgcatcaggtgaaattccagagggggctttcttttttatctggtcagatagtgaaagaacaattgctgacatgtttcaaaacgttggtggtgtgataacaaaatatggggataaaaacatacagaatggctctgaaaccgatcgtcaggtttcagaagtacgagataaccttgaggcgttagagttatcctctaaagtaatgaaagaagtaaacgctgcacctgacattatttatgcaacggcagatagtaacatgcgttatgcgctaattgttcgcacagatggcagcgttgaaattcaaaagttacgcattaatacaaagaaaacaataatcgaagacgggtcgccattaagtgatacaataccattcaaactgattactgtaggaacatctgccgcgcttgtagataaagattataagtatgcgtggttagtcaatgaggaaggggtttttgatgtgcaaaaacttctcactgattcaactaagttcatgctgtcagataaaggccgctcgctaagcgacgtccttagtggtttacaggcaaacattcctgacatagacttcagattgatttccggtagcctctctatattcaatcataataatagtcacattacgaaactgacaggcgttgacgaggcgtcttacatatcatctggaattgcatacaaaaaagcagggctggattacgtttatatgcgcttagaaaataaatctatcccacggtattctaatgatagggttgtttgggccggggattctttgacggagggggtaggtggaggtggaacaacagctcctggcgtgctcgcctcactatcaggacttaccgttttaaatcgaggttatgccggacgagcatcggcagatatagcgctgcatatgggggtattagtaccgttgctgtcaatttcaggaggacaaatcccggcaagcggctctgtttctgtcacagaaataaatccatcaaatggttatcgcttggggcaaaacaacgagacctttccgggaacactatcaggagtcccgggtaatctaatcagagccagcaataacacatggtcattttcacgagcctcagctggctctgttgttgcagttcctgatggaacccctttctattgtacagaacatgctggagaggatgactctataacagtaacgtgggttggtagaaacaactatgcgaccgcttttgctgaggtcgagcgtgatacagcgtcattccatgaatgggtcaagccatttaataaacagcatatagtaatagggatgacaacaacagatgcagaggtgattggttcaaataactacatcatcattactggaataaacgcatcccttaaggaaacctataatgactgttacatagatatgttagattatcttgtaagtgaaggacttatggacgctggcataaccccgacaccaggcgatattacagacattcaaaatggtgtaataccacgttctcttagaagcgatagcactcacctcaacgctgcaggttatacggttgctggtaagcgtgtattccaacaattaacagaattaggatgggtataa

SEQ ID NO: 447962 - DNA, 3060 bp, Serratia marcescens
atgacgataagattttatccatccttcttgccaggtgagccactggaaacgcatgagcataacgctatgaccgtgcaccagtggttaacagagaatgtgcgggagtaccggccagatatcaaagcaccgatcactgttgagattgacgggaaatacatcccatcgaatgagtggccgctttgctacatagcaccatctacaagcgtcaatatccgcccaatcccatatggtggggctctcggtggcctactgcaggttattaccaagccattgcagcttgttttcagcttgctgggatttaggatggcagtagacggcggccttagttctccgccaaccggaaccagtcttgagctttctggggcgagggctaacacggcaaagctcggtgatccgattcgcgaggtgcttgggattagcaggatttatcctgattacgcagtacagccggtatcacgctttgatcctggcaacccacagatttaccgatcaagcatgttcctcgttgtcggtgcaggtcattacacattcaacctgtcacttctaaaagtggggaatacacctttttcagcatttggcgacgatatttcctacacgatttacccgcctggtgctgatgttagcggtgacccgcgctctgaaaactggtgtgccgcgccggaggttggcggaacaacatcgggaacggcagggcttgatcttgcttctactggccccgcgtcggtaagcgtcaccgctgatgcggttatggtatctggcaataacctaacggtaattagttccataccagaggcaataccggagtcgtggcaggctggtacggtcataaccatcctagccccggatgcctataacgtaggcgccactggtggcgggaatgtgttttatggtgacttcaccgagcttaatccgtctgttgggctatcagtttcgctgacgtttaacgggcagcgcttcgacctgttcgtttctgcctataaccctgggtcacctgcagttcccggcgtaggtggcaacgcggccagcatcacagccagcgcagcaccaaccacttacgatttcagtacctcaccagtgacttttacgctgacttgggcaggcgtgccgtatgtcatatcgctatcagcaaattacatcaccatgtccggtctcattgatgagatcaccgatcagcttgttggctctgatttagtcgctgactctgacgctgggcggctggttattagagagtttgagagcccgtttaccggtaattctatcacttatagcattctacctgtttcgttgtttggtgcatcgccgacaattgttgcaggaacggcatcaaccggcggatctccggctgttataccgagcatccgccttgctgttgacagtgcagtaggggcgccattcgctggtattccggtgggtcagcagcggttatcccttggattgtccgggtatcaatatcgcattactgatattagcggatcgacgctaactgttgagcggttgatccagggggctgggggaacggtaattgtagatgcctcatggcccgggttcactggtcggacgcttcttgacttcacggtcactggcctgaatgaaaatgatgactggatggggccattcctgagttgccctgcaaatgaagtaaccgatctcattgaacttaatttcgtttacccacaagggttatgtgacgttggttcaaaagacggagccattcactggcatgaagtagcaattacagtgcaataccgtgaatccggctccgttgaatggtcaagcgtccagataatccacggcaaccaaaccgtaaacgaggttggctatacagagagaatcgccctccctgcgctggcaacctacgaaatcaggatgaagcgcgacaccccagtttggggcggaaccacgcgtgactctgttcaatggcaatcaatgatggctaggctacaagcaaggccgacacggtatgatggtgttaccacgatggcggttaccatcaggaccggccctcgacttgcggcacagtcggatcggcgtgttaacgttgttggcgcgagggtatatgacggctatccggccaggtcaataagtggggcgctgttccatgtcctaaaatctcttgggttcagtgattcgcaaattgactacgcaactatcaacgctctcgaggcggcatactggacgccacgagatgaaacattcgattattcggccgataaatcaggtgtgtcagcgcttgaggttctgcagaagatcactaacgccgggatgggttatttcttgcttagtgatggcctagcgtcagcgggaagggaggggccaaagccgtgggttggggtaatcagcccacaggagcagacggaggaacttacaaccggatttacagctcactcgcaagacgatttcgacggcgttgatgtgacgtatctcaacggggcaacatgggcagaagaaaccgttcagtgtcgagacgtggataatcctacgccggccaaagttgagaattacaaactcgaaggcgtgctagaccaggaccgcgcttatcgaatcggcatgcgccgcttgatgggctacaaacaccaacgtctgacgcatacaacgacgaccgaacttgacgcactttgttatgagtatatggaccgcatcatcatgaccgacgatatcccaggcagcacaattagctgtctgattgtcggtatgtcgtatacgccatcactgatcactctggaggttagcgagccgctgaactggacattagaaaatccgcgagtgctgatccgctttcaagatggtggcgcatctggacttcttgtgcctacaaggattgacgattacacgctgactctcccctacagctctagcatttctgtcgaagattgggaaatggataacggcacaagagaaccaccgcgccttattttctgcagttcttcacgcattggacacgacacaatgcttgctgaaatcgtgccaaataatgacggcacctgccaagtttcagcagtccaatacacacccctgaaataccaatatgacgacgctgtttatccaggcgatattaagtaa

SEQ ID NO: 447963 - DNA, 321 bp, Serratia marcescens
atgagcacaacgacgatagaaaaattacggttccagtgtcggattgatgctgacgatgaaactgaaaatgaactgctgttgctctatttcgcatctgcgcgtcgcaaagcagagaacttcattaatcgaaaactgtatgacgaaacggtgcctgaatctgatcctgatggattgctgatagtcgacgatatcctcttggcgctaatgctgctggtcggtcactggttcaacagcagggaagaggcatccgatgttaataaaatgagtatcccattcggctttacttcgctgattgagccctatcgattcattccgctctga

SEQ ID NO: 447964 - DNA, 1239 bp, Serratia marcescens
atgaaactgcatgaaatgaagcaaaaacgtaacaccatcgccaaagatatgcgcgcactgcatgacaaaatcggcgacgggcaatggactgatgaacagcatacccagtggcgggcgtccaaaaccgagcttgatggtttggatgagcgcatttctcgtgaagaagaactgcgccgccaggatcaggactatattgatcagaatgaagaggaacagcgacagcagcagaaccgtgacacctccaacccggaggtgcaagccgatgcccggcgcgcggctgcgtttaacaccttcctgcgtcgcggtctgagcgatatgtctgcagaagagcgccatgcgctgaaagaaatgcgtgcgcaaggtacagcacctgatgaaaaaggcggctataccgtcccgacgcagttccgtaatttgatcgtcgatgcaatgaaagattacggcggtatcgccagcgtagcgcaaatcctgaacacctcaaacgggcaggatatcgactgggcaacgtctgacggcactgccgaagaaggcgaactgcttggcgaaaacgtggccgcatcggaaggggatgtcactttcggcggcgcgacgctgggcgctaaaaaactgtcctcgaaaatcatccgtgtctctaacgaactgctgcaggattccggcgtagatatcgaagcgttcctggctggacgtatcgcaacccgtatcggtcgcggtgaggcaaaatatattgtactgggtaccggcgcgggcaccccgcttcaaccaaaaggcctggcggcctctgtcactggcacagtaaatactgcatcggctaccacctttggctggaaagagcttaacgcgctaaagcatgccgttgatccagcttatcgcaacggccctaaagttcgctttgcctttaatgacgccacccttcaacgggtcgaagagatggaagacggacagggccgcccgctctggctcccgagcattatcggcggtgcgccagctacggttctgcaagtcccttatgtcgttgatcaggccatcccggatattgccgctggcgcgaaatttgccttctatggtgacttcaaccgctttatcgtccgtcgcataacctacatgacgttgaaacggctggtggagcgttacgctgagtttgatcagaccgccttcttggccttccatcgctttgactgtgtgctggaagataccggggcaatcaaagcgctggttggaaaaccggcatctggcggttaa

SEQ ID NO: 447965 - DNA, 600 bp, Serratia marcescens
atgaatgaccgtgaaacgcgctgttatagcggggaggttagagctgagcagcgcaccgatgaacccacccgcattctgggttacggctcggtatttaacagccgctccgaacctctctggggattccgtgaaatcatcaagccgggagcctttgacgatgtgctgaatgatgatgtgcgtgggctgtttaaccatgaccccaattttattctcggccgcagcactgccggaacattgtcgttggcagtagatgatcgcggtctgcgttacgacattacagcacctgatacacaaactatccgcgatctcgttctggcaccgatgattcgcggtgatattaaccagtcgtcatttgcctttcgtgtcgcccgtgacggcgaacactggtatgaagacgatgaaggggtggttattcgtgaaatatcgaagttttccaggctgtttgatgtcagtccggtgacctatcccgcatatcaggaggccgattccggcgtccgatcaatgaaagcctggcaggaggcgcgcaacagcggtgcgctacagaacgccattaatcaacgaatggcgcgagagcgcctgctgacccttcttaacgcgtaa

SEQ ID NO: 447966 - DNA, 1227 bp, Serratia marcescens
atgctgcttgatgccctgttccgtagtgaaccactggaaaaccctgccacgccgatcacgggtgaatcggtagaaacggacaacatttttgccagagatgtgtttgtcagtccggaaacggcgatgaaactggctgcggtgtatgcctgtatttacgttatctcttcgaatatcgctcagatgccactgcatgttatgcggaaaaacaataacaaggttgaagctgcacgcgatcacggtgtgttttacctgcttcacgatgaaccgaacatgtggcagaccagctataagtggcgggagttaaagcagcgtcatattttgggctggggcaatggttactcctgggtgaagcgttcccgccgcggggaggtttccgggctggaatgctgcatgccgtgggaaacgacgttgcttaacacgggcggccgctacacctatggcgtttacaacgaagagggggcgtttgccgtcaaccccgacgatatggtgcatatccgtgcgctggggaataaccagaaaatgggacttagcccgattatgcagcatgccgagacgatcggtatggggatgagcgggcagaaatataccagttcattctttaacggtaatgcgcgacccgcaggcattatttcggtgaaaaaccaattaaacgatgaaagctgggggcgattaaaaagcatgtggcaaaaggccaccgccgctttgcgaagccaggagaataaaacaatgctgctcccagcagagctggattacagagcgctcactgtttcccccgtcgatgcccagatcattgatatgtcgaagctgaaccggtcaatgattgccggaatattcaacgtgccggcacacatgattaacgatctcgaaaaagccacgttctcaaacattacgcagcaggctatccagtttgttcgctacacgatcatgccgtgggtgacgaactgggagcaggaactaaatcgccgcctgttcactcgtgctgaactggctgcagggtattacgtcaggtttaacctgacaggcctgctacgcgggaccccgcaggaacgtgcccagttctaccactttgcgatcactgatggttggatgagccgcaatgaagcgcgagccttcgaagatatgaacccggtagatggtctggacgaaatgctggtgagcgttaacgccgccaacccggtaaacgattttaaggcaccaaaaaccgacgaggaaacgcccaatgaatga

SEQ ID NO: 447967 - DNA, 498 bp, Serratia marcescens
atgccaggaccaccgaaaaccccgacacatctggctttggtgaaggggaacccatccaaacgaccgatcaacaagaacgagccaaaacccccttcaggggtgcccccaatccctaagcattttgataagcagggcaaatactggttcaagcgtattggtgaggaacttgatgccgttggcgtgatgaccacgctggatgctaaagcgctggagttgttgatcgaggcctatgtcgagtatcggcaccattgcgacacgcttgatcgggaaggttatacctatgccgtctacagcgaagatgattctgatgaaggaggggagcgggaaatacgaatgataaagccgcacccggcagcagttatgaaggccgacgcatggaaacggatcagagcaatgctgagtgaattcggcatgacacctgccagccgatcaaaggttggtgtacaaggcccggcggaagccgacccactggaagaattccttaaaaagcgcaaatga

SEQ ID NO: 447968 - DNA, 597 bp, Serratia marcescens
atgagcactgagaagttgagcgaactgagcaagccggtgtcgtgggctgacgaacgcggaaatctttgcaccaacactctcaaagagcgcgggttggatagcaagtatcacctggactacgagaaatactcaacgccgctctactcgcaagagtacgtctccgccctgcaggcagagctggagcgctacaaacagtacgcgaaagaacgcgatgcggagaatgaaagcctgtcactaacggttgggcggttgcgcgtagagctggaagcgaaggataagcgtatagacgagctagagtatgagctggcatgcgtcatggcggataacgagtattgcggaaagaccattgcacgcaaagacgcatcgatcgacacgttcgtgaaggaatccggcgatgcgcagaagcggatcgcagagctggaagccaagctggctacgccggtgcggttgccacgtcgcgctcctgaaaatttggcatctgtgcttgatggttatgagaaatggctgatagcgacaacattccgtgacacgtggaatgcatgcctcgatgaagtttcccgcatctcatctggtttcaccgtagagggggatgagtag

SEQ ID NO: 447969 - DNA, 516 bp, Serratia marcescens
atgagcaaaataaatactgacaaagaagcttgcctatcacttgaaacccttaaggaactacttaactacaaccccgccactggtgagttcacttggttgaggaataggtcatcgaaagccgttgctggtcaaatcgctggctctgtgtgcaaggatggatatcgacacatcaagattaatggcatgacttataaggctcataggttggcttggttctattgctatgggacgtggcccgaaggtgagatcgatcaccgttttcgcaacagggatgataaccgagagaaatttataaggcaggccagtgcaagcgaaaatagcataaataggggcatgagacgcgataactccagcggatttaaaggcgtgtcctggaatagaaagagcaaaaagtggtcggcggaaataacagccaatggaaaacgaatgttccttggttttttcgctaaccctgagcttgctgctgaagcttacaacaaggccgctgagaaacatcatggtaaatttgtgaggtga

SEQ ID NO: 447970 - DNA, 1176 bp, Serratia marcescens
atgtcgcaaaacctgctgcgcgtgcgtgacggtcagggcgcttcggtctcgttttccgagctgctgttcgatctgatctacgttttcgccgtgacccaactttcccactatctgttgcatcacctgacgctgaccggcgcgctggaaaccctgttgctgtggttcgccgtctggctagcctggcaatacaccgcctgggtcaccaactggttcaatccggatacccgtcagatccgcctgctgctgttcgctatcatgctgctggggctgttcgccgccgccgcactgccgcaggcgtttggcgagcgcggcctgatcttcgcgctgttctatgtcgccattcaggtcgggcgctccgtcacggtactgcgcctgctggcacccggtcatccattaaaacgaaactttcaccgcattctcggctggctgtgcatctccgccgtcttctggatcgccggtgggctggcggaaggcaacgcccgcctggcgctgtgggcggtcgccgtcttgtgcgaatacgtctcgccgatgttcggtttccggctgccggtactggggcgctcggacagcagcagcgaatggaccatcgagggtcaccatctggcggagcgctgccagctgttcgtgatcgtggcgctgggggaaaccattctgatcaccggcgccaccctgagcgagatggaaagctggagcctgccggtgctcatcgcctcgctggtggcttttctcggcagcctggcgatgtggtgggtctacttcgacaccagcagcaaagccggcagccacgccatcagccaggcggaaaaccccggccagctgggcgcttacttccattatgtgcacgtcgcgctggtgggggcgatcatcgtctgcgccgtggccaacgagctggtgatcgcccatcccgccggccgcatccaacacgccacggcggcggtgttgctgctcgggccggcactctacctgttcgccaacgcgctgtataaacggctggtgtatcatcgcttcccgctgtctcacctggtgggactgctggcgctggcggtattggcccccgtcgcctatttaaccgacctgctgatggtcaatggcctgacgacgctgatcatggtggtggtggcggtgtgggagagcatctcacgcggcagagcgccgcagcggcacgcagaagcctga

SEQ ID NO: 447971 - DNA, 903 bp, Serratia marcescens
atgaacttattcgagaaatcaggccaaagcgtgggggataactcctcggctatacaagttacaggtgatgcccactttggcaacacgacaactgaggtcatggctatttgccagttagtggtcaaaagtgaaatggcttctcttcgtgaagatgctttcgctttagtcgactcacgggctcaagaatttggccaccaaattgcagaaaaactctctaaagatgttgatgaaaaactaagagtaaaactcgctgatcccgatattcagtacaccctcaaccaagcagttgttcaggtcgcaagaaaggggtttgatgctaaatcagaactgctaaaagaactcatagtttccaaatttaaaagcacggaagaggaagaaaatctgcttttagatcatgctttagatactacgcagaggctcaccacaagcgaaataaaactcctttcacttgtttattatttccgttactgccataaaaccatgtacggagtcaacattaaagagattattgagcgtggaactgaaggcccatcagtggcaggactaaccttagaaggttgcttcaatattatgggtcaattttataaaaattatgatcttgattacaaaagaatactgtcaacactggactcattaaaacccgtcaacaagcaaatgcttgtaattaaaggctgcataaatgcagagcagagttatgagaaaaactacatcgacctcataaaagaaagaacaggaatagagatgaccgatgaagagtcttttaaggaaaattttgcaacattatcgtcgataatggaggctttttcgataaaaggaaacaaagagttgaatgaatatgttttaagcccacttggacttgtgattgccaaaaactatctcgaagcccacaattttctcagctaa

SEQ ID NO: 447972 - DNA, 954 bp, Serratia marcescens
atgatgctttttcatcatctgtttgggtatccgagtagaatagcctccaatatcgaagtgcaacatttatttgaatcgtttgatatagaatttaacgtcggcggattctgcaagatttgtgtgcctatattcttgttcatctctgggtacggtttttcttcaagactaaaggatggggttggctacctatatgtggtaggtaaattaaagtcgatttattttagctactggattgtgcttgctattttcttgagtatcgggtttgtttttgtaaagggcgaaaaatatacgcttaacatgatgtcattgcttggcgatgtatctggattgacttctaattataatgatgagtggtggtttttcaaactttatgtgatgaacctacttgctcttcctgtgttactaaaaataaaaagcaattaccttctaatttctacaatacccatgatgttggttggtaaatttttcttcgtttacgggggagcacctcaattcatagttgagtttcttgtttctatttttccctttgctgccgggttggtatttggccgtgtggctggtggggtggaggattcaaaaataatatcatcgggaattaataaaatttcattaatcaacccgtttattttgttggtcatttcaataatagcctataagtttgggaaaacgatggggcttatgttagcgtctccgctgttcgttatttttctgtgtcggatcacagatcgagtaaagggtgtgtctgaaaatgtattaagatcactaggtcgtcactctctttatatgtggctgacgcattcgttttattgttactacttcactcaagaatttatatactaccctaaatacccggtggttattttagtttggctggttgctatatcatatgtaaccagtataattatttcatattttgaacgcggaatttatcgagcgttggcattaatcaaatag

SEQ ID NO: 447973 - DNA, 1371 bp, Serratia marcescens
atgtcggtacctaaccagaccccatacaacatttacacggccaacggccttacaactgttttcccctacgaattttacctgctgaatgccggtgatctagctgtttccctcaacggctcagtaatcacctccggctatacgatttctggcgtgggtaacgttgatggtggcgaggttctattcctaacgccaccagataatggcgcaaccgtaatgctggagagagcaattccaacctaccgcctgaccgattaccaggacaatggcgatctgctggctgataccgtaaacaaggatttcgatcggctgtggatggccattcagcaggcatttatctatcttggccttgcgcttacacgcccattgctcggtggcccatttaatgcaaaaggataccggattgaaaaccttggcgatccagttaatgaaagcgatgcagcaaccaagcgctttgtaaaacagcactcagaaagcctgttcaaccgcacgctgagggtgggtgagaatcatgtagcacagatcccccctgtagccgttcgtaaaaataaggtgctcgctttcaatgagcagggcaacccaatagcagttcttccgggaagcggaaccgcaactgatgtaatgattgagctggctaagcctactggctcgagtatgcttggccaccatggaactacggtagggcaagcactagatgacttggaattcactaaatatgtgccaagtatttattatggctcatttttcgaaaacgtatcaaatgcagttaacatcgtaacatctcacgatggcattacttttagcgatccaattcgcctaaaaaatcccaatggtgatttgttgcgggcgcgtgacccatctcttatttattatggcggcaagtggcttttagccacaacagcgaacactccagggtcagtagacttacgaatttactctagtaatgacttggttagctggtcttctaacgatataaagcttaatggaaacagtgcgatatgtagcaacactgttccttgggatggtggcactgttccggcgtcactgctgtgggctggtgaattagtaatcgacagaaaaacagggaagctccatcttgtaattagcatcataatcggagtggatggaacgacgggatgccccgcctctcggttgtttggtacgtatatatcagaactaactgatttatcaggcctgaaatttagtgttcccgccagggtgtcatgtgtagatcatgacggagggtttaataaatatagccgtattgatgcaactatagcttacgatgatgttaacaatcgttatctcatggctgttaagcgcgagaactatggtgtcattgatatattctctagctcaacaatagctatataa

SEQ ID NO: 447974 - DNA, 879 bp, Serratia marcescens
atgaaggatggctatacgtgggttattgcatttgacccgaacgatacattcgacggaattttatacgtttcatccagcgatggattcgcaactttttctgtgcctaaaaagcttgagatggcaaggttccggcatggttctatcactgccggtgtggggcttcctccacaggcgataaagaatttagaggacgctcgtaacggtattagtggttactcagcgctaacaaaaatacctctcaactttatcaagttgacagagagttgttcaattatacctcgctcagatactgtgtactggagtgattcggatataacggagacgcttgttgctccaaatgcaattagtgggaacatgaattatccgcgtaggttttatttttgcctgcgtacaaactcacgccttatcagaatgataatatctggtgccgttgctggtggtgtttgggatattggttggggcgtcaatagcgaccgtctaattgaatttttctatgagaatctaaataacgtttatcgtagtgaagcgatgggcgcagtttcatacactcagacccgacttaaagctgatgctggcactaactctattaatgcatcttctgttacttgggcgcctcgtcatgccaagacatacataataacagatggtgacgggacaatgacaattaatgcattgccaaacatgcctgttggaacgtatttcaatattgttattcagtctggcacaaactcgtttgttggattgattttaaaggcggctgttaacgggaataacatggggatgccgacagattggtcgtataacgggggaggttcaaattacgacgggaaaataattagattggaaaagggatctgctctgtggtttgccactcgataa

SEQ ID NO: 447975 - DNA, 375 bp, Serratia marcescens
atgtctggcaaaataacttcgttggtggtgatcctgctggctctggcggctgttgtcggcatgggcgcctggctggctgctcgacactaccagccgacgattgacagtctcaacgaggcgctgacgcagtgccgtgataccagcaggcaacaggcagcgatgattgataaccagaacgctggcattgaggtgctgcgacgcgctgatgttgaacgagcagccaaggccaaggctgaccaggaaaaagcccgtaggcaggccaatggagattatgagaaggccaacgcggtgatggctgaacgcaccataggcgaagtctgcgcggcggcgtccgctgcttttgacgcagaactgcgccgggagcgtgctcaatga

SEQ ID NO: 447976 - DNA, 369 bp, Serratia marcescens
gtgtataatgcgctggaaaccggggttgaagctgtctacgtgatggtcagtgatacgttgggctcggggcgttttactcgtcagcaactggataaaaagtacaagcacgcgagtgactttggtgttgcggataccagaaaaaacagagagactctgactaaataccgcgatgcgctcgaggcccatttgaatgataaggacacggttgagaaagggacttatagacgagaaaaaggatctaaggtgtttttcaatcctaacacaatgaatgttgttgttttaaaagaaaacggcgattttttatcagggtggaagataaatccagactcagataacggtaggatatatttagatacgggggatttatga

SEQ ID NO: 447977 - DNA, 1119 bp, Serratia marcescens
atgtcaataaaaagactgaaatatcttgatggcttacgtggcatcttcgcgctgactgtcgcattgagtcactattttggaagccagttgggttggcataattaccccttccaaaatgcttatatctccgttgactttttcttcatactctcagggtttgttcttgcgcatgtctatggaatagcaattgcatctggttcaatgagtaacagtaagtttatattttatcgtttcgctcgcatgtaccctctgcatattgcatcaatggttgctgtgggcattatttattgggtgtcgcaacgaggtttgccttttgaggaaccgctcttctctggagtggcaaatatattcttactgcaaaatatgggttttgtcagcggttggagttggaatgatcctagttggtctatttctgtcgagttctgggtgtcagtgtttttcgtaccatggttcattcaacgtgtaaaaaccaacgtcctgctgcttatctcattaatgtgttatgccagcttgtacatagcttacggttcattaatggttggccatgaaattatgtatggcattgttacatcgggatttattagatgcatcgctggcgttgctctgggcatttccatttgtcgcatggctcaatggctgccgtcacgtgagctcaataatgggcaaagcttcattttaggtagtgtagacctcctcctgtttgccgtaattattaatttagtttatcaaaccacccctgtcggaaagttaagctttttgccgattccattaatcgcactactaatgctaagcttagcaaactctaactcatggtttcacaaggtcattggcaataaagttgcagtttggcttggagatgtaagctattctgtttaccttatacataccccaataatactgatcatgggtgcaattctcccttcaataaacttatcgttcacgacaaagctaataattttcattgttttcactctcgtattatctcaaatagttcatcgctattttgagaggccttgctatgagcggttaaaacggagttttcccggcaaacaaccgccgcttaaagaagcttcactcggctcgattggtaccaatatggctcaacgtaaaaaagcatga

SEQ ID NO: 447978 - DNA, 627 bp, Serratia marcescens
atgacatacgatagtgaattcggatcacacgtatccctatatcgggatagaatcaaacaggttattgatgactccctcaatgaacatcctaactcaatgattcttcgtgttgatctgcataatccaattgatacagagaatatggataatccattctttcaacctagggttgactctgctgctatatctcgctttaccagcgcgttaaaagcaaagcttgaacacgataaacatattaaaactcaacggaaagactggcctgatgcccgacattctaccttacgttacgcatgggttagagaatataccaaaaatggaaaacggcattaccatttaatactgtgtttcaatcaggatgcttattatcatgtaggtgattacgatttaaaccgtaacactctaagaacaatgataacaacagcttggtacagtgcacttggcatcccgatagatagttcagggaagttagttaattacccttcaaatggcaaataccttctcaatcgtaaaagggacaactttgagcagacttatagcgatttgatgaacagggtggattacatgaccaaagtaaggactaaaatagtcggtgatggagaccgtaacttcggctgcagtcgcgggtaa

SEQ ID NO: 447979 - DNA, 1422 bp, Serratia marcescens
atgtttaacgctcgtccttttcctattgattcgtttcctcagattatcagaaatgcggtttatgaagtggaacagcacacgcaggctcctcaggctttgattgccgcatcggtactgggggttatttcgcttgcatgccagaaccgtattgatgtgtgccgactgaataatttgcgcagtccggtatcacttttcttactgacgctggcggaatctggtgaacgcaaaagtactgtggacaaactactgatgaagccattgtatcaactggaagaagaatggtttgaaaaatatacccatgacttggttgtctggaggaatgaagaaacggtttttaacattgaaaagaaagccttgatgtcaaaactgaagttagatattcgcaaaaataaagatcactcggcaacggatgaacttctgaaagagtttctggagtcgcatcgtaaagcacctgtgaggttcaagcagatatttaacgacgccacacctgcggctattaaagattacctctgtggctactggcgttctatcggtattatgtctgatgaggctggcaccatttttaatggttatacgctgaacgaactaccctttatcaacaaaatgtgggatggtgcaactttttccgtggaaagaaaaagcgaaccggaaaaattaatcaaaaatgccagattgacgttagggttgatggttcagcctgatgtatttaaaggttatctgcaacgtaaaggcgatacagctaaaggtatcggattcttcgctcggtgtttgatatgtcagcctgattcaaagcaaggttccagaataatctccagccccgttatttcaagcgagcatttgccgatattccatcaacgactgatggagatagttaacgacaatattgctagagataatcaaaatgatcgtctttgtctgcacttctcggtagaagcggaaaatcgctggatagaattttataacaaggtggagtcagatatgggcttacttggcaccttaacagactttaaagactatgcatctaaggtcgcagaaaatacggcaagagtggccgctcttctgcatttttttaatggcaatgatggagatatacctctttctgcagtcgaagatgctgtgaagatatctacctggtatctaaatgagtacatccacttattttctaagcctcaagaattcactctggcaatctcggaggcggatgagctttattggtggataaaaaaccattgtaatcgccttgttgtaccttatattactaaaaataccatcctccaatatggccctaataaattcaggaatcgtagtaaagcaaatgaattactcagtgcattattctctcaaaataaaatccttgtgggaaaaaaggggaaaaccacattaatagctatcgctggtttgaattcctcaactttattctga

SEQ ID NO: 447980 - DNA, 237 bp, Serratia marcescens; identical to SEQ ID NO: 138487

SEQ ID NO: 447981 - DNA, 1011 bp, Serratia marcescens
atgaaagctgggtcttatttttattctttaaaattagtttctgataaattgaagatagatcctgagttgatcgttgatgagtggcttcaacatagggtttcattgtatatgaaattgaattctttgccctgtagaattattcggtatattggtgccgattcttttttgttgaaatacgagattttaaaaataaaaaatggaatggattattatcaacatgagttaatgccggaattcaaagttagacaattccatccaaccaagaataccgacattgatgccaggttaataaataatgaccttggaatatcccgttttacatatagtggttatgcgtatggttattggagattgaaaccaacaaaaacagcccattttttaaaagaaaaaattatatcaccaggcctaaatattgtgttaagtgataatgaagtccttgagagtatcactattcatgggcgagatgatagtgattatttaattttgtccaatgaggcgtcaaaaattttagttgaggtgtatgttgatagtaaatcttttgattttttgcagaattattatttattaagtgatgaagtggaagtttctaaagacagcattgattataattattgtgatataaaaaagtcagtggattcaattccgtttattgaacactatagagcggcgctatatatttttatacatgaatggtggggggcgggatcatctgaggaagtagtgattaataaattggtcacacatcttgaaatgagtcatcaattaaaagttaagcattcaactgttaaacgatgggctgaaaaaccgcaaataaatgcaaaatatagaagcatgtctgatcagaaaaaagttttgtccattttaatttctgagtactgtagtacgaaaaacattaaaaaagaacctatggcagttgcatctttgttgaatgaatttattcactctgagaaatattgttttaactgtgaagtcacttttagtgaactagaggtagccacatggataatttaa

SEQ ID NO: 447982 - DNA, 789 bp, Serratia marcescens
atggctacacaatttgaaaaactcaaaaaagaactagatgatttagatatcatgggccatcagctttacttctccatggctaaagagtgtgagcaacttaatgagaaaaccataaagaatattcaggatgctggttggaaatttgttaaatttcgtgacgagtatcaaaagtggtatacgaaggcctatcgcgtaatttcacagataatcccggaacgattagcagaattcgaagcaatttacaaaggtgatcctaaaagaaaagatatcacatacatgaactattctgtaagcgactatctggtaggactgcaacaaactaatggtttgaatgaagttgtgcgcagtcctaaagatgcaatcagaaaaatggaaattcaatataaaatactatcatctgcaaaagaacgcttcaaaagcactctattcgatataaaagatattgtgcaagcagacattttcgactcagagttagaaacagccaaggagctgaataaaaaagggtttattcgtgccgcgggtgcagttactggcgtagtcttagaaaaacacctagctcatgtttgctctcttcacgccttaaagtcaagaaaatcgcatccttctatagctgaatttaatcagttattaaaagacaatgatgttgtcgatactccggtatggagattcattcaacatttatgtgatattcgtaatctctgtgatcatggaaaggaaagggaaccaacaaaagaagaagtaagtgaatttataagcggagttgataaaataaccaagactgttttttga

SEQ ID NO: 447983 - DNA, 1428 bp, Serratia marcescens
atgacggttccaaactccgcaagctatcccattcctgctgattggcaaaattttgagagactctgcatcactttgatgagcgaaatctatggttgcaagtttcaggcctatggccgtagcgggcagcggcagaacggcgtagatgcgcttggcattcttccaaatggagatgtcatcgcagttcagtgcaaaggtagggatcaaggttatggtagtagacttaagccaaaggatattcataccgcagttagagaaactaagaatttcaagaatagaatcgctcacttctacattctgtcgacctgcccaaatgatgtcgctcttgaagatgaagccgtgcagattacccagtcgcatttgcttcaaggacgctttccggtaacgttttgggggtggcagacacttgaaaatcaaattaggaggtatgagtctgtacagcgggaacattttgggtattggttcaagcgtccatccactctacagtgggcaatgcgaattgctattggatgtctattgattattatcagtatttatgtagttcatcagtatctgacttatcacaatgctcaggttgatctcagagagaacacggataaagacatttctcagtttttaactctaaccaataaactggatcatgcatacagcacatgtctgaagacccttgatgaaaaaccatttttatcatcatgggaactggatacattctgtgcaaaaccagtgtcaacatcgctggggaaaattgaatctcaagtgaaagaaactgggttaaatatagacgcgcgtgcttttgataatctgtccgccattttgaagatatttcgtgaagattataggcaagtgctgatcgcgtctgacagaacccgttcatttgaaaaaaatgtgctgcataatatgaaagctctttgtccgccattcaaggataaggggataatggatcgtatgttcatagagctaagagaacctgcagaagctgcacaaataagccagcttgagttttactttgttctcagagatttcataatgccaagtttagatgcggtaagggcacaggttcttgtctctaccaggcatataaataaccagcagataccacaaacccttatggaagaagcaaaaagactgaaccaacttatcagtgaacgaaataattataatatcgaaccaccacaggttccatttagtctggcagtagttaagtcaatgagttcgcgggcaataacaatgactggagagatgccagaccaagtagaggaggctcgttgggccgatttgatgttgggaagtatggtttttgcaatggagggcaacccaaaagaggttgacgaattggttcagtgcggattatataaatcagaaacacctagtgttataaaaaataggaatcaagagaagattctaaaatcaaaaattcaacaattggaatga

SEQ ID NO: 447984 - DNA, 342 bp, Serratia marcescens
atgaaaactttacctgcaacaactcagcgggcggtgaagccctgcctgtcacccgtggctgtctggcaaatgctactgacacgcctgctggaacagcactatggtctcaccctcaacgacacaccgttcagtgaggaacgtgttatacaggaacatatcgatgccgggatctcgctggctgatgccgtgaattttctggtggaaaaatacgaactggtgcgtatcgacaggaagggatttaactggcaggaacaatccccttatctccgggctgtagacattctgcgagcgcggcaggcaactggcttgttgcggcaaagccgtaaaaattcggtacggtga

SEQ ID NO: 447985 - DNA, 318 bp, Serratia marcescens
atgacccacaccatctggggcctgcagcggaatatcacgccgcgcctgggagcccgtctggtgcaggaggggaaccggctgcattatctggctgaccgggccagtatcaccggcaagttcagtgacaccgaatgccggaagctggatgaaacattcccgcactttatccgccagatggaatcgatgctgaccactggtgaaatgaatccccgcaatgcccactgtgtcaccctgttccacaacggtttcacctgtgaagtcgacacccttggcagttgcggttacgtgtacatcgccatttatcccacccagcgctaa

SEQ ID NO: 447986 - DNA, 459 bp, Serratia marcescens
atgacaacgcagacacagcaagacctcgcccccgcgaaccaacctgaatttgaactgaccgtcacgccggtccccgatgagcagcgtatcgatttctggtcacagtactttggcgctatcccgcagtggctactcctggagccgcatatcttcgcctggatggaccgcttctgcgagggctacagcggcggcatctggtcgttctacaccctcagcaatggcggcgcgtttatggcccctgatgctgacaatgacgataaatggcatctgttcaacggcatgaacggcaatggtgcggaaatgagcgcggaagccgcaggtatcgctgtctgcctgattgaatacagccatcacgcctgtcgcaccgaatgcgatgccatgacagagcactattaccgcctgcgggagtatgctctgcggcatcctgaagctcacgccattttgcgtatcatcgactga

SEQ ID NO: 447987 - DNA, 906 bp, Serratia marcescens
atgcctagtcccccttgtaagcggcttgacgacttgagtcaggtccagcgcgaacggctggcctacatcgattttcggctttacttcttcggtgagatcggtcgcccagatctgattgagcgctttggcgttgctccagcaggagcgactcgcgatttggctttgtaccgggagatcgctccgaataacatcacctttgatggtagcgacaagatctatcgtatcgggcaggcgttctctccgttgttcgagcacgcatcgcagcgtgttctgtcggcgctggctctgggctttggcgatggcgtgaatggcccaatgcaggcgttgctaccctgtgaatcccccacagccctgagcatacccaagatggatgtgttggccgtgatttgtcgagccatccactccaagcgccccgtcgccatccgctaccactcgatgagcagcggaaagtccgaacgggtcattgtgccctttgctttggtagataccggcctgcgctggcacgcccgggcctttgatcgcaagagtggagagtttcgggatttcgtcgtcacccgcatcgaagcgccaacattgcttgaagaggttccgcaggccaacgaacgaccggataatgatatccagtggacgcgcatcgttgagttggatttcgtgccgcacccacgtgttgaacgccccgaaatcatagagatggactacgggatgaccggtggctcgattaggatgtacgttcgtgcagcggtggcaggctatatgttgcagcgctggcgtgttgactgctcacccgatcattgcctaaatggaccggagtaccgtttatggctcaaagatcatctcgcgatctacggcgtgaaaaacgccttactggcaccaggctatagcacctctataaaggctgactcttga

SEQ ID NO: 447988 - DNA, 1881 bp, Serratia marcescens
atgaagattcaatccgttcgcatcaaaaacttccgggcactcaaagacgtcacgattcccttcgactccgttacgacattcatagggccgaacggcgctggcaagtcgacagtgctacatgcactcgattggttcttcaacggcaagcccggctcactgacagagaaagactgctcttttggagaagctagcgaagacatcgaggtgcaagtcacattcgcagatctcaccgaaaaggatcgggaggcgcttggaaagtacactccagagggcgcagcaacattcacggcgtggaagcgccgttcagctgacggcaccgatgtgctctctgcaaacgcaaagggattcccagagttcaacgtaatcaaaactgcaaatggcgtagcggcgaagagggagctttatacaaatctcagaactagtcgtccagagctggagcttcctacagccactaccggtacagccattgatcaggcaatgactacttgggaggcatcacatacagagttactcgtagacgcccccgaatcgctgcaaaccaacttctttggtttcaacagtggcggcaagatgagcggccttttcgacttcgtgctggtgactgcagaccttcgtgcaagcgaagagtccattgacggtaaatcgagcatcatcggacgcatcctggagcgctccgttgatcgtgcagcggcagatcaggagattgcggcaatcgtcgaggagtccagagcaaagcagcagaaagtctacgaagagaaattccaagcccagcttgaagtgctgacgacacagcttaacgaggtcgtgtcctcatactcacccggtcgggcggtcactgtttctcctgcagaggtagagctaaaagccccgaagaccacgttcgaagtgaccgttctcgatggaacggcagagacggctgtagagcgacaggggcatggttttcagcggacgattttgatctcggcgctccagctcttggcacagtccggttctgcatcagccgacggagtcatctgtttagcaattgaagagccggagctctttcagcacccgatccaggcacaggccttcgcaaaagtgctccgctcactcgttgaagaccctgacaagtgcatccaagtaacctatgcgacccacagcccctatttccttgaagctcgccacttcgatcaggtcagacggctaacaagatcatctgatgaaaccccggtagtttctgttcattacgcaaccgttgcggatgtcaaagccaagctggacggaattgtgtctgccgacgtagttgatcgaaggctagaccacaatgtggccgatcaactctccattgctctctttgcgaaccttgcgttcctcgtggaaggaagtactgaatccgctatcttctacggtatcggcgacaggacatcacatggcttgcttgaggccgctggtgtttcgattgtttccgtcgggtcaaagacatctataccgcttgcacatgcgattctcagcgcgattggtgtacccgcttatgcactctttgacgcagatgcaggctttgaggttcgagccaaagcaaaaaacaagaagcaggaggatatcgataaagagtggaacaatcatgcagccgaaaaccgcaagcttctgcgatatttcggcattcctgaagaagattttccggaagctgtcgtaggcgacacagtcgccatttttgaagaccatctggaatcatttctcgaagccaactggccagagtggctagctgcctgtagtgaaatcgaggttgccacaggtataagtctctcgaagaaccaactcgcataccgcacggcgacactcagatctgcaggggcggtgccagagatgctccagcgaattttggccaaggtagaaggaaaatga

SEQ ID NO: 447989 - DNA, 1872 bp, Serratia marcescens
atggaaaagctaaaaatgcattcacccaatctcacgcaggacaacatcgcccgcattcgcgatctgtttcctggcagcgtcaccgaagtcaagggcgaagacggcagcgtgaagttggcggtagattttgaccaattacggcaggaactggccgattcgattgtagagggaccacaggaacgctatcacctgaactggccgggtaagcgcgaagctttgcttgcggctaacgcgccgattgccaagacactacgccccagctgcgaagaaagcgtggacttcgatacgacgaagaacctgttcatcgagggcgataacctcgatgcgttgaagctcctgcaggagacctacctcggtaaggtcaagatgatttacatcgaccccccgtacaacacgggtaatgatttcatctatgacgatgattttgccgtggatacggggaaatttttgcttcagtctaatcaagtcgacgactcaggaaaccgattggtagcaaacaccgcatccaatggccgattccattcagattggctcagcatgatgttctctcgtttgcgacttgctcgcaatctccttgcggatacaggcctaatttttatcagcattgatgagaatgagctgtgcaatttgaaagaggtttgtgacgaaatatttggtgcagaaaactgtaggggggtcgtttctcgtccaacaggaactccgagtggacagggatataacatactcgttaacgaaatcgactatatcctcgtgtacgcgaagtcgtcggagagcgcgattctgggtctaccattctcaagcgaagatgaaaaaatttatgaccaagaagatgacggtggaaaatacctaaacagaactcttcgaaaaaccggtggtgaagatcgtagagaagatcgaccaaccatgcactacggaatcaaagctcctgatgggacagtcgtttttcccattgggcctactggttatgagagcaggtggcgttgtggtgaggactcatactgggacttagttaagcaaaacaggattgagtggaagcaaagcagtgaaggctggaaaccctatcagaagttctatctagagggacggctcaagcaaccgtctaatctttgggaaggaattgagggcaacaaaaaggcaagtctcaccattaaggggctattcggaaaaaaagtattcgatacccctaagccggtagagctaattgagcgctgcttgaaaatagccaccggaaaatccgacctgattcttgattttttcgctggttcgtccacgactgctcatgccgtgatgaagcttaatgcggaagatggtggcaatcgtcattttatcatggttcaggtacctgaaccgtgcgacgagagttcagaagcattcaaagctggatacaagacgatcgccgaaatcagcaaagagagaattcgccgtgctggccggcaaatcaatgaaggcaaacgccacgatgttggcttccgtgtccttaagatcgacgcatccaatatggccgatgtttactacacgcctgactctctcgacaaatctaagtttgatctgttcgttgacaacatcaagcccgaccgcactcctgaagacctgttattccaggtgatgctggattggggggtcgatctggcccttcctatcgacaaacagtccattcaaggtaagggagtgttctttgttgacggcaatgcgctgatcgcttgcttcgacgccagcggtagcatcgacgaagactttgtgaaggaactggccaagcatcagccgctgcgcgtggtattccgcgacgcgggctacaagaacagcgcggtcaagatcaacgtcgagcagattttcaagctcatgtcgcccgtcaccgaagtgaaatgtatctaa

SEQ ID NO: 447990 - DNA, 1161 bp, Serratia marcescens
atgaagattataatcatcaatacattatatttcccccatcatgtcggtggtgccgaattttctgtgcagatcttggctgaaaccctggctgctgtagggcatcaggttaaagttatcaccttacataatgaagataagcggcgaatcactgtaattaatggcgttgaagttgtatatttacccttgcgaaacatttattggccttttgaaccgatgaaacggtctaagttggcacgttttttttggcatctcatggataattataatcgtcgtgcagcgaaggatgttggaaaagaattggattattttcaaccggatatagtgcatactaataatatatctggtttttctgtttcagtatggtccgctgccgcgatgagaaatatcagaatcattcatacggccagagattattatctctttcatcccaacactacgctttataataatggggttaaccaaactgtacgcagtctttcagtttttgcctggtcggctctgaaaaaacatcatagtaaaaaggtcagttcttttgtcgggatcagccgcttcattatggactttcatagcggcagcggcttttttcctaaagcgcatagaacgcatatctataaccccgtttccgttcctcttttgcgtagcggtttcaggggggatagacgggtcggttttatcggaaggttgaacgaagctaagggattcgatagcttttgtttcgctgtgggcgcaatcagagagcgcttgcccgagataacggccgtcgcggcggggggcttttctgtcggaaaagagagtgaattgcggggcttagccgagcgttttaacgtagaactgcttggaaagataagcctgtctgattttttgcagtgtgtcgatatcgtcgttcttcccataaaatggcgagagccttttggccgggtcgtgatcgaatgcgccttggcgggaaaaatcgtgctcgcccggccggtcggcgggatcaaggagctgatggaaatcacccccaatgtattagacctcgatagccactccattattgatttgatcatggaagagcgcatcgtatgtagagacattccggcacgcgtcagagcgttattttcccctgaagccattgcagaagagtatatattagaatatgaaagagttaagctcggaaattga

SEQ ID NO: 447991 - DNA, 1140 bp, Serratia marcescens
atgagaaaaattgtatatattactctaatcgacttagatgagatatcctctggcgttgcaaagaaaattgtggcgcaatgtaaggctctcactgattgtgaatatggtgttacggtgctttatatggtgccgtcaggaattaaagtgtggaacttcgctaataataggaaggaattcgtagagttaaataatcgaaaaggaatgcttttctactataacgcaataagatttttaaaaaataggcatgaaaaattcgacttcgcttatgttagattacctttcccttcgctcaatatcgtgtcctacccctttatttatctgctgaagaaagtatttactgaaaaattaattgtcgaaatacctacttatccgtttgtgcaagaaagcaaatccgcaaaggctctcagttacaacgcgtatatagtattcttctcatggctgttcaataaacgaattgataccatcagttacatgggagcgttggaaaaaaaaatttggggtgtcaaggctgtaaggatctttaactccgtaccgctcggtgctgttccgttgaaaggcgatgttgcacatgaaggggtgagatttattggcgtggctcagttatcatattggcatggctacgacagagttataacagggatttccgattataataagcggaatccggatactccagtttttttccatatcgtcggcaatgccttgtcaagtaataatgatgaattaaaacggctgaaggaattatctgaaaaactgggtgttgacaagcaggttatttttcacggcgcgatgagtggcgaaaagctcgacagcgtctttgatggtatcgatatcgcagttgactctctggggcggcatcgcagcggtaactattataattgctctataaaatctaaagagtactgtgctcgcggtattccgtttatcaaaagccatcaggatgattcttttaatggcactaactatttctatcaatgcagtgcggatgactctgctgtggatatttcagccattctctcgtggttcgagagcaaggggcattctaaagaggagttacgagcatatgcggaaggtatctttgactggaaaattcagctttccaaggttatgagtgaggtagagaagcgtaatcccgtctag

SEQ ID NO: 447992 - DNA, 1065 bp, Serratia marcescens
atggtaaaaatattgcatgttgctgagactataaaaggtggtgtagcaacaataatacgtcagttgactggtgatgcaacagggtttgacattcattgcatcgtaccagatacacaaatatccgaactcagaggttcaaaggctaatttgcatgtttttgaacgtactggccgaaatattagctcttttatacaattagctaaggtatttgtcaaaaactataagggtatacgccctgatattattcacattcatagctctttcgctgggtttatttgccggggaatactctttttccttccaggaaaacctaaggtggtatattgtcctcatgcattttcatttcttatggacagcagtgagtttaaaaagaagtgctacgcgttcattgaacgaatccttgcaaggaaaacagattcgattatctgtgtcagccattatgaatatgatgaagctttaaaaagaggattaaataaaaataaacttcaggttatttataatggtgtagagccacctgtggatattagtgatatcgataaaaatgaaaacaaacaagaaggtgttcttgatatactctttgttggccggcttgactatcagaaaggattcgacattgttgaaaacgtcgctaaaaaccttgatgataaatgtcgaatcgttgtagttggcggtggtgttttatcggacccaaagctaagtcacagtgctaatattcagtatgctggttgggttggtaaggaagacatagcagcattttatgccaaagctgatgtgctacttatgccgagtcgatgggagtcctttggtctagttgctgtcgaggcccaaagttatggcgtacccgttgtggcatcgagatgtagttcaattcctgaagttataagcgacggtgagactggttttttatttgatgttggcgatgcagatgaggcttgtcgaatcttattgagcttagaccgtaaaacgatcggagggatgtcagagagatctgtcgcctattacaaagaaaatttcacctctgaaaaaatgattgataaaactttccacttatataaagcactgtaa

SEQ ID NO: 447993 - DNA, 678 bp, Serratia marcescens
atggcagatagttacattaccctatcgaaagaatcatatgaaaaaatatcaaacaagagcaaaaagggtaatgtcaaactgatttataacggcaccaacttgccagatatttcagaggtctttcatccaaataccgagttatctgaggggaaaattatattgggttttatcgggcgcctaacaagacaaaaaggcttgcccactctagttgatgctttaaatatcataaatcaacgcgggatcgatttcgaatgtcatttgattggtgacggtgaagatcgtgttgcgttagaaacatctgttgcggaatatgacctgacaggaaatgtcatatttcatggttactcgagcactccgtggaaattattacgccgcatacctattgttgttatcccatcactttgggaacaaggggcattagttgctattgaagcaatcattaggaatcacacagttatatcaactaatataaatggtttaaatgatgtggtcattgaactagaaactggctatctattcgaaagaatggatagcgagaagttggctaagatattagaagagctgagtttgggacacagaagttttatcaacatcgataaggataaacgagacgagttcctattccctgagcgaacagggggacacatctataacctttacaaaagtcttctccaatag

SEQ ID NO: 447994 - DNA, 216 bp, Serratia marcescens
atgttgattaagccagtggccaaacagcatggtctttcccctaacctctggcgccaaacgcccaacggcatcgatgtgctgcttttccatcacgagaatcaaatcgtactctcgacacatggttgccgtcagctgctgagctttatgtccgtccagagaaaggccatgcgcccgagcaatatcgcaggcatgaacatcagcaggtttatctactaa

SEQ ID NO: 447995 - DNA, 930 bp, Serratia marcescens
atgtgcgaagatttagtttaccatggtaattttgatgaaataaaaaacgattatatatatgcacgttatttgatttttagtgcgcacaatatacccagcgaaaacattcacttctataacaatacatatcaacacatcgacgacatgtctcatgccataaccaatcttaaatcacaacattataaatccgcttttaaaactctttattcaatatttgataaaattgcatattttcttaactcattctatgatttcaatgatattgatgcaaaaatttactttcacaatttttttggtaaatttgaaaacggaaaactgaaaccccactcaaagttaaaagagagcaataatcagtttctacacgcactgttctacatactaaaagatataagagattcaaaccataaagatgacaacttagacagtgagtcctattggttagatccagatgcggaaaaattttctaaaatcagaaatgcaattgagcataggtccttaaagataattgataattttggctataaactattaaacaatgacagtaataatcatgaaaagatctatgcagaagaaaaaaacaatctagaatctctcgatagtgaaattaagtttatttgcaaagagattaaaacacataaagaaaataataatcagacaaaactaaacatcttaatagataaaagggatgaattagttaaaaaaataacactctctaaaaataagataaatgacaaaactaagcgctctaagcattcattaatgattagtgagcgtgatttcgaagcgaggctaatgctacttataagattggttagaagatcaatcatatacttatcacttgctatccattgggaacagaagcaaaatagggatgactatcctattgtaatatcaagagatgttccattaaagcataaacttgatatataa

SEQ ID NO: 447996 - DNA, 888 bp, Serratia marcescens
atgcacggtatacagcgaatcctgcgtgctgcgctggttgtcgaacagctggtactccgccttctctttcgcctgttcgccgcgatcccaaccgtccggcacgtcgaaactgacgccgccgctgaacagcgtggtcaacgaacccatctccacccgcatgccctgcgccgacatgtcaaacgccacgccgctgtctttccagaagcgcacgttggtggtaaccagctgatcgtaaggcgcggtgatgaacagctgatagcgcatggcgcgctctttcggatcgaagtagctggtctccaccgacccgacgcggtagccgcggaacagcaccggatcgccggcgttgagctggcccgatttttcgctgtccagcacgatgcgcagccctttggcgtccggagaggccaacggcggcgcatcgagcagctgatagttgtctttgccgtctttgccgtctttgcccttgctgcccggctgcagttcgatataagcgccggagagcagcgtgcccagcccggagacgccttcacggccgatctgcggcttcaccacccagaaggcggaatcctgacgcagcaatttctccatgccggaattgagacgcgcctgcaccatcactttgctcagatcatcgctcagcgtgacggtttccaccacgccgacgtccacactgcggcttttgattttggttttacccgcttccagcccttccgccgtcgtggtgaccagcgtcaccaccggcccctgatggctgaagtggtaaaacaggatccaggcgccgatcagcgcggtcacgatgggaatgatccacaccggcgaccagcgtttgatcttctcaacgtctgcgacgctatgattattttccgtcaccttgcggctccttgttga

SEQ ID NO: 447997 - DNA, 405 bp, Serratia marcescens
atgtctgtcggcaatgatacggaaaccgtgaataagacggggctggcgccgctggcgttgggcgcattgggcgtggtgttcggcgatatcggcaccagcccgctgtacaccctgaaaaccgtgctgtttctctccggcgacgcgccttcggcgccggtgatccttggcctgctgtcgctgatattctggacgttggtgatcgtcacttctctcaaatacgccatgttcgccatgcggatcggcaaccgcggcgagggcggcatcatggcgctgatgtcgctgctggtcagcaagcgaaaatcccggccgctggtgctgttcgccggcgtgatggcgccgcgctcatttacggcgacggcgccatcacgccggccatttcggtgctctcggccctcgaagggctga

SEQ ID NO: 447998 - DNA, 231 bp, Serratia marcescens
atgaaacttgaaaccgccagcgctattaaagaattttacgcacaaccattagatgctgtgttgctaaatgttcgcatcgatgagcgtaaaaatcaggccgatctggcctctgctcgtttggtgcgtttggctgcatatatctctaagaacggcttaacggttatcgaggctgttgagttgctccgtaaagaggctgaagccatcgagcaccaagcgcaggagctgcactaa

SEQ ID NO: 447999 - DNA, 210 bp, Serratia marcescens
atgcgtaactgccctgggacaatcgctttagatatggcgctgtatcgtgcgaagcttaattcctcactttttgaagtgattatcgatgctgcatataacgaaaaggtgtcaaatgttgttattgatttaataactatagcctgcgatgccaacaacaatattatcgcagatttaaataaggaggccggtgatgaacaatccaatgcctaa

SEQ ID NO: 448000 - DNA, 2127 bp, Serratia marcescens
atgcagactgaaaaccgccccacggtgatctggcacccctttgaacgggcagcctaccgcctcgacgattcgttgtcagaagaagactgccgggctatcagcaccgcccacgggcgtacgctgtatcagcagcgccggccaatcccgccattattgcagccgctggtcgatattgcccggcgcagcggggcgagtgcacggatcgtccgggtgaccatccaggctgtcctggccgaaatggcccgcctgaataccccctgtcaccgctggacggcagagcgctggcaggcgatgtatcggcatcggcggctgagtgggccgttgctggcggcgtttgccttccacctgagcgatgtgccactcccgctgcaagacgagcgctgtcggcaaccgctgtgctatgcccgtgccgtgtttggccgggagatttgtcagcaggagtggcagcggttgctggcggtgttggtcagcctgggctatgcccgccgtacgcaggagatgttcctgtccgccgtgctgagtctgctgatgctggaaaacggcgatccgcggctggagagttttaccgaggccctgctgacacgcggtcagcagcaccgaacggaaggaatagccagagccgtggggaaagtgtctcatggcttggcggccatgggcattctgccgcgcccgttacgcatgcgcggctataccgactggaaagagaaaaacaccgacggtatcgcaccggagtgggtggcctggtgccggcgttggcgggaaacctccgtactgaggcccaagacccgcgaaaacaactacagctttattttgcgcatcggactgtggctggccagggactgccctgagatacgcgagcccggcgactggaccctcagtacctgcgcccgttttatcgccgcactggggaaaatgcacgtggatgagctgtctctggagccagaggaaaaacggcgcgtctccgcccgctccggtcagccgatgatgagtaactcccgggcctcgtttctgtatgccctgcggcgctttttcgtcgattatgagctctggggctgggggcggttgcaactcagtccctatcgccatctggccacgcccaacaccccggcatttagccgtggcgttactccccgggtgatcgacgatccggtctggctaaaactgatctgggccagcctgaacctgcgcccggaggacatgctgacggcgatccattatccgtttgccctgcaccaggcgatggcggtgatctggacccacgccgggttgcgtcagaatgagatcttgcgtctgaccgtggggtgtgtgcatgagcagacgaatgatattgttcaggaggatggcggcattattccggccggaaccctgtgctggctggatgtccccgccgggaaaacgtcaaaagcctttgtcaaaccggtcgccggtgtcgtgaaaaaatatgtcgatttatggctgcaggcgcggccgccagaacaggctccgctggttgatgaacgtaccggtgaaaaggtccgctatctgtttcagttccggggcagacaggccggcagcgccatgctgaataataccgtgatcccggtgctgtgcgcccgggctggcctccccgtcgaagacagccgggggcgcatcaccagtcatcgcgggcgggcgtcggcggtcacggcgctggccagcgtgccgcaggggatgacgctacatgagctgatggaatggtccgggcacagctgcccgcgctcaaccctgcactatatccgtatccgcccgacccggctggcggcctcttttgtgaaagccgacaaaatttcccacatgattggcgtacttatcgatcacgacagccaggccatgacggacgcggggccggcgctatattatgacctgggcgagctgtactgcaccaatccgttctggagcagttgcccgcaccggatggcctgcatcggctgtgatttcagcctgccgaaaagcagcgccagggcagtggcgctggagagtcgtacctccattcggcgctatctggaagaggtgcccctgacgcccgatgaacaggccatcgtcgccggagacatcgagaaactggataatttcattcgcaagagtcccgatacaccggcaaccgactga

SEQ ID NO: 448001 - DNA, 1221 bp, Serratia marcescens
atgtttcattttgataatagtaactacgcccctgagtttaagattataacaacacgtgctgctggaactagtttttctaatagcgaacaatgcctggctgctttcccatatgacacgagagaaacaatacgctttaccgaatgtgaagcagcaacaaagttttcaacgatgcgagaattagaaaatgaattttgcggagttcctggagcatcttatgctgttataaaaggacaaccgaatggcgttcctcttgaggttggtctcagaacggagatgatattacaccatcgttcagcccctggatacaatgataatggcgaatgccgtgattcagaattgctgacatttcatggtattgaacgatgccagccctttcttaccaaagaagaattgaattcaacctctatcctaacgccattgcaaaaattcgtacttggaggattcaagtatcaagctgcggatgttttctttgaggctatttataaacaacgaggagaaatcaaccaacagttacaggatttcctgtcgaaaggaatgtgtagacaccttgctgatttcattgttgcggaattcccatcaacaggcgtaaaaatattacagggtgatatttttcaagaacagaagtcaacctacgaaaatcttaccaagaacgtaatggagataccaaggctgactaataaaattagtttcaggagagatttataccatgttattcccaggttgatgaacttagatcagaatgttgtttttcgacctgactgttctgaaaatttgattttcccggcaagaactcagttacgtgaaagaactaattttgaatttatgaagcctgtttctgtagatattccacacattatattttctactaattcagattttcttatccctcttgttcaattaacggaaatatcttctaccatagggggggtttatcataaactttccaaggaacatatcgacaaagatcttgtcacgttattccgaagtcgcgcggcactagcttgcgattattctttgcagttggttaatcgagtttatacagcagagtcccatcagaccattattctttttatctattatatgttacatgatttagaagattttcttactgagaggagctttgaaagcgccccccccaccgtttggattaggcaaacgagaataaacatacttcagcattttttaacctatagaattatatcggactcaaaatttcaataa

SEQ ID NO: 448002 - DNA, 825 bp, Serratia marcescens
atgaaacactgtgcacgttacaccatgctggcagccctggtgttgggggggaccctgtcgccgctgagtcaggcggcgatggccgatggggatacctcggtgagcgtgggggccggccttgccgtggcgccggcctatcagggggcctctcactatgtggccttgccgttgtatgacctggaagggcacgtaaaaacggacaactggggcgcgttcacgctgggggttatccgtggcgcgcgctgggacctgccggtcccgtcgccgtttggggtggcattgctgatggattatgactatggccgcaaggagcgtatcagcgggctcggcagtcacgatgaccatctgcgcgggatgagtgacctgggcggttcgccggaggtcggtctggagttgagctacctgatgaacccggtacgcatttacgtgaagggcatgagcgcgacccgcgagcgccattacggcggtgaggacctgggacgtacggcgtacgtggactttggcgtgatgcgggattacgcgataaatgaccaggtgacgctggagggcaatgtgttcgcgacctgggccaacggcgggtaccagcggggttacttcggggtgtcgccgcagcaggcggctcggacccactttgcggcctaccggccgaaggcggggatgaagcagttcactgccagactggccctgaattaccagtggtcgccgtcgtggtccttccaggccggcggcgaagcgtaccgcttggcgggggatgcggccgacagcccgttggtggacaaggcgctggcggggatagccttcatgagcgccagctatcgcttttaa

SEQ ID NO: 448003 - DNA, 378 bp, Serratia marcescens
gtgcaatcttcgcggcaagggtaccgatatgcctttatggccgttaacggcttcgcctgcctgcttcatggggatattttcttcacggggggcattgatatcgcgcacatcggatcctcattggccttgttggcgttgtcaatgaccccgtatttaatcaccctggcgtgttttgtgtccatgcgccacaacgcaggggcgatgataggggcctggggggcactggcattggatggtaagacttattacgacgtgtttattgctccattgagctcgacagcggccattggtttgctcatcacgccgacagtgaatattctttttgtgagcgtctgttgcgtattgagccgtcatttgacccgtgtgtttcgaacctga

SEQ ID NO: 448004 - DNA, 363 bp, Serratia marcescens
atggtcaatgttgcgttttggtcaaccgtggtccttaccctggcgctcatgctgctggtcatggtgggggtgtggaatacctgtcgtgcgggccgccaaaatcaggccattatgaaacatggcaaggaggcccgggcgctgattgtgaatgctacgccgcataagagacaggttattgtgggaaaggtgtcgatgcaattacagcttgctttttcggtcaagggtgaagggtatcacgtattaaaggatgttatcgtttcaccctattatatggatgcgctcaggattggaaatcgagtagttattcggtatcgggaagggtatccgagaagcattgttattatgcaatatgttgataactga

SEQ ID NO: 448005 - DNA, 519 bp, Serratia marcescens
atgagacgacatgttaccctttttcctcccatcctggtctggatactgacaagcctggtggccaggccagtgcttgccgcctggccggacggggcgtgtaccgcccatcaactggaggcgcagtttgtggaccggcagggtgggcccgcggaggtgttgttggtactgcgtaatctggggacgcaagcctgccagatgaacgtgttgccgcccctgacgttctatggcggggacggcgagcagcgtcttgttggggcgcaataccccgaccatccgtccgtggcgtgggtcacgctggcgccgggcgaggcggtcgctgcgccattggcctgggaagagagagacattgagcatgcgcacaactgcatcacaccgttgatggcggcgttgaatttacccggcggggcattgcgattgctgtttggccgtcagatgtgtgcgacagggggctcacttgtcgagctgacccagtggccattgacgtcgtggcctgcgcaggggatgtcggagacgccttga

SEQ ID NO: 448006 - DNA, 357 bp, Serratia marcescens
atgaacgtttacgtgcaacggggtttgatggccggggcgctgatgctggttgctctggggacggatgccgcgacgaagccgttgcactcacccgcgaagggcgtggtatgcgatgcgtatttttgtgcgaatgcgcagggggtatcaacggcgctgacggcccgctatctgggcaagaagaaaggtgcgcaactggacgcgcagggggcgtttgagcgcacggcgtttacgtttgcgaacgggatatactgtgacacgaaagaaaaagtgtgtcgcaaggaccgctactttggtgctgacggcaagccatcgggggccattgatgtggtgacgaccgggcaactctttggcggatga

SEQ ID NO: 448007 - DNA, 480 bp, Serratia marcescens
gtgtacccggaggcacgtatccagctgtgtatcgtgcatatggtgcgcaacagtctacggttcgtctcctggaaggactacaaagccgtcacccgtgacctgaaagccatctaccaggcccccacagaagaagcggggctgcaggcgctggaagcgttcgccagtgcgtgggacagccgctatccgcagataagccgaagctggcaggtaaactgggccaacctggcgacgttcttcgcttacccggctgatatccgcaaagtcatctacacaaccaacgccatcgagtcgctgaacagcgtgatccgacatgcgatcaaaaagcgtaaggtgttcccgacggacgacgcagtgaaaaaagtcgtgtggctggcaatccaggcagcctcacagaaatggacgatgccgctgagggactggcgtatggcaatgagccgctttattatcgagttcggtgaccgcctggacggccactactga

SEQ ID NO: 448008 - DNA, 657 bp, Serratia marcescens
atggatgtgtttacttctttagttttgttttatgttttttcttatgcaagaaatataaataaaaatgaactatcgagagtgtcaaaatttaagtcagaacaacacagcgtgtgtttatcagacatgactatgtatataaataaatcctgcatcaatagttttgttgcacaaaactcaaaggagtgttgttctgataaaatatatcctcactttcagtttgttcccaatgtcacattgccaatattttccgcccctattattggagatggaagggtaaagcgagttagttggccattgccgacatttatgtttgttttgaatgcagacaagcactcagtaaaattaatgagtcttctccaacataaaataaattatttttcaaaacgaacaaatgtcagcgtaacgactctagtatataaaattaattcaaattacctgaggtgtttttttattttgaaaaaaaactgttcgaacatatggggattagatacagaagacaataataacaagcctggatggcttgagtctagtggtgtttttatattaaatagtcatcaagctaaatgtatcagccaaaaaaaagccctgaattactttaataagtatgcgcccgccgataaatatagccgttcttttttatatttgatttcactttaa

SEQ ID NO: 448009 - DNA, 258 bp, Serratia marcescens
atggccgagtttaaacgcacacaacgcgactatcctttgtcttttaaaattgctgttgttgagcaggttgaaaaaggcgaaatggcctacaagcaggctcaactgcgctatggtattcagggacgttcgaccgttctgacctggttgcgcaagcatggccaccttaactgggccctaggtcttcctctctccagccgggagttgcccatgagccaaccgtcagcccctttaactcctgagcaaagaagaacagcttga

SEQ ID NO: 448010 - DNA, 1182 bp, Serratia marcescens
  misc_feature (1152)..(1161): n is a, c, g, or t
atgtccgtcagaagttacttgaattattttattagcgatcttggtaagttagcgcgccagagtcggtatgatactgacgtgcttcatgctatccttgacgagctctcgtgtcgaaaaaaatcgctggcgcgcagagagctgaccgacgagatccataaatatctctcctgccagcctccacccactgttgcgcagaggcagaccgttagttgtagccaggtgtcttctgctgcgaaattgccgaaattagaactgaatcaaatcgaaaaagagcgcttgaccggcaagttcaataccagtgaaatcccaaatgcataccgtcgcgctattcttaataccacgcatattcataatcttcgtaaagagaacctgctcagaatgcatctggctggtatatgtggaaacgatgccgccgcgattcgcggcataattgaattctttcttcatggtcatactgtcgcacatacagagcggccagaggagaataaaaaggttactacattaatcaaatcaaccaatactcggaaacgaaatgaatttaacgacgtaaaattcacagataatattgtggagataaacgccggtcagagcagaaaagcagagagtgaaatttgtgccagtaaatctgatttttatcaagcaggtctggataaatgtattattctgagcgcaccacctggatgcgggaaaacctatagcatcgtagagcggctggaaaatcatgtgatggccttgagtgaaccctacgatgctaaaaaaatcttggtgctgagttttactagaaatgcagtcaaggagctgaagttacgtctggataaacatagccagagtgataaaaccgtgagcctagacctcattcgagtgatgacgtttgatgccttagcctacagtattttactggtcagtgacgtggtatcgtcagacgacgatttcgacaacaatatccgtagggcgaagtcgatagttattcaggaaaagattgctgacgttgaggtgctaaaaactgttaaatggatttatgtcgatgagtatcaggatctggtagggtgtcgtgctgattttaccattgaattgatgaaattagtcttaacgcggggcggtgcagtttcgcttttaggcgatccttgtcagcaaattatgaatttccagctnnnnnnnnnncttttaggcgatccttgttag

SEQ ID NO: 448011 - DNA, 606 bp, Serratia marcescens
atggttagcacaaaagagatgatggagcattatgtcatcgatcctcaggatagctactttgttaatggtgtaccgccgattgagaatgttgcggtcgttgcttatgatccgtcgtggccggaaatatatgaagcattggaatctaaaattaagaataaattaggttcgaatctactaaaaattgatcatgtgggttcaacggcagtacctggtctgaccgctaaacccgttattgatattgacgtgacggttgccgatgctgcagatgaagaaatatatttattagcgcttgaaaaccttgggtttagactaattgttcgtgaaccccgcttccatggtcatcgtctttttcattatgaaaatcctagagttaatctacatatttttactcaggacacccctgaaacagctcggcatttgcttttccgagattggcttaggcagtcagaagatgactgtctgcggtacgcgaatgcaaagcttgaggcagtgcaaggttgtagcgtagatatcgcaaaatatcatgaaaataaaaagagagtagttcatgatatttatagaaaaattttccaatctcttggttatttagatagcgaagacgcatag

SEQ ID NO: 448012 - DNA, 564 bp, Serratia marcescens; identical to SEQ ID NO: 98660

SEQ ID NO: 448013 - DNA, 651 bp, Serratia marcescens
gtgacagttcgtcggtggatacagtcgaaggcgttccctgaaatatcaacgaaaccaccaaggcccgggcttcttgacccggggcatgaatggctggaaagacaacgtataaatggtaaccataatgcccgacaactatggagggagatggttgacgctggttttgccgggagtgaaacgactgtcagagatgctgtggctaagtggcgtaagcaggctaacgctccggttgtcgccccggctcgacttccctctgcatcccgggtcagtcgctggttaatgccctggaggatgatcagaggtgaagaaaactatgcgtcgcgcttcatcgagtcaatgcgccagaaagaaccgcaactgaaaatggcacaacagttgtccctcgacgtctaccggatgctgagaacgaagaataaatcacagttaaatcaatggttccctgacgtcagtcagagtggactcgttgactttcagcgcgttgctaccgggatggaagccgatgcaacagcaatacacgaagcgatagtcagcagatggagtaacggtgttgtcgagggccatgtaattcgtctgaagatgctgaaacggcaaatgtatggccgcgcagggttcgagttactgaggcgacgggtgatgagtcctctggcatga

SEQ ID NO: 448014 - DNA, 1185 bp, Serratia marcescens
atggctgagttacatgaagttaaaccaagagaacaagcaggaagagacactttagaacgctataatgctcagattagagcagcgagtatcgcatgtttgtccatcttagagggcaaagacaccaaacgtgttttttgcgaatttcacgatgattttgtgattgaaaaagttattgctaataatattcattacacatttgtccaagtcaaaactaaggagaaacttcgagatatatggaaacttcgagatgttttcggaattttaaagaggaaaactgcaaaaaaccctcaaacaaatgaaatgatcagagatagttttgttggaaaactattacaacacacaactaattttggtgattcctgcaaagaggttgtttttcttacaaatacgcatattgatgaagatatagagaacattatcaatgatattttatctggatctttttctaatatacactgtaaacttattattgactcatttaataactgtttcatatcaattcaggatgaacaaaaaaacctagaaattgatgcaataaaaaccaaccttaagaaattaaggtttgatactgatgtggaatatataaaaagcaaacatgaaacattcgagatacttgcaaaagagaagatattcaaatttagtgaaatagagctatcgcatagcgaagccaaagaaatactattttccctcttatctcttgtaaattctaagtctagtgtaaagatcagcaactgctcaaatgaaaatataaaaaaacttgcgggtgtagatatcaatgacctcctggaggttctcagcatctcgaaacgtgcatattatgattttctagagaatggtgatgaacatgctttaaaatccgcatcggtaatagaacgattgctgagaaaggcaggcgctagcgacctcgaagtggattttttcacaagatgtaagattaaatgggatcagtggttaaggaataacaggcacattatatctgaattagattacatcacaattgacagagaaattaatgcaactttggataagctaacttttacgcgtggaagtttattcttatcaaatttaagaacattcatcaatgaattacatgattcattgcatcaacaagaattacttcattctttagataaagagactttaacgggaagtcttttttccagattagtagagcgttcaaaatga

SEQ ID NO: 448015 - DNA, 576 bp, Serratia marcescens
atgaagctgataagtataaaaataaaaggtagggatgtagccggccttgaatccgaagaactcatctttggaaaaaatataaccgaattttatggtcccaatggatgtgggaaaacaccattattgcaatccatctcttattgcttgggatacccgtgcaaatttagggatgatatttataagctatgcaaatctgccacactcacgttcactatagctaataatacttttcgtgccactagagactttgaaaataccgatttcatattaaccttagaaagcgatgaagatatattaaggttttacaaccaggctgattattcaaaacatatttttgaattattatcactcagttatccatcgcttcttacaacgcaaaataaacagtctttcccctatttatcgactattcttcctatattctatcttgaccaagatttaggttattcaaaattttattattctccaagtaacttcataaaagatcaattttctgaaatgctcagaatagtattttctttgcctgaaaaacactcttttgacgctaaaaagaacaaagacgaaatattgaaatag

SEQ ID NO: 448016 - DNA, 942 bp, Serratia marcescens
atgaaaagaagagaatcctcattgttacagataatgaaggagatcaacactgaaatagaaactctgaaccttaatgaagaagcaaagagaatattccgttctttcgaagaaatttgcccatcacttgattgtaaaatgttttcccgcagctctgaaagctatgcaaaacatctcttatatctaaaagatcaaattaaagacattgaaagaagtttaaacttagatagtgatagacatgacaagatagaacaagaaattatgtacaccagtaaaaccattgaagatcttagtactatgagaaataatatcatagaagatgaagacatatcttcagtaattgatgccatttcagaaatatcatccatactatttaagctacaattagaaaagagcgagttaaataaaatagcagtattagaagaaaaatatgttgaaatgcttaacaagcgcgaatatgctttagatgaactagctgggctcgaaaaaaatagacaattaataccaagacttgcgaaaataaaaactactttacgagataagttcatcaactggcttaaagttttaaaaactccaaacattgatttcaatattgcatttgaaaatgacttcagccctataatgggctatgagacattggaacagttaaaaggaagtactaaagtaagagctatacttgcatatagaacagcattgatagaaagcatgcttgaattggattgcaaatccttcatgtttgcgatatttgatacaccaaagcaacatgaaatacattacgaagacatagataactttatcatgaatttgaaatctctttctatgagatacaacttccagtttattttttcatccactgaatacaagtataaaggtgacgcagatgatatcttgttaacacctaagtatcctggagagcagcatgacatgtttttaatgaggtattag

SEQ ID NO: 448017 - DNA, 444 bp, Serratia marcescens
atgattaccatcagagcacgcgcggcggaagacaacgcgcaattggcagatatctggctgcgttcggtgcgcgccactcaccactttttaaccgaagacaacatcgcacagctgttcccgctggtgctgaacgactacctgccggcggtcaacgtttgggtggccgaagagcagccggggcatccctgcggctttatcggtctgaacggcaacaaggtggagatgctgtttatcgatgccgatcagcgcggcaaaggcgtgggcaaagcgctgctgacccacgcggaaacgctgcacgatgagctgcagctggacgtgaacgagcaaaatccgcaggccagcggcttctaccgccactacggttttgtcatcaccggccgctcaccgctcgacggccagggcaacccgttcccgctgctgcacatgaagctggaaaaacgctag

SEQ ID NO: 448018 - DNA, 411 bp, Serratia marcescens
atgagcgcccagttcgtttcccagaccgtacgcaccgccaccggccactggccggtgatactcccggccctcggcattgccttgcagccgaacggcaagccgcagccgtgcccgacctgcggcggtaaagaccgcttccgcttcgataaccaggacgggcgcggcacctggttctgcaatcagtgcggggccggtgacggcctcaacctggtggaaaaggccctgtcactgtctgccagggccgccgccgaacaggtggccgccgtgatgggagaaaacgccagcgccttgccaccggtcgctgagagcgttcattcaccaaagataaggccgagtctcagcgcaaggccgcgcgacaggcacaggctctggtggctgccgcgcagtcccagaccggcaacgcctatctga

SEQ ID NO: 448019 - DNA, 906 bp, Serratia marcescens
atgaattacatgacgtatttttctggaagacaatataaacgttattttcagtggaatggtaaggagggccggactataaagttctttcctaaaggttactttaatcccatattcttgatacagcgcatcgctgctgcattgttaatatacctcttactatcgcagggaaacgcccgaggcatgtcttggggggcagtggaaaatcgtgttgggggcaccgccacgttttcatgggggtggcccgatgagagcgatttaacccctatttgtaatacatcacagtgtattgtaacagtcggcccttgggatcccggcggtggcccgccaagtggtgggattaataaccctaatttagtgttacaaaaagttgtcgtaaatagtggagcaacaacccgtgatgctttccttgcatggacccgaagatacggaataagtgggagatatcgtatgcttatgtggacgccaggtcataatattgatacaagcaagacttgtttcgggtttcaggtgtttcctggaggagggggtggccttcgtgtagggacgcttcttccgggtactacatgtggtctcgtgcccccttctaatcttacttgtgattttaaccttggttccgaaattaatcttggggttgttccaaagggcactagtggagtatctggaggagtagacggatcggttacatgttcctcttcagcaacaatctcctcagctcttataaatcttccggtactggatgacaatgctgtggctctttctgttaatgggataaagctggataatcagcttcgtaatgtgggaacgggaaaacaagtgttgttaaatgttgttgcggatatcaaaggaaaacttaataacgcaggaacgtatgaaactaatgctgtcattttgttttcatatcaataa

SEQ ID NO: 448020 - DNA, 126 bp, Serratia marcescens
atgggcgacaagacgattggccgggagacgttcagcgcagtctggagtgaccctacgcccgtagacaaattctgtcgtcacgacgaggcctgttcaaaggcctccggactgacgccgccgagatga

SEQ ID NO: 448021 - DNA, 597 bp, Serratia marcescens
atgagccagcggaagtatttgacgcagtctgaagtggagcgtctattgcaacaggccttggcagggggaaatgccgagcgtgattattgtctgatttacatgagttttatccacggtttccgcgtcagcgaagcgtgcagcctgcggatatcggatttggatttacgggggcgctgtctgtatattcgacggataaagagcgggttttctaccaatcacccgttgctgaaggacgagttacgggctatcagggcctggctggcggtgcggacagggttgagaggggccgacagcgactggttgttcctgtcgcgccagggaaacccgctgacgcgacagcgggtgtaccaaatcatcagtcagttgggcaaggcagccgatatttccgtggacccacatccgcatatgctgcgtcacgcctgtggatttgcgctggctgaccggggtattgatacgcgattgatacaagactacctggggcacaaaaacattcgccatactgttcggtatacggcgagtaatgcagaacggtttgaaggggtatggcatcggccaaaaaacaagcgcaagagtggtcaattaggaccaaactgttaa

SEQ ID NO: 448022 - DNA, 1404 bp, Serratia marcescens
atgaatatatttgacgaagagtgtggtaacggtggaagtgaaagaggagtgggattaacaaaaggcaagagcctgctgaaaacccgtgttgctcaggcagtggcagtgtccgctatcttcctttcagggggggcatttgctgcgattaattgcaatagtgttaatgtggatacttggaaatacagtattactaatcccagtggtggtagttattgggggtatattgcagatggcggcttaagtaattgttttaattccttgcctgacatggcaagcgcaattaatgatctgatggaaacttctggtacaacgattggtccaggggcgactaataacggcaaggatggtattgccgacggtgacaatgcatccaacaccggtgctaacggtaaagcgaccggtgagggggctaccaataatggtgccaacggcacggctgatgggaaaggggccaccaacaacggtactgacgggaaagcgacgggtgaaaatgccacgaataccggtacaggcggctcggctgatgggaatgcagcgaccaacaccggctcgaatggtaaagcgaccggagaccatgcgaccaacactggttctgatggtgaagcgaacggcgacaacgccaccaataccggtgcgagcggtaaagccagcggcaacaacgcgacgaacacgggctccaacggttcggcggacggtgacagcgcgaccaacaccggtgccaacggcaaggccacgggtgccaacaccaccaataccggtgccaacggtaaagcaacgggcgtaaatgcgaccaactctggtgcaaacggtacggccagtggggaaagctcatccagctttggtcagggcggaaccgcgtcaggtaagaactcgaccaacttgggccaaggaggtatcgcctctggcacgaactcaacaagcgtagggcaaggaaccagagcgacgggaacgagttcaacggcgattgggcagggggcgttcgcttccggttttaactctgtcgccttgggggcaggctccattgcagatcaaccgaacactgtttctgtcggatcggtgggggccgaaagaacgctctccaacgtagctccgggtaaccgtggcaccgatgcagcaaacatgaatcagttgtggtctgtacagggtcagttgcaggacagtatcaatggtacggcacgtaaagcctataccggggtggcggctgcaacggcattgaccatgatccccgaagttgaccccggcaagacaattgcaattggtgttggtggtggtacgtatcagggatattcggcttcagcgttgggggcgagcgtacgtgtaacggatagcgtcaaggttaagctgggtgttggttttagtagcacgacggcgacctacggcgtgggtgcatcctatcagtggtaa

SEQ ID NO: 448023 - DNA, 648 bp, Serratia marcescens
atgcattgttatatggcgaaggtcacactactgttcgttttattggctttgattgtcgtgagctttacgactcaggcggaaagtgaaggtaaagtcgcgaaaatttattataacggagaaatcagtattccgttggtcagtaagctgattaatgacattgatgatataaaccaaaaaaagaacattggcagaatttatttatacataaacagctatggtggcgacatggatgcgggattgatggcatcgtccgctatcaaaagttcggatattccggtgacaacggtggcgatgtccacggttggctcagcagccacgctcatgttgtgcgcggcaaaagaccggcgttcgttacctgaaggcagtatttttatgcatccatcatggatgaaatacaatggacagttaaggccgaatgacatttatgcattgggtttggatagtgtgagatttaacagtatgtttagccaggtttatagaacctgtaccactatgacagacaaggagattgaaacactgctttatagcgagtctaataaggtgatgcttcagccggaggaggcgaaaagtaaggggatgatatctaaaatagatgcaaagatagtaaaatcggatttgtcatattacattttttcgccggataaatga

SEQ ID NO: 448024 - DNA, 657 bp, Serratia marcescens
gtgactgggaattgtcacctatctcacccatgtattatcaccgtcattgatgcctgtcagtatgggcgattggggctacaaagtattttaacgtcgccaacactttcttcatttaacactgctgtcgatatatatgagggagtcgatacggcactgacagcggtgcaaaataatattgctatggttagggggtgtttgatattgcgtttgctatcgttccctgcattggcactagggcaattgctgtctctggatagtgcgttgatgacccagttggggtatcaacgactgatcctgctctcaccctttgcgatgaataacgttatacggcaggtattgattagcggtgacatgcgtctgcctgtacgaattataaattcacgctgttcggcagcgttactgcatcgcattgtattatcgcaagggacattgttgcaggagggactcgatgaactgttgccacatatgcctgctttggtgctttctgtatcggagcgaagggtattgtcgggtacgttacaggaaattcccattcatttgcaggcccggcggcaacaacgcaatcataagacattgtatgctcagcggcagagtgcgctgcagaagttacgtgcagcaaatataccagacttgctgaggcggtttaccgttttatga

SEQ ID NO: 448025 - DNA, 237 bp, Serratia marcescens
atgaataatctgttggatgactgtgccttatccgggttgcatgccatgtctacacctcgggcgcgcttacgtgtgatgatgcagaaggcagcgatgttagagcaggaagggtgttttgaagatgccgcactttactggaaggcgggagaagaattgtccgaacgggaaagcgatcgccattggtgtgaggcgcgagcactgttatgtcaaaagcgaaacttacaacagcaacgttaa

SEQ ID NO: 448026 - DNA, 507 bp, Serratia marcescens
atgacaaaattcataggcgtgttgttgcttcttacggtgtttatcagcgtttatgtccaggggaagggaaatactatgtttaataaattaaatcaacagcgtgaaacgatggggaatacggcatttaccgcaacatattacaaacccgggttgttaaagcatattgtactgttcaagtataaaggcaacgtcacgcatacacagcgagatgcggtgacgagtcggtttttatcgctcaggcgctcaatgcgaccgggaacggaggcaccttatattctctctattgttgaaggtgtgcaaaatagtggggaaggggtggatggcggatttgaacaggggtttatcgtgacgttcaagtctgaaggtgaccgcaattattacgtgggcaaacccctggtagatacagagggggattacgatgaggcccatgacgcgttcaagcaatttgtgacccccctgctcagtgacgataacggtgtcctggtgtttgatttttcactgaggtaa

SEQ ID NO: 448027 - DNA, 2277 bp, Serratia marcescens
atgaacagaatgataacggtccatacctcgcttgatgatacccctttcctttttcaatcattgaccggcaaggaagccctgtcatcactgtataccttccatgtcgacgtgctttgcgaaactcgtcctgtcgaccccaagaaactgctggggcacaccctgacggtggaatgtcgccaaaccccgctgaccccaccacgctatttgtcgggcatcatgacgcgggttgaggtcaaggggcgggacagtaatgaccgctatgaccgttatacccttaccgtcaaacccgccttgtggtatctggggcagggacgggattgccggatatggcaagagaaaagcgtgccggacatcatcaccacactcttgcgtgagcagaatattgcgtttgagaaccgcctgagttgggattatcggtgttgggagtattgtgtgcaatatcaggaaagcgacttcgattttatcagccgcctgatggagcatgaaggtatctattactacttcctgcacgataacgggaaacacacgctggtgctggctgatgcacccgagcagcacgaggtgctcagtggtttcgccaccttcccgtgtattgacgagacggcgagtgatgtctccgagccggggattgcacactggcgggtgtccgagacgatgtctgcgtcgctgtatctgactgacgactatgattttcgccggccgcgtgccagcctgctgcaggcgagacaaaatcccgcccctgacggccagcaagaggccgtcgtgtttgactggccggggcggtatacccggcatgatgacggggcattttacggtcgaattcgccagcaggagcttgcgtgtgcacaggcacagatgtcgggggaaaccccgtcgctgggcatggcaccagggcatgcctttaccctgacgcgggcggcgcgcccggaagataaccggacctatatcgtcagcggtgcagagtattttttcagtgaggccggttattacagtcaggatgacgaagaggcgacaccggtacatcgcacggtctttaccgcccacccggcggccctgagctggcgtccagcccggcaaactgcctggccgcggacatacggcccgcaaacagcggaggtggtggggccacaggggcagaccatctggaccgatgaatacgggcgcgtcaaactcaggttccgctgggaccgtcataacacccccggtaatgaccaggccgcctgctgggttagggtgtccagtgcctgggccggatgggggtatggcagtatccaggtaccccgtgtcggcgaagaggttatcgtcgactttatcaacggtgacccggaccgccccatcgtcaccggccgcgtgtataaccaggacagcatgccgccgtgggatttgccggcggatgcgaccaaaatgggcttcatgacgcgttctgcgggcggaacccccgagaacggcagctttttggtgtttgacgatgcaccggggcgtgagacgtttgacatgcacgccgaacgtgacatgagcatgagcactgaacgtgacctgacggtgaatatcgagggggcacggaccacgcgggtgaagggcgaagaccgctacacgttcgatgatagccagcgtgtacgtatcgccagggggcggcaggttgatatcgcggcgggcggtgataaccgggaggtctcgggggacagcacgaccacggtgcacggcaagcagacggttatcattgacggtgagctggttgaggaataccgggacgggcaaacaaccaccgtcaccgtcggtggccagacgttgaagatacacgccggtggccaaacgataatcatcagcgagggtggtcggtccattgacatcgttggcgatgcaaaaaaaaagataaccggcaacgagcgcgaggacacgacgggggaatggacgaagtcggtggcgggtaccattaacatcctgtccgatgcggatgtgaacattaaaagcgccacgaaaatcacgctggatgcgcctaatcaaaaggccactaccggcaaggggcacagcgaaagctttaccggtcactctttcagcatgacgggtgcatcggaaagctttaccggcagttcggtcagttttaccggctcgtctgtcagctttacggggatgagtgtctctgtgggggctttgggtatcagcaatacgccgttcaagtacaaaaaacacgataacaaggtccagtttgtcagtggcagtaccacgcttaacagcaatttcagtgccgttatgagtgcactgataaccctttcgtga

SEQ ID NO: 448028 - DNA, 369 bp, Serratia marcescens
atgacgatggtcaatgttgcgttctggtcaaatgtggcccttaccctggcgctaatgctgctggtcatggtggggatttggaatacttgccgagcagcccgaagacatcgggtcattatgcagcatggcaaggaaacccgtgcgctgattgtgaatgctacgccgcataagagacagattattgtggggaaggtgtcggtgcaattacagcttgctttttcggtcaatggcgaagggtatcacgtattaaaggatgttatcgtttcgtcctattatgtggatgcgctcagggttggaaaacgcattgttattcggtatcgagaggattgcccgaaaagtattatcgtagtgggcgaagtgagtaattga

SEQ ID NO: 448029 - DNA, 609 bp, Serratia marcescens
atgaggcgtaaatatttaaccggggaagaaataaatagattgcttaaaactattgctgtggatatggtttcaattcgtgactattgtatggtgagcatggcctttttgcacggtctcagagtcagtgagctgacggcattacggctcccggactacgatcctttgtcgaagaggatttatatcatgcggttgaagggaggtatgagcaccagtcatcccttgttgctggaggagagtgtggcattgcagcgatggcttgccgaacggcaactgcttgccggaagacatcagccctggttgtttttatcacaacagggtcagcgtttatcccgacaacgtttttaccaactgctgcggcgctatggcgaacgtgctggtttaccgttgccattgcatccgcatatgttgcgccatgcctgtgggtacaaccttgcggaacgcggaaatgacacgcgtttgattcaggattatctggggcaccgcaatattcgtcataccgtgctttatacggcggcgaatgctgctcgttttaatcatgtttggctgaaagacgcaggtttgccgctgatgtcgccgttgcaggaagcgttgcctgtgggcgtgctgtga

SEQ ID NO: 448030 - DNA, 1440 bp, Serratia marcescens
atgaatacaaaacatagccacgctggacgcatcattgacaacagcgagaatagttatctgttattgaacgagttacactaccccagaaatgatgagaacataaaagggaaaccctcactatcaagtgatcaggccgcccaacagctagtaaggacaggcctaacctggaatggaaaagacgtttttcacactcctgtgaaaataaccttttcctttccagaatacagtttctgggggtatacacctgatggcactgaaaccggattaagttcgttcacacccatccaaatacagatggcaaaattatctcttcaagcctgggcagatattgccaatattaattttacagaggagaacagctccacacattctaacattacatttggcaattacagcctgcaagccgatggcataacgccgacctatagccaagcgtatgcttacttacccgggggctactccagttctggtcaaacttggtataattacaatgtgaataacattcagcgtcctgatatttatgagtatggcagacaaacactcacacatgaaatcggtcacgcattaggattaagtcaccccggtaactataatgcgggtaacgggaccccaacctatgataacagtgccagttatgctgaagatacaagaatgtacagcataatgagttattggaatgaaaaatacacaggtgccgatcaccagggacactactccgttgcaccacttatcgatgacatatcagccattcagtacctgtatggtgcaaacatgaatacaagaaccggaaacacaacgtatgggttcaattctaacagcgagagagattacttctctgccagctcaaaagatgaaaaattaatattttcagtgtgggatgctggaggcaatgatacatttgatttttctggttatgaaaacaatcaacacattgacctaaatgaagggagtttttccgatgtcggggggctaaaaggaaatgtatccatagcccatggctctaccatagagaatgcgatcggtggaagtggtaatgacgtcatcattggcaacgatctggtcaacattttaaaaggaggcgacggaaacgatttgctttttggtgggggaggttatgatgaactgtatggtggattaggcaaagacacattcctttactattccaacagcgaatcaacaacagaacgttatgactggatccgagattttcagtccggacaagacaaaatagatatttcccacttaaataaaacgctgggatacgagaacgctatatacttatcagaaactctaagtgataaaaagggagcagcaacaatcaactatgaccactattataatgttacagattttttcgtaaacatgggaggaaccgctaaaaatgactttcatataaaaatcgtcggcaccgttgattttactaccgatatcatcgtctga

SEQ ID NO: 448031 - DNA, 525 bp, Serratia marcescens
gtgttgttcaaaggacttccctgtggtcaagccctctcgttttttgtcgctgcttgcgaaaaaccctgttttgcgcaccgcccggcggccaacccctggctcaggacggcgcgtgcccctcccttttgttcaccactccgtcgcctgaccgcctgtcgggtgcagggcgggcaagcacattaccgcgggccgtcatggctaccgcacgacccggcgcgaggcggggtcgtattgcgcagcgatggacagccccgccctttgctggaaaaacacgcaaagaactttacaattaggaccattttgactagtcaaaagaaggcatggcgggggctggctttgatagatgaaaatatcgaaatgaataactttattgacacaggaaactggagtgacaacaaaacgcacggcgcacccgccattccgtcctcgggagcgtcaccgtcagcgcgcgtcaacaggcccgttaacggaccgggtgccggccaatgcgatggatggatgtcattgaaaagtaagaggaggtaa

SEQ ID NO: 448032 - DNA, 4098 bp, Serratia marcescens
atgaaaagcaaacctacggacgtctctttgcgtcggtggcgagcgctgacctggataaacatcggtatccaggcctgcttcccgctggcagtgagctttaccccgacgatagcggctgcgagcagcctcctgcagaagtctgcgcctgcgcagacgcaggcctatacgctgacgacgggcgaaacggtggcgacggtcgccaaaaaatacaacatcagtcaggcggagctgcgcaagctcaatcagttccgcagttttgcgcacgggtttgaccacctgaaggccggcgacgaactggatgtgccggcggcacccctccaggccgggaatggcgcggcgcccgttcggccgaacggtgacgcacaggcggcgcgggtggccggtgtggcatcgcaggccgggaatttcctggccaacaaccccaatggggaggcggttgcgtcgatggcgcgcggcatggccatgggcgaggccacgaaggaggtgcaggcatggatgagtcagttcggcaccgcgcgcgtgcaactggatgtcgaccagcatttctcgatgaaaaactcgcagttcgacctgcttattccgctctatgaacagcaggactggctggccttcactcagggaagttttcatcgcacggacagtcgcacacaggccaacgtgggccttggggtgcgctggtataatgacggctggatgctgggcggcaacaccttccttgatcatgacctgtctcgcgcgcattcgcggatgggggtgggggtggagtactggcgtgactacctgaagttgggggccaacagctacatgcgcctgaccaactggaaggactcgcctgacctggatgaaggtacgtacgaagagcgaccggccaatggctgggatatccgcgcgcaggcgtggctgccggcgctgccgcagctgggcggcaagctggtgtacgagcagtattacggcgatgaagtggggctgttcggcaaagacaagcgccagaaagacccgcacgcctttacgctgggccttgagtatacgcctgtgccactggtgtcgctcagcgccgagcagcgccagggtaaggggagcgagaacgatacccgctttggcgtggaaatgcgctatcaactgggcgtgccgtggcagcagcaggtcaacccggatgcggtgcaggcgatgcgcagcctggcaggcagccggcatgacctggttgagcgtaacaacaacatcatcctggagtaccgcaagaaagaggctatcagcctgcgtacggcaccgctggtcaccggctacgccggggagaaaaaatctctgggcgtgaccgtcaacagcagcaacggcgtggaccgcattgactggtcggcgccagcattgctggccgccggcggtaaaatcgtacaggacggcccgctggcatacagcgtggtgttgccggactaccagttcactcagggggtgaacaactacaccgtcagcggtgtggcggtggacaaaaagggcaatcgctccggtgcgagcgagacgcaggtcagcgtgcacaccccggatatcgatgagaagaccagtacctttacgccgctcaacagtacgctgtcggcggacggaaagagtacgcaggtactgacactgagcgtcaaggatgcgaaaggtaatgcggtggacctgccgcaggcggacattcacatgaccgtcggcacgctgaaatctgccacggtctcggcggtggacaagacggctgccggcgtctacacggtgacagtgaccgccgggacggacaaagagacggttgtcctgacgccaacggtgggtgatgtgaaacttgacccggcccgggtggttatcagcggcgtggcaccgagctcgaccaactcgaccattgacatcaacaagggcagcatcacggcgaatggcgtggacagcgcgaccattacgttcgaggcgaaggacagcaacaacaacccaatcacgggcattgctgacgacatcaccttccaggtggtggacaaggatggcaatccggcgccggcggggaccattaccgtctcgaaggcaacggaaatcaccccgccgggcacgtacacggcgacactgaccggtgaaaaggccggggagtacacggtgataccgcagtacgacggcagcgcagtgggcaacatgaacgataagattgagctgaaggcggacgagacgccggacgccggtcagggcaactcgacgatagcggcggcgccgaagagcattgcggcggacaacgctgcgacgtcgacgctgacgttcacggcgaaggacaaaaagggcaacgtcatcaccgacctgactgcggtaacgttcgtggtcaaggacgcgagcggcaacgtgccgaccagcggtatcacggtgagtacgaccaccaatgcgggcaacggcacctacacggcaaccctgagcgggacgctggcggggacttacaccgtcacgccgttcaacaacagtgctgcggtgggcagcttgtctgacacggtgacgctgacggcagggaccaccccgagtggcaccaactcgaccatcggcatcaacaaggacagcatcacggcgaatggcgtggacagtgcgaccattacgttcgaggcgaaggacagcaacaacaacccaatcccgggcattgctgacgacatcaccttcaaggtggtggacaaggatggcaatctggcgccggcggggaccattaccgtctcgcctgcaacggaaatcaccccgccgggcacgtacacggcgacactgaccggtgaaaaggccggggagtacacggtgataccgcagtacaacaacagtgcagtgggcgacatgaacgataagattgagctgaaggcggatgagacgccggacgccggtcagggcaactcgacgatagcggcggcgccgaagagcattgcggcggacaacgctgcgacgtcgacgctgacgttcacggcgaaggacaaaaagggcaaccctatcaccgacctggctgcggtaacgttcgtggtcaaggacgcgagcggcaacgtgccgaccagcggtatcacggtgagtacgaccaccaatgcgggcaacggcacctacacggcaaccctgagcgggacgctggcggggacttacaccgtcacgccgttcaacaacagtgctgcggtgggcagcttgtctgacacggtgacgctgacggcagggaccaccccggacgccaccaagtcgacgttcagtgccgacccgagcgccatcatcccggacggccaggacagcaccacgctgaccctgcacctccaggacagttacggcaacgccatcaccggtctgaccaacgtgacgttcgcagccacgccagcagcgaccgcatcgctgagcacgacgacggatgcgggtaacggcaactacacggccacgatgaccagtacggccgcgggcagctatacggtggtgccgcgtatcaacgggacgccgataagcggcctgagtgataccgttaacgtggccactgtcgcgaccgacgtacaggacatcctggtgaacaactacaccttcgcgaaggacgcggggttcccgaaaaccgggttcaccggcgcgaagttcacggtgcaattgaacggtggtcagccggacgattacacctggacctccagcgcctcaagctgggcaccggttgaccccaatggggtggtgacgttcactcagaaggggaacagcaccccggtcaccatcacggccacgtcgaaggcggatgcgagcaagaaatttgagtacaccttcacattgaacgactggtacatcaacaatgggtcaacaacgatgaactggtcagcggccgacgcctattgcaacagccagggtgccgcgttgccgggcctcgcacaactcggcggctcgcaaggcatcagtggactgtacaacagccgcggcgaagtaggctcactgtggagtgagtggggcgatttgaccaagtataccggctcgggcttcccgggcagcctcaacacctgggcgtccgaggtcttcagcagtggtaaccactacaacgtcttcttgaccacgggctacgtcaactactacaacgacagctacagctacttcgttgcttgtcggcagggtctttaa

SEQ ID NO: 448033 - DNA, 1272 bp, Serratia marcescens
atggatttcacgtcatcactctcaaagagaatcaactacgagcttttacaatgcgtcgtaaaaatgggaagaagcatacataaatcactaaacacagaagcaatttcccaaacatgtcgagcactggcggatgaaattagcgcgcaacgttatcagccatcgacttactcacgctttgccgtcacagatccaaaacttagagaaatctatgccccctcatttcgtgacaggctggtacaatgttggttagttcatcacatcaacccgtatgtagaacgtgtacttatcgatgacacttttgcaaataggaaaaataaaggcacactggctgcggtacaacgcgttcaacgcttcatgcgtcaaccaggccatgattattaccttcagttagacatccagaatttctttaattcgataccacgtaacccgttgcttacacaatgccaatccatcacacagcgttatctatcagaaagtccactctatgagacactgaatttcattttagagcggtgtatccttcatcctgtagcgcaatgcacatggactgtttctggcgacaggcgattactgagtacaattcccccacacaaaacccttctcggagcagggagtcacagagggcttccgctaggttcttcagcaagtcaaatgttcgctaacttatggttaagccccctagaccacttcatcaagcactcactgaaagccaaagggtatgtgcgttatatggatgacttatttttactcggtaattcatcacaaagaatgtctcaatggcgagagctcattgcatcattctgcacccatgaactcaatctcaccttgcaccccacaaagcaaagtattcaaaagtgcagtcagggcgcagattatttgggttatcgtgtttacccccattacttgcatatgagaaatcgaaatattcaccgtttcatttaccggcttaatttcttcaatcaattattgtcaggaaggttacccgagtacgttcgccctgactccgaatccttcattcacagttgggctgcttatagcaaaggtactcccattttccctcaatatgcgttgctcatccaaatccagtcagtcatcaatagctatttgggcatgatgcagcacacgcaacactggcgtcttcgcaagcaaatatggcatcgccacgcgggtttactcaagacctggtttatccccgctaacgcaaactacggtgccgtgcgtattaaacaatactgtaaacaagactggattgtgcagcagtgccgatggtaa

SEQ ID NO: 448034 - DNA, 528 bp, Serratia marcescens
atgcctgccattgcaggtaggcgggtatcgcgcaatattaaggaaaatacgatgacgaaacaaaatcattcaccccaaaaccctcctcccctctctcctgatgaccgtgtcagcgttggtcggcgtgtcgcgccacgccaatccaatcacgaaagctacgtgctgccggcgtgtctcgatcacctcccacccatgccgctctatctggcggtggcgcactttgggttggtgatgggaaaacccctgtcacgggagatgatttgccaggctttccagctcgatacgcgtcgggcattggagattatgcgttatttactcaacggtgcgccccgggtgacctgcaaatgcctgtccctgatgaaggggcagggctattgcctgcgtattttggcgatagccacaccggaacagtctgttgctgaaacaacgtcctcgcaaacgacagtgcggctacgcgggagtaccgcagaacgtgaacaggtgcagcaacggttgcgccagtggtttttacgacgccccttatcttga

SEQ ID NO: 448035 - DNA, 408 bp, Serratia marcescens
atggggatgtggtcgtggttactgtggctgagtctgagtgtgctgttgctgggaggcatgttattgctgtcaccgaatgcggttgtcaaaccttgcccggcgaggtttatccctgggatttggcgctttatacgcggcgatatggccgtggagggcacggtacacatagggttaggcctggggggcgcagggggctggctctgtgctgctggtctactggcctctgactggacgcgcagtttgctggttgtgggggccggggcgatggtgctgattgcgttgtttaatgccggacgtaagggggcgcagaccctgatggagttggccgtcttgtcggcgttccagggggctggctgggtggtgctggtgctgattgtgctgcagttgtacgggctgtcgccgcggtaa

SEQ ID NO: 448036 - DNA, 717 bp, Serratia marcescens
gtgaggcttgataagaacgggttgtactgtcaagggacgataacgggcattcgcgggcctctctcgcccaatgggctgattaccgtcgtcgatccctgtccttacgggcgactgggactgcaatcccttttgaccccgccaacgacggcctggggagcggttcccgttggtgcctatgaacgggtcgaaagggcgttggcggcgatgaaagaaaacaggggtaacccgcgtggcgcacccggcccaaaacgttgcctgattgtgcggttgtcgagatatccggcgcgggcgttacaacaactgctgcaattggatgacgaagcactggttctcgccggggtggaacgcctgattgtgctttccccatttgaagtcaataacgtagtgcgccaggccctggtatgttgcggcatccacttaccgcttcggatcgtcagtgtgcgcagcacactggcgttgttacagcggatcgtgtggtcagagggaacattgttgcaggcggggaaggacgaatggttgccgcagatgccggcgctgttgttgtcgccctgtgagcgcagagtgatgtccaacacgttgttggaaatacctatccctcagcaggcatggcagcaacgacgtaagtcgaaaacgctatacgcgcagcggcataatgcgttgttaaagttccaggcctcagggctggcggccttgttgcgccggttccggccgatgtga

SEQ ID NO: 448037 - DNA, 135 bp, Serratia marcescens
atgaaagaaaaaccaccggtacgatatgcgctgaccacgccccaccgagacccaatgttatcgcccgggctgagcgtggtgttattgctgatgtgggagggcagtgatgatgtgccaaagggagagcagggatga

SEQ ID NO: 448038 - DNA, 249 bp, Serratia marcescens
atgaggaacggttcaagaaaaggcgcttgcgacatggacacgccattgccggtcatgcatgccatgtcaataccacgagaacgttcacgtgcgctgcaggagcaggccgcaattctggagcgggaaggggggttcgatgaggcggtacgctactggcaggccagcggggagctggcggtgacggacggtgagcgtgactggtgcgaggcgagggcgctgttttgccaaaagcgctgtcagcgggcgtaa

SEQ ID NO: 448039 - DNA, 459 bp, Serratia marcescens
atggcagcaggggttagcaaggggcatcacggtacggccgggcctgagcgtcaatccacctacggcgaatatcatctgccagccgggttgcagctggccgcgacggtcccgctgtatcaggcggtggcggtttggggatggcgattgcggcggcctttttgtcgcgaagagctggcgaaggcatttcatctcgagttacgccgcgcgggggatgtgatgtcttacatccggcgtgcgcgcccggaccgtatcgcgagtcgccagttttattcccgtgcatccagcggcgggcgcctgcgttatctgcacattatcgcaaaaccgcggatagaggggctcccggtgtcggagacgccggtgcatctgacacctcaggctccccccgacggtgcagatacggcgccgttaccggcattgcggcgttggtttatcggtggcgcgagagggaacttgccgtga

SEQ ID NO: 448040 - DNA, 441 bp, Serratia marcescens
atggtgcgcaacagtctacggttcgtctcctggaaggactacaaagccgtcacccgtgacctgaaagccatctaccaggcccccacagaagaagcggggctgcaggcgctggaagcgttcgccagtgcgtgggacagccgctatccgcagataagccgaagctggcaggtaaactgggccaacctggcgacgttcttcgcttacccggctgatatccgcaaagtcatctacacaaccaacgccatcgagtcgctgaacagcgtgatccgacatgcgatcaaaaagcgtaaggtgttcccgacggacgacgcagtgaaaaaagtcgtgtggctggcaatccaggcagcctcacagaaatggacgatgccgctgagggactggcgtatggcaatgagccgctttattatcgagttcggtgaccgcctggacggccactactga

SEQ ID NO: 448041 - DNA, 426 bp, Serratia marcescens
gtgatcgatgttgtgggggatcacctgcagcagactgtcacccacgttgaccatctgaccaaccgtgacgctcagcgaatcgatgcagccatcggccagtgcacgaacgatgatcgctccaccggcatcgatgttgagccgctccttctgcagctcgtagcgctgcagctccatctggtagatctggttgtcgaagttggcggcctgggtatggatctggctttccagcacggtgatctgcagtgcattctgttcgttctggccggacaggcccagcaggttgttctgctgctggtaatacagcgccacctggttggtgagttgatccttgttgatcagtcccttggtctgatagtgccggtagttctccatgttctccttcatgatgcgtatcccttcctgagcacgccgaaggatgtcggttga

SEQ ID NO: 448042 - DNA, 705 bp, Serratia marcescens
atgatgaatgcagtcaaaaagaccacttgcgcactcgcagtacttgccaccacctccacagctgtcatggccgagagcattgatgtgaaagtcatcggtactattaccccgacggcttgcaaacctactttgggggggggaggtaccatcgactatggcaatattccgcctgcatctcttagtaatgatacatttactgttctggcagaaaagcaggttgattttagtatcacctgcgacgcccctgccaaggtggccattctcgccgttggctcgaaggccgacaccgcaacaaatgtaactaaatcacctgctggttatgatgtattccagggagtcctcttcgctccaagtcccggtgtagtaggactgggggtgtcaggcggtaaaaatatcggtgggtatggcatcagattggtaccgggatcctataccgttgacggcaatcaggcagacactattgggcgcaaaagtgacggcacttgggttccctctgccaatctctgggctggtagtttatttacccccgctttcaaagacttgcaaatctcttgggcctcaaaaggtcagcttaccccaatagctttcactaccgccgctgggaaactgggggttcaggcctacatcaccaaaacctccgagcttgacctctccaagcccatcaatctcgacggcttgaccaccctggagttggtctacctgtaa

SEQ ID NO: 448043 - DNA, 552 bp, Serratia marcescens
atgaaaaaagttgtatatgaagatgacaacaagcttctggcggccttggcactagcaatcgttgagaggcctaaggccaacttgcacgaattagcgaaggctgtaggaattagtaaagcaaccctatatcgattctgcagtactcgcgatattttaatagagaggttgatgcagagcgcaactcatgcgattagtaaagctatcaatgatgccaggttggatgacaagtcaccgcttgaagctcttagccgattgtcgaatgattttataaataatcaagaacttatgatgtttttgctctacaattggcatcccggtaaccaacttgaaactcaatgtcaaactgagtggtattcagcgctggacacgttcttcctgcgggggcaacagctggggatttttcgtgttgatattgcagcagctgcgatgagtgaacttttgttttccatgttgattgggctccaggatgcggagcgtcgcgggcgtgtcgcgaaaatggggctatccaggcttatggaatcagtattcttgcatggtgttgttagagtataa

SEQ ID NO: 448044 - DNA, 675 bp, Serratia marcescens
atgaataaacccataggtaataataaaaaaatggctatcgcttgcttcgccatgttcttactttttataggcttgagtttttatcctgtaataataccagataaaaaaaaccttctgatttctggatggctatttcctgcattatatattattgaattctcttttattttcccattatatgtctttaattttggtaagcttgataggatgggggttggcaacttcagatgtaaagttttttgtctatgtttcgttctactcgtgctaacccaatttttgggtgcctatataatggatatccgaagacaagaaaactggatagtagaacaggaggcggtaaaaggctggatgttttggttaaatcttttccttttgatttttattgtcccggtttatgaggaagttatttttagagggtatttgtttaggctgggtataattacatttaaaggtaatgtttatttttcatcactaatcacatccttactattcgccgccctgcacacacagtacaatgacataagaacatttgtaatccttttttttgtttctatgatacttattggtgcacatgtaacttcaaaaggaatggcaatgccaatactccttcacatggcaatgaacgcgaccgttttagcattgccattaatttttaatgaaatagcaacttcataa

SEQ ID NO: 448045 - DNA, 825 bp, Serratia marcescens
gtgatcgatatcgtgggggatcacctgcagcagactgtcgccgacgttgaccatctggccaaccgtgacgctcaacgagtcgatacggccgtctgccagcgcgcgaacgatgatcgcgccaccggcatcgatgttgagccgctccttctgcagctcgtagcgctgcagctccatctggtaaatctggttgtcaaattcggcggcctggatatggatctggctttccagcgcggtgatctgcagcgcattctgttcattctggccggacaggcccagcaggttgttctgctgctggtaatacagtgccacctggttggtcagctgatccttgttgatcagtcccctggtttgatagtgccggtagttctccatgttttccttcatgatgcgtatcccttcctgagcacgccggagaatgtcagtggagcgggtgaacgcagcggtgtattgcgccttttgtttttccagcatggtaagcgtggcctgcttgctgctttccagtcggctgatgatttgcgcaatgcgcgccagctggtcatcgatatcccgctgctggttatcgctgaccaccccgctgcgggtgcttttgctgacgtcaatctggtaaatgggggcgccggcggcgatcacctgtccttcggtgacaaattgcttgaccaccaccccctgtacggcggaatagacgttggcggcacggggataggtgctgatctcaccggtcacgttgacccgccgggtataggtaccggcgatcacgaaggtgagaaacgcgatgagaaaaaacaggcagagccctgccgtgagccaaaagggaatgccgggtaa

SEQ ID NO: 448046 - DNA, 1059 bp, Serratia marcescens
atgcagctgctgaacagtacgcgcttttcagcaattgtgaccttatatcgcttgggtcgccagatggcgtcggaaacagcgggacatctaagtactttcccggatttttccgcgttttcatcacaaaaaatagaaaatgcgcttgtatcgtttaatcagattagcagctcgcgttcagaacaagaacgtaaaagagaagaacgcgaggcactcatcgctgactatcctgatcctgtgaacgaagagaacgatcctcaagatgattttgaagtcgaaattgtggggggagatgcgttagatgcggtatgtaacgggcttttcgtgtttataaacaccgtctctcttgtgcatcgtttgcgcgaagtgatcgccttcaggggatttacccgccttgagagtagtatcacgacaaaccgcttcacacagcgctgcgcgcctattgctagggagagaaaatcttggctgccggcgatagagaaccggggagagggtatttatattgagcttaacaacgctaccctgactgagtgggagcaacaacccgatgttacgcggcgaatcggcttgttgatgcaaaattaccagcgctcatcgcttgaaggtgcacaggagggggattatcaacctgatgccagactggtgttgatacatacgctctcgcatctattgatccgccagttatcgcttgaatgcggctatgccagcgcgtcgctaaaagagcgaatctattgttcaccagaatattgcggtgtactgatctcaacttcatccgcggcttcggatggtaccttgggtggattagttcgtcagggtaaaccttataactttgcctccacattaatcaatgccttgcggtcggcagcatggtgctcatctgatccgctgtgtctcgacagcgaggggcagggcactgaggctttgaaccttgcggcatgccatgcatgcacgttgatctccgaaacgtcttgtgagctgcgaaatgtttttctcgacagggggcttgtaattggcacgattgaaaaaccagaggtaggctttttatcagcgctcttgctgtag

SEQ ID NO: 448047 - DNA, 780 bp, Serratia marcescens
atggtcgaactgcaacatcaacggctgatggtacttgctgaacagctccagctggacagccttatcggcgcggcgccggcgctgtcgcaacaggcagtggatcaggaatggagctacatggacttcctggagcacctgttacatgaggagaaactggcccgacatcagcgtaaacaggcgatgtacacgcggatggcagccttcccggcggtcaagacgttcgaggaatacgacttcaccttcgccaccggcgcacctcagaagcaaatccagtcgctgcgttcactgagcttcatcgaacgtaacgaaaacatcgtgttactgggcccctcgggcgtagggaaaacacatctggcgatagccatgggctacgaggcagtacgggcgggcatcaaggttcgcttcacaacagcagcggacctgctgttacagctgtcgacttcccagcgtcaggggcgttacaaaacgacactcaatcgcggtgtcatggctccaaaactgctcatcatcgacgaaataggctatctgccgttcagtcaggaggaggcgaagctgttcttccaggtcatcgccaaacgttacgagaagagcgcgatgatcctgacctctaacctgccgttcgggcagtgggaccagacgttcgccggggatacggcccttacatcggcgatgctggaccggatcttacatcactcacacgtagtccagataaaaggagagagctatcgactgaagcagaaacgaaaggccggggttatagcggaagctaatcctgagtaa

SEQ ID NO: 448048 - DNA, 837 bp, Serratia marcescens
atgagcattaatagtaatagcgtaaccgagtttctgaatactgaattagaacatactgacagtgtttgtactgaatttgtcaatgtcagagatgttggcaccaaccgcgtcgaaatggattcagatattttagataacagtaaaagtagtgtggatagagatatgacggtatccaagcatacgcacaaaatctctaactctattacggttagctcaggaacagagttctcttttggacaagaaatatctattgaagcatcaggtaaagtagggcttcccttagtttccgaaggagcggtaaaaacgacagccaagctcgtcgcagggcagaagtttagtagctcacgttctgagataaagacagaggaaaaaacgattgagtatggtggcggggttcagaaggttaaagctgggaaagtattgacggtttcctttatttatgagacttcaaaaataacggggacggtaaaaataaaaagacctataaaaatttgttacttcgaacgtcttaagcgtgttgctgtaaactattgggatggggtgaatgctgtagataaagaatacttagacttcaacaatacatatgatgtttttaattttattcgacgtgaaaagaatggattatcaacagccaacctttttcttgaataccgtagcgatagatatacactgccaacttatgcgatatatccacttattgaattcgaccatgttaacaaagttgtctatttgaaacaggaagaggctaactttgaaatttccctaggaaaaaaaattgtccagacgattttggatggagaaacgggtgaagcctattccatgctggaatttgaatga

SEQ ID NO: 448049 - DNA, 264 bp, Serratia marcescens
atgatgcccgtttccacccccaccccatccaccccgtcgccggtgcttcctcacggttacaccccgcgcgaacgttttatccgtctgcctgaagtgctctacaccaccggcctgtcccgttccaccgtgtacgagatgatgagccgcaaacagttcccggcccaggtctccctcggcggtaaaaacgtcgcctggctggcctccgaggtcgaacagtggatggatgagcgtatcgccaaccgtcaccaggaggctgccgcatga

SEQ ID NO: 448050 - DNA, 192 bp, Serratia marcescens
atggttgcccgttttgatgtcaacaccgtcaaagaagttgaagtgagtattcgtcgttttgagcaaaatggagttgaaatcaaaggcgtcattcttaacgcgatggtcagaaagttgggctcttactattcaaattatggttattaccaatatgaatataaaagtgacaacaaaggtaaggataagcactaa

SEQ ID NO: 448051 - DNA, 981 bp, Serratia marcescens
atgagtgcttatatccgtattgaaaaaggcgccagcggctggggtggccccctggagctgccgatagagcccggcaagaaagtggtgtacatcaccgccggcacccggccttcgatcgtcgatcgcctcagcgaattgaccggctggccggccgtcgacggtttcaaagagggcgagccgccggcggaagagatcggcgtggcggtgatcgactgcggcggcaccctgcgctgcggcctgtacccgaaacgccgtattccgacggtcaacatccacgccaccggccagtccggcccgctggcgcagtttatcctcgaagacatctatgtctccggcgtgcgcgaccacaacatcagccgaatcgaagcggcagatagccagcctgccaccgccgttgcagcgtcgcccaaggcgcgcgactacgacaccagcaagaagatcaccgagcaaagcgacgggctgctggcgaaggtcggcatgggcatgggatcggtggtggcggtgttcttccaggccgggcgcgacaccatcgacaccgtgctgaagaccatcctgccgtttatggcgttcgtctcggccttgatcggcatcatcatggcctccggcctcggggactttatcgctcacggcctgacgccgctcgccaacagcccgatcggcctggtgacgctggcgctgatctgctcattcccgctgctgtcgccgttcctcggccccggcgcggttatcgcccaggtgatcggcgtgctggtcggggtgcagatcggcctcggccatattccgccgcagctggcgctgcccgcgctgttcgccatcaacgcgcaggccgcctgcgacttcattccggtcggcctgtcgctggcggaagccaagcaggacaccgtgcgggtcggcgtgccctcggtgctggtcggccgcttcctgaccggcgcgccgacggtgttgatcgcctgggccgcctcggccttcatttatcaataa

SEQ ID NO: 448052 - DNA, 1287 bp, Serratia marcescens
atggtactgcgcctcgaactcgccctgcgggccgcggccgtgcgcctgcaccagccgattgtcggcgtcgtagcggtagtgctgttcgtaaaggccgttgcgccggctgatcaggttgccccaggcgtcgtaacgataaaacagtttttgccagtgcgtcagccggttatcggcgatcggcgccagcggcagatgcgcgtcgatgtcgctctgcgggctgcgctcgcccagcaggttatccgccagatcgtacaccagccgcgcgcccggtttgccctgattaggttcgcggtgttgcagcaggcggccttcggcgtcgtaaccgtagtgcacttcgccgcgcagcgcgtcgctcaccccggccagctcgccgcggccggtgtagcgataagcgcgccacagcacgccgtcttccggccgggtcagtttgtcgtggccaaaggcgctgctctgccagctgcggcggcccatggcgtcgtaacgccgctgctgctgcagcgcgccctggctgcggccggtttcccggtgcaggcgatcgcgggtgaactcgctcaccacctgctggttgaatttaatggcgctggcgtggccggagccgtaatacagccactgcaggcgatcgccctgcggcagcgtcagcgcctgcagattagccagtgcatcccactggtattgcagctcgccgttcacgccctgctcgccgagcagccgcccggcggcgtcatagcgcatctgcacgctgtccggctcgatgcccagcgccgcgccgctcgccgtcggcaggcggttcagctcgcgcagccgccccatggcgtcgaagcggtaatgccattccgcgctggcgttgccgcgccagaccagctgcccggcctcgtcgaagcggaagcgctgttcgcgctgcgtcagctcgcccgtgctgcccggcaggccaacctcgcggtgttcctccagcagcccggccgcgccgtagcgataatagtggcgggtgtcgtccgggcgctcttcggccagcacgcggcccaccgcatcgtagctgaagcggtagtcgccgccgttgccgttctccagccgcgtcagccagccctgcgggctgtagtgatagcgccgggtgcggttgatgcggtcggtgatgctgaccggcagccccagggcgttgtactgccagcgggtcaggctgcccagcgcgtcctgatgttcggccagctggccgtgcgcattccagttaaagcgctcttcgccgccgtccgggtggatcagggtgtgcaggcgcccgccgttatcccatag

SEQ ID NO: 448053 - DNA, 918 bp, Serratia marcescens
atggaaaatatcgtcacaaaagccgctgctgtttctaacagtactaagcttcaagttgtgcctatggtttcaaccaaaggcggagagggtaaatctactcaaagcgccaaccttgccggcttccttgccgatgcaggtaaaaaaactctcctcatcgatggtgaccactcccaacccaccgcaagcagcattttctccctggaatacgaggcacccaacggtttgtatgaactgttgatgaagactgtcgatctcaatcaccccgaagaaatcatatcccgttctgttatccctaatctcgatgtcatcgtttccaacgatccccacgaccgtttatcttccgccatgttgcatgcccctgatggtcgtatgcggctgaagaatgttctgcagcaccctttgttcaacgagtacgacgttatcgtcattgattccaaaggtgcggcgtctgtgatgctcgaactgattctggttgccagtacggagttcgctgtcggtgttatcaagcctatattgccggatacgcgtgagtttctgcgtggcacattggggttgatggaaggattattgccgctgaccagctacggtattgcgttaccgcgtatccgtattctgacgaattgcatggagtacacgaatctggattggcagaccctgaacagtctgcgcggcattatcgcaaacgggcagtatctgcgtgcagataccttcgacgtctcccttctcgacaccatcattcccaagcttgaaatttacaaaatggggcatgcttccggccaacctgttcatcgtcttgaaagaaccaccacacgcacatcaacgctcgctgctgcggacactatgtatgagctggcctgcgagttgttccctcactgggttgccgacttcgacgttctgcgtcaggaggcaaatcaatga

SEQ ID NO: 448054 - DNA, 1221 bp, Serratia marcescens
atgattgcttcctgcttgtttatcggcggagcgtcgcttttacttagcgagcatttatcgaggttagaagtctcttcacacaagtttgttgctgctcttctcatttttaatccattcatgttacaaaatatcgcttacagatatgactctttaggcatgtctgttgcgtttttcctggcagttatggcttatacctataaagctaataatcctatcagacaagtttcggtgaaactgttagccggagtactatctttaaccctatatcagccatgcgctaatatatttattggtttacttgctgtggacattatgatcgcagcagttaaaaataactgcaaggctactgggattataaataaaacatttaaaagtacagttttatttatctctttttacttagtttacatgttgttttttgctacaaaaagcaattcacgtgcagagatcatatcagctaattctgaagggctggaacatctgctagctacgacaatggcattaaaagatatggttctatcttatttttatgggccagtttatatttattttttaattccagtcgttagtggtttgattttcacactaattgcaaatcgccataatggaaaaatgacattatcattcggtctttattgggtgctttccttaattgtgtttttagtttcacttatggggccaaccatatttcttaaagacgcacctgtatttccaaggactctggtctccttctctgtgtgtcttgttttgattgcgatccccgttgtttgcttcttacccaaaatgaaatatttgtcacttgttcctgttattacagtaattgcattcagtgctcaactaagcagcgctattaaatcacagcgcgagtatgaagatttcattttcaacatgattggtcgcgacttgatgactaataacgaaataaaaaccatcggaacagttggccaagtcaatatagatgaaagaactaaactgctaatgagcaacaaaccattaataggctatttccttagccctgcatctgagtttctagcctctttccagctaattaataaagggttcccgcagacactgcatggttacggaaatgaacaaaacaataaaaatgcgctttctcgtatgatcagcagtgggattaaaccaatctcaaccaataaggaatattccctgttcatttctggtaatacagccattgcatcattgggaacgaataataattga

SEQ ID NO: 448055 - DNA, 1527 bp, Serratia marcescens
gtggtcaagagcttggccacctcgtttggattagattttctcttgctggaggataagcacggcggagatgtgaacaccattcacaatgtgcgtcagggcgtgtatgccaccgaggccgagcgtcaacgctacgagcatcgtgaagcttatgattcgcaccactaccatcggcacgaaaactatattaccaccaaccgggcggggaaaagggcgcacgaagccggtacgttaaccgatacctatactggtgaaatattttcagctaatgataaaaagaacctcgaccatattattgccgctcatgaaattcacaacgatcctgggcgtatccttgccgagtgcgatggtgccgatctggctaataattcatcgaatctcaccttcacgaatgagtcgctgaataaggctaagaaggcaaaaacgatcgatgctttcgtgcaaacgctgcaagaacagcatgcggttactacgcaggaaattgctcgcttacgcagtcagccagtactttctgagcaagagcaaaaacaactgaacaaactggaaaataaagccgcggcagattttgaacgtatgaaagaggctgataaaaaggcgcgggaaaaatacaacggcaggattgatagggaatattacagtagcagtaagtttgcaaaaaatgtcgctactgccacgatgaacaatgcttttcgcatgggaactaggcagatgctgggtctgattctggctgaaacttggtttgagttccgtgagcgtattcctgtgatgtttgagaagcatcgtcatgcgttcgatgcaggcgatttcctgcaggatgcggcggaagcattacgcgctgtatggcagcgagtgcaaagtaaattcagcaccttcctgactacctttaaagacggtgcgatcggcggtgtgctgtccagcatcacgacgacgctattcaatattttctttacgaccaaaaagatgatggtgcgcctgattcgcgagatgtggaacaacctggtgcaggccttcaaggttatggtctttaatcctgagagattagcgccagggcagttagcgaaagcggtgagcaagctggtcgctgctggcgttgccgtagccgcgggcgtggtggttaacgaagcccttgctaagatgttcgtctttccctttggcccggaacttgcggctttttgcggcgcattggcgaccggtattctgacgctggtaatgaactattttctggaacatagcgtgttgatgaacaaagtctgggcgttcttggatacctttaaagataagtatcagaaagcactggagtattatcaacaggtgaatgctgagctcgatcgctatctattggatctttcggcattagagtttgcaattgatacgtcagcgttatcgcattttacgcggcatcttaatgtggtgaatagcgaaattgagcgcggtctgctactacgcactgagattgagcgacggaatattgagctgccgtttgagggagggaatacccgttccgtgcgtagttggttaagcaagctatga

SEQ ID NO: 448056 - DNA, 1098 bp, Serratia marcescens
atggcattacctttcattattctgggtgtagcggcagcggcaacggcgtttggcggcaaaaaagcctatgatggatatcagaaaaaatcggaagccgatgacgtattagagcgcgcgcagcatcgttttgataagcataaagagagccttgatgagacgaatgaaataacgtctaaaaaactggccgagctgggtgaaaaagagctgcagatcggaaaagatttcaatgaatttaatacgatagctgttgatctccttgctcgtatggcaaaggatggacacaaggatcttgaactgacggtgccaaagcacagcatccataagatccagagcctggctatttctgccacggagtacctgactaccgttgttggcgcaggggtgtccggagcggccgccggctttgccgtttacagtggcgtgatggcatttgccgccgcctcaactggcacgccgatcgccgcactctccggtgtggcggcatataacgccacgatggctgcgattggcggtggttctttagcggctggcggctggggcatggcgggaggagctatggtgctgggtggcgcagttgttgcaccgttaattgctattgcgggctgggcttacaatagccatgcggaaaaagcactcaataatgcttatcaaagttcccgtgaagtgacagatgcggtagcgaaaatgagtgcagcggaaacacagttggcaaaggtccagcagtatgtagacagtatttatgaatcgatcgcccgtatgcataccgcctttgtgcagcattactttgcaccgctgaaagcgatgcatgcgatcattgttgaacgtcatgaaaagaatatcaccactgaggtttctgagtcggaagagatcatgacaattatcgatcatggctatgaattggcagcaatcatgaccgaagtgattactactccgctgttcaagccggttatgcagcaaaatggcgaagctattatagaagatggcgtgatccaactgcagaccgacagtaatggcatgaacctgctgaataaagaggttctggacggaaagttggcgatatctgcctctaatttcaaagcgttttcctctcgtatttaa

SEQ ID NO: 448057 - DNA, 921 bp, Serratia marcescens
atggcagattcagcaaggagttgctcagcagaacgtttagtcgagattctgatagaactacaaaattgtggtgttgtaaatcgctatcagttgatgagaaaatttaatatcactgaacgaacagtctatcgtgatcttaatatgctttcttcatttattgagggctgtggcggcggagagtatagattgatacctattcgatctcagaataatcgctactataatcttcacaacccactggctaagatgttggacgctgatgcagtttttcctgagagggatgataacttctggatgagcttagaaaaacgagctgaagaacagcatgttagagttcagtttggccttcctgagcattccgccagaaatgacttgcgaaaatattttgacctattagagaaagcgatccagaaaaacagcgtctgccatattttatacaaagataaaacgcgtatcgttcatccgtataaattagttaaccagaaaaacatctggtatctgcaggcgactgaggacgggaagttaaaatctttttcgttaagtaaaattcgctggctggatattaggaaagagcatttcgtggtcgatacgaccatgctgttattaatcgatgaacatcgtgatccttgggtgagtgaagagacttttgaggttcgggtacgtatcaaacatagtattgctggatacttttcaagacgtgatttactgcctcagcaagagttagtgtgcgaagagaatgatggggtaattctactttgcaaggctgcgcatcagaatcaaattattccattaattttattttggttacctaatatagagattctggaaccagaatggttaaaaaaaacgattatcaacatgttgcatagctacatcactggcgatcgcgactcagtttctgttctggattgtgatgtctag

SEQ ID NO: 448058 - DNA, 1452 bp, Serratia marcescens
atgagctttagtagagaaatacggcaattacaggggcgctggggaagaggtgacttcccgaagcatctggaatggatcgagttagatggactgagaggatggtcgggacaaagggtagattttaaattccctattgttgcaatagttggtgaaaatggtgtaggcaagagtactatattgcaagctgtggcagccttatatgactcgacttcagaagagaaatattacgcttcaacatttttccctgataccccttgggaaacaacaactggtgttactattgctggttcagtaagagaaggacaaaactcggtagtagtatcagtcaggaagccgacgactcgatggcgaggaaatgatactcgtaaaaaacgtcctgtagtttatttggatctacgccgtttgcagccaatatattctagaataggttatgctagattagcgaaatctgctgttctggaacattcatctgttccatttgatgaagcaacactttctagattttcctctattataggtaaaacctattccgagggtaaaaactcaattacaaaccttgatgctaatcgttctgttccagtagtatcatttaatggagttcagtattctggttttcatcaaggtgcaggggaatcaactatagctgaattgctgtcaacaaatataccggagtatagcattgtattgatagatgagatagaaacgtcgttacatcctcgagctcaaagaagattaattagagatttggcaagtatatctagagtgagaagaatacagtttgtgctaaccactcattctccgtatgtactggaggaattgccatctgaagctagaatctatgtctttaataatgattcgggtaagaatgttgttcctggcgtaagccctgagtttgcgctaacaaaaatggatgaagagaatcacccggaagttgatatatatgttgaagatgactctgccaaaatttggcttgaggagataattgctcggaagaggctgtcatatttgaatcgttgtagtgtttctacatttggtgcggcatctgttggcaaagcactagggactatggtagatacacatcgattctcgagaccaacaatgataattttggatggtgatcaagatccaagtagcgggtgttttattctcccgggagaagaagcaccagaacgtgttgtattttcagaacttgaatccataaatattcccgatgttgctggtgttattggacgttcacattctgatttaattaacgcagttcaacaggcaatgagtgcaccagatcatcacgattgggttaaacttgtagcggatagaataattgttggtggaaatgacttgtggagagcaatgtgcagatcttggatggtgcattgcgctaatgactcaactgcagaagatattgttgatggcattgaagagttgctttcaaataactcgtcaaatgtatag

SEQ ID NO: 448059 - DNA, 675 bp, Serratia marcescens
atgaacgtcgttcacgaccatccaggggtctctactcttgttggaaccccaaaagaaatacaggacaagctccggaagtcgcatgccgacaaggtgatggtgctcactttcgagcacatgaatgcccatgtgctgaagaccttggccgagaacatgtcaaacgttgcctcgtcgatgttcgaagtgctgctgacacggcaggatcgcgaagtcgtagagcttctggctgacgcgctcgttccgcgaaagccggcttcaccacggttgctcaaggaagcgatgatgcttgccagggcgcgcaaggccgtgctcgacagcggcgattggctgacggctgccgagattgcccagttggccgggctgagcgcgacgaaccccagtgcccaacccaacaagtggaaaaaacaggggcagatattcgccatccaccacaatggcatcgactacttccctgactatggcctggaccgggatacgaatttccggccgttgaaggccatggccagggtcatcgaggtattggccgagcataaggatgcctggggcatggcttactggttcctctcggtcaacagcttcctgggaggcaagcggccgcaggacctgattgcctccgcccccgaacgggttatcgccgccgccatcgacgaagtgcaggagattgcccatggctaa

SEQ ID NO: 448060 - DNA, 711 bp, Serratia marcescens
atggctaaacgcaaggctcggctgcctggcgacgaagggctgcaggctccagcggacgaagttgatcccgccccgcctctcccctgggagaagctggataccacttcgttcacgctgaaggcgaggacggtcctgcaccgcgtacatcaggctcggtacaaggcggaccagttcaatccggggcgtgtgggcaatgcacgtttcagtccgatccagaatgccgacgcagaagccattccgactttatacgcgggtgtcaccatggcctgcgccatgatggagacggtcttccatgacgtgccgtatgcccctggggtcaagacgctcgacaagggaaaattgagcgggcaggtgcattcgatggtcgaagtcacccaggatctccaactgacggatctgtccagcgtgccgctgcgcaagctgggagtgagccgcaaacagctcatcgacacggaaaaggaccaatacccggccacacgtcagtgggccgaggccatccatcggcaatcaccggaatcccagggcctttcctggatttcccggcaggacgataccgcccgcgcgatggttcttttcggtgatcgcatcccggcgaaggcgctatctcagcagggggattcgcgaagccttctggacgataccgaggcgtatgacgaagtgttcgacctggccgagcagctgggcgtgctgatcgttcagggcaaggcctga

SEQ ID NO: 448061 - DNA, 597 bp, Serratia marcescens
gtggcgcttcatgctgatttccgggcgggtggccaaggggcaggttgggaactctggggagcgttctcggtcgttgcaaagaaacacactggtcacgacggggtagatatcttggtcaattgcgccggcatcgcaccgcttgccccactttctgcaaccaccgaggcactttacgatgaagtgctatccatcaatctggcttcgacgttctttctcactcaagcagctgcgcctcacattcgcgaaggcggccggatcatcaacttctcgtccgcattgacgcgcatagctgcgcccacgagaccggtctatgccgcgtccaaaggtgcaataaacgcgctgactctcgcattggcggcggaattcggtccgcacaacattaccgtcaacggcgttgcgcccggtgtcatcgacacagacatgaacggtggctggttgaacgaaccggaggcccgacgtcaggccgaagaactatcggtattctctagggtcggccatgccgatgatgttgccagcctcgtcgcattccttgtatcacccgacagccgctggacaacgggtcaggtcatcgacgtgtctggagggtcaaggctctga

SEQ ID NO: 448062 - DNA, 651 bp, Serratia marcescens
atggcaaccatagtcgaccagcacctgggttggcgcgcaaccttctggctcgtcttcgcactgacggttatctgcagccttatcgtctccgccctggttcctaagtcgcgacaccagcagaccatcagcctcggggctgagcttgccgagttcaggaccccgcacctctgggctgcctacacgacgagcgcactcatcatcggggccaccttcgctgctttcgcttacttcgcgccgatcctgaccgaaatctccggctttacgcctgcggcgattccgtggctgcttggcgtctacggaatggcgaacgtcatcgggaacaccatcgtcggccgctacgccgaccactacacaataccgatcatgatgctcgggctgattacgctgagtgcaccgctgatccttcttgcactcctgacgcagtacgcagcgcttagcgtgatcctcttcattgtcatcagcctagtcggcgtgccaatgaatcccgcgatgatcacacgtgtcatgaaaacggctacgcatccggggcccctggtcaatacggtccatacctcggtcatcaacatcggcctggaggtcggctcatgggtcggtggcctcggcatcagcgccggtcaccgctctgggtcggcgtcccccttgccgccgtag

SEQ ID NO: 448063 - DNA, 546 bp, Serratia marcescens
atgatatatccccgcttcccgagggaacaccaagccgtcacgctgagcaggccggtgctcgccggtttatccccgctctcgcagggaacactggatggcacactccgcttcgactttaccgacctcccggattccctgaaggaagcagaggatagcccgtgcggtgggctgcgttgccagttgggagcgtatcgatccgtcgttcttcccttcgtcgatgagacaacacagcatctgctccgtcacatcgaaggatgtgcacaaggtatcgcggatttcatcatcctccgaagccaattccacggccccggaaacgacgagacatcccccggcagccgagggcgccataggaagcatggctatagagcccaacgatatcagcgatcttttccatgcacgatttttcggcggcgacaattttttcgctcggctggctccgcacatgcgctagtaaagacggcctgcttgtccttgaatgcgcggtacaggctacctattgccactcccatcgccttggcaagctcttcgatggaagttgccgcgtag

SEQ ID NO: 448064 - DNA, 2616 bp, Serratia marcescens
atgaaccacctattagcttatcactgcctggatgtcgctgcctgcggataccagatggtgattgataatcgttttcatgccgccgatattctggcagagataggtttctctcgtgccgatggtgcatactggtttgcttattttctggcgctgcacgatatcggtaagtttgcgcggggctttcaacaactttatccgcataataattccgcgcttgtgtctgatgcggggcggatttatcgtccacgacatgactctctgggatactggctttggcagaaccatatcttgcctcgctggttggatgacaatatcgccttgttgcctgatgatgaaaataaggagcgatgtgaaagcagcctggacatttggttacagctggtgactgggcatcatggtgaaccaccggagaacactaacggtgcgctggcttttacgcgtgaagatatattagcgacagaatcatacttgctggctattcaggctgtgttccccgaaacgtcttttcctccgcaatttgccgataaaacgtggcgccgcaatttaaaaaaacaaagttggctgctggctgggctggccgtattagcggattggttaggatcaaaccagtattacttcccctttgtagcagcgccaatgccgttagcaaattattggaaacaagctcagcgacgggcgcagcatgccattgcttcgttacctgcggcatcggtggttaacccggattatcaataccagcatattttcccatttatcaggaagctatctccgctacagcaagatgctgatgaagctgatatttcttcccaaggtagccagttgtttattttggaggatgtcaccggtgcggggaaaacggaagcggctttgattctcgccaaccgcctgatgtcacaggggaaagccgacggcttatatgtcggtttgcccaccatggcgacagctaacgcgatgtaccagcgtctttccagggcgtatcacgctttatttcagtcttcatctcgcccgtcgctggtgttggcgcatggcgccagcaaaatgtccaaggcattcagtcaatctgtatggcagggggagaacagcgggcagttacgttatgacggttctgaacccagcgccagcggcgagtgcaatagctggtttgcggattcgcgtaaaaaagcattattggcagaagttggcgttggcacgctggatcagctcttgatggcagcaatgccctatcgtcatcaatcactgcggttactgggcattaaccggaaagtgttgattctggatgaagtgcacgcttatgacagctatatggtgcgcttgttggaggggttattgcatttccacgctgctcaagggggaagtgccattatcttaagcgcaacattgccttattcactacgaggtaagctacttaatgcttttgcgcacggtgcgggttggagcatgccggcaccaacgcagaatgccggctacccgtgggtatcgcaattgaatgatcgcggtttggctgagcggcaagtcgcgacgcgtgctgaggtaaaacgccgagttaatgtgaattgggtgaccaatctggaagacgcgctcgcgatgattgagcaggcggtggctgaggggcgttgtatctgttggatacggaataccgttgatgacgcgatgctggtttatcgccagttacaacagcgcggtaagatcccggcagaagatctcttgctgttccacagtcgtttcgcctttgtcgatcgcttgtgcgtggagcaaacaacattggattggtttggtaaaaatgccgatccacaacagagacagggcaaagtgcttattgccactcaggtcattgaacagagtctggatatagacctggatatgatgatcagcgatctggcccccatcgatctgctaatccaacgcgctgggcgcctgcagcgccatattcgtgacgaaaacggcaagaccggcgatgtcacgcaagatgctcgtccggcaccggtattgtccgtcttcgcacctgaatggcagccaaatgctcaagagggttggctaggggatgcactacggggaacggggtatgtttatccggatcatgcgtgtttatggcgtacgcaggcgattttgcgcgagttacagggcatcaccatgccggaccaagcaagaacgctggtggaaagtgtgtatgaaggcagcatcgaagccccaccggccttgctggacgtggaggatagggtcctcggtgccaagtatggtgagcgcatggcggccgggcaaaacgtcttatctcgcgatcagggatacgatcgccgagccagcagcacgctgtggagtcctgcagcagagttaacaacccgccttggtgacgaaactctggatatttacctggcgtatcgtacctctgaaggcatcaagccttatgctgatgtggttgatttcccgtgggagcaaagccgggtgcaggtacgcgaaaaatggtggcataagcattgcgccaggctgccccaactgacggagacggagttggaagcatttcgaaaacaacagcatcggcccctgggaaccgtgttgctgctggaaacggactgcaattattaccatcaatcgctggggttgttgggaaatggatcgtaa

SEQ ID NO: 448065 - DNA, 1581 bp, Serratia marcescens
atggaacctttttcacttctcaccgaaccctggctgccggcgatcactcgttcaggccagagaaaaaagatttccccacggcagttgtcggatgacgacattgtcgaactggcttatcccagggctgactttcagggcggcgcttatcagttcctgattggtctgctccaaacggcgtatgcgccggaagatgaggatggttggaaagatatttggcgcgaagggctggatagcgaggactggcggcaggcgctggagagtattgctgatgcgatgcagtttggcccgcaaaaacctgcctttttacaggacttctctacgttggagagcgagaacagctcgatctccggcttgttggtcgattctcccggcggcaacaccctcaaactgaataaagatcacttcatcaagcgcgacagctaccagcgtttttgcccgcattgcgccgccatggcgttatttaccgttcagaccaattcaccggcggcgggggcgggattccgcaccagcatgcgcggcggcgggccaatgacaacgttggtgatgccgcaaaatcacaatttgccgctgtggaaaaagctgtggctgaatgtgttgccgcaggagcagcgaccgtcattggctgagttgccgaagatttttccctggttggcacccacgcgcagcagcgagaaggcgggaaacagcgtcacaccggaaaactctcattctttacaagcctattggggcatgccacgccgcgttgaaatcgacttcactcacacagaggagggaagttgcgatctctgcggggagtctcatcccgctctgttgacacagatacgcaataaaaactatggcgtgcagtatgaagggtggctgcatccgttatcaccctaccggcaggcggttaaagcgggctcaccgttgttatcgcttaaagggcagccaggagggttggcctacaaagactggttggggctggcgctgggggcggaggataagttcaaccgcacggtaccggctgaggtagtgcgtgagcaaagctaccgccggctacgtccggcagaacctctttatctttggtgttttggtttcgatatggataacgccaaggcgcgttgttggtatgaacaccgtttacccaacctggctatcgataaagcagcgctgtcacaattcaccggaactatcgaacttgcggtcgccttggccacaggcagcctgtcgttgttgaaatcggcgctgaaagaggcctggtttgaaacaccgaaggaagcgaaaggcgatttcagcgcgttggatatcgcgtattggcaggaaaccgaggctgattttcgcacgctgctgtcctgcctgatgcacgaattgcccgatgaatcagcggatgctcgcgcagcgctgcgccagtgggagtccgcgctgcatcaatatctgtttgtgaccttcgatcgcctggcgttgaataatccggatgatcatcaggcgttgctgcggatccttaccgcgcggcgcttgctggataaaaactacaccaagcagaaggtactgaaagatgtcaaaacgctgatggtcgaacgtaaggaggttcagggtgcttaa

SEQ ID NO: 448066 - DNA, 588 bp, Serratia marcescens
gtgcttaacagtaataccagtaaggagttggtcgttacccaggtggctgcacaagaggcgctaaagcgctggtttaatgatttgcagcagcgagatcatagtaagtcttttaacggccgggtatggcgagccgagttgcggcggaccaaagggccttatgaggcgctaacttgcgaagggtttcgtgcgctgtgccagcggttggaaaaaaccatgccgtttcagcctggcgatatgctggcattggcactatttgccagcgtcgcggcacatgccggccgagcaaatgggcaagacagtttcgccgcgcagttgggtaaagagctaaaggggcggccttgtctgtcgtcgctgcgttttgaacgtttgcaacaggtcaggcagccggaggagttgcatagccaactgatgaaagcggtaaaattacgcggcgacgaaggggtaaatatcgtttcgctggcggacgggatattcctatggatgcgcgagtggttggcgcgcgaggaacatcgcccggtcgaaaccaatccattccgtcgcaacagcgtgcgttgggccagtgaatacctgatggcatcagggaaataa

SEQ ID NO: 448067 - DNA, 1062 bp, Serratia marcescens
atgactacatttattcagctgcatttattaaccgcttacgccccatcaaatttgaaccgtgatgataccgggcggccgaaaactgccatcatgggcggcgttgagcgtttacgcgtctcttcgcaaagtctgaagcgtgcctggcgcacgtcagaaactttcactgcttcattgaacggccatatcggttcgcgtacccggcgtttgggacgagagatttatcagcaattgctgaacggcggcgtggcggaagaaacggcgttgtcgatcgccgggaatatcgctgggaaactcggtgccattaaaaaggataagaatgcaacgccggtccagaatctggatatcgagcagttggtgcacatcagcccggaagaacgggagaaaattagcctactggtgagcgagttgatcgcggatcaacgcacccctcaagaagatgaattgaatatcaagcagctgctgggtgagcaggcgcaaggggtggatatcgcgctgtttggccgcatgctggcgtctaacccggagtttaacgtcgaggccgcttgccaggttgctcacgctttgggtgtcagcgcagtggcggtggaagaggatttcttcacggcggtcgacgatcttaatcgtaaagaagaagatgccggttcggcacatatgggggagcagggttttgcatccgcattgttgtatagctatatctgcatcagccgcgatctgttgctgcaaaacctgaaaggcgatgaggctttgcttgaacgcaccctgcgagcgttaacggaaacggtcatcactgtttccccaacgggaaaacaaaacagcttcgcttcacgcgcttacgcctcttatgtcttggcagaaaaaggggaatgtcagccgcgctcactttccgtcgctttcttcaattcggtgcgtggcgaggatcagctgctgcaggctattaccggtttgcaacagcaataccagaagtttgcgcgtgcgtacgatatgcattccgagagctatcagttgaatgtggaagagggcgaagggacgctggcgggtttactggactttgtcgccaaataa

SEQ ID NO: 448068 - DNA, 729 bp, Serratia marcescens
atgtcccgttatctgttattccaactttatgcacctttggtttcatggggagcgcctgccgtgggcgaggtacgccataccgatacgatccctacgcgctctgccttattggggctattggccgcggcgctgggtattcctcgggaaagtgaagatgaactgaatcaatttaatcaacattaccggtttgccatcttaccgttgtcatctcatgagcaatggttacgtgactatcacaccactcaggtgccgagagaaaataaaaaacggcgttactttacccgaagggaagaattgactctggcgccacaggacgtgggaacaatgctttcttcgcgcgaataccgctgcgatgcctattatctggtggccgttagtgctgaaccaggcgcaccggtagatctggataatttggcgcaggcgcttaaaacaccggtatttcccttgtatctggggcgtaaagcctgtcctttggcattgccgctggcacccagagtgcttaccgggcatctggcggatgtgttccgcgcaggggaaaggcagttggagcaggatctggccttcctgtattccccagccaagccggtagcgttttgctattgggaaggcgaggcggaaggggtggaactgatcgagtcacgacaacgcaacgatcggccgctcagtaagaagcgttggcaatttgggacgcgcgtacagcatagcggaaaatatcggagggaggcgtaa

SEQ ID NO: 448069 - DNA, 666 bp, Serratia marcescens
atgtttctttctcgcgtcactttggatctggccaggttgccgccggttatgttggacaaatggctaagcacacaacaggcttatgccagccaccaatggctatggcaacttttcccctatgagccggaaaggtgttttttgttccgtcaggaatcatcgacagttcagggccagttttatctgctgtcagagaagcgaccgcaacagcaacataatctattccagattgcgactaaaccgtatgagccgcagctggtgaagggaatgacgttgtttttcaatctgcgggccaatccggtcattacccggcaaggcaagcgcagcgatgtgatgatggatgcgaagtttcatgccaaaaggcagggaataccttccagtgaatggcggatacggcaagagcaagcggctcaacgttggttgcaggagcagggtgagcggcatggttttagattgacaccgttgatggaagattttactcacgtagtttctttccagtcgcagcggctatcgcatcgtaatggggaaaaaccgataactttcagcacagtcgattacgccggttacctgactgttactgatccggcgctgtttataaaggcattgcgctcggggttgggtaaaagcaaagcattgggatgcgggttgatgatggttaaaagggggtaa

SEQ ID NO: 448070 - DNA, 921 bp, Serratia marcescens
atgagctttattccccttaatccaattcctttgaaagatcgaacgtcaatggtctttctgcaatatggccagattgatgtgattgatggcgcgttcgtgctggtggataagacagggatccgcacgcatattccgctgggatccgtggcttgtattatgttggagccgggaactcgggtatcgcatgcagcggtgagactggcagcaacggcgggaacgctgctggtttgggtcggtgaagcaggcgttcggttgtacgccagcggtcagcctggcggagcacgctctgatcgtttgttgtatcaggctaagctggctttagacgatgaactgcgcctgaaagtcgttcgaaaaatgtttgagctgcgttttggtgagccggcacccagccggcgttccgttgaacagctgcgtggtattgaaggcgccagggtaaaacagacctactctttattggcccaacgttatggcgtgaaatggcaggggcggcgctatgaccccaaggactgggataagggagatgtggttaaccaatgcatcagtgcggccacttcttgcctctatggcattaccgaggcggctgtattggctgcaggttacgctccggcgattggctttgtgcatacggggaagcctctgtcttttgtctatgatattgctgacatcgtaaagtttgaaggcgtcgtcccgaaggctttcgaaatcgccgcgagttcccccctgtcccctgataaagccgtgcgtttggcctgtcgagatatttttcgtgcgcaaaaaacactgggccgccttattcctttgattgaggaggttctggccgcggggggaatcgaactccctaaaccttttgaagatgcgcagccccctgcgattcctgaacctgtttcgttaggtgatgcgggccacaggagtcggaactga

SEQ ID NO: 448071 - DNA, 294 bp, Serratia marcescens
atgggaatgctggttgtcgtgacggaaaacattcctccacggctgcgaggccggttggctgtgtggctattggaggtgcgggccggggtctatgtcggtaatacctcgcgtaaagtccgtgaaatgatctggcatcaggttaccgccttagcgggggaaggtaatgccgttatggcttgggcgatgaataacgagtcaggttttgattttcaaacatggggagaaaaccggcgtgaaccggtagatctcgatgggctaaggttggtctctttcctccctattgaaaatcagtaa

SEQ ID NO: 448072 - DNA, 1308 bp, Serratia marcescens
atgaatggcaaactactgccagaaacctggctggcaaagctcgcaattgattgctttgaccaaatctcaacaacaaacagcaaagtgaagagtaaagactgctcaccggaagggctatatcctgtcattgaccaaggtcagaattacatttctggttatattaatgatgaaagtaaggttattaaagtagactctcctatatgcatatttggcgatcacaccaggatagtaaaatgggtaacccatgattttgtccctggcgctgatggtactaagttactacagccaaaagccttcatacacccacgatatgcttattatagtttacgcaccttaaatatcccagacaaaggctactcacgtcatttcaaatactttaaagaattagaaattaatctacccggacggttagaacaaaaaatcatcgctgaaaaaatcgatacgctgctggcgcaggtagacagcactaaagcacgtcttgagcaaatcccacaaatcctgaaacgttttcgtcaggtggtgttgtctgctgcggtaagcggacgattaacaaaagtatggcgagaaaagaatcaagactcaagttcctcaggtgaatggcaacagtttgcattatccgaacttggagttttgtctagaggaaaatcgaaacatcgccctcgaaatgatccccgtttatttggtgatacgtatccatttattcaaacaggtgaggttgcaaatagttcaggtaggataaaatcagccacgaaattttatagtgagtttggtttatctcagagtaaactattcccccaaggaactctttgcattactatcgcagccaatatagccgatacagccatactagatattgatgcttgcttcccagatagtgtagtcgggttcattcctaaaaaaaacaaatctcatgttttatttattaaatatttaattgatgctaataaagaagatcttgaagcatatgcaccagcaacggcgcaaaaaaatattaatttaaaggtgctcaacgatctaagattccccatgccaggtattgaagaacaactcgaaatcgtccgccgcgtcgaacaactcttcgcctacgccgacaccattgaaaagcaggtcaacagcgccctgacccgtgtcaatagcctcacccagtcgatcctggcaaaagccttccgcggcgagcttaccgcccagtggcgtgccgaaaacccggatctcatcagcggtgaaaacagcgctgccgccctgctggaaaaaattaaagctgaacgcgccgccagcggcggtaaaaaagcctcgcgtaaaaaagcataa

SEQ ID NO: 448073 - DNA, 6321 bp, Serratia marcescens
atgactacacgctatttttcttcgctgattgaacagtcgttatctcgttcgacggaagctacgctgagcattatgggcgtaaccaacccgcatcttcgcgagcaccttgcgcagcagatggcggctgaatgtggaaaggaagggacatttctggcttctcccgtatttgaacaaacatttggctggaaagagtcaaatttcacgatgagggatcttgccacaaagcaaacgttactgagcaaggaggttgttgattctctcgataacaaagaaaacggacgttatcgttttggctcaacctggaaaccgttcacacatcagttagccagctggcaagcattacttgataaaaaacattcggtggttgtgaccagtggcacgggctcgggtaaaacagagtgttttatggttccggtacttgaggatctttatcgtgaactacgggacaacgggaaaaaaccgctaataggcgttagagcccttttcctttatcccctgaatgccctgatcaattcacagcgtgaacgtttagatgcctggacccgaggttttggaaccgggattcggtactgtctgtataacggtaatactgaagagctgcatgcctcagtaaaaagtgagcaggcaaaccggccaaacgaagtgctttctcgtgagaaaatgcgtgaggaacctgcgcctgttctggtcacaaacggtaccatgctggaatacatgatggtgcgtcaggttgatgcacctatcattcagaaatcaaaagcggaaaaatcattacgctggatagttctggatgaagcccatacctacgtaggttcccaggccgctgaactggctttacagctccgtcgtgtcatgactgcatttggcgttacacctgatgatgttcgctttgttgcaacatctgcaactattgccggaagtgatgcagaaaagcagctgaaaaaattcttatctgagttgtccggtgtgccacaggaacgtattgatgttctgggaggtagccgtgtcattcctgacctggcgccgtgccagcatctttctctatccctggatgagcttgagcatatccctgattctgatggagcggatattagccttgagcgctacaccgcgctgacccactctccgcaagcgcgtcatctccgtgagatgcttgtgagtcaacccaaaccgatgaagcttaatacgctgacccggcgtttgaatgagctaacaaaacatcagtacactcagcaagatattttgcgctggctcgatctctgtaccggcacgcttcccaatgcgcaagaaccggcatttctgaaagtcagagcgcatatttttcagcgtaatacccaggggatatgggcctgcgtagataaacattgctccgctaaacacaatactgcgctggagaaggggtggccttttggcaatgtgtatgtgagtcagcggcaaaactgcgagtgtggcagccctgtttatgaactcgcgttctgtaatgagtgtaatgaaccgcatttacttgcccgtgacaaaaaaggaaagcttgtacagtgggataataaaggcggggatgagttttcactgcaggatgaagcacctgatgattttgactcttcgagtgaaaaagttcaaaaagaacaggtattccagccaccccatattattgccgcggaatgtaataccgaaatgggttatctcgtgcagcgcctcgatcgtcaaactcgaagtattggcgtagtcaacccggatagtattccgctggcgatgaatgatattgagcaggtctgtagcgccagcaactgcggttataaagggggtaaaggtaaacaacctttccggcgggcactgttaggcgggcctttctatgtgacgaatatcgtgcctaccgtgctggaatattgtcaggactttatcagtgatgaaggtaaagagggggttggcccactttctttgcctggccgagggcgccgactgatcaccttcactgatagccgtcagggaacggcgcggatggcggtgcggatgcagcaggaagcggagcgcagccgtttgcgtggtagcgttgtggatattctctcttggcatcaacgacaaaaagtagtcaacaaacctaacgagcaggccaatgtcaaagaaatgattgatatggccgagcagggaaaaatcaggattaaaaacttactacagtggggaatgcctgatgcggcgaaacaagcggaagcagaattagcccttattgaacaggctatacaacaagccactggcggaaaagtcgatacggttttgatgtctctctcctggcctgaaatggtcaaggaattgaaagataaggcggatatcaaaggtcctatcctacagtataaccactatctcaagcctgaaatcttcactgaaaatggtggccctttaaaactcgctgaaatgctgcttttccgtgaatttatgcggcgcccgaaacgtacgaatagcctggaaacgcaaggattggttcaggtgggttatcaggggctggagaaggcgcatagcctccctgctcattggcaagataaagggttaaccctggatgactggcgtgattttcttaaggttacgctggatttctatgtcagggaaagcaacttcacccagctggacgaagatctgaaaaactggatcggtagccgtttctcttcaaaatttgtccgtaaccccgattcgaaagagcctgatgacaaccaggttaaacgctggccgcaaattcgtcacggtaacgtcacgcagcgtctggtcaaacttttgatcctcggcgctaaattcagcagcgtaaatacggtcacaatcgatatcgttaatgcgtggctaaaagaggcatggcttcagttgacggggtcattagcggtattgaaatctgacggcaaccgtttttatttacctaaagagcatctgacattctctctggtacaaaaagcctacatttgcccggtaaccaataaattactggcgacggctttcagaggcctgacgccttatctgccaatgcatattcagtttgaacggctgaccagtgcacaatatgacgcctttgtcgcccaggcggtgacgctgcctgagatttggcagcacgaccgttctcaggatgattatgtcgatgggttaagaaaagttcgtgactggctgggtcaggaccctctggtggcgcaattacgttcgcaaaacctctggacggacattaacgatcgcgtcgttgaaggtggattttactatcgtacggcagagcattccgcccagcaatcatccgagcgtctgcaaagttatgaacgtatgtttaaaaacggacagcttaacgttcttaactgttcaaccactatggaaatgggcgtagatattggcgggatttctgctgtggtgatgaataacgttccaccgcaccccgctaactatttacagcgtgccgggcgtgccgggcgtagcaaagagtcccgtgctatttcttacacgttgtgcaaaggcaacccgcacgatcggcaggtttttgctaaccctctctggccgtttgaaacggtgatccctgcgccgatggtggcaatgaattctgagcgtctggtacagcgccacgtcaattctctgctgctgtcagactatttgtgccatgtcatcggtgaaaccgaaaaagaacgtaccagccttaatagtcagtggttctttggtgaagagcttgaacagtcggtgtgtaaccgtttcaaagcctggttggagcgtcagacgctgagcattgacgcggctttggttcgattggttaaaggcaccgcgcttcatggcgttgcggcagaaaagctgcgggataaaacgtgcaacgcgattgcggcactgcagaagcgctggctgggaatttatcgcgaccttgttaagcaggaaagtgaatcgcagcccaatacgccgtatcgcaaacgtctggagctggagaaaaaacggcactgcggcgagtatctgctgcgcgatttggcggccagaaccttcctgcccggatatggcttcccaacggatgttgtcacttttgataacttcactatggaagattatatccgcgagaaaacgtacaaagtccgggataagagcgatcgcgaagataacgtctcgcgttataaaggcttgccttcacgtaacctttccgtggcgatccgtgagtatgcgccgggcgcggagattatccttgatggccgggtcttccgctccgctggggtgtctctgcactggcataatcttaatgctgataccaatgaagctcagcgtctggatagtgcctggcgttgtcacaaatgcggtacgttaggctatgaggaaggtattggcggctcgggagatttgttctgtaccaatgatgcgtgcggtgagcgcatcacgccggaaaaccgacgtcaggttttacagcctgcgggttttgtgacggatgcgcatgctccggtgaccaataacattgagaccatgaaattcattccggttgtaccggcctgggtatttgttaaggccgagcgtgtaccgctgccgaacccgttgatgggctttatggcttccggggcggacggtaatgtgttccagcaaagtatgggggaaggcggtcacggctatgcgctgtgcctgagctgcggccgtgcggagtcgatgctcaacctcacggatgcgcctaaatccatggaaacacactatccgccacgtccaggaaaggccgaccgggatagccagaatcagcggattatctgcccaggttcaacggcgctgaataaaaatgtcacgctgggagcgctggccagaacggatgtcttcgagctgattgtccgccgcccgcaggacggagagtatatcgctgataacacggaagaaggtcgtattgttgcaatgacgctggccgtggcgctgcggcgctcgctggcaagcgtgctgggtgtttccgcagcggagctgggctacgcggtgcgtccggtcaggctggagaacgagcaatccgttctggcggttcagctgtacgatattatcagcggcggcgcgggttttgcttccagcgcgccattgcacattgaggccgtgctgaagggaatgatgaagcagctgggctgccaccactgcgatactgcctgtagcgagtgcctactcgactcacagacccgccacgatcacgatctgctggatcgtaaagcggcactggcctggctgggggtggatttcagccactatattggtttgccggatgaggagaaattctctctggctgatgcgcaatattgcccagggagcattgaagatactctgcgacgggccatcaacgatggtggtcgaaagctcacgctgtggatgagtgggccgttgaatgagtgggatctgtatgcccgtcagttccgcaccgcgatccagaactaccggctaaaagatgatgttgaggtggtgctggttatcccgcgaaacattgacgatccggagatccttcaggaactcgcgcagtttacggcgataggcgtgcagctgtgccagtctgagctggatacggatacgccgctcgttgcgcaggtgacgtttgacgatcgcctgatgacgttaatttctcgcagccatgacgctaccatccccgggccgaactggcatctgaatagccagatggttattcgcagccatttgcaggggccgatagcgctttataaaaccgagttgccatccgaggatacgggcagcaaaggcctggttaacgatattgaaatccataagcagcttaacggcccggtttctcagtttggccagcgcttctggaacctgctgaccgagtctcaggatgatattcagcgcctgctgacggaatgccgggtgacgcgtatccactatagcgatcgctatctgcaaaaccccgtagcgctggcgttgttaggcgggttgttgaagacgttgaaaccgatgctgacgcaagaggcggaagtgacgattgatacgctgttcaggagtaaagagcgaccggggaacaaaccgttccatgactggatgagtgaagcagacttccaggatttcgccgaccagtggtttgcggcatccatgggacgagccgtggagattcaggcgttcaactctggccgcgacattccgcaccaccgtaagctgatggtgagttttgataatggccaggcgctgaaaatccgctttgatcagggggtgggatactggcgtattaactttgcgcgagcctggcgtgattttaactttaatgacgacgtctctttccagctggggaatatggcgcaagcctgcgcagaaggcctggtagtgaacagcgaggagagctgggcaaccgatgtgctggtgcaggttatcgcaccttaa

SEQ ID NO: 448074 - DNA, 534 bp, Serratia marcescens
atgtcagcagcaaaccactcgcagcagccgattcagttcgcctactgggtgccgaacgtttccggcggcctggtgatcagcaatatcccgcagcgcaccggttgggacatcggttataaccgcaagctggcgcagatcgccgagcgcgccggtttcgactacgcgcttacccagatccgcttcaccgccggttacggcgcggaaaaccagcacgaatcggtgtcgttctcacaggccctgttggacgccaccgagaaactgaaagtgatcgccgcgctgctgccggggccgtggaaccccacgctggcggccaaacagatcgccaccatcagccatctttccaacgcgcgcattgcggtgaacattgtcagcggctggttccgcggcgagttcaaggccatcggcgagccgtggctggatcatgaggagcgctacctgcgttcggaagagttatccgctgcctgcgcggcatctggactgagcccagcttcaccttcgccggcgatttctaccgtttccgcgactactcgctga

SEQ ID NO: 448075 - DNA, 357 bp, Serratia marcescens
gtgatcatcaacacctcctcctggctgacccacggcgcgctggccggctcatccagctactccgccagcaaaggcgcgctcgatgcgatgatccgcgcggtggcgctcgaatacagcggccagggcatccgcgtcaacaacatcaaccccggcatcatcgacacgccgatggcgcgcggcagcgtggccgacagcgcggcgttcgcgccctttatcgcccatacgcccgccggccgcttgggcgaatcagaagacatcggcgatgtggcgctgtggttggcgacggacgaggcccgcttcatcaccggccaaagcctgttggtggacggcggttacactatcgccggcatgcgttga

SEQ ID NO: 448076 - DNA, 1200 bp, Serratia marcescens
atggcgaagatcaaactcaccaagaccgcagtcgatgcggcgcaaccccaggcgcaggttgttgaactccgggacactgtggtgcccggtttcctgtgcaagattactccaactggccgcaaggtgttcatgctgcagtaccgcacaaacgccggggagcgccgtaagcccgcattgggccagtacggggaattgactgtagaacaggcccgttcactggctcaggaatggttggccgaagtgcgtagggggggcgaccccagcgccgataaggctgctgcccgtgcagcgcccacggtcaaggagttgtgcatcaagtttatggaggactactccaaacaacgcaacaagcccagcacccagcgcgggtatcagggcgccattgaccgctgcatcgttccgttgctgggccgtgtgaaggtccaggatgtgaaacggccagatgtggcgacggtgatgaagaaaatggcccacaaacccgctgaggcgaaccgtgctttcagcgtgatgcgcaagatgttcaacctggctgaagtgtgggggttcagacctgacggtagcaacccctgccgtcacgtcccgatgtacccaaacgggagagccactcatctcatcagcgacgaggacatggttcgtatcttccgtcaactggataaggtggaatccgaagggctggaaaactacgtcattccgttggcgatccgcctgcaattcgagttcgctgctcgttactccgaaatcgccatgctccagtggctatgggtcgatttggaaaaccggcgcgtggtatggcccgacagcaagactggaggcatatccaagcccatgagcgatgaagcctatcgcctgctttcggccgcgccgagggaggaaggtgtcccccatgtactgccatcccctagttgtcccggtagccatctgaccgagggggagtactacagcggctggtgccgtgtgctcaaagctgcgggcgcgacgcatgtgggtacgcatggtatccgccatcgttcggccaccgacattgccaattcgggcattccggtcaaggtcggcatggcgctgacggcgcataagaccgtggtgatgttcatgcgctacgttcacaccgaggatgagccagttcgccaggccgcggatctggtcgctaagcggcgcaagacaatcacaggcgcaagccatgttgatgaggtggcagaatga

SEQ ID NO: 448077 - DNA, 1050 bp, Serratia marcescens
atggccaatagcgaagcccgtatatttattgccaagccattctcctattttgatctcaagggggaatgctgcttccccggctcagagctcattcaatccaatgcgcgggaaggcattgtgacagccttggtgctggatgcgaacatctgtcttaacctggctaactacgcacgtgggcaaaaggaccctatcaaagaatcgatgtttcgccaattcctgttggctgttgagttcgtcaaagtggatgtcgttccttactttggttgcatggaactagcgtcaaatcgtgagagcgatcagctcgacacggataagctctccagcatcgcttcgaatgtcgcacgtgctcttgcgcagagtgaggattccttggcgcgggggagacaagcttctgcccgaatcgcggacgggttggagatgaccgacaagtccttgtcggtggcgtttccaatgctgcgctacgcttattgttgtttcctgaaaatttttgagatccgttcacgcggattcttgaaggctcgtgctgcaaaaaatttcatcgaattctttgattggtgcgaagccatggagtgtcatatagggctgatttcgcaagccgcgttcgccttattcgggggcgcgaaagaagcggataagctgttgagcctgcgtgaaggcaagacaccgcttgatgctgcgtggggcgctgcctgggacatctggcattgctggatggtgcagaactactttcctgcgctaccggtggacggaaagccgcaacatgcaatctttgtcaccgatgatgctgcagcagccttcattgctggccagtgcttgcctcgtgcactgtttctcaatgccggtgaaccgtttttgtctgcatctgttttgagctacaactttccgttctatgcggacaagggcgaacgccttaacgagctcttgagacaacgggactcacagcgattacgccgcatattatccaatgtgagcaacaccaatgagtttgatcacgctcgtgtccaggttgagattgagaggcttgagcaagccatcatgacctcttggtga

SEQ ID NO: 448078 - DNA, 510 bp, Serratia marcescens
atgtcgcaactgtccttttccttgttcgataccacgctgatggtgcgtgacacccagggccgctatctgccggcgacggtagaccagattctggaagccgcgcgccaggtcgttgagcagaagatgcagcgtggtacatccttcacgtcgccagcagtggtcaaagaatatctgtgcgccaagctggctggctacgagcgcgaaatcttctcggtactctttctcgattcacagcaccgcctgatcgaatacgtagagatgttccgtggctccatcagcagcacatcggtgcatccgcgcgaggtggtcaagcaggcgctgcggctcaatgcggcggcggcaatcctggcccacaaccatccgagtggaagcgcggatccgagcgaggcggaccgcgctctgaccaagaggctcaaggagacattggcactggtggacgtgaacgtgcttgatcatgtcatcgtcgctgacgtcaacaccacgtcatttgccgaatgcagcttgctttga

SEQ ID NO: 448079 - DNA, 1701 bp, Serratia marcescens
atgcatcgcttccgattcaaaaacatttggctgctctctcatcgcgagaagacagctcgacacgtgaaattccatccgagcaagaacctactggtggggaggaaccacacgggaaaaacgacgttgatccggagtctgtttgagacgcttggcgcgaagccgcaaggaaaactcgaacagtgggacgagaacgcagcctcgctgcttgagttctcggttaatgacaaacactacttcgccctccatcaagatgggcggcgcgcgctatttgacgaaacgttcaaccttctcatttcaacttcaaagttcggcgattggtccaagcgattttgcgagataaccgacttcaacctggtgttctcagacaagaaacaggcagaggtggtttccgctgaccccgcgtgcttcttcgcaccgttctacgtgaaccaagatggcagttggcaatctgactggaacacgttcggaggcatgaaacgcttcagtgcaccgttcaagccaatccttgagtacttcaccggcgtatgtccaccagagtactacacggcaagcgcagaaagatctcagtactccaaggttcttgaagaacaccgccgcgagtaccgcctgctcgagcgcgccattgagcgatttagtaagacagtcccgttatcaggcccaaaggtcaatgccaacaactttgtcgtcgagattgagcagctcaccaaggaagtcaacgaactcaacgtccgacaggaagcactgcgcaatgtggccgtgcgcgagcaagagcttctgaagaatctggaccatcagattcagctcgccgacagcgctctttcagcatatgacagtgacacaaaatacctcctcagagaaggcgcagcgccactagtctgccccacctgtcatgccgagcacgagaaacccttcctcgacctgctggagttcgcagaagacgcccgtgttctacgcgagctagccgcccgactgcgtgaggatgctacagaggttcgaaagcggacgcagaaagccttcacggagctaaactcactcaacgagaactacctacgcatctcccgcttgctggacacgcgtaaaggtgagttgaagttccaagatgtcgtaggaagcctgggcgcagagtctgcatttgcagctttcgaggctgaacgcaagcagattcaaaactctatcgactcagtggttctcactatcgacgtgctcgagacgaagatggccgagctgcgttctcccaaacgcacgaaggcaattttgactgagttccgtgagcactatgcggctagccgcatcgcattacagcttcactccgttgcaaccaaaaccatgcagctggcatcacgcccctctctttcgggcagcggcggaccgcggtcaatccttgcctattacgctgctatctggcagaccattcaaggcaagatgggcacatatgacgtcccagttgtcatcgactcgcccaaccagcaagctcaagacgacttcaatctaccggcggttctcaagttcatcgcaaaggacttgcccgctggcatgcagctcattgtcggcttagaaacaccaaccgactttctcttcgatcatcaagtcaccctgacagagaagtacgggatgctcaataaagatgaatgggaatctacggagaaattgatggagccgttgttgagcaaaatgtaccagacgaccctgtcacagggctaa

SEQ ID NO: 448080 - DNA, 1188 bp, Serratia marcescens
atgggggatgcgttgggcgtagttaatggcacggcggagcttttgctcgtcgctaacaatcctaaatattcggaaactggtggtgggcacggggccaagggcgtcgacttccctcgctggtgggcagtcttccggatgatagagttggagaaggccaatgaacccgactttctcctactttttgagtccgtccaggacgtcgcagaacttgactccgcgaccatgccaacccgtgctaaggtctaccaagtcaagaagaaagatgccggcacttggacatggtctgtcctcaccggcactatcgcccccaaggccccgtcggtcaagtcaaggaagtccgctaaaacgacagttgcaccagcgaaggcaccgacttttgagaaggtcccacaatcggctctcggcaagctgcatctcagcctgagcgcctttgacgcattgcccgtcgaaggagtatttatctctaacgcaggctgtgacttcccgctcgccaacggaggctctgcagccacgacgatgccatgctcgcttgcagaccttgcgcccgaccatgtgcaattgcttacagatgccttcgcatcactgtcaccaagcacccctccaccagatttgacaagagttaagttgcagaaggtcgctatacatcccgacaacttgaccgcaccggttattgccgcagcattagagctattgaacgaacgtagcccagagcatgcaggccaggcaaaatcgttcgtcgattcattggtgatgcagctttcgccactgacccgccgcacggacacttgtttatcgttcgaagaacttgtcaatgagcgtggcttctcgaaaaacgcgttcctggcagcgctggctgcgctggagacggtgccagaccgccttgcgttgctcgacgtctggctgcaacaactccaaaccgagggtttggacttcatgactatcacatcggtacgtattgctgcagcacgtgcacagcaggatcgactcattgggggaaccaagctctcaaacgaaatcgacactttctgcgacgaatggatagcagccaatccatggacatccaacttgcggcctttcgtagaagccgcgcttgccgcgctcaaggtcaagttctgcggacatcgcgactatgacctgatggcgaggtttgtcatgagagcgataacgaaatgcgtggaccagaactga

SEQ ID NO: 448081 - DNA, 2070 bp, Serratia marcescens
atgaacgcaatgacccaaaccgaagcccgcgccctcaacaccgccgcagctattccgttggaagctgccgacccgaccaagaacctgattctggtgccgctgtcgcggctagtgctgcgccctgtgggccgcaacgtgcgcaagactccgcgcatgtccatccccgagctggccgcatccattcagcgtgtcggcctgctgcaaaacctcatcgtgattcttgccgccgatggcgagcattacgaagtggttgccggtggccgtcgcctcgcagccctcaagctgttggcgaaaaagcaccgcatcgccaaagattgggaagtgccttgccttctggtggccgatggcacggcacgcaccgccagcctcaccgagaacgtgcagcgcgaggacatgcacccggcagaccagtttgaagccttcgcgggactggtggccgaaggccgccccatcgaggacatagcggcggatttctccgttacgccgctggtggtgcaacggcgcttgaaactggcgaatgtctcgccgcgcctgatggccgactatcgggccgatgctgtcacgctcgatcaattgatggccttgtccatcaccgacgaccacgccgcgcaggaaagcgccttctacgatgcgccgacatggcagcgccagccgtccgctctgcgcgaacgcctcaccgagcgcgaaatcgacgcctaccggcatccgctggtgcggtttgtggggttggatgtgtacgagcaggcaggcggtggcacccggcgcgacctgttcgcggaaggcgatgcgggcgtgtatctgcttgacgccgcattgctggagcagttggcacaaggcaagctggcggacattgccgccgctgttcgcgccgagggctgggcttgggtggatgccacgcccgccatgacttacgccgacctgcattctttccagcaggcaccgaaggagcgccgcagcccgaacaagcgcgaagccctacgcatcgaaaagctgcaagccaagatgtgggagcttggaaatgtcattgacgccgccatggatgcaggggacgaggacaaggccgagaccttgcaggaagaaggtgaagccttgggccagcagttgcaagcgctggaagacggcttgcaggactttagcccgaacgtaaaagccgcagccggtgctatcgtcaccatcgaccgcaacggcaagcccatggtgcatcgcgggctgctgcgcgaggccgaagccaaggcgctgcgcacgctggaaaggctgcggcaggggggaggcagtgaaggcactgccgggtgtggcgacgaaggcgaggacaagaacgatggcaggtcgcccaagaccgctgacatgtccgataagctggcgcagcagttgagcgcccaccgcacggcagcgctgcaaatcgaagttgcccggcacccgcaagtggcgctggctgccgtggtgcatggcatggtgcagaccgtcttgcagagccgccactacggccatagcttgccgctgggcgtcagcctcaaagtgcaagaccggttggaaggcatggccccggacatgcctcactctccggccgctgtggcgctgcgagaactgcaacaggtggcaggcgaagccttgcccgaggacagcgccgaactgtttgccgcactgctggtgaagccgcaagacgaactggtcaagctgctggccgtgtgtgtggcttccacggtggacgtagtgacacctcgcgccacggcgcatcagcccggcgcagaactggcgcaggccatggagttggacatggcagcatggtggaaaccgaccagcgagggctacttccggcatgtgccgaaggccgcgattctggaagccgtgggcgaatttgctccctcgcacgtcacccggctggcgaagttgaagaagggcgacattgtcagtgaggccgaacggttgactggtggcactggctggatgcctgccatcttccgtgccgaaagtacgcagcaggccgggcaggatgcggcaaccgaagccgaagcgctggagaatgccgccgtggtagatgagcagtcgaaggtcgaagcactggccgcgtga

SEQ ID NO: 448082 - DNA, 873 bp, Serratia marcescens
atggagaagtttgaaaaaaagaatcatcactacgtccctcagtattggcaacgtggtttcaaaggatcggatggctatctgtacggcaagttcggctcaatcatcaggcgcgtatcgccaaaaaggatcatgcaacgcgactggctttacacggtttttgatgatcaatggaatccatcggacacgctggaagacacactctccacggtagaagccaagcatgcgcaactgtttcggcagctacacacacctggctacatgccaacacccggtgatcgagatcaaatttgccaagcattggctttacaggcaagccgccatccagacgttctggcgcgcagccataagctcgcaaaggagttcggagccttcctcgcggatgctcactccatgtctcttgatgaattcacatgccgtgcctcgacattcggtatccatgacacggacgcgcatactttctacacggtgcttgctcagaaaacggaagaacaattggcttccgagctagccgatttgcacgctctttcaccccagtcaccagagcttcccgaacaggaagcgcttttggcagcaccccagatcgcggacgttataaaaacgctggaattgtgtttgttggacgctccttctggcgaagcatttgtgcttggtgataccccgcttccacaatccaacttggggcttggtttttcagttccgctgtcgaagtcgcttgctgtgtgtgcgacccaagcccaaagtacgatcacgccaacaacggtagctcggcgaatcgccaacaccgcagaggttagagcgatcaatggcgttcaagccgacaatgcggcgcaagttgtcgtgggcccctcagttgatcttttatccaagctgtag

SEQ ID NO: 448083 - DNA, 306 bp, Serratia marcescens
gtgacagcgaagaactcattggcagtggcgatacgaacagtaagaaaagcgcgtggcttgagccaggaggcattctccgacgtgtccagccgcacttacctgagtacgctggagcgggacttgaagagcccgacgatcaacaaattggccgagttgtgcgaagtgatggacgtgcatccgctcacattgctgacgctggcgtatgccggcgacagcacacgtaagatggaactgctcctggcacaagtccggcaggaacttgaacagctcataacagaccaagaaggaaagcatggagaagtttga

SEQ ID NO: 448084 - DNA, 762 bp, Serratia marcescens
atgatgggatcgaacactgggcagtggtatccgaccgcagcgtatctgtacacgctgcacctcgatggccccgcgctggcttgggaatacttgcgcagaagcccccaataccggcttgactggctgcaccgtcatcgtcagccagaaacggcgcaggcgtggggcctgcgctttctggaagatcccgccttggacgcacgcgatgcgcatccaacttggcttccccatcacgatactgaggttcagcttcaccctgacaccgatccgccgcccacggcgcaagccttcgcgttttggggtgtccctgggcacaagcaactgacccacgacggcaagcgcctggtcctcacatcgcactggccgggccgccgcctgcggctcgcccttggaccgggcctggaggacggtatggcttatttctacgccattcgcgcgctggccaagccctacgcgcgctatcgcacgctcattgctgaacttgaggccacggccatggatgtcctgcctgcagcagcccgctcccggcctacggccgccgcgctgatggaattgcataccttgcaagcactcgatgctacccaggcaggtgcgtccctgcgggaggtcgccgatgggctgtttggcgcggatgccgtcgcggccgactggcacaaagacagcgccttgcgcgcccgcgtgcggcggctggtgcgccgtggcgatgcgctgatgcacggcggctaccgccgcctggcacagcttccgccgttcccgctgcgctag

SEQ ID NO: 448085 - DNA, 2058 bp, Serratia marcescens
ttgcaatatctgccgccgcaggagtcccgcgcccacgctgcgggtttgctgtacgagaaccggccctctgaaggcgtggactggcgcgagcgcctgacggccttcgtggcggagacggatcgggtctttgaccttctcgatggtgtgttgccggaaatcgcctggctggatgatgggcagacgctgacctacctgcatgcggccatctcgacgcggcgctatccgctggcgatgcccgaggtgccgttccacctcgatgcgctgctgagcgactgcgcactggccggcggcctggcaccgatgcttggcgaccagcacctgcgggtggtatcggtgcggggattcccgacatcgacctggccgggaatgctggacgacctcaaccgcatgggctttgcgtaccgctggagtacgcgctttctttgcctggacaaaaccgaggcggaaaaagaactctctcgcctgcgccgccagtggttcgccaagcgcaagaacgtcatcgcgctgctgcgcgaaaccatcttccagcaagaaagccctctggttgataccgacgccaacaacaaggcagccgatgcggacgcggcgttgcaggagctgggcagcgatcaggtagccttcggctatgtgactgcgaccgtggcggtcatggacacggacgccgccgtgcccgacgagaagctgcgcagggtggaacgtgtcatccagggccggggatttgtgaccattcccgaaacactcaatgccgtggatgcgtggttgtcctcgatccctggccatgcctacgccaatgtccgccagcccattgtctcgacgctgaacctggcgcacttgatgccaatgtcggccgtgtgggcgggccccgagcgcaatgaccatctcgatggtccgccgctgatcgtgacccgcaccgaaggcgcgacgccgtttcggctggtcacgcacatcggcgatgtggggcacacactggtggccggccccaccggcatggtcaagtcggtcttgcttgccacgctggcgatgcagtttcgccgctatcccggcgcgcgtatcttcgccttcgatatggggcgctcgatgcgtgccacgatcctcgggctgggcggcgagcactacgacctcggggtggatggcgggatcgctttccagccgctggcgcgcatcgacagcgagggctaccccacctgggcggccgaatgggtcgaaggccgcttgctgcacgaaggcgtagccgttggccctgacgagaaggccgccatctggtcggcactggaaagccttgccggggcgccggtagagcagcgcacgatgaccggcctttccgtgctgctgcaatcgaacacgctgcgtcaggcgctcgcactctatgtgcttggcggcgcgcacggcaagctgctggatgccgagcatgaccgtctgggcatggccgacgtgcagggcttcgagatggaggagctgatgcacagcaaggctgctgtcatggccgtgctgcattacctctttgcgcgcttcgatgaacgcttcgacggggcgcccacgctgctgatccttgatgaagcatggctgttcctcgatgacccggtattcgccgcgcgcatccgccagtggctcaagacgctgcgcaagaagaacgtgagcgtcatctttgccacacagagccttgccgacatcaaggattcgagcatcgcgcccgcgatcatcgagagctgcgccagccgcatcttccttccgaacccgcaggcaagcgagccgcagatccgcacgatttacgagggcttcgggctgaactcccgacagattgagatcatcgccactgctaccgcaaagcgcgactactactaccaatcacgcctgggcaaccgtctgttcgatctggacctggggccagcgacgctcgcctttgcaggggcttccacgccacaggaccaacgcgacattgacgcggtgctggcatccgcggacaccccgtcgtttgcagccgcctggctgcgccatcgcggcctgccatgggctgcgtccttgcttgaccattccccattcccaggagaaacgccatga

SEQ ID NO: 448086 - DNA, 762 bp, Serratia marcescens
atgaacgctcgccattccctcaaaagaaaaggcattgtccttgtcgtagccgccgcactgtccgccggtgccgccatgcccgcccacgcgctgttcggcggccgcattgtgttcgaccccaccaactacgtgcaaaacacgctgacagcgatccgcacgctggaccagatcaacaaccaaatccgccagcttcagaacgaagcccagatgctcatcaatcaggcccgcaatctggcgagccttccgtccagcgtggtgaaccagttgcgcagcaacctggcgaccacgcagcggctgatcgcgcaggccaaagggctggcctacgaggtggcgaacatggacaaggagttccagcgcctgtaccccgagcagtatgcggccaccgtcagcggcgaccagatgctcagggatgcgcaagagcggtggaggaacaccctcacgggcttgcggaccaccatgcagatgcaggcccaggtgtcgcagaacctgggcgaagacgaaagcgtgctggctgacctcgtgggccggagccagtcggcgcagggcgcgctgcaagccatgcaggccacgaaccagttgcttgccctgcaggccaagcaatccattcaggcgcagcggctccagcttacgcaggatcgcgccgcctctctggagctggctcggcaggccgccgccgccgagcgcggccgcgaggtgacgcgccgcttcctgggggcgggcacgccctacacgctgcagtccgtccatttctacagccgctga

SEQ ID NO: 448087 - DNA, 1380 bp, Serratia marcescens
atgaacgacgtgacggtcatcgaccgcttcctggatacgttctcgcgctacatcgattcagggttcggactgctgcaaggcgaagtcgcctttctcacggccacgctgatcgtcatcgacatgaccatcgccggcctgtattgggccatgagccatgccaccggccagggcgaggatgtgattgccaagctgctgcgcaaagtgctctacgtaggcgcctttgcctacatcatcggcaacttcaactcgctggccggcatcgtgttccgctccttcgccggcctgggcctggtggcctccggctcggccatcacgatggaaagcttcttgcagccgggccggctggccaagaccggcatcgacgccggtgcgccgattctggagcagctcagcgagctggccggctttcccgaggtgttcgtgaacatcacgcccatcgtggtgctgttcctcgcctggatgatcgtcctcctgtgcttcttcgtgctggctatccagctcttcgtcacgttgatcgagttcaagctgaccacgttggccggcttcgttctggtgccgttcgcgctctggaacaagacgagttttctcgcggaaaaagtgctgggcaacgtggtgtcttcgggcatcaaggtcttggtgctggcggtgatcgtgggcatcggctccggcctgtttgcccagtttcaaatccagccggctgagccttccatcgaccacgccttggtcatcatgctggcctcgctcaccttgctggcgctgggcatctttggccccggcatcgccacgggcctcgtttccggtgcgccccagcttggtgcgggcgcgatggctggcgcagctgtcggcgccgccggcacggctgtggccattggcgccgccacggccggcgtgggcagcgcagtcatggccggggcgcgcatggccccagcggccgccaagctggctggcagcggcgcgcgtgccgcctcgtcggctggcagcagcgcgaagtcggcgttccagacggggtccgccgcagccggcggtggtgcaaagggggtgatggctggcctgggcaatgtcgccaaggttggcgcacaagctgccgggcgcggcgccgtctctcaggtttccgctgccgggcagcggattgctgcaccgtttcgcgccggctggaacggcccggcacctgacgctggcgcctccgaaggccaaggcacttcaggcgaaggcgcaccgggcggagccgatgtgcagaagaacgaacagcctgcctgggccaagcggctgcagcgccgccagcaactcacccaggccgcgaccaccgccgcccacacgctgcgcggtggcgatggcggcggttcagggcaaggcccaagcctgcgcggcaccgatgactaa

SEQ ID NO: 448088 - DNA, 705 bp, Serratia marcescens
atgcgattcaaacgcccccaggtgcgctatgccgacagtccacagcccaccaccccataccagtctgccgctctggcatgggatgagcgcatcggctctgcccgagtacaggcgaagaactggcgcctgatggcattcgggtgcctgacgctcgcactgttgatggccggcggcctggtgtggcgctcggcgcagtccattgtcaccccctatgtcgtggaggtggacagcgcaggccagatccgtgccgtgggcgaagccgccacgccgtaccggcccagcgatgcccagacggcgcatcacattgcacgcttcatcacactggtgcgctcgctgtccatcgatcccgtcatcgtccgccagaactggctggacgcctacgactacaccaccgacaagggcgctgccgtgcttaacgactatgcgcgggcgaatgatccgttcgcgcgcatcggcaaagagtcggtaacggtgcagatcaccagcatcgtgcgcgccagcgacacgtcactcaatgtgcgctggacggagcgccgctatgtgaacggcgcggctgcaggcttgcagcgatggacagctgtggtgtccatcgtgttccagccgccgcgcaccgaagaacgcttgcgcaagaaccccctgggtatctacgtcaatggcctgtcgtggagccgtgaattggatgtatccgaaggagcgaagtcatga

SEQ ID NO: 448089 - DNA, 1014 bp, Serratia marcescens
atgaataaccttttctgtaaatccgttttgccattgattctgctgaccctcgcgggctgcgctacgcagcgcaaaccgccgcccgtgatctctcttgacgagcctgtgcaggcgcagctgttgcctgagcctccggcgccgctgggagtggtagccgtgcccgaggtgctacccatgccggcgcaactgaagccggtgcctgcgcgagacgagtccgcgtcagtggcggagcccgccgacgagaccgtgcgtgtttcgcgtgccaatgcagaggcgcgcgttgcgcctacgcgcgagggctacgtcaacgcgatccaggtatggcccttcacggacggcgctctgtaccaggtctatgccgcggtgggccgcgtgacggtggtatcgcttcagccgggtgaaacgttggtgacggtggccgcgggtgacacggtgcgctggctcgtgggggacacgtctagcggtagtgaccatggcaatgagaaggggcggcgtgtgaacgtgctggtcaagcccatccgctcgggcctcaagacaaatctggtcattaccaccgatcgcagaacctacctgctggagctgacttcgacggagaagacatggatggcatcggtttcctgggtgtatccgcgcgacttgatgctggcgttgcagcgccaggcgcaggcagccagcgccgcagcgccggtggatactgggctggcgctggaaagcctgcgctttcgctatgccatcagcggcagcaatccgccgtggaagccgctgcgcgctttcgacgatggccagaaggtctatatccagttccctgcgcgtatcgctcagggcgagctgccgcctttgttcgtcattggcgcacagggtgatgggcaactggtgaactatcgcttccgctcgccgtactacattgtggatcggctgttcggcgcggccgaactgcggctcggaggggacaagggcgacattgtgcggattgaacgcaatgacggggctgcaggcgcagcgcggaggaactga

SEQ ID NO: 448090 - DNA, 1299 bp, Serratia marcescens
atgagccaggacaacactccacaggacgacattcccgacttcgccgcgccacagaggggtaaggtggcaccggaggcggttgcgctgcgagcccagccgcgcccggtcactcgcctgaaccagcgcacgctggccatgctcgccggaggcctgtcggccaccctactcgtggccaccatctggtcgttgcaaccgcagcggcgcggagtcagtgagcagaccgagctttacaacgttgatcgtgtctctaagtctgaagggctggatggcctgcctgccgactactcgaagctgccgccagccttgccgctcgacgtccccgagctggggccgccactgccgggtgacctggggccggccatcgtgaactcacagcagcccgccgtggccacctatgcggcccccagtcacgatcccgccgatgccttgcgcaaggaagaggaagctgctgcggcttcgccggtattctttcgttcgggtaattcaggccagaccagccccacagcagcgcaactggcgccacaggtgcccggcagtgcaagcacacttgcagccttcgagccgctcgccgccgggccggcttcggtggcgcagtcatccgatccgactgctacgcaaaatgggcaggagcagaaagaaacgttcttgaaaggcagtcctacaggaacccagaattccggtagcctgcaaatgccagcctcgccataccaggtcatggcgggaacggtcattccagcagctttggtgacgggcatcaactccgatcttccgggtgacgtgatcgctacggtgacagaaacggtctacgattcagccaccggccgctatcccttgatccctcctggctcacgcatcatgggcaagcacaacagccgggtcagctatgggcagagcaggattcaggtggcatggaatcgcatcatcatgcccgacacatcttcactgactatagacaacttggtgggcactgatccggccgggtatgcggggctggaggatggcgtggactggcattgggatcggatattcgcgggagcagcgctgacgaccctggtgggggttggcgccgagctggccgccccggaaaaccgccaagacggcaaccgcatcatcatcgccggccgcggcagcgtgcaagacacggtgaaccaagtcggacaggaagtgacgagacgtaatctcaatattcagccgaccttgacggcacggccaggcttgccggtgcgcatcatcgtcaaccgcgatctcgtgctgcggccgtaccagccgttatttttcaaccgaggagcttcgcaatga

SEQ ID NO: 448091 - DNA, 261 bp, Serratia marcescens
atgagcgtgaccaagaaactgcgtcttgggccgttgcccaagacggaaagtatcaaactgacttttgcatgcccggccagcttgaaggctgacctcgatcgttacgctgcactacattcgcagacgtatggtgaggcagtcgatgcaatgacgctgatcccgcatatgctggatgctttcatggcgggggatcggggattcaagaagggaattagtcccgaggcatcgatgccaaaggagggggaaagtaccacgatgtga

SEQ ID NO: 448092 - DNA, 1779 bp, Serratia marcescens
atggaggagcaagcttggttcgagatgggggatattcgtcgcagacggtgggatacagccgtttggattcctcttagacgtaacgagacattggctaatgaaggcgacgattcaaccgtgggtagcctagaggagtttgacggcgttggtgcggtcgtcatctatcctgaatttcgcgagcttgtggaggcgagattaggctggcaggacttggggctgatcgacacgaagtcatatgcatccaaggaccatccatacaagccggctgatgtggtttggtacaacgatgggcagcctattggcttctcgcttgtgctggtccaccgcgtcagcggagaccatccgaaccaatggatagtgcaccctgatctcgtcatcgcattggggctgttacaggaaggtgattcattactgaaggtcgatgaaggttatgtcgaggtcatccgtcagcgtcgtaacgctgtgggcgaagtcgttgccattgagatcaaatccgactttctacgcgactatctgtgcgctcgaggtttggctctgcgactagtgcagttccatcagaggagcgagatcgtagagaacatcgaccatctaagctggggcgagaatggtgctgagattgaagagccttttgagcgcctcagtctgaaaatccatgcgattggccccgatggaggcccgccaggtgccggcttagcggtgttcaaaacttggcgcactgatgtcgacccagaacaagatgctcaggtctttggtgcagagacgaatgaaaatacaggttatgaggctaggactttcgtgcagcctggaggccgcgtcggctacagggtcactggcgagttgtggcgagaggcttggatcgagcccagtgaccacagcgttagagtgcgaggcgacaagcccggggacgggctgcgttatgttgttgatgcggctggcaccacgatgactgcgacggagctaaatcgcgaggacattggccgttggctgtacttccgacctcaggtcatcggggtactactcagctatcgcggtagcgcgctgtcttggtacacggaaagtacaggctctgtgcagtgttcgccaaacgaaggagttcatttcggtattgatgctgcgggtttagtcaatgtttacgcagaagacatcgcaaataaagcccagtggcaacagcaggtatggtttgggcacaacgtggcgccagccgggcctgcttgcgcggagttgctcgatgcgcagatgaggtgcgaaccagctaaaactgaagcccctgaaaactattttcaacggatgctggaagccctcgacggtgctttcgtcaaactgcatggctcacccctctttcatgaccatcccgacaaagctggcatgctggacacaatacatcgctttcgcggtctcaatggccgcgccggcgtgctgtccttggctaaggacatcgcgagggcgacggcggatgcgatcgacgtagctcggatgcgagaacttgtgccaccaggcactaagcccggcctcggctccttgaagctgctggatgcctatcttgctgcgaaagtgggggacgtgaagtcgcgggaaatcatggggccactcgtaggcgtttacgatcttcgtctcggcgatgcgcatcctgcatcaagcagcattgacggagcctttaagttggcgcgggtagacctagatgcggatggcgtggagcagtgcaagcaactacttagatcaactgctcttgcactgcaggcgatccttgaggctgtttgtcagccagccgcagcatcgtag

SEQ ID NO: 448093 - DNA, 1182 bp, Serratia marcescens
atgtccagttgggccgatatcaagttagatggacaaaccatcctcaccactcaaaatcacttcagtacatggttctttcgcaataaggagcgagtgattgaaaagaatcccacgacgggcgacaccctctataagtatgtgatgtcgggtgaaaccctgcggcgacgcttggagttggatggccacaacatggcaagcctccagagggagttcaataagcaacttgcacagatgaaatctgactgtgaggagatgatcgacattgaccctgatggcaagacaaaagaactgttgccgatcctagccgaatcgacacttgccgactggctacagaggcttcgaaaaattgttgagcaaaagttagaaagaattcattttggtgaggtcgacaaggaattcggtgacacgttgctcaactttatgatgagcgccgatggatactatttcagtgacaatcccggagctggcgactacaacttcccttgccaaacatacgagggctacgcaatcgcactacttgaggtacttccgaagaatattgagtgcgttcttgacatcagcgaactgatagcaggtggctggacaaatgccttcgatgacttggttgagttcaaacaggatttcaccactttctatggcatcttcaaagcatcacttgaggacatctcggcgttaacacagattgcacctgataacaaaacactggctcgcatgctctatgccgccgtgatctctgcaatggaaacctatctctctgataccctcaggaaacaggtattcgtgaagccagcgatcaaacgcagattcgttgaagcgcacggaaaatttaagggcaaccatcttgacttgagcgacatctacacatggcttgagaaattggattcgtttattactgatgtcatcgactcagagagcttccacaatatcgtaagcgtcaacaagctgtacaagaatgtgctgctgaccgatattccaaagctacacatggacaagctggtgaaggccatcgcaatacgccatgacattgttcatcgcaatggcaagaccctcgacgggatcatccatcaactaacgatggatgaggttcaccagctcgtcctggatgtcgacgccgccattcagcacattgacaagcagatcaaagatgggcttctagacgatcttgacgaagaagatctatga

SEQ ID NO: 448094 - DNA, 705 bp, Serratia marcescens
atggtctggttgccctatagtcagatgttcaacgagttctccggagaattggcaaacgcgctgaacgagctcgtaggttacacgcatcagttggctgcttggcgcgacctgctggctccgatggctcaacagcagcaactggatgctgccgttgatttcgttgatccggtggctactgtcgcgctcaatctgccatatgtaatccgttcgcgcttcattttcgcctctgcgcatctgtgtcatcaagccaatcgcgcgaagcaaggggctatatggaaggacgaatttccgctggatggggaggtttggttcgatgcggcagacaagtacgggaaagcttggaagcgttacaacactttcaagactcgactggagaaagtcggagccaaggactaccaggcggctacccacgacttccgaaacgcctacaaccatcggttctcacctcggatcgtgctcgggatctccaatttggtgacgcgacaggtaaacaaggctacaggtgccgtgacctacggctttggggagactccggccctgacgctgccgcatatcgtcgaacacctggaaattcagtgtgatcgcgctcatcgaacatttgagtctttccaaaagttggtcagggagcacgaagccgcgatccgcctccacaacaccgcgtccctagcttctgtgaaagcgccctcccatgtaaacggtgtttaa

SEQ ID NO: 448095 - DNA, 126 bp, Serratia marcescens
atgttaaagcgaaaagttggccgtagcgccattacaggtcaatttgtgaccgaaaaagaagttaagaaaaaccctaaaaccactgtgacggaaacgatcaagtatcctaagaaagagacaaagtaa

SEQ ID NO: 448096 - DNA, 162 bp, Serratia marcescens
atgttgacctttgtggtcaccgggccatttgtggcgcacttaggcgtacatgcggtgctggttatggcggatgtgctgtattttttggtctttattctctgctttgccctggggttctgcactcggcaccacttgcacggcggcaacgccgaaaatatctga

SEQ ID NO: 448097 - DNA, 1794 bp, Serratia marcescens
atggcaataactcagcaagaactaacagttcgtggtgaacaagtggaaaggatatatattaactatgttaacaataaatacatagttaatagacgatatcagcgaaagctcatctggactatcgaagaaaagcagagttttatagattccatcatcaatggctatcctgtccctatcattctattagcagatcaaaaaggaagtcaggataacttagtggagataattgatggaatgcagagaatggatgcaattacatcatttattagcaatgattttccagtaaatgattcttactttgatttaaacacatttgcaactactaaggatttactagatagaggggttctaatacaaaaagaaccagtgatgaaaagagctgattgcctggcaatttctgcttatcctgtacctctgtcaatttatgagttttctgatggtgagtctgttgatgaaatatttagacgtataaattcaggtggtcgccaactttctcgtcaagaattgcgagctgctggagcaattaattcctttgctgactgtgtgcgcattatttcctctagagtacgtggagatacgtctaacacaccgatacttttactaaatgatatgaagtcaataagtataactaacagagagctaccgtatggaattaatgctgataatgtgttttgggttaaaaatggtattttaaccaaagatcatttgaggcaaagtcgagacgaagaaattgtagcagatcttctggcttatatgttatcagatacaccagtttcttcacgtaccgaattgtttgatgattattatggtgcaacctacccactcagaggagcaaacctcgaaaggtttgaagaaatggatcaagcgattcgaagaagaaatcctgatttggtagatctggattatcaacgtacccatgatacattaatgttgcttctggcagaagcgcaaacaacattttctaatttaatttatcccgacggaaatgctggaaacccagtgcctcgttacttccaggctgtatttttagcattccatgacctcattgtccgtaaaggaaaagtacttgcagatagggcaggagcaattgcggcacttacgaataaaggaaagaatatttctatccaagaggggggaagatgggggggcgaaaatagaggtgtggctgttaactcggtcgtggggatgattcagcaatactttgaagatgatagtaatcctgatccagctaaagtgcattgggtcactaacctccaaaatttgctgacgaactcgaaaacagaacagtctgcttatgattttaagcaaggttttcttgagttaagtaaaagacctagttttgatgagaactcattcgaaaagatattagagacatgtacagctatcgcaaatattcaaaaagggcataagggttacgtaatcgttggcgtttgcgataatgatcatactgctataagggttcaaaatatttttcaagtagctccggtaacatttaatggctttcaaataacaggtgtcgagcatgaagcggcgcatttagggaaaaccatggatcagttattccatctaataactgagaaaattaaatcatcagaaatgtctgagcctctaaagtcttatgtaaatagtcatcttaagtgtgtgaggtattacgataagacaatttttgtttttgaagttgtagggcaagagcaaccctcgcattataataaaaaacattttgaaagaagtggaacccaagttgttgaagtgccaatagagaattattctgttttgttctcaagatttaaatga

SEQ ID NO: 448098 - DNA, 252 bp, Serratia marcescens
atgttcattgagaatgtcacaaacatccccatagtcaatttcgccatggaagatgacattactatttttcttctttatttcttcgacattctggcgatatttctcatcgatggggccaaatatattaaaaatgcaatcgggtcgattactggcaaggaatgtcaacattccaaagtcaaagcgaaaatcaagcgccccaacataaaccgcattattccgatacccgctatttttattatagaactctcttga

SEQ ID NO: 448099 - DNA, 435 bp, Serratia marcescens
atgtttgattcaattttagtggtttgcgtaggtaacatatgccgttcccccacgggggagcggttgctaaaagaaatgttgccagataaaaaaataacctccgcagggcttggggccttagtgggtaaacctgcggatgcgacagccgccgagattgctcaacgtcatggcctttctttggatgggcaccaggggaagcagcttacctcttccctgtgccgtgagtatgacctgattcttgtaatggaaaaggggcatattgatgccgtatgcagattgctccctgaggttaggggcaaaaccatgttatttgggcattggctaggccagcgtgaaattgccgacccttatcgccaaagccgtgaggctttcgaatttgtatttaagcttcttgacgaatcagccaaaaaatgggctaacgccttaagccgatag

SEQ ID NO: 448100 - DNA, 1989 bp, Serratia marcescens
atgaaccatattcacgagaaggcctggaacgaggaatgggggctgcttgctaagctgaaccatgaacaggggtttgccgagtacattgaagagctgggattggcctggaaagctttccaacagggtgatacgccccaaggcttgcgttcggctattcacgcttcatggttacgcagccacaccgaaaacattgatgcgtattgctttgaataccagttctgcgatgaaggcgaacttcgcagaataatggcgcgtaatgtgctgttaatctcaatcgcgcgggacatcatgcgtaatctacttgcctacaaccccgatggacacatcaatctgaccgatgccaatggcgtgacactgcattattgtggccaggatttaacgccagtaggcagtattcttagcgaggctatatcaggtactaattgcaccggtcgctgcctgaaagagaacaagctggtctatatgctgagcgcagaaaactataaagaagcgctgcgcgttcgagggaagcactgcgcggcagcccccatcagggatgaaaacggcgtcatgctgggcgttctgacgttgactgccaatcctgggtattttcactaccacacattggggacggttcaggccgctgccgaagccatttcacagcagttgattttgcgtcatctggtcaatgagcaggagtcggtgatggaatcgctcaatgaaggggtgttggtcgtcagcgagcaaggcacgattcgacagttaaaccgctatgcccgccaggtattggacatacaagaagatgttcgcttccgtgatgttgatgacgtcttgctgcccgaaaactgctcattgaaggagctgacagcctgcaaagatcgcaacatcacactttgcccaggccctgattcgcgcatctcatgcgtgatctcggttgtcgtcatgccggaaggtggtcgcgtcatttcaatgcgagataaccgacgcgtgcgtgatatgacgcgtcgcgttattggcagcagcgccagttacaactttgacatgattctcggccagtcacgagtgatgcaggacacacgcaacaaagcgcgtaacgctgggcgcagtgacagtacagtgcttctgacgggtgagagcggcacgggcaaggagctatttgctcagtccatccataatggaagcaatcgcaataccggtccattcctggctgttaactgcggtgcaattccgcgcgatctggtgcaaagcgaattgtttggctacgaggatggtgcgtttactggctccagacgtggtggggctgccggaaagtttgaactggcagatgggggaacgcttttcctcgatgaaatcggcgatatgcctctcgatgcacaggcaagcctgttacgagtcttgcaagagggtgaagtgatgcgtatcggcggtaagcggccgctgaaagtgaatgtgcgaattgttgccgcaaccaaccgcgatttgaaaagagatattgagcatggctcattccggcgtgacctctattttcgcctgaacgtgatcaacctgcctattccgccattgcgtgcaagaaaagaagatatcaaagagctagctgactggttctgtgaaaaaatttgtcgcgcactcaatcgtgaacgcgcactattttccggttcggcgttgcagttgatggaaaactacgactggcccggaaatgtgcgtgaactggaaaatatcgttgagcgaacaattaatctgaccgatacgaacgatatccgggccaaggatctccctgaggagcttcgtctgcccaccaattttgatttaggcataccacgcgagaacgcaaaaagttttaatctgaaggatggcgagaaggcgctaatcgagctctgcctgatggacaaacagggcaacatgcgccaagttgccatcgcgctcaatctctcacgcggtgcgttgtataacaagatgaagcgatatgggattgaacccagtgattaccgcaggttgaaccatgaaatctga

SEQ ID NO: 448101 - DNA, 1452 bp, Serratia marcescens
atgtctacacgaaaacacaatgtaccttacctgatattcatctgtgcaatcgcttcagttagcgggatcatcctcggctatgacgcctccgtcatttcaggcgttattgatcctctgaccgaacatttatcactcacgccagcggaaagtggttgggctgtttctaacgtaatttttggatgtgttatcggtgcctggggggtcggacgcctcactgaccgtattggccgtaaagcaacactgatcatcaccgctgtactgtttgccatttcagccatcggtgcggctttagcaactgatctgacctggttcgttgtttatcgcatgattggcgggctggctgtaggcatggcctctgccgttacaccactctacattgcagaagtgtctcccaaagatctgcgcgggcgcatgttaggcatgcagcaaatgctgatggtgagcggccagttggtggtgtatgtggtgaactacctgatctccaaaggtgctgctcatgaatggattgtgtctatgggctggcgctggatgctggcatctgcactggttccctgcgtgctgttcctcgttatggtcttctttatgccggaatcaccccgctggtatgcaatgcataacaagaaagagaaatcactgaaagtgctgacctctctttctaacgccgcacatgctgagcgcctgtataccgaaatccgcagttccattgctgctgattcagcttcgtccggtgaaccaaatcagcgcggcattctgaaagataaaaaagcttcctacatcttatggattggctgtgccatcgccgtgcttcaacaggtttccggtatcaatatcctgatgtattttgcgccgtctcttctgcaaaacgtcactggtagcacacaagactcgttattccagagtatttttctcggtgtggcgctgttagccggtgtgagcatcgcgcttgttgcctttgaccgcgtgggccgtattcctttactgcgctggggtgctctgggatgcgctgcctttttgttcttcacttcctgggcatttatgaaagaaaccaaaggctttctgccggtggtgggattagtgggcttcatctttgtctttggcctgtcatggagccttggtgcgtggctgctgatttctgagattttcccgaaccgtatgcgcgcagtcgcgatgggctacgccttctgttctctttgggtatctaacttcatcgtgacgcaaagcttcccaatgatgaaccgcagtccagcactggtggagcacttccacggcgccttcccgctgctgttatgtggtggattcagcgtcattgctttctggttcgttggccgttttctgcccgaaaccaaaggggtatcgctggagcacatcgaaccactgatgctttccaaatctcgtcgttttggccataagcagcaaccgctcatcacaccagaatctgtatcgcaaaagtaa

SEQ ID NO: 448102 - DNA, 1008 bp, Serratia marcescens
atgtctattaaaaatattgtgcgcgttggtctgattggcgcaggtcgtatgggcagtttccatggtgagacagtcgctcaacgtattccaggcgcaaccttggttgcagtggccgatcccgttccaggcgcagccgagaaactggctgctaaactgggcgcacaaaaatcctataccgatccgcaggcgatgctgagtgaccccgagatcgacgcagtcgtcatcgcatctccagcgcgaactcacgctgagctagttgtggcagcagcaaaagcaggtaaaggcgtgttctgtgagaagccaatggcggtgacgctggaagaagcggataaagccatcaacgcagctaaagaagccggtgttgcattacaggttggcttcaaccgtcgtttcgtaagtggtttcgctgccgcttatgaagaaatcaaggcgggtaaaattggcgtgcctcaactgttacgctcaaccacgcgcgacccaggcttgggcgatcctacccccatcccacactggacaattttcctggaaaccctgatccacgacttcgacatcctgctgcacctgaacccaggcgcaaaaccaactcaggtttatgctgtagccgatgcgttagtacgtccggattttaaagatcgcggattgctggacaccgccgtagtaaatatccgttttgataacggcgcgatcgccactgctgaagccaacttccaggccgtgtatggctacgatgtccgtggagaagtgttcggcagtaaaggcatgcttcaggctggcaacatcaacgtgaacaactgtgtgcgttacactgctgacggcatttctatcgaaacggctcgtcgtgataccgatctgctacgtgacgcttatgtggcagagctgacagacttcgttcgttgtgtggctactggtgaagccccgaaagcaacaggcgaagatgcacgtaatgcgctggaaatcgctttggcatgtatcgcttccgttcaacagtcccagccgatcactctctaa

SEQ ID NO: 448103 - DNA, 780 bp, Serratia marcescens
atgtctaactactcattgtccgtctgcgctgaaatggtgtttctcgacctgccatttattgagcgtgtagaacgcattcacgctatgggcttcggcgttgaaatatgggactggaccaagaaagacatcgatgcactggtaaaaaccggtgcccgtattacttcgatgaccggctatatctcaggcaacctgactgatgacgaagagattgctcagctgctctctagcgccaaagagtcgattgaagttgctcgtcgcctcggctgcctaaatctgaacctgcatgggacaggtctgaacaacgtgggtttgcccgtaaaacccgttgaagttgtaaccggtgcgatgtggctgaaggcaaaagaaacactggatgcgcttgctgctttgggcgaaaaggcgggtaaggttttcacactggaaaacctgaatactgccgttgaccatccgggaacacctttcgcgaaagcggaggacactctggcgctggttactgcggttaacagcccatacctgaaaatgaacctcgatatttatcacgcgcaaatcggtgaaggtaatctgatcgaactgatccagaaaagcgaaaagcacattggtgaaatccaggttgctgacgtgcctggtcgtaaagagcctggtacaggtgagatcaactacaaagccgttgcccgcgctctccagggcatcaactaccacggtgtagtcgcgcttgaaggttgggcatctggtgattctgtggtggcgttggaagctttccgcgaagcgttctccctgtaa

SEQ ID NO: 448104 - DNA, 897 bp, Serratia marcescens
atgaacttatcaaagcgtattcgtgttggcgtgagcccactgtcttggacgaatgacgtgcttgaagatcttggtggtgatattccactggaaacctgcttagaagaagccgctgctgccggctatgaagggattgagttgggacgtaaattccccagaacgattaacaaactccagccgattctttccgatgcaaaactcaaactggcatccggctggtataacggattccttgctgaacgtagctttgatgaggagcttgaagccgttcacgatcacgcattacttctgaagtcgcttggtgcgaaagtcatggtttatggtgaatgcggaggcatgccgggtagtgcgccattagatgaaccattatcgctttctccaaccctggagaacatcagtctagagcaatacgcgcaaagggtgaataacctggctgcctcactacagaaaatttacggcttgcgtctcgcttatcatcaccatttgatgatggtggtcgaaaccaacgatgaactgaaagcatttctggaagcaaccgatgatttagtgggtatcgtactggattgcggccatgcaacagttgctggtgtggacataggttgggtacttgaaaattatggcaaccgtgttgcccacatccatatgaaggatgtccgtggtgatgtgttagacaatgttattaacaacgacatgagctttaatgatgctgtgaggaccggcttgttcacagttccaggagatggcatcgttaattacataccagtaattaatttcctcaaaaattcaaactataaggggtggataattatcgaagcagaacaagaccctgaaaaagcgcccccattagagacggtaaaaaaggcgcgagcatgggttcaaaaagagattggaatctga

SEQ ID NO: 448105 - DNA, 732 bp, Serratia marcescens
atgaaagaatatatacaacccgtggctctggtaaccggtgccaacaaaggcatcggcctagccataacgcagcaattggccgcacgtggctacatcgtctatcttgccagtcgcgatgagcagcgcggtgttgaagcaaaggacagcatcgaacgccccgacttggacattcgaccgatctgcctagacgtcaccgatgttgaatccattacagcagcagcggcacgactgaaggatgaagtcggatcgctcgacgtactggttaacaacgcaggcattgcaggccaaccactgttgcccagccagtgcgacgcacaggcgttgcgtgacgtttatgagaccaatgtgatcgggccagtttcggtcacccggctgctactgccgttgcttcgagctggacaaagacgcactatcgtcaatgtatccagtgagttgggatcattgactctgcatagctatcctgactttccattcgcgcccgccaatttactagcttactgctcgtcgaagacggcgctcaatgcattcaccgtactgctggcaaaggaacttcgggaggacgacttcaaagtcaatgccgtcaacccagggttcaccgcaaccgatctaaatagctttgcaggaaagcggacggtcgatcaagcggcggagatcgtggtcaaatatgcgaccttggacgtttccggtcctacagggggattctttacagacggcgggtttctgccatggtga

SEQ ID NO: 448106 - DNA, 600 bp, Serratia marcescens
atggctaccgtagacgccatacacatggcgacgattcaggttttggcagccgaaggccttgccttgtgtacaaccacccgtgtcgccgaacgtgcgggggtgtcggtgggcagcctctaccaatactatcccaaccgtcgatcactattggcggcagtgttaggacggcacctcgaccatgttgcagccgcggtggagcaagcatgcatcgcgcaaagaaggagcccgataaacgatatggctcatgaagtggttcatgcattcctcggggcgaaactggaagaccccgcggcgtcgaaagcactctatgccgttgccgaagagcatggaggtactctcttggtcgcacatgccaaggaacgcatgcacagagctgtggcctcgatgcttaatacggccacagatgcacactttgacgacttgagcacagccagcctcttgatcatgagcgctatgactggcccggcacaggctttactggaggatgacgcgtccgctgaatccgtcgatgtgttgcaggcgcacctctgcacgctgatacaggcgtatctacgggcaatttctttatcagtgccaaccggcaagtcaactgagcaatga

SEQ ID NO: 448107 - DNA, 132 bp, Serratia marcescens
atgaaaatcatcagcaaacttcaggtaatgacgatataccgtgagcatccgcagtcacagttgttccgcttctgtaccggcaaataccgctggtccggcagcgtctgtcactatgctaggcgcgaagtgtag

SEQ ID NO: 448108 - DNA, 534 bp, Serratia marcescens
atgaaaatacggcattacctcgtggcactaagtacgctattgctggcgggctgcagccagccgacggcgaaggccaaaacccgaagcggtggcggtgggattattgtcgccatcaatcacaccaaatgggcgatcaaccatttcagcgtcgacggtcagccgggcattgatgctattgggccctatcagggcggcggtggcggctgctgctatggcgtgccggcgaaatggcggccgggtatgacggtaaaagtcgactgggaaagtggtgaggcatctacaaaagggtttccgggatttgcagatacggaaaagtacttggcttgggaaaagaaaatgagtgcgaataaccagcagcacagcacggtggtaccggtgcctgactatacggggcagaaaacctgcgggatcacggtgcattttctgccctgcgatgaggtgaaggtgacgaccagctgtgtgagccccggccgaccgggctatccgatcaacgagccgctgcagatgccggagccaagagtatgtccgaaataa

SEQ ID NO: 448109 - DNA, 513 bp, Serratia marcescens
atgaaaatacgacactacctcgtggtactgggtgctctgctgctggcgggctgcagccagccgacggcgaaggcgggaaccatagaggcagtcaaccacaccaaatgggcgatcaaccatttcagcgtcgacggtcagtcggggatagacattattgggccctatcagggcggcggtggtggctgctgctatggcgtgccggcgaaatggcggccgagtatgacggtgagggtggactgggaaacaggggtgggttcatcaatggattttcctggttatgccgatgaaaaaaaatttttatcctgggccaaaaaaataaaggcccagaataagcagcacagcacggtggtgccggtgcctgactatacgggacaaaagacctgcgggatcacggtgcattttatgccctgcgatgaggtgaaggtgacgaccagctgtgtgagccccggccgaccgggctatccgatcaacgagccgctgcagatgccggagccaaaagtctgtccgagataa

SEQ ID NO: 448110 - DNA, 543 bp, Serratia marcescens
atgaaaaatataaagaactttcaattgagcgctccgaaaacgcgcgaacaaatcaaattaaagaacaagcacaacgtgcagtttctgtattcagatgacggcacggaatggtactcctgccagcaagagttttcccaggacaccatcaagtttgcgtatgacgagaaaggcgttatccgaagcattgccaacaacaaggatgtatcaacgttatggcctgtggggttgagtgtggccgaggttgcggatacgacggccaatcgtcgcgctgacgtgatgggcggctgggtgtttgatggtgaaaacatcgttaagcgtgtctacaccgaagaagaattgaaagctcaggccgaaaccgaaaaggccaaacggctggcatttgcgaataaaaagacgcaagcctggcagtcacaactgatgctggggatgattagcgaggaagataaacaatcgctgattgcctggatggaatatgtaaaacaagtccaggcaatcaacataagcgcagcccctgatattgcatggcccgaacaaccggcctaa

SEQ ID NO: 448111 - DNA, 1374 bp, Serratia marcescens
atgtattttttagacaataacagcggtgtaaatgccatgccggcgattgctccggtaaacagcacctccatccgctggtttaccgaaggcagtggcggcttaccgccaagctggcctggtatggactggtttaacatcgtccaggcggagttaatcggcgtcctggttgcggccggcatgtcgccggagaaggcccgcgtcgaccagttggcggcggccattaaatcgattgtcggcagcgaagcacttctgaagaagaattacctgagtgaaattgcttccgctggcgctgcggcgcaggcatctgctcgaaacaatctggggctggggtcagccgcgaccaagagtgtccaggtcgatccggaagacggcacgtcaggccgggtgttgctgacgggcggttttgggctagggtcgggtggcgtggtgataacgaatgccaataacgcgaacaggacgggcttttattcgttggtcgctaatcagcattcaaacagcccagataccacgctgagctgggagcttctttgtatccgccacaataacaactctgctattcagctattttggcaggctggtgtttatacgaccaagacgcatattcgttcactgggaccttataatgcctggggaccgtttggcagtttatatggtacagacaataaaccggctcccgccgatattaatgcggtgaataaatccggcgatactatgaccggccaacttattaccccatcagttgcgacaacgccagaggcgacaccgtggggagctggttcttatgccgcacagttgagtactcaggcaccctttttccagcctaactggcaatggccggtaacgtcaggcggtgattatgtgccgatagttaaaggggtatcaacccggcaagggcaaggctatccaacggcagtgagttttgggtatttgctcagtggcacgcccagttttgcccaaccctgcatccatgcaaagggcgataatgcagattttaattggcggtttgacgcaaataacgggaatttttactgcccaggcggggtttatgctgccggcgctatcttccatgtcgacgggaatatcaccggtaatatctggggcggctatctcagtgactggctgaacaacagcttcctggcccgtgataataatatcggcacgcgtgctacctgggactatgtcaatcagaatttcattcaaaacgtcaggtacagtgcagaaacgcaggtaggtgcttcgggagtgaatacgtaccacagcaatacggtgctgaccggcttcgataactgggattatgattattctgctgaagccttgttctggagtcacattcagattctaaaaaacggccagtggttaacgataggacgttga

SEQ ID NO: 448112 - DNA, 1470 bp, Serratia marcescens
atgtttgaagatattttagggaccgtaaacagcacccgtaacagcgtgcagaatgcgctgggcgtgagcaaggacaataccgggctcggcgcgtttcgtggggtctccttctacaccttccgtgaacagcgtcaaaccggtggccggcgcatcgtcaagcgagaatacccgctacgcgacgaagggggcgcgatcgacctgggacgcaagttgaccgaacgcacctttaccgcttgcctgttggggcgccaggccaaggcgcaatgcgacgcgctactcgaagctcttgacgcacctggtgcgggcgaactggttcacccggaatacggcaccctgtcggtactggttgataactatgagtgccgggcggtggccgacgagctggactattacgagttcacgatcacggtttacccggaagcgacagccactgccccggaggttcaggacaacaccgggcaagccgtggcggcgcgcacagacagcttgtttggcgatctgggcgatacgctcgtcagtacctggagcgtggtacaagaaggtgtgcaggatgccgtgactgttttggacgcgatcagcggcgtgcttgatgacatctacaacgcggtggaaaacatcggcatcatggacgatgtgaaccgtctgatgggagccatcacggccgtaaaaggcaacgccgaggggcttatcaatacgccggccatgctggcggccaacgtgcttggcgcactcagcggcatcacctccgtcaccgatgcgtcatcggctttccgaaccttcgagcgattgggcgtgcacctgtcccgccgtgctgacggcatcgacaccagccacatttccgccggtgctgcgaaaaacgtccaggcgctgtttcatgttgcctccaccggcgcgctggccagccagacacaggccgctgccggcattgtgacattagcgcttgagcgcgacagctaccagcctcgaagcctgtcgcagacgccgtcgcttttcgtatcgagcgctgccggcagctctactgcatcgccgaccgtggccgccagcttgcagcagaccgccaatcaaagcgccgcccaaagcagcctgctggacgatttgtcggccgacagcgtcgccacggccagcgtgccactgtttgagagcgcagcggacattactcgcgtggcagtcgcgcttggccaggcgttggacggtgccattcttgcggccggtgatgccggctttacgcgctccagtaccgcgttgcgccagttgcgcctggtggccatcaacgatctgcaggtgcgcgggctccaactggccggggttagcctggtcacaccaaagcgtaccgaaccggcgctggtgacgctgtatcgccagacaggtaacagccggcagcaccaacgcctgacacgccgtaacggtatcgccaacccgctgtttgtgcctggcggggtcgctatcgaggtgatcaatgaaccaggttga

SEQ ID NO: 448113 - DNA, 2031 bp, Serratia marcescens
atggccggacaacagttacgcgcatccatcatcgttgatctgaatggcaacgtaaccacacggtcacgtcagttcggctcatctatttctcagatggctcgtagcagccagtccgcattacgcgggttgcgcgcgagtgtgatgtccgtctccgccggcatcgacaagatgggcgcggcggcatcgcgctcgttcggcatactctcccgtggcgcaattggcgtggcggcggcgggctactccgccaacaagctgtttatcaatccggcatcacagcgggaaaactaccgtatcgcgctcaactcccagtacgacggcgacaaggccaaagccaaggaggcgatggactgggcaattaaaaatgccagggacagcacctggggcctgaccggcgtcatgcaggagtacgtgtcgtccaaaggcttcagcatgagcgacaagcagacccgcgatttcatcacgatgttgcaggatcagggggcgtatcgcggctgggacctgaacgccgcccagggcgcgtctctccagctcaagcagatgttttcgcgccagcagatcaccgccgccgacgccaacctgttgaccggctacggggtgaacgtttacgacatacttgccaaaaagttagataaaacaccgcaacaaatccgcgcgttaggcgagaagggcttgctcggtcctaaaaccatccagctattgttcgaagcaatggccgaacaagccaagggttcccaggctaacgccatgaacacctggacgggtctgacggcccagcttggcgacgtctgggatgatttcgccaacaaggtgatggacaaaggcccgttcgacctgttgaaaaaccaagtgagaggtgtcctggctcaatacgacgcgatgggcaaacccggcaagggtggcagaagcgaactggatgtgctgaccgagaaggtcgcaaccgagttggtgggtgcctttaacctggccaaaggcgctgctgtcggcctctgggatgccgtctcaggcgtggccaaaggcctcaaatggatcaacgagaacgtcgttagcctggacaaagtcggtaaggcattggtcggcatctacgcggccaacaaattgctgcgccttggcggccgcgcgatcggcggagcgtaccgcgtggcgtccgccccggttcgcggttatcgctggctacgtaatcgccgcaagggaaaaaccggtgtgggggatgccatgccgtccgttacgggcgcattcggcgtgcagcaggtgtttgtcaccaactggcctatgggcggtctcggcggcggttttggtgctgacgtcggcaccggcaaatcccgcaaaggccgccgtaaaaaaggccctggccgcaatcttccccgtaatgtctccgtcgctgccgcgcctgccgccgctaaacggggcttctttggccgtatgtttagcggtgccgcctctctcgccggcagtgcggcgtcctgggtaggcaactcaagcctcggcaaaggcctggccagcatcgggcaaaaatccagcagcatgatcggcgcagccggcaaatgggtcgccaacagcggtttcggccaggctgccggcaaactggcggcacagggttcgaaagccctcgggtggcttgggcgtgtcggcagcaagctcggcggccctgtgctgtctgcgctgacactggccccgacgctgctcgatgacgaggtttctacccgcgacaaaggcagtgccatcggcgcaacggcgggtgcctgggcactgggtgcggtcggttcgctcgtggggccggtggggacggcggccggcgcggcgctgggcggatacctgggcgactacctgggcggctggatggcggacttgtacacccagtgggaaggcggaccaaaagacagcaataccgaagcgccgcaggagcagaaagtgcaggccgacgcctcgctgcgaatttcgctggcggacggactgcaattgagcagcacccgtattaccgaggacggcatgggcctgaacgtgtatgacggcaacaactactacccgttctga

SEQ ID NO: 448114 - DNA, 540 bp, Serratia marcescens
atggtggccgcaacggagaaggccctgctggaggcgattgagtcgctgttcggtgccacgctgcgcgatttcggcacccatcctggcacctgggacgacgtggccatccgccacatgctcaccgcaccgccggcgatttatgtcgcctggttgggcttcggtccggggcgtacccgcaccgaggtggagagccattgggtgttctatgtggtggccgaacggctgaacggtgaaagcgtcgacagcttgggcatttaccagatgatcgaccgcctggtcggcggcatcaacggccggcggttcgggccatcgagcaacatgcatctgaccaaaggccaaaacctgtataccgatacgcaggatgcggcgggcatcgctctctatgggctgtacttctccgccaccacgccactgtgcatcggcccggatatcgccacactggacgacttcgagcgtcactatcagacctggcgcagacctgatggtgccccggcgtttgaggcgcatatcaacgtcaacgatccaacccccaaggagtaa

SEQ ID NO: 448115 - DNA, 447 bp, Serratia marcescens
atgtctacacaattacctgaaacacatagccaacagtctgatccgctggatacagcgttggagacaacagtattcagcgcggttatctggtgtccacgcccggcctaccgccgtgccggttttgcctttacccgtggccgcaccacgctggatcctgttacgcgtgaacagcttgccatcctggaaaaggatccgtgcctcgttgtggaatcatctacgccggcaacgcagccggcggcacaatcgggggccgtggacaatacaggcgtgggtggcgtaaccccggaacaaatccgtgtggccgtcgcgtctctcgatcgcgagaacggcgagcactttacccaggcgggcaaaccgcgcgttgctgctgtcgtcgctgccctgggggctgacgtcaccggcaagcaaatcgaagccgccctggcggaaggcggagacgacgcatga

SEQ ID NO: 448116 - DNA, 273 bp, Serratia marcescens
atgagtacatccaacatcaacgacacccggccaacgtttattagcctgctcgaacagatgcgcgccatctgcggcgaacagcatcaccagtactgcgatttgcaggagctgggacgcatgctgggtgttgtccctgtcaatgagcccgtgccggagtctctcccgtttgaagagacgtcgctcattccggcatttgctgaagcggcgacgcgcctggataccctggcgaagatgaaccgcgagttgcaggcggcgatccgttctgcgttctga

SEQ ID NO: 448117 - DNA, 921 bp, Serratia marcescens
atgattattaccccggcaagccttgccgccttgatgacctccttccgaaaagatttccagggcggtttgacggctgctccgtcgcaataccaaaagatcgcgatgacggtgccgtcttcatcgaaatccaacacttacggctggctgggtaatttcccgtcgatgcgtgagtggatcggtacacgtgtcgtcaagcagatgaaggcgcatggctataccatcaccaacaagacctacgaaggcactgtaggtatttcgcgcgatgattttgaagacgacaacctcggcgtttacggcccgatgttcgaagaaatgggacgtgcagcgggcgtccagcctgatgagctgacctttgaactgctgaaggaaggatttaatcagccctgctatgacgggcagaacttctttgacgcagagcatcctgtttacccggaagtagatggtacaggtgccccagccagcattagtaacattttcctgcaatcggaagaatggacgggtatcccgtggtatttgctggattgttcccgcgccgtaaaaccagtgattttccagaaccgccgcaagccggagcttgtgatcaagtcgaaaatcgatgacgaccacgtctttatggaaaacgaagtgctgttcggtgccagcgctcgtcgcgctgtcgggtttggtttctggcaaatggccgtggccatgcaggccgatctcaatctcgacaacttgtgggcaggctggcagatgatgcgcgccttccacagtgacggcgacaaaaagttgggcctgaaaccaactcatctggtcgttccgacgcaactggaaaaagccgcaacgcaactgctggagcgcgagttgatcaccacggctgatggcaccgccagcaatgaaatgcgcggcaagctgcaattggtggttgcggactacctgtaa

SEQ ID NO: 448118 - DNA, 1143 bp, Serratia marcescens
atgaaaacatctttcaacccgcaggccttactggccgcccaacataacgagcctatcggcatcgccgttctgagcatgaacgccgatgacgacggctggtatcaactgttgcctgccggacgattccgggctcgcgatggtcgcccgcacgatatcgccgaaggctggctgatgacggcgacggtcgcggcccgccttattgctgatgttcgcgcactcggtcaggacgtgctgattgactacgagcacaaccaactgcgcaagaaagacggattggtccctgatgccctgagcgcggccggctggttcaatgccgacgagatgcagtggcgtgacggggttggtctgttcgtgaaaccccgttggacggctgcggggcaagcccgcgtcgacggtggcgagttccgttttttgtctgcggtcttcccttacaacgtgctgggcgaaccgaccgaactgcgcatggcggcgctgaccaatgaccccggcgtaaccggtatgcgggcgctggtcgcgctggccgccgagttttcatcccaccccgaaacccaagagagcaagccgatgaatgaaagactgcgccagttactggcgaagctgggcatcaccgtgcccgaaaacaccctgccgaccgaggagcaggcgactgctgcgctgacggcggtgattgaccttcaagccaaggccggcactgccgacaacctgcaaaaccaggttgccaccttgtccgccgaggttgagaccgcgaaagccgcgcagaccggcgctgtggatttgacccagtatgttccgcgcgaaacctacgatgcggtgcgtggcgagttggccgcgctgagcgccacgcactccacggcgaccttggcgcaagtcctggacgaggccgagaaagacggtcgtatcttcaagtccgaacgcagctattacgagctggtcggcgtgcagatcggcgtggcagcactctccgcacagttgcaggacaaacagccgatcgccgcgctaacaacccttcagacgaccagtgtcactgctccccagaagaaagagcggctggcagtgctgtctgccgaagaaaaagacgccgctaaagcgctcggtatgagcgaagcggactatctgaaactcaaagaggacgacgaagcatga

SEQ ID NO: 448119 - DNA, 1308 bp, Serratia marcescens
atgccacagaccgttgatctaggctatgcggcacggttgccgcccaaggaggccgtggcctatttccgggccaaggggtacaacatcacctggaactggtacgagcaactgaccgacgctcacgcccgcgctttcaccgtcgccaaggcagcacgtatggacgtgttgacgacgttgggggccgaggtcgatcgtgccatccataacggtatcacccgcgacgagtttatccgcaccctgacgccccgcctgcaaaagctcggttggtggggcaagcaaatcgcggtcgatagcaacggtaacgccaaaacgatccaactgggcagcccgcgccggctggcgttgatttatgacgtcaatacccgcgtggcgtacaacgccgggcgttatgcgcagatgatgaacaccgccgacgctttcccgtattggcagtatgtggcggtgatggacagccgcacccggccagctcatgctgtgcttaacctgatggtgttccgctttgacgatccgttctggaaaacccattacccgccgaacgggtggcgatgccgctgtcgcgtgcgggcgttgtcggcggcccgcctcaaggcgttgggcctgaaagtgagttacggcgcgtcctttatccagaccaaaaccgtcgatgccggcatcgatgaaactaccggcgaaatcttccagacggcctcgaccaccttcaataacggcaaggtcaacatgacgccggacgtaggctggtcgtacaacccgggttcggcggcattcagcaccgaccaatcgatgatccgcaaaatgatagaagttcaggatgccgaattgcgccggcaggtggtgcagtcgctaaacggcagccgtgagcgccaattggcgtttaccctgtgggccaggcgggcactggaagcaccatcggtggtctcccccgtgcaggcgctggggctggtgtctgagtctgtcgccgaggccatcggtgcccagaccgggcaaccagtaccacgcctgctggcgatgaacgccgagagtttgacgagtgcccccgaggcccagcgcctgctgccggccgatgcgccacgcctggccaccattacgcacaggccggcggcgatattatgggatccgcaacagcgccggctgctgtacgtcactgacagcagcgacggtaatacggtgatcgtcgcggaaacggcgatcggtagcggcgcagtcgaggcgttggcctcggcttatcggcaggacgtggccacactgcaacaacaggttgcccgtggtgaatatcagatgatccagggctccattcaccaggcagaataa

SEQ ID NO: 448120 - DNA, 381 bp, Serratia marcescens
atgacctggatttctactaacgccgtctcgctgcttctcctgctggccatcgtcgccctgggcagttggggcgcttatacccagcaccgggtcgacggcttgcaacaggataatcaggaactgctccggcaacgggacgaggcgcaacttatcctgggcaatcaacagcgcaccctgtccctattcaacgcgatcgccgaggctacccatgaagaaaaacgccagaacactcagcagatggaggtcgcgcgtgccgtcgtgcgtcgcgcgctggagcccataccggctgctgctgtgcgggtgcctgatgctgtggctgaccgcgtgcgcgcggccgttgccgagattcgtggcgctgccggcggtgagcgccagccctga

SEQ ID NO: 448121 - DNA, 216 bp, Serratia marcescens
atgctaacgctgctaaagggtttgaaagacgccaaactctggagcgcatttgcgtcggttttgacatcgtggctggcgagaaagtccagccgcaaggtgaaaattatctaccaggatgggcgagtggtagaagagaactacgaagggtttgatgtcgaagagatcggcaaactcagacgttcaatcgaacaagtacacctacaggatgataattaa

SEQ ID NO: 448122 - DNA, 435 bp, Serratia marcescens
atgagtattaaatatttggttggactgattttgattggcgctttcgtttccacggcgaccatcgccgacgataaagaaccaagcaacgatgagatcgttgcacaaatcttggcgggtaatgataaaccaaacactggctctaacgagcaaaccgtagcacggaaccccgcatccggtttttggacgtgtcatgggattaggttacatatgggggttgatatggcttcctggacaaacctcgatagcggtgagatgttcatattacacagcaaacctgcgccaactgagaatggcaagggtaccgactatctgttttcttcaaccaacaaccctgcggtgattgagtacttcgttgtcgacaaaagcggaaaaaagctaagcattcgcgatcagctcaagttctctaagctctatccctgcaaacgcaccaaataa

SEQ ID NO: 448123 - DNA, 510 bp, Serratia marcescens
atgacaaccaaagctcaactgattaagctgatccacgttgcccgacgcaagctgcaactggacgaagagacctatcgctgcttgctggtttgcgccgttcccggcaagaacagttgccgggacatgaacctgcctgagctggagaaggtactgagcactttgaaaaccaaggggttcaagcccatatctacaacagtgagcgcacgtcggaaaggtgctccggatgtgacagctaaaatccgggctatctggcacaccatgcaccgtgacggcttcatccagcatgacaccatcgatgcgcttaacgcttacgttaagcgcgtcacccacaacagtaacggtggcgtggggatcgcaaggctggattggttgcgcggacaagacgcgacgacagtactggagtgcctcaaacgttggcaccagcgttgtatggttgaggcaatggatggcgctgcaccgagaggatatgacgcaacatgtcggcaatttcgtttgcagcgacgacattaa

SEQ ID NO: 448124 - DNA, 213 bp, Serratia marcescens
atgctgaaaattggctttgcgctgtttgtttctgcctgtgggtttgatgcctgtgaggcgttgcccgtctctgagcgaatttatcagaccgaacagcagtgccaggacatgctggtccgcctgcaagccaggcgcccctcggcagtgttgttgtgtagcgaggtataccgtgacgaggtcgtgagcgatgacaaccaaagctcaactgattaa

SEQ ID NO: 448125 - DNA, 393 bp, Serratia marcescens
atggataaattcagcgaactgtgcagcaatgccaggaaagcggcgaacttattttacgactggtcgcagctggcaaattgcacatccgaacgtgtgagctgcctgacggtggagcatttgaaggagacatccgagctgttctcagctctgctggcagagctggaagcgaatgatgcgccgaaggatatacgcattgcagagactgaaaaacgactgaagcaacgcgcagaagaagcggaatcgcgcatcgccgcgctggaagccaagctggctacaccggtgcggttgccaaccacttcaggccgcctgggcgtggcatacacgcgggtaattccagaagttatcgaagctatccacgccgccggcttcaccgtagagagggataagcagtga

SEQ ID NO: 448126 - DNA, 708 bp, Serratia marcescens
atgaatgctgaagtacttctggaaaaaatcaccgcgcttttatcgcaccagtcaatgacgtgttcgcagctggcagctgcgttggatgtcacgccggcggaaatcatcggtctgttgcgacaggcgcttaagggggatcggtttaacgagcgcaacgggtattattcggtactgccgctagcggtagcgcccagtattcccgccatcgtcccatgtgccgttgccacaacggcgcttcccaccggtttcaccgggcagatcctcgccgcgctcgagcagcgagatatgacgtcgaaagagctggcggccttcaccggaattggctcctcgcgcatttccgcttttttgcgttatcgggtcgtgcaaggtgaagtctcaaaggtttccagggacgggcaaacctactaccacctggaacagcggcccgtgcgcatgagccgcaaggcttacccctgggtcgaaggacaggtcattccgtcgtgggtacgcgctctggcaacgggcgttcgtgggtgtgagagcgtctatatcgtcgccgaactggatgccgacaagcaatcgcagggttggccgcagttcatcaccgcatacatcgacgttcggctggatcgttgtatttgcggcagctcggccgaagatgtcaccgcatatgtgctgcgctatctgcctttcgaccatagcgaggttaagccgtctcatgcggaataa

SEQ ID NO: 448127 - DNA, 270 bp, Serratia marcescens
atgccgaaaattattttcgaatttaaagaattaccgcctactttcgtgacggaggctggtgttgccggtgtcccggtcagtgttgttgtgagcactgaggggattaacacgaataattccggtcacgccgatcaccttgtcgccattctgcataaggctgcaccgaaaatcatcaaggcggccagtgatatttatttgcaagaacggcgagccgctggcgatgtagatgctaagagcacgttttataaatcatcgtcgaccacacattaa

SEQ ID NO: 448128 - DNA, 258 bp, Serratia marcescens
atggagaaagttttcgcctacgcctgggcatccggtttaattgaatttgggccatcgtacccttcgggggcgttgccgatttattccggtgatgaaaaagcgctgcgtgaggcggtaatggtgaatgcacgtgtagccagaaccagcgaacagctgttggtgccgggtatccctgaggctgcaaaccagcatgacgcgctagacgcactgatttacttttcagaccgcgtgaaaaccacttatttaaaaaggaagtga

SEQ ID NO: 448129 - DNA, 222 bp, Serratia marcescens
atgaacatgtttgatgcagtgaataacgtcagtcgggccatgaaatttttcggcagcgatgtcgaaaaatcgaagcgatatcgccaacgccctgttgttcaagttacgccacccaccatgccgccggcagaaggggtaatcgaaattaccgtttgcaccgatggactgcgccgccgcgttcatgcggcccgcattcaggggtgcacggtgtattgggagtaa

SEQ ID NO: 448130 - DNA, 1977 bp, Serratia marcescens
atgaaggggaatatttgggtcacagcgcaggaatgtgttggtttgccaggtctgccgaccagcacgactaacgtacgccggaagctggaggcatttgttctcggcaatgaagagctgacccgcaagcgcgcggggagcaaggcatttgaataccatatttcagtattgccgccggaagtcagggcggccgtgttaaagcgccacaatcaacttgaaaccacatccggcctgataacgctgccagctcggaaagccgccgaccctgcgcgcgctcgcctttggcggtgctgggagctggccacggtatcgcagcgggaacaggctgaaaatcgtgttaaatccgttgtgttaatggccgagctggttgatagcggccttaaggtccgcgcagcggctgacgtcgcagcgagcaatctcggcatctctcccaacagcctgcgtcgctggtatggcaaggctcagaaacacccccgctccgattgggggccggccttgctggattaccgtctgcttgagggcaccgggtgtgcaccaaaagccgatttcgacgatcaagcctgggagttcttcaaagccgactacctgcgtctcgaacaacctgcaatgatcaaatcctacgagcgcctggaaatcgccgcacgtgaacatagctgggctattccctcgtttgataccgtgcgccgccgcgttgagaaagagatcccggtcgaggtacgtgtactcacgcgtgaaggtgaacatgctttacaccgcctttatcccgcgcaaaaacgttctgttgccgacttgcgtgcgctggagtggatcaacggcgacggctaccagcacaacgtgcgcgtgctttggttcaatggggaagtcttgcgccccaaaacatggttctggcaatgcgtctacagccgaaaaatcctgggttatcgcgtggatgtcagcgaaaacacggactcaatccgttattcgctgctggatgtaattcgtcagtatggcaaaccgcaaaaagcgaccatcgacaacacccgcgcggcggccaacaagaacatgaccggtggaactcccacacgctaccgattcaaggtcaaacccgatgatgtaaaaggcattctgccactgctcggcatcgaggtgcactggaccagcatcgttgcggggaaaggctgggggcaagccaagcctgtagagcgcatgttcggcgttggcggtcttgaggaatacatcgataagcaccccctttgcgcaggtgcctacaccggtcccgatccgatgcacaagcctgactataaggcgaagcctgtcagcgccgaacagttcctgcgagcggttgcagacggggtcgccatgtacaatgccgccgtcggtcgcaatactgagatctgcgccgggaaactgtcgttcaatcaggcgtttgaagccagttatcagcaacaaatcatcgagtttttaccggaagaacaactccgaatgctgatgttggccaccgaggccgtcacggtaaaacgcgatggcagttttacgctcaaggccgggggcaagatccaacagcaggaaaaccgttatatcagccccgaactgcgcggtatccgcagccataaggtggtggttcgcttcgacccgcaagatctccacgccaaagtgtactgctacacgctggacggtgaattcatttgcgaggccatgtgtgaagcccctgtcgccttcggcgatacgcagcaagcccgtgaacacaagcgtcaccgcacccagatggtcaaagccaccaagaaagccgccagcgcgcagaaagcaatggatatgttggagctgaccgaattaatgggccgcaccccggaaccggaagcgccgcaacgtcaggtggtacgcatgttcagcgagggaaataccgttaaaaaagtgcaacacgtggaggatgaagccgaattcagtcaacacgaaatcgccttccagcaatatatgtctaagttggctagccagcagaaataa

SEQ ID NO: 448131 - DNA, 243 bp, Serratia marcescens
atgtcgcgagaattccaagactggcatgtagaagacatcaaggcggccgtcaggaagcgcaggaaaacgctgagccagctttcccgcgatgccggattggcgtcggatactttgcgtaacgtctttcgccatcactggccaaaaggcgaacaaattgtcgcagaagcaattggtgtcgatccggccgttatctggccgagccgctatgagcaaaaacgtcgagtatttaaggaagaagtatga

SEQ ID NO: 448132 - DNA, 1005 bp, Serratia marcescens
atgtcagaaaataccgccagccagattgcggcgccgcaaaatgctcaggcgtcgggcaggacaattttattgttcctggcgctggctttgatgtcggcattgctgaacagcagcgcgccgacgccgctttatccgctgtatcagcagcagcttacgctaagctcggtcagtctgaccgtcatctacggcgcctatgccgccggcgtgctgatctctttgttcggcgtcggcaatctggccggcaaagtaaaggatttacgcagcatgatcgtgccggcattgctggtggtgttgagcggcgccctgctgttcgcgcaggctgatacctttgccatgatgctgatggcgcggctgttggccggggtgggcaccggggcgctaaccggcgcggcgaacatcgcgttggtgcggtttgggccgcgcgacggcggcaaaaatgcggcgttgatcgcgacgctgtcattcaccaccggattggcgctgggcccgatcttcagcggcatcgccttgcagaccggtttccatcccacgacgctgccatttgttttcatcatggtcatggccgccgtggctgcattgggcgtgatgttctcgtggccgcgtggcgtggttacggcgccgagccatgttacgtcggccgagacagaaaaaagctcgctgctcgatggcttgcgcgccaccggcggtaaattctttgtgtgtgcaggggctttatttatctgttgggcgctggccgccagtattttggcaatcggccccggcgtggcggaaacgctgttaggcctgcacgctcgtggcgtctttggctatgcgattgcggtgtatctgctgatcgccggtatcagccagatcctgagccgccgcgttaacgcccgtcattcgctgttgttcggttgcctggcgcaggtgctggcggcagtggtgttcaccatggcgatccagtggcattctcttgggcctgtctcttatacacatctgacgctgccgacgatctactctgtgtag

SEQ ID NO: 448133 - DNA, 375 bp, Serratia marcescens
atgtctggcaaaataacgtctgtggtggtgattttgcttgctttggcggcaattgttggtgctggcgcctggctggcaggtcgtcactatcagccgacaattgaccgccttaacgaggcgctgacgcagtgcaacgccagtaacaagcaacaggcggcgacgatcaccagccagaacgccggcattgaggcactgcagcgcaaacaggacgagatggaagccaaggccaaggcggagcaggaaaaagcccgcataaaggctcagagcgattatgagagggctaacgcagttatggccgagcgaaccacgggcgaatcgtgcgccgctgcatcagccgcttttgacgcagagctgcgccgggagcgtgcacaatga

SEQ ID NO: 448134 - DNA, 2265 bp, Serratia marcescens
atgaccgtatcaacagaggtaagccgagaggaatacaccggcaacggggtgacgacagattttgactatcgcttccgtgtgttttctgcggatgagcttgttgttactgtcgctgacacaacagagaacatccgcacgctggtgatgaacactgactacaccgttaccggcgcgggcagtcgtaacggaggcaaggttaagcttgccagcgcactggccagcaactggcggatcagcatcgagcgggagcttcctgtaactcaggaaaccgacattcgtaaccagggcaacttcttccctgaagtgcatgaggacgcatgggataaattgaccatgctgatccagcaggcgattggtggccttggccttgcactgagaaaacctaactggttggcaaagtattatgatgccaaaggaaatcggatatctaacctttccgatcctgtctatgggcaagatgctgccaccaaaaattacgttaactatgtgggagactacaatcagcgtaagacgttgcgtttccctgaagatgtagagccaatgccagcggcgaatgttcgtggccattcactacagggctacacgaacgagggtaaaccggttccggtgtttaccatcaccgacactggtgatctagcgttaaaacttgccagcaccattggtgcccagctcgttggtgttgagcctcgcggaactgttcaggatgcgatccggtacgcaaccccggaaatgttcggcattaaactgcagagccgcctatcatcgtcgtttattgattacacggaccagtttcaggcgctggtaaattattgcgtatccaacagcattcccctagtgagtcataatacacagcatgggacagcgatgtattctgatttaggaatttatgtaaccaggccgattgatttaactggtttgcgcgagatgcatggcaacgtaaccatttatgttaatgggaatgtattctatgacccaacaaatataggggttgcggtacgggcttacaatgcaagtttcgatagtcagggaagatatatcccaggctcaacgaatggaaatattaactggtctggttcgctagaggttgttaatttgtcttctcgttccggtagcgttcagggaatgcgcttgacattcacacgcagcagagttggaagattaaaagcgtatggttttatcggtcgcggtgttcatcttgcatgctgttacgacagtcatattgatattatcgaagctgagcgctgcggtgacataactcgatttgccgttgaggtttcaactcacgatgccatggccggcgctgatgaaagtaacgcgctgacaataggcggcttgatggcgcatgactcatatgaaaaggcctggttggtagttggtagtaaattgcgcctgctacgggtccacgaggagctcaccattgtcactaccaatccctcatcacctaaacccattgaaaccagaaccgggtatgggcggttaaattcctatttctcatctgtcggtggcgggattggcaatgtcagtgttgacccgttatcaacaaatccactcccgcacgtgcacggatttggtgctgtggatacatccgctgatactctcggttcaccacgcggaatagttgtcctgatgtcgggtgaccctgcttcattcggcggtactgtcggtgttatttacaccaaaacattgagtattattgagggggctcgatgcactataaatagagtggaaattgttgatgagtttaccggtggggattacgatacggtaattaatggggggtttataacgaatgtgaaaaataatatttgtcgggtggcaaatgtgacaatcaggaacagtttttcgattcggccgctgcgcagcacgagctacatttcatgccagtttaatggatctccgaaatttaacggcattcgtgcatttttgcaaaactgcacgatatctggagacctgacagtaaataatagcttccgcgctgaattttcaaactcgagaattcagtcggtaaatatagtcggaactgatgtagacatagttatgagtaccgttaacgttcctgggaattttaacatatcagattctgctacaggggtgtggctattatcaaacgttcgcattgatgggactaaatcaccctggagactgccgacagtggcgccgtggattggcgctcgcacatcgaatccagacccgcgcccaggagagggcgtcgattacacatttacagccggcggctgggcacaattaacaacgcgtggaagttaa

SEQ ID NO: 448135 - DNA, 702 bp, Serratia marcescens
atggcacatccgatcatgtcctcatatccagaagtattcgtgcgcactggcaaagcaatcaccacatcccaaagtgtggcaaactttttctgcagagagcacaagaacgtattgcagaagatcgagacgcttgactgctcagaacaatttgcatcagctaacttttcagcccatgttcaagaagtaaccatcgggaacggtgccgtgcgtaaatccaaggtttacgatatgaccaagaacggcttcgtgttcctggtgatgggcttcaccggcaagaaagcggcacagttcaaagaagcgtatatcgcggagttcgaccggatggagagtgagttagccagccagcgctatggccacaacacgcttggcgatctgaccggcactgctaacctgtctgccctggtcgacaagctgcagcagatcatccatgaaggcgagtttatccccgcgggcaagcggccgaactacagcctgccggcgaaccggaagcacgaggccacaatcatccgcgacttcctgagcaaggatgacagcagcaccctgctcactctgctggaatggctgcgcgccgatggcttcgatgtgtcggcggcagatcgggaactggacattatccggggctacgtcggcggtatgcgccgcgcgctgggtgacatccaaacccacgcccgttacattgatcatcagattgggaagatgtga

SEQ ID NO: 448136 - DNA, 531 bp, Serratia marcescens
atgaaaaagttgttattaacattgctaattattttccctgtcagtgtttttgcctttacaaaacaggggttttataccattgacgatacgggatggacagctagctcaactccgtcaggtgatgtttttgtttgttccgattgtggcgatcttgttcaggttttgatcgcttatggtgctgatgttggaagtgattcgcagtataaaaataatgaacaattcatggcggcattctctacagaccaaaagaagagggagtttgctgaaatgctggtaaagggagcgcttccaatgaaggggtttgacgtcaatattataagggttaactttgggaatataggatatctaaaagctttacaatattcagcatcagtaaaaatgcctgatggaaacgagtcaatggaaaccacattgatcgccatgcataaaaatagaataattaaattcactgccaacttttataaaggaaggttaagtggtgagtctgccataaaacttgataaattccacaaatcaataaaacttttataa

SEQ ID NO: 448137 - DNA, 555 bp, Serratia marcescens
atggacccgcaaattttccatagtatttttgataatgacagagttgttaactcaatgatcaaggtgtctgaaagtgaagacgacttgggattcttgcttcgccttcatttgatctcagaagcatatctcgaagcactgattagcagcgcaatgcgcaaaattgatttgttttccgaagaatcgaaagatggcatctacttaaaacttggtttcccagcaaaggctacgctggcgcttaagttaggcatgcccttagctgcttacaaggctttttcggccattaatagccatcgcaataaggctgcgcatcagttaaatcgtgaggtattagacagcgagttaataaacaaaatatataatttggttgactcaattggctcttacgaaaaagatgatttaaccaagcacggagcattgttttacaatgacgatggctcattgcgtaaaaaatatattttctctgaaaatgaaacacctgaccgcataaagttattgatcctcataagtgccctttatgcgcgcgtcggcgttgaaatcggtgtcctgcgcaagtaa

SEQ ID NO: 448138 - DNA, 330 bp, Serratia marcescens
atggaatgcaacaacccaatcaccagccttaatgacgtcatctacggttttgcagcgcagatagtcatagttggctacgtaaaggatcgcagcttcattgccgtctacagatgcggtaaatttcttcgtggtgttatcgaaaaaaccgatcgtgccagggggcgtatcggcggccgcagcaccttcgcgatgcagttgtggattgacgaagataccgcccgcgtgaattacatgtttcccgtctttagccattttttactccggcatttcgctgaaagtttgagaggagttaacctgacgcagcatgccgttcaggccgatagaggttga

SEQ ID NO: 448139 - DNA, 384 bp, Serratia marcescens
atgacgccagccatgcatcgccgcgttcgcgattactttgtcgattcagggcttaccgccggattcactacgcagatgctgcgctggagagacaccggaaagggagaggataaattcattgtctttcggccgaacggaggtggggcgattcaaaaagatttatccagtgactatttggtgcttgttgacgtggtaggcgctatagacgaggacgaagaggtcgacaacgcggtacaggcgattatcagccatattcagaataacccaatgccgaacggatgcttggggcagattgagaatgtgggcggaataccaccaccagtatcaacaactgaggggcgattagtttatcgccttcagttttcctgcctgtatggcgggtga

SEQ ID NO: 448140 - DNA, 756 bp, Serratia marcescens
atgcaaggctgctccacacaaaatggtcagttaattggccgcgctaaaacgctggaactggcttacggatgcccggatcaggtgcctgcagaaggtgactggaaattgttgggcctgccaacatcagcaacatgggatttaagtcccgaggcattaacctccgatgctgataatggcggcttcagttccaatttgatcgcaagtttagatccaacgtactccattgatggagaggttaggattaacgacaaaactgacgaattcggcattcaacaatttgttaagtatgttgtggatgaagttcgtgcccgccggcaaccgacggtctggatgcgcttccagtggggtgactactatcatatcggctacatggtctcgacgggcctaagcgatggtggtggcgttaaggaaattgtcacgtacagtcttgagctgaagattaacgatggctcgaccttccagatcattgaagctgccggcgacattccagttacaggcgtttcggttgctccaaccaccagttccatcgctgcaggcgccagtaccacctttgcagtaactgttgcgcctgctgatgcagacaacaagctgtacaccgttacctcttcagtgccgaccagggctacagcagcatttgctggtaataccgtgaccgtgtcagcgccttctggcgctacggcaggtactgcagtgatcaccgttaaaacagttgatggtgaattcactgccacgcataccgtgaccgtcaccgcgtaa

SEQ ID NO: 448141 - DNA, 675 bp, Serratia marcescens
atgacaccaatgaccgaaatcggtgaaatggttatttcagattccgaccgcgattatttctttcgtccgtcattcgccaacatgacccgaataggctcaccagcggcaattgtagagcgctttgcagagctgcataccagcgatgcaccgagactgcttgagtctgctattgaagcgtatggctcggttcctgggtggttgcttgcccatatcaatgccccctcttttagtagcgatgctatctttgcgggaatgattgttctgcaggcatgctgtgatgatgatattagtgcgctggtgggcgagttacggcccagcaagagaggtaagcgggcgtttgtgtttcgtcgtggcagtatgccgcccagcgatattatcgtactcgggcaggctctcattactcacggcatcatcggaaaggcgaaggtgagaaagcttcagcggcatgagtcgaacagctacgtgaacgagttcaaagcgtttgagtacatcagcgctgcgcgtaaccatttcagcatgccacgcgccgaagcagagcagttaacaatgacagattttcaacttcttctggcagcaaagtaccctgatcagaaggggtatacgcgagaagagtacgacaacgcagcagatgattactttgctagaagggcgcgacgcctggctaaggccgcgtag

SEQ ID NO: 448142 - DNA, 1905 bp, Serratia marcescens
atggctaccacaccaacacaaaaacctatccctagcaacgaaattattgacttgaagtttaatgccgagaaaatagatgaagcggtgaattcagactctgaaacctacatagataggtttggaattgagaggtatacccttgatgggattagaaagaatctggcaccgctaggcaaagcatatacaaaagaacaggccgtatcggcaatcgcatcaggagaaataaaggagggtgatttcttcttcatctggtctgataacgatgaaactatcgctgaccaatataagaatgtatcgggtgtggcagaatttcaaggttatgggtttataagaagtaagttggtaacaaacctatatcaggaaattggtatagagttatatactcaatcggctaatgtagataattattatgtggctgctggtggtgctaatgctggtaagttgttaaaaacaaccacaactccaacagtcgtaacatatattccagttaaaccaggacaaacatacattattaaatcaacagacttcaggggtaattactttgccgtggcactaaaagaagataatgagttaactgaaacaacccttgggttggcaatgttatccggcactggaaattatcgttcattccaagttcctgctgatagcgcagctaaatatgcttttattaatgtagtgattagcagtggtgggtttgacataagatcagaactttctatcacatttgattatattaaagaagtaaatggaattgagatatatgatgattattcaagaaaccatttgattgatgatagcgttagcctcatagaagaaactggtggccagctttatgattcattaaataataagacaggatattttgttagagcgcttgggggaaatgcaggtaatattgaagcatcaaatggagctatactaaatatattccctgtggttcctggtaaaacttacactgtagcggcatcgagtttcacgtatggattcttcgcgatcacgctaaaaacagataaccagctgactgggccaactttggggctcgtgaccctgtcagggtctggtagctctcgatccttcacagttcctgccgggagcactgccaaattcgctttcattaatgtgtatctgccattacagaactgggatattcgcccaggcctacagatcagcgggccaattcaaaaagtgagcgggataaaggcatacggtatttatgacgaaaccgccagaaagcagattgcagatctggagaactcaataccaaaaatgtccgttctgactgggaaatcgtgggctattcccggtgacagtatcacagcaaaaaatttcaggacaaataaaaattaccacgaatatatatctgataatgtaggcggaatgactgtatataactacggtatcagcggtacaggttactatggacgttcaggggttgcggatacaattactgaaacacctgattatataacggtgtttttcggtacgaatgactgggggcaagagaataactcgaaaccacttggcgccttcctcgataccggtaccgcgacgatttctggttgcatcaatacgtgtttgctcggcctgatcacgaagtttttctcgaagaaaatagccgtgtttactccgctgccgcggctggacaactggggaagcaacgcggcacctaatgccgtcggctatacgcttgaacagctttctgcgctgattcaacgatatgctgcgcactactcgatcccgtgccttgatctctaccacgagagcaacttgccagtgtacgtaccagcggggaattcctactatttcacgtacccaggaggtagttcgccggacggcttgcaccctaacgacgcaggacacatcgtcatggccgcgaaaatccaggcgtttctcgagtcgatgtaa

SEQ ID NO: 448143 - DNA, 252 bp, Serratia marcescens
atgaaagcagcagtagataaaaaagaattactccggatggttcctatgtctgagtcaaccattaactcactggagaaggctggtgagttccctaaacgatttgcaatgacaaatcgcaccgttgcatggaacaaggacgaagttgaggcatggcttgatgcacgtcagaaagaattcaccggcgtaaagcctaagcaccatcccgatgtccgccagcgcaagcaacggccagtacaggagcgcgcagcatga

SEQ ID NO: 448144 - DNA, 153 bp, Serratia marcescens
atgattttcaaaaggaaccatgaaggtaaatacattttcacggtcagcggccttgtgagctggacattcaccagctttgaagacggtatccgctgggcattcacggaacggctggcaatagatactgccaacaaaatcggagcgaaattatga

SEQ ID NO: 448145 - DNA, 195 bp, Serratia marcescens
atgggcacctatgatgcataccgaaatatcgccagaattgcgggtgaatgtgaacaacgcggatggtatgagaaggccgctgaagtttgggaaaagtccctcaagcttgcgcgagcagtcgatgttccgtggattaaaactcgcatggagttctgcaccaacgcggccgcgcgctgctggggagtcgagaattga

SEQ ID NO: 448146 - DNA, 1227 bp, Serratia marcescens
atgctttgtagtatttctaaaataaatatactaatcccatactctagaaaaaaagttaatatacaattagatggaaaaagtctgattatcactggtggtaatggttgtggaaaaacaagtttcataacagccatttataactatttgaaaaagggaatagatgatcctaataataatagcatcgaatatttgatgaatcagataaatcattacaaacaccaaatagaaaacattgggcgagatggtgggaattataattactataaggatatgttagagaaaaacaaggatagattagaagaaattaataatttcaatatcgaaacagattatattgacaacaaagacattcggtctttgctcagattccatagtgctacaagacaatccgcaatctcttcaccaaatcaagcaccaaaacactctgttctaattgaggaaaataagcatttccctaatgataaagatggcagtcaattctttgaaagctatttattgagtttaaagaaaaaccaaagctatgcaatagcttttgataaagatgaaaatgaagcaaaacgtattaacctatggtttgataagatacagttagatctgcgctcattatttgaagatccaggtttaggtctagagtttgatacaaaagatgagaagttttatttacatcaagatggaaaagacagatatacctttcagacgttatcagctggatactcttcaatactaagtatctataccgatttaataatgagagttgaaatgtgggaggtctctcctgataatatacagggaattattttcattgatgaaattgatgctcatctacatgtatcattacaaaagcaaatattaaggtttttcattaaatcatttccaaaaattcaatttattgtgacaacccactctccttttgtggttacatccgttgcagattctgttatttatgatcttacagctaatgagcaaatcatagatgcttcttcatattcatatggtgtggttatggaagaaattttcggcgttctaccagattcccatgcattaacggataagcttacacacatagaaaacttagtcaaaaatataaccaaagaaaatatttttgaactagaagaaatcatatcatctttggcatctaataaggataacatgagcgataatactcaagcattccttgactcagtacagttaaaactaatcaagacaaagaaaaatattaggaggtag

SEQ ID NO: 448147 - DNA, 654 bp, Serratia marcescens
atgtttaatgtaataagaacaatacccgcccctgcttcgctgtcagacaaaaaaacttatgacggcgatgatgttcattcagctctacaagaatgttttcatgaaaaatgttatttatgtgaaactaagaaaccattggatataaatattgaacattttgatcctcacatgggtgatataactaaaaaattctcatggactaatctatatttagtatgttcacgatgcaacaatataaagctgataaaatataaaaatcttcttgattgttgttcaataagcgtttgggatagagtgaaattaactcctggattttctccaaaagcaaaaaaattcattattacgccgcaatttcctgacgataaaacaattgaaacagcacagctactaaatgatatttacaacaatgacaatacaataaacaaaagacttacagctcgttccctacgaacccaagtagtccaaaccacacacaaactaacacagcatatgattgtttatcatagcgaagattctacagatgaagaaaaagaaaatgcacttgataaaataaaagttatgattaagaaatcatatccatactctgcattttgtcgctggatgataaaagatgatgaagatcttgataaattattaacccccatcatggactga

SEQ ID NO: 448148 - DNA, 192 bp, Serratia marcescens
atgcttatcgccattcgtgacaaccgtatcactatttattttatcatttggcaaaccaaaatttcgcatcccccttcctctattatcaacatcaattcgattaaaaaaatcaagcagaccatcaaagcggcaattatctatcttgtttttaaagccaccattgatgaaaatgacaggtgtccccatcgctaa

SEQ ID NO: 448149 - DNA, 402 bp, Serratia marcescens
atggataaattcagcgaactgaaagcggttgcagagaaagccaaagagttggctggtattaacaactacaaaaaggggaaggatgccattgttgcatttaaagctgctgctaaccctgccgccattctcgccatgctggcagagctggaagcgaagaccctggaaggcaggggtatcgagcaagagcgggagcttttccgcgttgagcgcactgctcaccagcagcatgcacaggagcttgagaagcgcatcgccgagctggaaaagcgtctggctacgccggtgcggttgccggatatcgaatttgtaaaaatcagcggcattgatttcccggtcatgcgtgctgatatcgttaaaaaggaagttcgtcgagcagggttcaaagtcgagggggatgcatga

SEQ ID NO: 448150 - DNA, 690 bp, Serratia marcescens
atgaaagagcgtccagtgattttcaacggagagatggttcgcgccattatcgacggccgcaagacccagacgcggcgggttatgaaggttcagccatctgagcatttccaccctatgaatatgtcccttgaattggattattccgctcgctggtatacccctggagtcatcgataaagacggttatctgcaaccggctacgggtcaggttttcggcgttgcaggtgaagatgagggttatgcgtgtccgttcggagcggtaggcgatcttctgtgggtgcgcgagacgtggagctcagattttgccaattactatccaaatgatcgcgtctggtatgcagcggataacaatcgatgttcggatatagaagtagtgaatggcgttcggggaatctatagccctgaaagtgatgttcatgtgccatttcgctggcgcccatcaatccacatgccgcgctgggccagcagaatcacgctggaaatcacaggcgttcgcgtggagcgcctgaacgatatcagtgacggtgacgcgattagcgagggctgcagcaccgctgatatgaagagtggcgagtgtgtagctgacgtatttgcgcgcctgtggtcatccatctacggcggtgatagctggaacgctaatccctgggtgtgggttatcgagtttaagcctgtggaggcgcagcatggctaa

SEQ ID NO: 448151 - DNA, 390 bp, Serratia marcescens
  misc_feature (346)..(355): n is a, c, g, or t
atgtcctctaatgttgttgtctctgcgcaaaatttgcgtaaagtttatcagatttattccagcccgatgcagcgtctgggggctttgctgggttatcggggggctaagggcagggagtttgtcgctctggattccgttaactttgagattagaaaaggtgaaacagtcggtattattggtgtcaatggttccggtaaatcaactctgttgcaaatgatttgtgggactttggcgcctacaagcggcagtgtatttactaaagggcgtattgcacctttgttagagcttggtgctgggtttaatccagaatttacagggcgtgaaaacgtttacctgaacgcctctnnnnnnnnnngcgtaaagaaattacggagcgtttcgataaaatag

SEQ ID NO: 448152 - DNA, 288 bp, Serratia marcescens
atgatcctatcaacaatacagacatttctactgcaacaatctttatatcaactaatcacattcggtaatattcgggtagagacacatctgagctttaataacacatgggaagtactaataagtggtgatgcatttaaagtattcaaattcaatagaacactcaccgcactggatgaagaacaattgtttcagtactcaacactaatagacgccaagatattgcaatacatcattgatcagcattatgcactggagaacttattatgctactgcaggacttcaccataa

SEQ ID NO: 448153 - DNA, 630 bp, Serratia marcescens; identical to SEQ ID NO: 447722

SEQ ID NO: 448154 - DNA, 228 bp, Serratia marcescens
atgatgactaatttcctatcagtcaccggttgccagcatctggatagcggtgccaagcgtgtttaccacctgaccaataaggccacggtgattgagtatccgcgtttgcctgtgcgttctcgctttcagttctatgacccgcgcggcaacaaggttcacaccaatggcgagcgtgtcgcgatgaaacaggctgttgaacgccataaaaaactctggaggttcgaatga

SEQ ID NO: 448155 - DNA, 621 bp, Serratia marcescens
atgaaaactttcgcctatgcctgggcaagcggcctgatccagttcgggaagactgtgccagaaggcgctttgccgatcatctccgggcaagaagatgatgtgaaaaacatcctcatcgctatttcccgtcattcacgcaccaacgatgacttattggtgcctggcgtaccggaggcagccaaccagcatctggcattggatgcctttatgaaatttagcgattgggcgcgccgggactacgcacaattgatgaaaaaaagggccggcagttccgatgaggaatattccatcgagatcatcggtcgcttcactagcggcacctatgttgcccgataccagggtaaacaggccagcaacaccgccagcgcaaaaggcgctgtccatcggctggcgggcaagatttttggccccatgcaacgggtgacagtcacgcggatcagcgccggccgggaacatgcggccggcacctttcgggtcacggtcgatgaaacccaaaaatgccgccgttgtggctgcacctggcgcaatgcgtgtgccggggggtgccactgggtcagccctgatttgtgcagcgcgtgtgtcgattcaatggattccccggaggtaaccgatgagcaatga

SEQ ID NO: 448156 - DNA, 249 bp, Serratia marcescens
atgaaaaatgtcctgcgcaaaaccagcgccaaagactttaaccggcgttttccggtggggtcgcggtttcgctactaccccgttgtcggcgtgcctgactgcgaagaagtggtgacgcgctcggtggcctggcacctgcagaacggtaagaccgtggtgcgggtcgagggcaagattggcggcgtttccgtctaccgtctggagcctctggaggccttccatgaagtaccccaagggcagcgtggttaa

SEQ ID NO: 448157 - DNA, 222 bp, Serratia marcescens
atggctaggatgatccgcctggcaagcgaccattacgttgcctacaacacaattggcgatatgcatattgacagtaatcgccaggtcaaagtgctgttgagtgacgggcgtattgcattggctgaacagagtcacggacagaccgcctgggcgcgcctggcgcagttggtggatgaggtgaatatcgccagcgcgagtgatgcgcctggctcactgcagtaa

SEQ ID NO: 448158 - DNA, 792 bp, Serratia marcescens
atgcttgctagcttgtgtgactatgaaaaagtttatagtttagttgctagactctatcaggcagaaaactcttcttatcacaataaagttaatgaggaattcgttgtaagagaaattaagaaggcagggcggttggctataaccctccacaaaatattacttccattgttttttattgttaaggatgacaggttgtctttaaatgaagtcttcccagttattcccaaagggcaatataatttgaatgaggtacgtgaggctatatcgttcttcaaaagtgtatctaattgctctttgttagaatatattgataatattcgtaacaaattaaacagcacatatccccgtgaaataaaagaactaataggatgtaatttcccgacggaactagttaatgctgactcgagtttggaagcgactattttgggattgtctggatttaagagggtttctgagtgttctccaattttatctgaacttcttcaagttaataccaatgagtttttgaattggatgaattacttgcacggggagaaaaaaacctcaggcacaaattatttaacatgccactcatcaaagggattagagtttgataatgtactgattttactcgaagattcaatgttacatgataagaacattttttctgaacttctatcttcagatttaaacataacgttaaatgacaagttagagagagccaggcgtattttttatgtttcagtctcacgtgctatcaagaatgttagtatagttttgttttctaaaaatgctgttaattttcaaacgtaa

SEQ ID NO: 448159 - DNA, 300 bp, Serratia marcescens
ttggctctgctgcaattcacgggagagcttgtcgccgagctgctgcgccgcctgcagatcgcgcagcgctttagccatggccagggtgtgctgctcggcctgctggcgcagcgcttcattcagcgcagacttatccgcagccaactggccgatggtgttcttggctttcgtcaggtcgccctgcagttgagcgcggccggcagattgccccaggtaatacgcaccaacgccaacgccgagcgccagcagataggaaaggaaatgggtttgcaggtgactaagcaccagtctgagggttaa

SEQ ID NO: 448160 - DNA, 300 bp, Serratia marcescens
gtgcgtaaaaaaggcaaccggcgcggcgaactgctgatcgagctgctcggcaaggagacggccgctatcatcgaaaaacacttcggcagtgaaccgctgtatattccgcgctgtgacagcgcgttgcgtgagtggcgtaatcgccgtttcatcgacgagcacaacgctctggtggcggccggtgaaagctcccgctttgcgcgcatcacgctttgccccaaatacggtgtgactgaccggtgggcgcaaaagctattggctgagcgacaggtatcgtcacagcaattagatctgttatag

SEQ ID NO: 448161 - DNA, 300 bp, Serratia marcescens
gtgcgtaaaaagggcaaccggcgcggcgagctgctggtcgaacttttgggaaaggagacggcaaaggtgattgaaaaacacttcggcagcgaaccgctgtacattccgcgctgtgacagcgcgttgcgcgagtggcgtaaccgccgtttcatcgacgagcacaacgccctggtggcggccggtgaaagttctcgctttgcgcgcattacgctttgtcccaaatacggcgtgactgaccggtgggcgcaaaagctgttggctgagcgacaggtatcgtcacagcaattagatctgttatag

SEQ ID NO: 448162 - DNA, 156 bp, Serratia marcescens
atgcagaacaacaaaacagagatcctgactgcgcttcagaacaatcagaccacaatcattagcaggattgataaactggaggatcgctcaagagatgactccaagacgctaaataagattgagctgctgcttgaaagcaagcagggcaaaaagtga

SEQ ID NO: 448163 - DNA, 1455 bp, Serratia marcescens
atggctacatggcaacaggctggtaacgctggcggactgctggcagggattggcggtatgaatgccaatgcccctcaggccagcgatatcaataccacactaggcctgatccgcgataacaatgacatcgctcgctccggcgcaaacaacgttgctcttactgggctgcaaggactggcaggcgtcgctggcgcaatgcagcagcagaagatgatggaaacccagaaagccttcaaccaagcgcaagcgaatgcgtggaagacgggagacacatcattactgagagattttgctgctgcaaaccctgcatttgtcgctcaggctcagcaggcattttctggattaaaagagcaacagcgcaacgaccttggcgatttggctatgcgggcaaacgtagccttgtctcaagggccagaggtctacagtaaattcgtttcagataacaaaagcagccttcaggccgtgggggctaatcctgactggatgatccagactggagtacaaaatccagaccaactatcacatatgcttacaacgatgagcatgggggcattgggaccggagaaagcttttgatgtgatggataagcaagaagggcgcagactggaacagggccgactggatgaaagcattcgcagcaatcaggcaagtgaagcaaacacgattcgtgggcagaacatcacgatgcgcggtcaggatattagcgcgcagaactcaatgcgcagcgccggcggcgcagttccagccagcgttagagaatatcagtacttcaacagcctttcccctgagcagcagcaaacatatctgcgagtcagggggcggccaggtggtgatgctgacaacacagtccagttatcggatggcagaaccgtaaccgtgtcagggaagttgcacggccaaggtgccaatgcattctatgaaggcaaggatgataacgggaatatggttcgagtgcctgccagtgccatctctgccccgccaacagctgcagcaagcgcacaaaattacgcgatgaaaaaggatcttgatgatatcgaaggtgcaagtcttaatagcctcgatttcatgacgggagttactggtggtactggtactccagcattaggcgcagatgtcaggagtcgcctgaaaggtggcgatcagagaaaactttataatgcaacccaaagaatccagggaagaatgcagaaccaaggcgtggccgcagctagagatatgggagccagcggcattaacaccgttgcagaggcaaagatgtacttccaaggaatgccgcaatttgatttttctagcccagaagccgcgcaaaggtctgctaaagacattcgagagtacacggacaattacaataagcaatatcaggtcaatgtaggtggaaagcgccaaggtaataaccaagagaaagcgcagctttcagatgacgatctgttaaacaaatatcttggaggcagatag

SEQ ID NO: 448164 - DNA, 204 bp, Serratia marcescens
atgaagcgtatggacaagattagagaatggctcagctactggtttggagggatcacgacaatgggcggcgtcctatccctgaatgactgggcaatcatcgtcggtatcgcgtgtaccgtgggaacgttcggcatcaattggtattacaagcgtaaagagcgggaggataggctaaatggcaatgtctccggcgctaaggaataa

SEQ ID NO: 448165 - DNA, 297 bp, Serratia marcescens
atgactgattacagcaagatgagtgatttagatattaatgttctcgtcggtgaaattcagggattcgcaaacaaaatagcggctctgaacggcatgagagactactgcaacaacccggcagacgcatggccgattattgtcggtagcaaaataaacatcaggttcggtgctgaaggaatggcttgcgaggctcagtttatgcagtacggacatgagagtgttgagtactaccatgttaacccactccgcgccgccatgattgtcttcctcatgatgaaggatgccgaaaaatgctaa

SEQ ID NO: 448166 - DNA, 126 bp, Serratia marcescens
atgaagaagtttattgaggcgctaatggtcattttcataaccagcacggtcgccgggttcggattcgtaggtggcggggttgctttctggggatggattaaattcttaagcaagttatgggagtaa

SEQ ID NO: 448167 - DNA, 189 bp, Serratia marcescens
atgagcaacgaaccaaaatttcctgagcttcccgtagaacttcaggttgcattggtaaatgccgcaaccgcgatggcgacgacaaaaattagcgcgttaggcagcaagtacaatcagtgctttaatttcttcgaccgcgagtacaagttgatttgcgattcactatacaaagagaatcgggggagataa

SEQ ID NO: 448168 - DNA, 267 bp, Serratia marcescens
atggataagctacgcgaagagtttgaaaagtggtggcaacaagaagactacgacaatcgactaagcaacattcaaggcgtgatgtttaaccgcatcaagcaagggatgtttgcagcatggcaggccagccgagccagcatcgtggttgagctccccaaagcagcactgacctcagagtttagaggcgataacccagaatatcgaatgatggcattcgacgtgaaggagtccatccgctctatcggcctatcaatcaaaggggagtga

SEQ ID NO: 448169 - DNA, 822 bp, Serratia marcescens
atggaacctggcatctactacgacatatcaaacgatgactatcacaaggatgaggcaataggttcaacgaccattaaggcaataagtgtaagcccagcaaatctttattttaacccgttcaaaggaagtaaagcggcgcagattggcacggcaattcatgcggcaatccttgagccagacatgttcgaaagggatttcattctggaacctgaaattacctcccgggcatcgaaagagtataaggcgctggcggtcgataatgacccagaaaaaatactcatcggtagcgaggtggaaaccataaacagaatggtcgagtcatctcgcctgaatgaggattttatggactacctcaaagcaaaaggccgttctgaagtttcaatgtttgccacctgtcctgtaactggcctaaagcttaaatgccggttcgataggctatctgatactcacccttacccattggatgttaaaagctgtagggatgccacagagcgcggattcagtagtgcattcgggcaatatcactatcacgttcaggcagcattctacttgtatgtgctgaagcttgtaacaggccgagaactaaaccaattttgcttttttgcaatagaaaacagcgcgccatacaaaaactgcatgtactacatcggcgaggattcacttgagctcggacgtaaaacaatgttcgaggccatgcagaaattaaccgagtgcttgggcgacgaaacgatgcacaccgagggaatggtgctgccatccagcgaaataaacgtcccatcctatctattcgatgatgatattgacgacgaggtatatctctaa

SEQ ID NO: 448170 - DNA, 585 bp, Serratia marcescens
atggacctatcaagaacgattgtccctaaatctgatcaactcaacttcgaggatgttcagtcacaatgcattaccgccgtagttaaatccgttcgccaagggaacaaagagcagccggtatttattgacctcgaaggatacgaaggtcgcccgtacaagccatcaaaatcaatgcgccgcgttcttattggagggtggggtaatgatggtcattcgtgggctgggaagtctttgacgctgactggagacccaacagtgaagtttggcggcgtagcggttggtggcataaagatttcagcaatgagtgatatcagcgataacttttccctaatgctgactacttcccgcggtaagcgttccgagcatcgtgttaggcggctagaagcaaaccaagcaaaaaccgagaaaatatctgaccctcaggtgcttcttagctggttcgcagaggaggccggaaagatggatttgccgaaacttgaggcggcttactctcgcggacagaacgcgctagcagctcaccctgactgcttgagcaagctcaccgaaatgtacagcgccagaaaatcagacatcgctgggatgtaa

SEQ ID NO: 448171 - DNA, 294 bp, Serratia marcescens
atggcctgtaattgctttgaaaaaacagccgtgctgttcaaggaacgcatttctgaaaaggtcggcgatgcccttggcgagattgaagaggctgggttcgagcactcactctacaacttcagcggtggtgatcattccccggtggcgatgaattttaaattccgctactaccgcaagcgcaagggcggcggactggcagccaaccagaccaaagcagatcacctttgcatgatgagctattgccccctctgcgggactaaattcgaaggcgacgacccgcgggaggccaaatga

SEQ ID NO: 448172 - DNA, 186 bp, Serratia marcescens
atgaaagagcgcccagtgatgccagcaaatgaactgaagccttgcccgactatgggaagcgagtgtcggggttgccctgattgccccggagccagcagcaccggttcaaagagtggcgatatcaccaacaaagcagcgcgtgaagaactggagctgtgggccgagtcccaggagaaagcattatga

SEQ ID NO: 448173 - DNA, 576 bp, Serratia marcescens
atggataagctgagcgaactgagcaagccggtggcgtattcactgcgatttcggaatatgcataccggcgagcctgataaaaccatcaacgcaaacaccactttctctacgcttgagaaggccaaggcgtatggcctggggagtcggtatgtaacgcaagacgacggcaagatagttagcgttcgtgacccgtcacaagaccctatcgttgagccactctactcgcaagagtacgtctccgccctagatggtgttgctcaatattggattggagagtctgccggatggaagaaacgcgccaaggatgcagagaagcgcatcgccgagctggaacgcattctcgatggggtaacgccagtgatgatcgccggaggctggacggcgaaaggaatcagcgattatgcaaaatcactggaatccaagctggctacgccggtgcggttgactgatgagcggacactatgggcgggtgaagatgattatgacaccggccacgttaaaggctggaacgccaaccggcttgagcaagccgcgctgctgaaaaagcagggcttcaagtttgtgggggatgagtag

SEQ ID NO: 448174 - DNA, 1200 bp, Serratia marcescens
atgactgatacagcatactcaaaagctctgcaaaaagaggtagaccctgagcaatatgtagcattattgggtttagatgacagcacagtacatgcctttgctcgtgaagatatagtctgccctatatgtgaggctaatggtggttcttatgtaagagcatctgtaaacggtgcttatcgcaaaaaagctcatttcaggtttgtgggagataacgatattagcgcacatcacccatcttgtgatttttatgccgatcggctttctaatgaggtcagacaacatcttgtgcagttcactacggatcgcacgaaaatcactcatgtgatcagaacgatggtttgcgcaggtattcaggaaaaaatcttcacgcaagaagcgatgcgtaatatgaggcaatggttctttgctaaacggtgcaagtcaacattcgaaatcgccttgagtgaagagcaaatcgattggttagcatatatcgttgcgctgcctgtttatccgtatgcgtggcatagagatgaccttttacctttccacccaatgcaggctatcgtgcctggtttcgattggaataaggctatttcgagagaaactgtaagattacatcaaccgacgttgaggcgtttagatgaactaaaccttcaccgaaagcatattgaagaactgcaaaattatatctcgaaaacccaacatgctacacttttagaccctgagcttttgaaagaggagtatgcaaagaccctccagttaaattctttcattatcaataactacctagaattccagaataagtcagttaaagacagagcaaatggagagggaaaattactcgcattttccgctttgctgttgttcgttgccaactgggatattgatgaggcaattgcgcagttttcggtcattgccaaggttcggcacgttgaggattggctcgccggcaacttcattgggttgaacccatactttaagttttcaattgccaacacagctaaaacactacaggacagctggccggttgattaccaggaacttgaaagatggcaggttgaacagtccatgagagatacttatgagagttatagccttacgcgatcgcttccgcttccctctctaatgcctgatatttacgtcacgactcatttagaaagagctaggagagaggcagagataaatcgcatgatagaaaacgacatcatcgacttttag

SEQ ID NO: 448175 - DNA, 1179 bp, Serratia marcescens
atggccgcccgtccgcgccggcgggaaaaccggcatttaccagatcaactttatttcgataaagccactggtgtttaccgcttcactctggtcacggggaaacgcaagtctctgggtaaagaccgggcactggcaatcgatattgcacgcgaatacaacaacagaatgcgtccagaaaatgcagtatcaatagactcacttatcagggaatctggaggtatacagggagaagctctccccttcgctgagcatgtagatagaataatggcgagagctattgaagatgaacgtccatccgacaatacgaaagatgattggaataatgatgccaagcgggtgaaagaattttttgtaaatataccggcatgtgatatcgaactagagcatgtcaactcttatataaaagaataccatgcagaagcatcagccaacgttcaaaacagaaaggtcagtttcttaaagaaactattcagttacgctgtagatgaatcgttaatgcttgataacccggccacgcgtaagaaaatgcgaagaacagatgagaaaaagagacagcgcttatcccttgagcatttcttggctattcgtaacgcagccttaccatggttacgaacagccatggatctggcattacagacaacgcatgctcgccttgaggtatcccggatccgctattctatccgtgaaccaaagaatgggatctgtgggtgcgtttggttggaacagcccgtgaatggtatttacggaacactatatattcaccggcaaaaagtacaaaagaaagaggcttcacacgttgccattccgatcggggaggttttgaagaagatcatcgaggaaagtagagacaatgtagctagcccatatgttgtgcaccgcatacctgaccggaacgtgaaacgcagcaaagaagttgctcacccgactcaggtggcgcctgattacctcagtcgttctttttccaaattacgcgatcaactcgggttatccgatcacctgaaaatggaagagcgaccgacattccatgagatacgtgctttagcggctcacctttttgacaaccaggggatagatccacaagggcgaatggcacatagcgacgcaaaatcgaccaaaatatacacccaaaatcacatcgattgggtggtcgtcccacatggggagatctctgtagggtag

SEQ ID NO: 448176 - DNA, 270 bp, Serratia marcescens
atgaccagaccaactactgcgcaactaaacgctgcttatgaccagtttaatttttggtacgacaaagccaaaaaactggatgaagaattagcgaaagcagaagaacgcatcgccgagctggaagccaagctggctacgccggtgcggttgcctgagacgtattcgcccgagccgtggatggggccagacccaagcggaacctggttggaaaaggaagacgtgaaagactcaattcgcgccgctggcttcaccgtacagggggatgagtag

SEQ ID NO: 448177 - DNA, 630 bp, Serratia marcescens
atgtcggataatgccaagcactacgaccatttcaaagtcgaggggccggccgttaagacgctggtcgagggctttaaagcaatcgacgccaagcgccaagccatcatcgccgggctgcaagccgagttcgatgcggtagcgcacaccaattcatacgggttcggcgacaaagggagccgcgtatgtaacttggtgtggcctgctgatcatgaattcccgtgccagaccaccatcaagcatcgtacttatttcaaagatgctccggttgtcatcgcccgaggaaagggtaacaccaaggaaggacgggaattcaacaagcagctggatgcggcgatcgccaaagcaaacagcgctctggcagacctgccgccgtggcagacctacatcatcaaccactacggcatcatgcgtaccggattcggtaccggtacgtccagaggcactcccatgctgagcacctacggcggcctctgccctgggcgcgatgactgcctgctgtttgccatcccgaacacgaaatcgcgcgacggcgaggttgggcacggcgacgtgatcatccctccagaattccagaagctgacctatggccagtactacgatctcgtccaaccagagcgggaggaagtatga

SEQ ID NO: 448178 - DNA, 3531 bp, Serratia marcescens
atggctgttttaatcagcggtaaactcattggccctaatggcgacccgcgcccgagtgtaacgattatgctggtggcagtaaaaacctcatcggcagttgttaaacaggcgccttccatttcgacaactggcgcagatggtagttactcgttatccgtcgaggttggcacacacaacgtaatgatcgaggcacatggacgtccttttgagaaagctggtcaaattacggtttacagcgactcaaaaccgggaacacttaacgattttctgaccagtccagggcaggatgaattaacgcccgcgattgtggcaatggtagacgatatgcgtgcagccactgctttatatgctgagcaggctggtattgctcgtgatgaggcaaagtctgcttccgaaaacgcacagaacatcgcagacgccaatacctactacaccacgccagaagaccctgacgggacgattgcgggtattgctggtactccgattgggaaaagtttccgtgttggtcttggtgtcggaaaagggtttaaatactatataaacaataatgattccgctattgaaattagtgagattgcaggtgctaacgttgtaaacagattgcagacggatttttatgcttatgaaaaaaagaatagccatctaaatagtgagctattctctatgcaggtatcatctattgattttaatgagatgggtaatatcagtcttggtgatacatcactaatcagaatcactgacattaacacgcatgatgcattcttaagcacaattcagttctcacaggtttcatccccatccctgatgaaacgctggtatattccaaatcatacacaatattctaatggcgtaatttcatcgaattatcagcctttctattatcagagtttgtcattcaatgagttttctgagctgacagaacgctatgctcgagttagatatacgctccctgataattacaatttggtagatgaaaataatcgctatcgtgttgtagatacatccggaacatttaagccatcattcgcaggaacattgacatcagagacagtgtcatgcatatcagcgcatgcgactaaaaatattgttcaattctttgtggtgctgtcagaaattgttagtgaaggctatgagccaaatcaggctggcgttctttcattcattgcagacaaaattgacggcgccttgatgatggcgtactcgggtgtgtatgggtcatatacactgcgcgaagaccaattcgacatcatcattcctgccggggaatataccatcgacgttgtaggtgacgtcggggttgctgcgaccattcgtcagcgtaaaaaactgacgtttgagcccgaagataaatatatccgtaaggttgccgatgtcacaaataacacagaccttaacttcactaagtacccgattgagttgaagtgtacctttgaagaaggtgaagcgccatcgtctgactgcctggtattgctcgatgagaaaggaaacaacatcgattgccagtttgctggcgaataccatacaaatctgcgcaagcagttggatattggtaaacatgctgatggttcgttgaagtctggttcggtgttcttcaatgctgatatcgctgccggtaagcagatttatgttcaattgaatgctcatacgacaccgcagacgcatggtattcacccaaaactgattgcggtaaacgacggctatgatattaacgtcggtggtaacacgttccagttccgtgataatagcaattttctgctgggggccatcgttgataaaaatggcgtggtacatggcatgagccattttgctacttttgccgggttggttggtggtaacgcagatctgacacgcttctcctataagccaattatgcgccttatcagcacagggccggtgttctctgaggtggagtctgtcgtttacaactcggaaaaatacggtcttgatgctggcgtgctaaagctgcgtgtacggtatcggatatttaaaagcggacaggttcaggtctacggtatgtgcaacgtgatgaagcctatccccgttggcaaactgtatgggttcgatattcgattccagaccggtgacaaaacatttgttgcggatgataaatataaaacagcgctgacacctgcggccggcacatttaccgcgccaatgtctctggctgtcgttcgggcttgtggtgatacgcaccgcagcggaactcaatacgggccaacgcggccaatcacggcatcagctggcggtatcggtacgggtggggtgcaggtttatgctggttggcgctatacctcaccaacagattacagcttcctgaattggccggttgagaaagattgggcgtggccgtttgagttttggatggactgcaacgaaagccaggacagcccgcgaaatgtggctattgaggtgttcaatcgtccagttggtttcctcggtgacggcgcgtatccgatccataaacgcaagcttattttgcctgaactggcagaactgtcagagtctatcctggagttttgggacgatgcggcaaaaatgccggactactatgattactatgttgcaaagggcggaaccaaaacatcgtatcaccgcccgtacacgacagagatcattaaattccttcgctaccgaaatagcacgttccagaaactattcagtgattttaaaaattacctgaatgccaactttgggccgttggcaaatctgggtgataactacctgtctgaacgctatggtcttgagtttgcagcaacgtgtgtcatcccacctctgcaatggatgtatttcacagcagtaaaagaaaatgacacaacggcaacttcagaactgaaagcaggcatcaaaaactttgctgatgccttggttgaccgatacaacgcaattggcggtattccgttgcgtggtaaagctcaaacagatatcggtaacgcaaacgctatgggtatgcgtgtgctgggcttagcgctttatgccgggttagatgctggagatgtttacaaaaacacattcactggcgtactgaatcgtttatcaacggtatatcaggtgatcccaggtattgttacagatagccagaatgcgtcaccggcatcagatttgtggctgccgtatcagtcatggatcggttatttcctggcattcgcttacaagctggttggccgtaacgatcacccgatagacaatatcaacctgttgttaagggcaacatctggcgctggggcgctgcgtgagtctgactattgctggtctgaatcccgacgcggacagccgccaactgtggcttgggtgatggcgattttgatgatggataaccgacaatcaacggttaatgctgcggcttctctggcagagacgttcacgtcggagtttgggccgcgtcctggctatccaggccggttctacggttacagcaataacacgtcggaagatccggaagggaaaggccgcccaggtactaacatcccatatttggccgctaaccttagtgatctgtggttgtactactatttctaccaaagcgggctgtaa

SEQ ID NO: 448179 - DNA, 144 bp, Serratia marcescens
atgatggcgatgctggaggtggcccacggcacgaagcccatgaacaacatcaccgccgccgccaggatcaggccggcaggcaggaacacccgcgggttggaacggtcggagaccgaacccatgatgaatttggagaagccgtag

SEQ ID NO: 448180 - DNA, 273 bp, Serratia marcescens
ttgcagacgccctgcagcaccgacgcgtttgacgcgggattctacggtgaaatgatttccgaagccttgttcctgcagcggttgacgcgcgccgacgagcagggcgccgagtcattggaaatgatgtgccacccggcgttcctcgacgcgacgatcctgcagagcaaatactgtcatccgcgcctcgtcgagctggatgtgttgaccgcgccgacgctgaaagcggcgatcgccgaacgcggttttatgctgggctccttccaggatctgtag

SEQ ID NO: 448181 - DNA, 924 bp, Serratia marcescens
atgatttctatatttttgggggccggtttttctaaatgggctttcgatttgccactggtaagtcagctttttgattttaatatctcttaccttactgcctcagaagagaaaaagctctatctaattaaggaggattggtctgtctggatacaaaaaaatccggaagcaacatacgaaaattttgtttattggtgtattaataaatcttctcaccgtaggagcagagttgtttggtatgttaatagaaggttaactgaaccattcattactaggattcgtggtggatattctgctgctatgttcgatgaaaaaattgtgaaacaaaatgaaaggatagtttttttacgtaatttatttaatgagctagagcgggctggtttaaaaaatatcattacttgtaattatgataatattgtcgagtatatcctaggttgctctggatttaattatggtataaaaaatgaaattttagtgggaagaggaagaaatccacaatttccttggcaaaatgcagatgtgagagttactggtgagatcctgctggctaaattacatggctctttatcgtgggacaaatataataaatacaccagcggcaaacctggcaggacagggaaagctttaattgttccccctgctcctgaaaaagaacctccgcttgaattactagatgtttggacatttgctaggaatgccttagccaatagcaaagtcttaattgtttttggtttttcttttaatgcgtatgataatgctttgctgaatctattgagggaaagtggctcaaatttgaaaaaggtaattttgatagatccctatccgaaagttgatgaggccaaatgtctttggccttcggcatcaatagagactatcaaccccttaaatgatattgtttttccggaaaagtggttcgaaatattatga

SEQ ID NO: 448182 - DNA, 954 bp, Serratia marcescens
atgacaagagtaacttctgaatcccacattggcgagctaggttcagcgtttttacaatatctatgtagcaaacaagaagtaatttaccgtccagttaggatttttgatgttggtatagatgcgtttattgagcctcaagtgggcaatattgctacaggagcaatgataggagttcaaataaaaacagggaaaagttttaaaacgagttcaggtcgttattctttcaaaagtgataaagctcattttgaatattggtctagatgcactttacctataataggtgtcgtctatgatcctgaggatgaaaaaggtgtttgggttaatttgagcgatatagctaaggacaggcttaccaataaagggccatgggtaattaatctttcggttcaagaacacttattagactctgacagcttgcaaacccttattgatagcgctgaattaacaaggattaagaaagattttattaaattttcttacttaaccatgcctcaatcgaatcaaaagaaagagaaagattcatttcaaaatttaagcaccatctcatctcatactgcatgggatgaactattagatacttttctttcccttctttatgatgacagaattgttgctgatgctggttatagattaagtttatatttcccgaaggaaaaaagtgattttcgctaccaatatataataaaaagattgtctttgcttaatgatgtccagttaatcaaaatgatattttcagtgaaggttgcattggatgattgttatgagcatgtggcggagcatatatgtaatataatgagatacattccaaatatatgtttaaggttggaaagtattatcttcaacaataatttgagtaatgatgtgaatgctgttgctattcaattgattgaatctttatcagaatatgaacgtcaagatttatgggacatgattagtaataaaaggttgttgtaa

SEQ ID NO: 448183 - DNA, 624 bp, Serratia marcescens
atggcgatttttggctacgggcgtgtttcgacatcgcaacaggatactgagaaccaacggctggaacttgggcaggctgggtggcaaattgattactggttcgctgatgttgttagcgggaaggttccggcaatgcaacgtaaagcgttttctgaaatgctcaataaaatccgtgatggtgaaacgttggtggtagcgaaactcgatcgtctggggcgtgatgcgattgacgtcctgcaaacgataaaggcgctggctgagcgtaatatcaaagtcattgtccaccagcttggcacaactgatctcacctctgctgccggtaagcttctgttgtcgatgctggcagcagttgcggagatggagcgtgacttgctaattgaacgcactcaggcggggctgtcacgagcaaaagccgaaggcaagaagctgggaagaccgtcgaaaatagcgcctgaagcccgtgacgcgattgtagagaaaaagtatagcggaaccagtgtcagtgcgttagcacgagaatatggcgtttctagagcgactatagcgtctatcatgtctttaaacgagagcagagtgtcacagaatgagaaggatgagattgatgtcatttataaggtgttgtag

SEQ ID NO: 448184 - DNA, 1032 bp, Serratia marcescens
atgcaacctagtcagacgtttgcagtgcagcaatttcgactggatgccgtttctgtcgggcagcctagtgagttcgagatcacgttcctgaacgatggtgtgcgctaccaatatggctttgccatgactacacagcgcatcgttagcgaacacttgttggtttacaagtcattcaagccccagcattggttcactcgccgctttgatgctggcacaaataaggatatctacgactttggttccggcctgaaaggccctaagaatctgtgggaaggtgccactcgcccaaacgcactgtttttgtcgatggctgtgcaactgaatagcgaaaccttgcgcccgttgttcgactggttcttaaaccatctggtcatcttcaacgaacaagcccaactgagtccacaggggtcgatcgagctgctcaaacagactgacggacgcaaggagatctgcaacttcctatcttcagctgatatcagcattgccgatattgatgtggaaactcgcaaagtcccagggcaagccattcactttgacttaatggccggtaaaactgaagtgcgatcggaagaggtggaagagcacaaggtgcgcttccatcacgttaccgaacagggcaaggctgtgtttgatattatggacgagtcgaatggcacgcgtaatctactgtttcttgctgcgccagtgctgaacatccttaataaaggactgacgctggtcatagatgaactcgacaatagtttgcatactttgcttgtgcgcgaactggtgcgactgttccaccgccccgaaatcaacaccggtggtgcacagttaatatttactactcacgatacgtcgctgttggatgcaccaaatttgtttcggcgcgatcaagtgtggttcgtcgagaaagaccgtgatcaaacatcgacattggtcagtttgtccgaattcagccctcgtaagaatgaagcactggagcgcggctaccttatggggcgctatggcggtgtgccattcctcgaccacactctggggctaaaacactga

SEQ ID NO: 448185 - DNA, 681 bp, Serratia marcescens
atggctcgtgataattctccaaaacagcgtcaacaaagacagcttgagcgtaagcagaaccggcgagctagctacgaccgcatccttatcgtctctgaaggcagcaagaccgagccaaactatttcagagagattcgcaccacctaccgcttgcatacagccaatgtggaagtccgacccagcgagctgggcactgcacccattcaggtggtgcaatacgctaaggaattgtttgaaaaaggtgaccgtcacaaggacatccagccgcgtgcgttcgagaaggtctgcgctgttttcgatcgcgacgatcatgatagctatttcgatgcgcttcggctggctgagtcactggacggcaagctaaggaacgacgccaagcaagctgtaacttttcaggccattgcctcagtgcctagctttgagctgtggctgctactccactatgaagatattcaggctccgctacatcgcgacgaagtaatgcgccgcctgaaacgacatattcatggttacgagaaaggcgcgggtaaagcatttgcaactaccagtgaacatttggcagtcgctactaggcgtgcagaacgattggcagaacgttttacagcggatactgaccccgaaccttttaccgctatcgtcgatttagtgaaactactgaccaaccttcacacagggaaatga

SEQ ID NO: 448186 - DNA, 1017 bp, Serratia marcescens
atgaagagtcgagaatacaaagctgccgaagcagaccgcaaatcctttaaggtttcagccgggatcgactggctggacatactgatcagcttatccagactgacccagcatcgctatgttcaggaagaattacttaaaatcaccgggttaaaactctgggttgaaccctgcggcctacgtatctcaaagttgacatcatgcgagcaccatcccggtaactacgtcaaaccgtgggtaaaacccatgattagcagcactaacgatgtttttcggattcgcttccgcgatctactggcaaaccatagcgggaagctggaagcagcactcagccaattgcaaaaccgtttcccctttgcgtatgagccgcaaattgtgggggtcgaagtcttctgcgatttctggcacaaagctcggtcgattaccgctacaaatgcgatgacctatcggcttcaaagcgccctgttcagcccgggagccaaagtccgacaatacaatcccgtagttgggcgaaatatgttccttgatgttcagggggctcgtattaatcctgagtggaacctgagaacaggcaacaaatgggacaacatctcatggcaggtctaccacaaatgcactgacgacggtcagaaactccctgttgaaaagcaacgcgctcgcgttgaagtcacgttgaaaggttcagcaataagacgctactctattaaccgtcttagcgacatacaacactttcgatttgaaaccctcgctcacctgttcagatttcgcaaaccaattgagcctgaaatgatggctgacggtgatttgtttcgcttaaccgctatcaatgcggttcgtaaggtgaacgatgcaacagccgaacgcggattgcattctttcaataatatcggacgaagagataaacgtagctggatgatggtcaacggtgacaaacgcctgcgaaaagagagctcccatctgatggttgttagcgacctgcaaaacgccgtcaagggcgctttacgtcgtctccacgtttga

SEQ ID NO: 448187 - DNA, 993 bp, Serratia marcescens
atggcacagttgaacacacgagtaaaagatgaatcgaaagaaaaggccgaacaggtactggcggccgccggctataccttcagcagttacttctcaaccctcacggattatatcgccgaaaccggtagcctaccatttcagatccgctataagccagcagcggtgaacccgcaggaggtattctccgaagccctgcagaaattcaaagccgtctggggaagactgaatcatttcatcctgtcggcgcggtcggattcctctctccctgagatggctattgtcaaggccatgcaggatatcgaggaagcttacaccttctatcggaacaatgaagatctcatcttgtcagctcccgggcagcgcaccggttcaccggcagggggatatcacgcctttccggcgagcctggacggcattaacggtctgaccggagtactgcgtctggcgatcggcaatctgggcagcctggcggtactgacccccgaacatctggagtttaccaggaagtgtattgatgaggccgcgggttacatcaatgagctgcaaaaattaggcggcggagccgtatccgggcacaccctcaaccagatgatcatccgtgacagctgtgaggccattgtgtgcgcgaaagaggcgctggctaaaaatgaaaagggtgaaggtataccgctctataccttcaccatgtggtttgagcgcttcggcaagcaccttgagaatatccgtaccatgcagcgccgggtgggcgcctcggactcaaccgctgctctgaccgatctgtgtgaacagctgaccgccgttgaagggtatctgaaacaaagtgaggcgctgcgccacggtaagagcagcggctatataccgaacgatgagatcgtcgtaaaggccgaagagttgctggaaacgttcagaagccgcgccggtgaccagttggagttgatcccgaggcatgctgattccgtcaatcgcatcgccccccgtggaccgactgattaa

SEQ ID NO: 448188 - DNA, 324 bp, Serratia marcescens
atgcacaaggcggaactgacgcgtcaggccagtctccatacagaatacacggtaaaaaggccacgacgtagtggccttttgattaacatattctcagtcgttcatattggcgtgaacatattcatcaatcacgccggcaaccacacccgcaacggacgtcatccgcgtgggataaaagtcctcaaacttatcgtgcgaataaacgacaaactgacaatcgccggctacatactgaaacccaagttctggggccggctcttgggtgagagccgggcaggtatacggcccgtctttcgcagcgagaaagagccggtgtgggagtga

SEQ ID NO: 448189 - DNA, 756 bp, Serratia marcescens
atgagtaaaaagaaacggggtaaatgcgcggcggcgtggcgattcttccgttcggcagatccgctttatcactggattggcctcagcagttttgcgattttgttggtcaaggtgctagttctgaacaatatctccgctccactgcgttttatgtctgcggtcagtccggtagtggaaggtattcttggctcggtgatcgccagctacattttttatatcttctgcattcacccgccgctttatgcggaaaaaaagaccagcgcctcctttgttaattctatcctgacacggatatcaaaaaattttgagcggcacctgacggggatctccgccacgctgggctatcactcaacgtcggatgaattttttagtgcctttacggggattgaccctttcagcagaaatgcacctttactcgttcagttaactccgaagcaggtatatgcagactggtttcagtattttcagaatgaaaatgtacgtttacaaaaagagatagagcgtctgatgaattcgcggctgctcctgaacactgaattgatctacaccctcaatacaatcaacgactgcggctggttcatgattattgaaagtatggcaggcatgaagggccaaatggcagtcaaccataaccccttcatcaatccagatcagccagccatttcttgctgcacaagcatgtatgacctgaaggaattaatgaaaagcctgcaaccggtaatcgacgcaacaggaaaactcatagattgcccctga

SEQ ID NO: 448190 - DNA, 423 bp, Serratia marcescens
atgctgagtctggagccggcgaacggtctcagtgaggctcatgcagtgggcctttacagccgggtatccgtgtttcaggacgaaagcggccagcaaggactcagtcaggtcttgctgacgctgcgcaccgagaatacgcgggctctgccggcaggcgcattcgatcagtttgagctgccgtactgtaatggccagatcctgacgcccgatccaggctatggcgccccgaagattttccccaacaatgccctcggcatggggttccgtttccgggaaggggcctgctctttgcactgctacacggtggaggacgcccggatcggtgccacccagacactgacggaagtggccgaagcgctcgtcagtaacgttgatgctcctctccgcgcctatgctgcaacccttcctgtcactattcgttaa

SEQ ID NO: 448191 - DNA, 330 bp, Serratia marcescens
atgttgcagttccttttatcttatggcaccgatccacttctgctggatcaacccgaggatgacctggactgtctgatgctaagcatgagcgttatcccagccattatgttgaacaagaaacgccgccaactgattatcgtgtcgcactctgctccaatagttgttaacggcgatgctgaatacgttatcagtatgcagcacgatcggacaggcctgtatccgggactctgcggtgcactgcaggaatcttcgctgaaagcactgatatgccggcaaatggaggggggagaaaaagcgtttcgttcgcggtatgaacgtattcttagttga

SEQ ID NO: 448192 - DNA, 2166 bp, Serratia marcescens
atggtaggttcacgctggtataaatttgattttcataaccatactccagcttcacatgattacagaaaacttgatataacccctagagactggcttctggcttatatgaggcaacaggtcgattgcgttgttatcagtgatcataacagtggggcctggatcgacgtcctgaagactgagctggcaaacatgtctcaggaggccagtgccggagaaattgctgaattccgaccgctgacgctgttcccaggggtcgaactgacagcgaccggaaacgttcatatactggcggtgatgcatacgcaaagcaccagtgccgatgtggaaagactgctggctcagtgcaacaacaactcccccatttcgcgtgaaacccctaatcatcagctagttcttcagctgggtcccgccggaatcatcagtaatatccgccgtaatccagaggctgtttgtattcttgcgcacattgatgcggccaaaggtgtcttacaaagtctgactaatcaggcagagctcaccgcagcttttgaggcaaaaccccacgctgtagagatccggcatcgtgtcgaggatatcactgacggtactcatcgacggctgatagataatctaccgaagctccggggctcagatgcacaccatcctgaacaagctggcgtgcgcacctgctggctgaaaatgtcgtccccagattttgacggcctcagacatgccctgctggatccagaaaactgcgtattgttcgatcagccccccccggctgagccggcttcgcatttaatcagcctgaagttcagaacccgtcactgccgcccagcagctcaggaggcggcctcggtggaattcagcccgttttataatgctgttataggctccaggggcagcggcaagtccacgctcattgaaagtattcgtcttgcgatgcgcaagactgaggggctgactgcagctcagaggcagaacctcaatcggttcagtgagtcagggatgacaacggatagcttcatcgaatgtgtgtttcgcaaagagggtacggattttaggcttagctggcgacctggtggtaatcatgaattacacatgctaagcgacggagaatgggttcctgacagccactggtcggtcgatcgttttcctctttcaatctacagccagaaaatgctctacgagttggcatcggacaccggcgcattcctgcgcgtctgtgacgagagtccaatggtgaacaaacgggcgtggaaagagcgctgggatcaactggaaagggactatcttaatgaacaaatcacactgcggggacttcgggctaggcaggtaagtgcgggctcgttgcagggggagttatccgatgctgaacgtgccgtcggccagctgcggtcaagcgcctattaccctgtctgcagccagctggccctggccagggctgaactgtctgcgtcaaccctacccctggagcattatgaacagcatgttgccgctattcgggctctggcggaagaagctcaaccgttattttcaatcccgccggcaccttccggcgcgttgacggaagttatggcgcgcctgtcgtctgttcaacagcagtatggtcagcgcctaagtactctcctggcagagtattcagcagagctcgccgacatcagaagagagcaatcttttacagcgctcggaacagccgtgagtgatcaggaagcagctgtagaaagtgaagctgatgccctgcgggctcagggactgaaccctgatgtcctcaacgaattgatggcgcgctgtgagtcgctgagaaatgagctgagaagctacgacgggcttgacggtgcgatcgcagcctcagaagtacggtctaatcagttgctggatgatatgcgaatccataggatgacattgacagataaccgtaaagcgtttctttcttccctctcgcttaacgacctggaaatcaaaatcctgcccctttgcgccccgcatgaagacattgtatcgggttaccaggcggtaaccgggatcggtaactatgccgaacgtatctacgataacggtgacgggagcggactattgcacagctttataagccagcgaccgttcagcccgcagccagctgcgacagagaataaatacagggcgctggaagagctgaaagcgctgcatcgggatatccgccaatag

SEQ ID NO: 448193 - DNA, 1146 bp, Serratia marcescens
atggacaaaaaaaattgtaaagttaaacctgttgttgtcgatttattcgcgggagcgggtgggttctcgcttgctgctatcgaggcaggctgttcaatcgcagttgctatagagaacgacccttatgcggtggaaacctataagaaaaatctgctaaaatatgaagctgcgagaaaggtaaaagtattagataacagtatattagattacacacctgaaaccgttcgtgctgaaaatcttggtgatgttgaatgtgatctcctccttggagggccaccttgtcagggtttttcgacacatcggatattagatgcgggcgtggatgatcctcgtaatcagttggttcttgcctattttcggttcgtcaaagcgtttcgaccgcgcgttttccttatggaaaatgtgcccggaattctttgggaacgccacaaatcttatcttgataaattttatgaagaaggtaagaaggcaggctaccaggtacttgagcctgtagttttagatgctcgcgattttggcgtaccgcaacgaagaaaaagagtctttattttggggattagagatcaccaagacatgccggacttcgtttggccccctgaggcaacccacttcgcgccaggaaaggcagaacctgggcaaaaagtctggacctcttgtgcggatgttttcagatctgctccaaatagggatgaaaacgacatccatatgaaccatggctctgcgttggtggatgtatttcgtaatactcccccgaatggaggaagtcgcaaagactctggccgtattcttccgtgccataagaaacatgacgggcacaaagatgtatatggtcgaatcaatccggcagaacccgcgccaacaatgactacggcatgcattaatccatcaaaaggacgctttgtgcacccgacagagcaccacggtattactctaagacaagcggcaaggatccagacatttcctgatagtttcacttttattgggggccttactgccgctggtcgacaaatcggtaatgcggttccggttgagcttggcaagcacttgatccaatatattaaaacctatttgattgataaatcatttgaccaggcgcgagtcgacgtaccaactaacgccgaagaacacgaaactgagaaagtatga

SEQ ID NO: 448194 - DNA, 210 bp, Serratia marcescens
atgaactaccgcgaatattttcgcctgttgcggaaaacgcgacaggcgtcattcgtaagtttttcctttcattattgtttccctgcgccttggctgaaccgcaaatttaacatttgcgacgcggcaaacgcgttaattcgtcgggctaatgcggatggactgcggtttgtgattacgctcaacattcacgtgttattatttttttattaa

SEQ ID NO: 448195 - DNA, 960 bp, Serratia marcescens
ttgcatgagctgcaaagtgcacttgttgattggaagccaacgccatctcgtttgctttcggctaaatatcgtcatgaaattagccgaataggagcggaggttgaggatacgtctttaaggcagaggcatgcttttgccaagttttacgagacaatacgaaaaccaggaaaggaaggtcttcctggggcacaaattgagcttcttcgccattacaaattaaaagatcatgtttctcgtcaatctgaaatgctatcttttttggtcgaggaaagtgttgccgattttgggaagagaatttacgctgccgatgaattaaccggcttcacttttcatggacactataaggtaaacttagataatgagaaggataaaaaagaggccatcagccaatacaaccgttacgtttgttgtctgccatcgagagatgatatttctcgaaaaataggatccgaacaattagatagcggtcatatttttaagttaggggatacttggtgggtgtgtgcgaccccagcttgtgatttacagccaggccaaggaacgattgcttttaaaaaaggcggtgactcaagcttacgtccgtttaccgcgataaagttatatccagtcacgaatttagatgaattaacttatcaacatattaatagcggttcttattgctacgttgagtatgatgggaaaatattagggctaggagtgaagtatccaaaagatgactctagtactcccgcaattcagaaggtcgaatggcgtgcttttgttgctaaaaatggtggggtaattgaaggtaggcaactttctttactagagttgcagcttgaactagatgatttgaaaataaaaagcgataataaagaggctgaggttgttgcaaagcttaggtacgaatatgcacttaactacattcaacgtgtaggggcaagtgtaagtcgtattggtcttggatatgtagttccataa

SEQ ID NO: 448196 - DNA, 594 bp, Serratia marcescens
atgtcaacatcaaagtacccaaacgagatcaaaataaatcccaatatgggtggcagagtcgcgatagaacgattagtgcaggcttatggcttttcgactcggcaagctctagctgatcacctagacgtatcaaaaagcacccttgctaataggtacatgcgagacactttccccgctgattggatcatccagtgcacattagaaactagcgtgtcgctacggtggcttgttacaggcgaagggccaatgtttgaggatggtcaagcagacatccagacagtaaaaagacaaaaaataatagacgggaagttgtacgactctaattattatatttttgataaggctcttataccaaacgatgtcatttatccattagcaataatggaaaatgaggatgtctttattatcgataaagagaacaaagaaataagtaacggaaagtggattgttcgcattgaaggtgaagtatttacctgtgagcttactcggatacctattggacgcgttcgagttacaagcgctaacgagcctttcgaatgctctatagatgatattgaagtgattggaaaaatatctctaacaattaagaggtaa

SEQ ID NO: 448197 - DNA, 942 bp, Serratia marcescens
atgacaccgcaagccccccaaatccccgccgacgtgcgcgagcgcatcattgccgccgccactgatcttttcgagcagtcgggccgcgagacgatgcccacggtcgatgcggtgcgccgggccgcccgcgtggatatgaatgcagccagtgccgtgatgaaggaatggcgcagggcgcagactgcccaggccgccccggtggccgtggcggtgccggaggttgtgcagcaggccagcagcgccgccgtggcgacgatctggcagcaggcccaggagctggcgaacgaatccctacgcagcgcacaggccgcatgggaaaccgagcgggccgagctggacgcgatgcggcaggagctggccgaggctttcgagcgccaggccggcgagttggacgcgaccacggccgagctggccgccgagaaggccgccaccgaaaagctggcccaggaacttgccgccgttcgtcaagagctgggcgcagcacaggaacaggcgcacaccgccgaggcccgcgcccaggagatcgagcgccgggccgacgagctgcgcacggaactggacagggcgcaccaggacgccgaccaggcacgcggggcactggccgaacagcagaaggccagccaggcggccgccgctcaactcgaccaggtgcgcgccgagctggtgaaggtgcaggccaaggccgaggccaacgaggaagcgcaccaagaacagcgcaagaccgcagcgggcgaggcgcaccgcatggccgaacgcctcaccgccgcccaggccgagcgcgaccaggccacgaaggcggctgcacaggcacgcgaagaagccgctcgcctggccgggcagctcgacacgctcaaggagcaatcggccgcgctgttggcccgcatcacaccgccggcggccgaggcgaagcccgcgaccaggaagaagccaggcggcgagtga

SEQ ID NO: 448198 - DNA, 420 bp, Serratia marcescens
atgggaacccgatacaccgatgaacttgctgcctgggccaatcagaaggccgagaagaagcgccgccaggacacggcggcagtagcgtttctggcggtgcgcggggatgtggtcgaggcaatggaagccggttacgcgctgacgacgatctacgatcacatgcacgaaaccggccgggtgaaaaccagctatgagacgttccgccggcacgtccagcggttcatcaaggcagcgccggccgacaccgcgccgccgacaccgaaggccgccaccaggtcggccagcgactcgccgaccaccgttccagccgtcacgccaaagccggccgtaccagctccggccagccctgccagcgagcaagccgggaagattcccagcttcaatttcaacccaacgctgaacaaagaggacttgctgtaa

SEQ ID NO: 448199 - DNA, 285 bp, Serratia marcescens
atgacctacgccattgctttcgatcttgatacagaaacactcaaacagtcttaccccaatccgtcctggaacaacgcttacggggacattcgcaaaacgctagaacctctcgggttctcttggcaacagggaagcgtctacttcggcgatgaacgcatcaatgcagttcagtgtgtcttggccgcacagcaactcagtacgacttacacatggttcaaagcctctgtgcgtgacattaggatgctccgtatcgaagaaatgaacgaccttgcacctgcgctataa

SEQ ID NO: 448200 - DNA, 270 bp, Serratia marcescens
atggcacgccaaaagaaccacatcctgcacgcgcttgaatcaatcgccaaggcgcataaggacttggaaaagaccgtcgcaacgcacgggaaaatcatcgagagccaaggccaagacatcgcggccctcgaaaccaaagtcatggaactgcgcaacagcgccatccaagccgagatcgcaaacggcgctgcaacaaaggccgttgccgaaaagtacggcgtcagctcagcccgtgtatcccaaattgcaccccgccgctcttacaactaa

SEQ ID NO: 448201 - DNA, 195 bp, Serratia marcescens
atgactgcgatctggatgtttgagagcgggcgactggaagcccgcaacgaggccggcgaacttctgcgctggtggttggccgacgaggcgatgggcgggccgcttgccgccttgttgaaccaggcgcatagcctgagccggttgcttctctggccgttgttggacgccaaggaagggcagaacgaaccggcatag

SEQ ID NO: 448202 - DNA, 171 bp, Serratia marcescens
atgaccaccaagaccgtgagcgccgccgtaccggcggccgtgaaggccgaagctgccgctatctcagccgcgcacggcatgagcatggccgcgctgctgcgcgagctgctggcccgcgtagccgcccgcgatgctgaaacgctggcctggctcgataaggcccgccgatga

SEQ ID NO: 448203 - DNA, 294 bp, Serratia marcescens
gtgccacaagtaatcgtcaccgaaggcgcggcggaaggcttggaacgatgccggcggttcctggccgtcaaggcaccggacgccgccaggcgtgccggccaggccatcgagcggcaattcctgctgctggagacggccccggacattggccggccgttccctgaaatgcccgagctgcgcgagctggtgattgccttcggggattccggctatgtggccctgtaccgccacgaaccggccgacgatgcggtgtatgttctggccttccggcaccagaaagaggcgggctactga

SEQ ID NO: 448204 - DNA, 273 bp, Serratia marcescens; identical to SEQ ID NO: 350842

SEQ ID NO: 448205 - DNA, 1104 bp, Serratia marcescens
atgaaccaaccttgcacgcgcagcgccgtcaagttcgacctgttcgccgaccaggcacgccaacgcaagatcgaggcgctgggcgacccgttgcaggtcatcgccaaacacatcgactttgaccacctggcgggcgtcattgatggcctgtgtccccgggccgacacccgcaagggtgggcgcccgccataccccaccgcggtcatggtgcgcatcctggtgcttaagtacctcaacgacctgtcggacgaacaggtggagtaccaactgctcgatcgcatgagcttccaacgcttttgcctgctctctgacagcgccaacgtacccgatcgcaacaccatctggcactaccagcagcgcctgggcgttgatggcacgacggcgctgtttcaggccacagacgcgcagctgctgcgccatggctacatcgcccgccgcgggcagatcatcgacgccaccctggtacccgcgcccatccagcacttcaccaagcaggagaaggcgctgctcgatgagggccaggtgcccagcgactggagcccagccaaacgccggcaaaaggatctggacgccacgcacaccaagaaacacggcaagagctaccacggctacaagctgagcatcggcgtggacgtccgccacaagttcatccgcaagatcaccacgggcaccgccagcgagcacgacagcacgcactttgacgaggtgctcgacgatggcaacaccagccgggatgtgtatgccgacaagggctaccccagcgcagcgcgcagtgaaatgctcaaggccctgggttaccgcgaacatatccagcgcaaggcccagcgtggcaagccgttgagcgagtgccaaaagaaacgcaacacccgcattgcccgcacccgtgcgcgggtggaacacccctttgcgcagatacagcacatgggcggcaagctcatccgcaccattggacaggccagggcgacggcagccatgaccatgatggccacttgctacaacctcaagcgcctggccggtttcctcaaggacggggtggatgcgttctacaaggcggccaccagcccatcaaagagcgagacacgcctgaaaacggcgaatgcgtga

SEQ ID NO: 448206 - DNA, 1383 bp, Serratia marcescens
atggcaggacaagcgcaacttgccttgttcgagccggccgacgaggccggcacctaccatgacacggccaggacgggctttttctcgctcctggtcgcggtagggaaggacaagcggcaggattcatacaggctcacagacatgcccacgatcttgggcatggtcgatcagacccgcgacacctggctgacgcaggcagagttcatgcgccctaatcgccgcgtggtgaatcttgcgcgtgtcgggctgctgttcgccgacctggacacctaccggcagccgtgggccgccggcaggacgccggagcaactggcggccgccgtgctgtaccactgcgcccaggaaggcatccccacgccctcgctgctggtctatagcggccgcggcatacaagccaagtggctgctggacggcaccttgccgcgtcaggcgctgccgcgctggaacgcctgccagcggtatcttgtcgatcgcctgtccggcctcggcgccgacccccaggccaaggacgcaagccgcgtgctgcgcctggtcagcaccgtgaataccaagagcggcgacgtgtgccgcgtggtgcatgtcgagcacggccaggacggccagcccgtccgctacggtttcgagtacctggctgaaatgctgctgccggtggcccgctgggacatcgagcagcaacgccgcgaccgtgccgaacgccggcagctcaagctagtgccaggcggcaaagccgacaacctgcgcggcttctccggccggcagctcgcatgggatcgcctggaggacttgcgcaagctgggcgagctgcgcggcggcgtcagggaaggcgagcggatgcagcatcttttctggcgtctcaatttcctgctgctgtccggtgccacgcacagcgggcagatgtaccacgaagcggccgcgctggccggcgagcttgatccggcctggtcgtatcgctccaaggagctgatgacgttgtacgccaaggcgaaagcctacgaggccggcgagaaggtgacgcttggcggccgcgagttcgcaccgctctacacgcccaagaacgacaccctcatcagcctgttccagatcaccgacgacgagcagcgcaagctccgcacgcttatcagtgcgggcatggccgctgaacgccacagggagcgcgaagcggcccgccggcgggccgctggggcggtagatcggcaaacctacgaaagccgctccttgagccggcagaagccttgggaagccctcggcatgagccgggcgagctggtatcgcgccggcaagccgaccgtgccggacagtgagacaggttcgtgcgtattacaggccctggcgggcgacctggccagcatcgccggaagtgacgagggcggctacgatgcttga

SEQ ID NO: 448207 - DNA, 456 bp, Serratia marcescens
atgacaaagcgtatttctggccagtcggtcgacttcaacatggacggcgcactgatccacgcggaaaaggtcagtttgagcattaccgacaacaccgccgccgcccaaacccagggcgtgccggacgggtgggtaagcggcgacgtggcggccgagggcgaaatcgaattgagcaccaaggcctttgcccaggtgaaagccagggcgcaggccgccggcagctggcgcggcatcccgcctatcgatctgatgtggtatgccaaggccggcaatgaagaactgaaggttgaggcgttcggttgcaagctgattgtgagcgacattctggacgttgatcccaagggcggcagcatcatgacccacaaaatcaagttcgtcgtgaccgatcccgattttgtgcgcctggggggcattccttacctggagtcggacgttacgcagaacctgatcgggtaa

SEQ ID NO: 448208 - DNA, 372 bp, Serratia marcescens; identical to SEQ ID NO: 160032

SEQ ID NO: 448209 - DNA, 336 bp, Serratia marcescens
atggcagcccgcatcaccgacgacgaatgggacgaactgactcccgagaatttcgataccacggcactgctgcgtgcagtcgatgccgtggacgtgctgcgcggcgatttgaatgacagcgcagacggcgcacctccacaactgcgcaccgacctgttgaagctgcatcaactggcaatggccgcgttcaacgagggattacgcagccgagtggctgagctatttgatctcgccgtggatcttcaggatcaggttgatcatctgatgacctcgctggaacaagtgcaagaaaccctgtcccggttgacggcgctctacccagaaagcctgtcctga

SEQ ID NO: 448210 - DNA, 336 bp, Serratia marcescens; identical to SEQ ID NO: 239731

SEQ ID NO: 448211 - DNA, 240 bp, Serratia marcescens
gtgctcaaggggttcggtggtgccggcgtgctggaggtcgtcgaagacgatgccggcggcacctatcgagcggtatacacggtcaagtttgcggaagcggtgttcgtcctgcactgcttccagaagaagagcaagagcgggatcgccacgccaaaggccgacatggacatcatccgcgctcggctgaaggtggccgaggtattggcacaggagctacgaaatgcaaaaacgaatcattga

SEQ ID NO: 448212 - DNA, 603 bp, Serratia marcescens
atgttggttggctacatgcgcgtgtcgtcggactccgaccgccagagcacggacttgcagcgcgacgcgctgctcgccgccggcgtcgatccgcgtcacctgtttgaggatcgtgcctctggcgcgaaggatgaccgtgccggcttggcgcgggcgcttgagttcgttcgagccggcgatgtgctggtggtgtggaaactcgaccggctcggtcgctcgctgtcgcacctgctcgccattgtgacttcgctcaaggacaagcgggtggcgttccgctcgctgacagagaacctggacactacgacgccctcgggcgaattcctgttccaggtgttcggtgcgctcgcgcagtacgagcgcgccttgattcaggagcgcgtcgtcgcgggcttggccgccgcacgcaaacgcggccggatcggcggccggccgcaggcgatcactggtgagaagctggacgccatcgtcgccgcgctcgatggcggcatgtctaaggcggcggtgtgccgcaacttcaatgtcaagcgcactacgttgattgaaacattgacgcgagcaggttggcgtggtgcgggaaggacggtcgatgagcaacaagaataa

SEQ ID NO: 448213 - DNA, 3030 bp, Serratia marcescens
atgagcaacaagaataagctactcaccgtcttttctgacgcagagcaggaagccttgtacggcctaccggacttcgacgatgctcagcggctggaatacctggcgttgaccgaatctgaactggcgttcgccagcagccggcctagcctgcaggcccaagtctattgcgtcttgcagatcggctacttcaaggccaagcatgctttcttccgcttcgattggcatgaggtcgaggacgattgcgccttcgtgctgagtcgctatttccacggcgaagcgttcgaacgcaaggcgatcaccaagcatgagcactacagccagaggggtcagatcgccgaactgttcggctaccggtcgtgggcggctagcttcctgccgcaactggcacagcaggctgaacagatcgtgcggcgcgacgtaatgccaggattcgtggccgccgaactgatcgtttggctcagcgagcacaaaatcatccggcccggccacaccaccttacaagagctggtcagtgaagccctgtccaccgaacgcaggcgcttgggcggcttgctggcagaagtgttggacgaatcggccaaagctgcgctgggccagctcctggtgcgtgacgacaccctgtctcaactggcagcgctcaagcaggacgctaaagatttcggctggcgtcagatggcaggggagcgcgagaagcgcgccacgctgaagtccttgcacgggatcgccaaggcgctgctgcccaagctcggcatctcgcagcagaacctgctgtactacgcgagcctggcgaacttctataccgtccatgacctgcgccacctgaaggcggagcagacccggctctacctgctgtgctatgcctgggtacgttaccggcagctcaccgacaacctggtcgacgcgatggccttccacatgaaaaaacttgaggacgagagccgcacgggtgcgaaacagtcctttgtcgccgaacagctgcgacgccatcaggaaacgccgcaggttggccgcctgctgtcgctgtacgtggacgacagcgtggccgatccgacgccgttcggcgaggtgcgccaacgcgcctacaaaatcatgtccagggaattgctgcaaaacacggcgcagcgcatgagcgtcaagccactgaacaaactggcgctgcactggcaggcggtggacggcctggccgaacgcattcgacgccatctacggccgctgtacgtcgcgctcgacttcgccggcacggcccccgataacccatggctcgcggcgctgacttgggccaagagcgtgttcgccaagcagcagcgcctatcacaacggccactcgacgaatgtccggcggcaacgctgccgaaacgcttgcgtccgtacctgctgatgttcgatgccgaaggcacgccgacaggcctgcatgccgatcgttacgaattctggctttaccgtcaggtcaggaaacgcttccaggcgggcgagctctacattgacgacagcttgcagcaccggcatttgtccgacgagttggtttcgatggacgagaaagccgccgtgctcgcgcagatggacatccccttcctgcggcagccggtcagtgcccagctcgatgcactggcggccgagttgcgtgcgcaatgggtggcgttcaatcgcgagctgaaacagggcaagctgacgcacctggaatacgacaaggacacgcagagactgacctggcgcaagcccaagggggagaaccagaaggcgcgcgagcaagctctctacgagcaactgccatactgcgatgtcgccgacgtgtttcgcttcgtcaacggccagtgccagttcctgtcggcgctgacaccattgcagccacgctatgcgaagaaggtagccgacgccgacagtctgatggcggtgatcattgcccaagccatgaaccacggcaaccaggttatggcacgtaccagcgacatcccgtaccacgtcctggagagtacctaccagcagtacctgcgccaggcgacgctacatgtggccaacgattgcatcagcaacgccatcgccgcactgccgatcttcccgcattactcgttcgacctcgattcgttgtacggtgccgttgatgggcagaaattcggcgtcgagcgaccaactgtgaaggcgcgctactcgcgcaaatatttcggccgcggcaagggcgtcgtcgcctacacgctgctgtgcaatcacgtgccgttgaacggctacctgataggcgcacacgagtacgaggctcaccacgtgttcgacatctggtaccgcaacacgtcggacatcgtgccgagcgcgatcaccggcgacatgcacagcatcaacaaggccaacttcgccatcctgcactggttcggacttcgtttcgagccgcgcttcaccgacctcgacgaccagttgcaggagctgtattgcgccgatgatctggcattgtacgagaaatgcctgatccggccggctggccagatcgaccggcaactcatcgtcggtgagaaggcgaacatcgaccgaatcgtcgccacactgggcctgaaggaaatgacgcagggcacgctgatccgcaagctgtgcacctatacggcgccgaacccgacgcggcgcgcaatcttcgagttcgacaagctcatccgcagtatctacacactgcgctacctgcgcgacccgcaactggagcgtaatgttcaccgctcgcagaaccgcattgagtcctatcaccagctacgctcgaccatcgcccaagtcggtgggaagaaggaattgaccggccgcaccgacatcgaaatcgagatcagcaaccagtgcgccaggctgatcggcaacgcgatcatcttctacaactcggcgatcctgtccctgctgctgacgaagtacgaggcagctggcaatgccaaggcgctggcgttgatcacgcagatgtcgccagcggcctggcggcacatcctgctgaacgggcattacaccttccagactgacggcaagttcatcgacctggatgcgctcgtggcgggactggagctgggctga

SEQ ID NO: 448214 - DNA, 129 bp, Serratia marcescens
atggcgattcaagatgtcaacgttgccgtacagctgcttgatgacgttcgcgccatcgccaaaggctttatccagctcggcctgcgccttgagattgccctcaatgctggcaccatattttgcctgtag

SEQ ID NO: 448215 - DNA, 456 bp, Serratia marcescens
gtgctggccaccttctattggcagggcatgaactggaagcaccaggccagccaaattaagaagctgttcaagcgctacaacatgacgcacatcggcattgacgacacggggatcggtaacggcgtgttcgagatggtggaggcgttcgcgccgcgccagaccgtcgctattcgttacggggtggaaaccaaaacacggctggtgctcaagatggtcgacctggtggaaaaccagcgcatcgaatgggacaacgagcagaaggaaatccccgccagcttcctggccattcgtcgcactaccaccgccaagggcggcagcatgacgttcaccgccgatcgcagcgccgaaaccgggcacgctgacgtgttctttgccatcgcccacgcagcctacaacgaaccgctcaactatgagaacgcccgcaaatcaacatggaaaacgagaaaagccgcatga

SEQ ID NO: 448216 - DNA, 246 bp, Serratia marcescens
atggtcgacctggtggaaaaccagcgcatcgaatgggacaacgagcagaaggaaatccccgccagcttcctggccatccgtcgcaccaccaccgccaagggcggcagcatgacgttcaccgccgatcgcagcgccgagaccgggcacgctgacgtgttctttgccatcgcccacgcagcctacaacgaaccgctcaactatgagaacgcccgcaaatcaacatggaaaacgagaaaagccgcatga

SEQ ID NO: 448217 - DNA, 513 bp, Serratia marcescens
gtgaatactttacccactcagaaaactacaaagcttaaatgccttgattctgtcagaggtcttgccagtgtggcagttgtgctttcccatttgtcgttgatttactttgtctatctgcataactttactggggaagatattcctgaaggctttcctgtccaaaattttctccataactctatttttggttttctctactctggaacatctgccgtttttgtatttttcgtcatgagtgggatcgttttatcccggggaattgaaaaaagaagcgatgaatattacttcataacatcatttacccggtatttcagattggctatacccgccactttttcatgtttgttgatgtttgttgtattgttttttatttctgctagtgatcagcacattcctggggtttcaggttggcttgaaccattctttattaagtatccatctttgattgatgccttttcgtatggtgcggtgggtgcctttataggtccacctgtttggagtgggaatatataa

SEQ ID NO: 448218 - DNA, 1278 bp, Serratia marcescens
atgaccaccattaccgcactgcgggttgaagacattcgtttccccacgtcgctggggctggacggatccgacgccatgaatccggatcccgactattccgccgcctacgtgatcctggagaccgatcgcgcggatctcagcggccacggactgacgttcaccatcggccgcggcaacgagatctgctgcgcggcgatccacgcgctggagcatcagatcgtcggtgagcggctggagacgatcgccgccgatatgggcgccttctggcggcgcttcaccagcgacagccagctgcgctggatcgggccggacaaaggcgccattcacctggcgaccggcgcggtggtcaacgcggtgtgggatctgtgggccaaatcggtcggcaagccggtgtggcggctggtggcggagatgacgccggaggagctggtgcgctgcatcgacttccgttacatcaccgactgcatcacgccgcaggaagcgctggcgctgctgaaacagcgggccgagggcaaagaacggcgcctggagcggctgctgcaggaggggtatccctgttacaccacctccgccggctggctgggctacccggacgacaagctgcgccgcctgtgccaggaagcggtcgacgccggtttctcctacctgaagctgaaggtcgggcgcgatctggaagacgacatccgccgggtgcgcatcgcccgcgaggtgatcggcccagatcgccggctgatgatcgacgccaaccaggtgtgggaagtggacgaagccattccgtgggtgaagcatctggcgttcgccaaaccctggtttatcgaagagccgaccagcccggacgacgtggaagggcatcgccgcatccgcgaaggggtggcgccggtcaaggtggccaccggtgagatgtgtcagaaccgcatcatgttcaagcagttcatcatgcgcggcgcggtagacgtggtgcagatcgacgcctgccgtctcggcggcgtcaacgaagtgctggcggtgatgctgatggcggccaaataccagctgccggtctgcccgcacgctggcggcgtcgggctgtgcgagtacgtgcagcacctgtcgatgatcgactacctgtgcatcgccggcacccacgaaggccgggtgatcgagtacgtcgatcatttgcatgaacactttgtcgatccctgcgtgatcaacggcgcggcctacatgccgccgagccgtcccggctattcgatcgagatgcatccgtcgtcgatcgagcagtatcggttccgcgggtga

SEQ ID NO: 448219 - DNA, 1068 bp, Serratia marcescens
atgaatgccttacacgccgacggcggcgcaaaaccctggctggcgaccttcgcggtcggcctgtccacctttaccgtcgtcaccgcagaaatgctgcccgtcgggctgctgactccgatcgtcagcaccttgaacgcatcgataggccgtgccgggctgctgatttccctgccggccctgttcgccgcgcgcatcctgctaggcttttgcatcggcggtatctgggccatcgccggcgggttggcggaacgcctggtgccgccggcctccgtcggattagcgctgtccgtcatcttcggcggcgtagcggcggcctcggtgttcggcgtgccactcggggtgttcctcggcgaagcgctgggttggcgcatggcgtttctggccgtcgccgtcctggcggcgctggccctgctgttgctgctgtgcgtgctgccgtcgctgccggtcacgcaggcgataagctggcggtcgttcaccgcgcagcgcgcgaatcgccgactgctccttgggctgctgctgacgtttctgctggtcgccggccactttatggcttacacctttgttcgcccgctgttgcagacggtcgccggcatcgagggccgctgggtggggccgctgctgttcgcctacggcgtcgccggtatcgccgggaatttcatcgccggccaggccgccgccaaacggctgcgccgcactctggcgctgatcgccctcgggctggcgctcgccgtcctgctgctgccgctgctgggccacgcgccgctgagcggcagtgccttcctcctgctgtggggcatcgcctacggcggcgtttccgttgcgctgatggcatggatgctcaaggcggcccccgacgcggtagaggtcgcctcttctctgtatatcgcgctgtttaatctggcgatttcctgcggttcgctggcgggtgggctggtggtggacaccggaggcctgacgataaacggcgtgctgtccggcatggtgctgctattggcgttggcgatcctgatacgaacccgcccgcaggcgctggcaacggcggcgaaggccgattcgccgccgggttga

SEQ ID NO: 448220 - DNA, 252 bp, Serratia marcescens
atggattttcctggttatgccgatgaaaaaaaatttttatcctgggccaaaaaaataaaggcccagaataagcagcacagcacggtggtgccggtgcctgactatacgggacaaaagacctgcgggatcacggtgcattttatgccctgcgatgaggtgaaagtgacgaccagctgtgtgagccccggccgaccgggctatccgatcaacgagccgctgcagatgccggagccaaaagtctgtccgaaataa

SEQ ID NO: 448221 - DNA, 222 bp, Serratia marcescens
atgcaggttacaggcgcgtttaacctcacgacgtaccagcggcggcagcgtcaggataacgcccctggcgagctgctgcagggtgtaggcaaacgcctgcagctcggcaatctgcgccgcgtcattgctgatatcctgcgtcacgccaagcgcctgctgcgcttgctgctgtcgcgtggccatcatgctacgttgcacctggatggcttccacaatcagtga

SEQ ID NO: 448222 - DNA, 417 bp, Serratia marcescens
gtgcaggctaacgataaaaccacggtgctgggcacatccaccttgttggccggtgcggtgcagcacatcgcagagggcgattacagtgtagcgacgcaggccaacgcagtggccagcgtgggcggcgatgccaccacggcggtggccggcagcttgatggagaagatcggcaaaatccgcagcagcatagcggcagcgcgccaggaagtgatcgccccggtggtatgggtggggagccagcaaatcaacgtgatggctttgatgctggaaacgctggaggtggtgcaggagctggcgcagcagactgccgcccatacccacagcaacaccggcacaccgcagaacgcgcaggcaatcagcgccaccggcacgaagtccaaccagctgaaagacaaatacgcgcccgtgattgggtag

SEQ ID NO: 448223 - DNA, 261 bp, Serratia marcescens
  misc_feature (212)..(221): n is a, c, g, or t
atgacaaaacgaatttctggccagtcggttgatttcaatatggacggtgatttagtccatgcggaaaaagtaagcctgagcattaccgacaacaccgccgcagcccaaacgggtggcgtgcccgatggctgggtttccggcgacgtggccgcagagggggaaatggagctaagcaccaaatccctggcgcaggtgaccgccaaggcgcgggnnnnnnnnnncgcgggccgccggcagctggcgcggcatcccgccgattga

SEQ ID NO: 448224 - DNA, 198 bp, Serratia marcescens
atgattgtagccatagccatagtagctacttgcttttttcaccataccattcaagatgcagcctttaactacaacaccactctgctcaaagcgcttgatcgaaacctcaatttccttagcagtattttgctcgaatctggcaaccaacaatgttgttccggcatagccaccgattattgcggcatccgtcactgctaa

SEQ ID NO: 448225 - DNA, 315 bp, Serratia marcescens
atgagattgcacggagacttcagcgaactcagtaagttattcagtatttactttggtcaggattatgatctgtttactgatgccgaaacggccgacggtgtgattgacggcttcctggtgcaaaacggcagtcaagtcatccgcgatatcctcgaggagactaaagagtttcaggctacttatgcggggcgtatcaacgaaggcatggcggagcatttttcagatgagttcgtgccggagagctggggcactaccgcggtagctttctttgccatgttgcaacgaaaagcagagctaaagctggggcagctttaa

SEQ ID NO: 448226 - DNA, 345 bp, Serratia marcescens
atgagtttcgccagtctcgccggtgaaaatgaagatcacggggaattctttaggtgtcgatattccgccctgttcttgccctccatagaggtcgtggaggtatttacgtttataaacttcgtctttttccagtatctcaaaaggatgcggtgtttcgacgatatcaaaaccgagatctttgagaaattggatggctttttccgtgccgctatcggcgttgattcccttaaacggataaccatgctgctcactgtatgctctagcggaaatgcctcggatatcgtacttctcgccattataaataagggtgaattttttaaatcgttttatttcatgttgttttaa

SEQ ID NO: 448227 - DNA, 819 bp, Serratia marcescens
atgatgaatcgcgtatgggtactgggcgacgccgtgatcgacctggtgccggaaaatgccaacggttatctcaaatgccccggcggcgcgccggctaacgtagcggtgggtatcgcccggctcggtggcgacagcgcttttatcgggcgagtggggcaagacggcttcggcgcctttctgcagcaggtgctgagcgatgaaggggtggatatcggccatatgcggccagaccccgaacaccacacctccacggtcgtggtggatctcgatctgcagggtgagcgctcattcacgtttatggtgcagcccagcgccgatctgtttttgcagcccaacgatctgccggctttccaacggggcgaatggctgcacctctgctccatcgcgctctcgcaggagcccagccgcagcgcggcctttaccgcgatggagcgcattcgggcggccggtggccaggtcagtttcgatcccaacatccgcgaagaggtctggcgccagccggaagcgctgcgcccctgcctgcaaaaggcgctgctgctggcggacgtggtgaaactgtcgcgcgaagagctggctttcatcagccatcttgacgatctggagaacgccattcgctggatgatgcaaacctatccgctgcgcctgctgctggtgacgctgggcggcgacggcgtctgcgtacacgatgggcagcgtctgcgccatttccacgcgccatcgatcgcccaggcccaggcctgcggcgcgctggccaccaccgccaaaggcgccatgaccgccctgccccgcgccgacgagctggccgctttcctgcgttga

SEQ ID NO: 448228 - DNA, 213 bp, Serratia marcescens
atgatccgcctggcaagcgaccattacgttgcctacaacacaattggcgatatgcatattgacagtaatcgccaggtcaaagtgctgttgagtgacgggcgtattgcattggctgaacagagtcacggacagaccgcctgggcgcgcctggcgcagttggtggatgaggtgaatatcgccagcgcgagtgatgcgcctggcacactgcagtaa

SEQ ID NO: 448229 - DNA, 216 bp, Serratia marcescens
gtggtaaaaagccaggtcgagcaggcccgccagaaaaagaatgcattacgcaatgaagccgatgaagaaattgccgtcctcagtgatgccgtcaaatacggcatcgccacggaagatgagattgccaatcttgaagcctggagccgctaccgcgtcttgctgatgcgtgttgaccctgaacttgcccccaacattgaatggcctgcgaagccctaa

SEQ ID NO: 448230 - DNA, 156 bp, Serratia marcescens
atgcctgtaagaaaacttccagatggtcgttgggttgccgatttctacaccctagatcgcagcggcggcaaagacggcaaacgcgtgcgcaaaaaattcgcaacaaaaggcgaggcgctagcgttcgagaactacacaatggagaaggtcagttaa

SEQ ID NO: 448231 - DNA, 216 bp, Serratia marcescens
atggccgagccggtctatctccttgcggcagcattcgccgttgaagcgggccgcatgatgtttcacgccgtgctgctgcaggctgcccatcagggtgtcgcccgccagctgcatcacgaagtcgtcggcgatcaccagatagtgatcggcgagggatttggcgtattcgccgacggcggccagcgcattggcgccctgaatatatttgcctggtga

SEQ ID NO: 448232 - DNA, 1002 bp, Serratia marcescens
atgtcgttaatgctgagcgtgatcgtcccgatgcacaatgcgggggaattattggagcctttcctggcctcgctgctggcccagcgtgagcagcggttggaggtgatcatcgtcaacgatggttccaccgacggttcgggggagatcgcacaccgttacgcggcggcgcatccgcatattcgtgtgatcgatcaagccaatgccggtgtttctaacgcgcgcaatgccgggctcgccgttgcccgaggcaaatatgtggcgtttcccgatgccgacgatgtgctggcgccggacatgtattccacgctgctggaacaggcggaacaacaccaattagacgtgatgcaatgcaatggcgaacgctatttcaccagccaggatgaattgcagccgatttttcccgaggcgcgtttgcgcaccaccgacgttatcaccggcgtacagtggtttgaacgtgcgttgaaatcgcgaaagtttattcacgttgtatggctggcaatatatcgcctcgactttattcgccagcatcgcctttatttcgagccgggattgcatcaccaggatattccctggacaacggaagtcatgtttaatgccaaacgggtcaaatatttaagcacgccgctgtaccgtcaacgggtgcacgacaaatcgatcagcaaccgccgtcgcaccggtcaggcgaacgtggattatcaacgccactatatgaaaatcgtcgagatgctggagcggctcaaccggcgctatgccggcactgtcgccattcgcccggctttccattggcaaatcacccgcgaagcgctgggcatttgccacagcattcgtcgtgagccggatccggctgcccagagtcagatcaccgaagagttctatcagcgcggcatcgacagagcgatgttcgccaatgcgcgcggtctgaaacaggggtggcatgtcatgctgtggctgcatcggctgaagcagtggcgcagcgataacggctgctcgcaaccggcctga

SEQ ID NO: 448233 - DNA, 591 bp, Serratia marcescens; identical to SEQ ID NO: 429189

SEQ ID NO: 448234 - DNA, 3186 bp, Serratia marcescens
atgagactacttgaagggcaaacggtcatcagtggccgcaaaggtggcggtggaagcccacacactccggtagagcaggctgacgatctgctgtcggtcgccaaactgaaaatggtgattgcgttatcggaaggagaaatccagggcgatctcacggcgcagcaaattttcctgaacaataccccgctggcggatgatgccggcaattacaacttttcaaacgtgaagtgggagtatcgcaaagggacgcaggaccagacctatatccagggcatgccggagatcgacaacgagatttcggcgaatattgaagttaaagccgcgtcaccgtgggtgcggcagttctccaatctgacgatcgatgcggtgcgcatcaagctcagcctgcctatccagtaccagtacaaagacaacggcgacatggtcgggacggtcacgcaatatgctatcgatctctcaacagacggtagcgcctaccaaaccgtcgttgatgggaaatttgatggcaagaccacctcagactatcagcgtgatcaccgcatcgacctaccgcgggcaacgtctggttggtctatccgggtgcgccgcattacgcctgattcgacgtccagcaaactgatcaatgccttcaaagtgttctcttttgctgaggttatcgacagtaagatgcgttaccccaatacggcgctgctgtatatcgagctcgattccagccagtttaacggcagcgtgccgaaaacgacctgcaagccgaaaggcaagttgatccgcgtgccggacaactacaacccggtcacgagaacctatagcgggacgtggaccggtaattttaagctggcctacagcaataatccggcctggattttttacgatctggtgctggatgaaatttacggcatgggcgggcgcgttgatgccagcatgatcgataaatggcagctctacagcatcgccgcatactgcgatgaaatggtgtctaacggcgccggcgggaaagagccgcgctttacctgcaacgtgttcattcagaaccagcaggacgcttacacggtactccgcgacctggccgccgtgttccgcggcatcaccttttggggtaacgatcagatctacgtgaacgcggatgtgccgcaaagcgacgtcgattacgtgtatcacgtttcaaacgtggttgacggcgtattcacctatgccggtggttcgtataaaaaccggttcagctcgtgccaggtgtcttggtcagatccgcttaaccactactcggacaccatcgaaggcgtctatgattccgagctggtcgagcgctatcgcgttaatcaaatgcagctgacggcgatcggttgtacctcgcagagcgaagcgcaccgccggggccggtgggctattttgtccaatgccaaggacggatcgatttccttcaacgtggggctggatggttacatcccgctgccggcggaaatcatcggtgtggccgatcctttccgtgcgggccgggagaatggcggccgtatcagccaggtcggcggcaggaatattaccgttgaccgtccggcaaactatgctgttggcgatcgcctggtggtgaacctgccagatggcaccgcgcagggccgcacaatcagtgcaattagcgccgacaaaatgacgctgaccgtttcaacggcttatcggcaaacacctgtgccgggggcggtgtggtgcatcgacagtgacaagctggcgatccagtattttcgcgtcacgtctatttcagcaaacgatgacggcacattcacaatcgccggggtgcagcatgaccctaacaagtaccgttatatcgatgacggcgtgcgtatagacccaccgccgatctcggtcacgccgccaaacgtcatgccggcgccgaagggcatcgctatcaccgaagttgaccatcaggcgcaggggctgacggtagcatccatgcaggtaacctgggagcgcgtggagggcgccatcgactatctggcgcagtggcgcaaggataagggggactgggtaaacatcgggcgcaccagcgcgcagggttttaccgttcaggggatctacgccggggtgtacgatgtccgcgtacgcgctgtgaatgcggtcgacgtgtcatcgccctggggttatgccgactcgaccacgctcagcggtaaagtgggtaaacctggcacgccggtgaacctcatggccagtgataatgtcgtatgggccatcgatatcacctggggctttccctccggcgccggtgatacagcctacaccgagatcgagcaggcaactaccgccgacggtcagaaccctctgttgctggcgaacgttccctatcctggggtgagctatcagcacggccctatgccggcgggcgtgcgccgttggtaccgtgcgcggctggttgaccggatcgggaataagggggattggacgccgtttgttgcgggtatgtcgaatgtagatgctgacgacctgatcggctcggtggttgatgattacctcaattccgaggacggcaaggcgctgctggagccgctgaaaaccagcccagaggctattttgcaaagcgtgttggcggaatacggcaccgctaaccaacaatgggccaactatggcgaaaaccgggccgggataatccaggcacagaaggtggctgctgatgctcaaagctcagttgcgcagctggaaaccgacgtcaccgccaaattcaacgatcaggaagccgccatacaggagaaaatgacggcctacgcagatgcttccggcccttcggcgatctggacgttgaaaaccggtgttaagtacaacggaacgaattacgacgccggcctggcggtggccgtgaccgtcaacggcacgcaggttgacacgcgcgttgccgtcaatgctaaccagttcgtggttatcagcggtagcagcggcagctattactcgccgttcattatcaaggatggacaggtgcttatcagtcagggctttatcggcaagggctggatagaaaacgcgatgattggcgattatatacagtcgaatgattatgttgctggaaggcaaggatggcgcttagataaagggggcacaatggaaatgaatggtgctaatggttcgggaaggcgtgtagttacagcaacccttgaacaagtttttgatgcaaatggaacgctgcgaatgcgttctgggctttggtga

SEQ ID NO: 448235 - DNA, 729 bp, Serratia marcescens
gtggggcgtgggctgcgcatcggccggcagacagccggcgagcatctcacgcttttggccgaagcctttgcaacggttgacctgaaaaccggcctgctgcaagccgcggcgcacgaagccggcggcggtaaaggtggcgaagctgccttccggccgggcgaaacgtgccatggcggcgaacagttgctcggtccacatgtcgggatttttggccggtgcgaagccgtcgaggaaccaggcgtcgacctggttattcatgctggcgtcgaactgcggcagcagttcgttgacgtcgccgaaccacagatcgagcgtaatgcggccttcggccaacagcaggcgatggcagcccggcagcggcagcggccattgggcgcgcagctcatcggcatagggagccagctccggccagcgcgcatgcgccgccgccagatcggcctgctgcagggggaatttctcgaagctgataaagtgcaggcgttgcagcgcggcgtccggctctgcctggcggaagcccgcgaaggcctgccacagcgtaaggaaattgagcccggtgccgaagccggtttccgccaccaccagcagcgggcgcgggtgagtggcgaaacgctgcggcagccggttgccgtgcagaaagacatagcgggtttcttccagcccatcctgattggaaaaatagacgtcatcaaactgtttcgaaacaggtgtaccctgttcgttccaggttag

SEQ ID NO: 448236 - DNA, 747 bp, Serratia marcescens
atgcagccgcagcgaaacgtcgcgcagcttgtggcgatcgcgcaagccttgcacctgcagcagcgttcgctcggcgtgcggcgggcgcggcggcgggaaaatatcgtccagccgatgaccgagcatcttctcgacgatctgttcgccgctcagcccgcgcatggcgtcctcgctgacgcgccggccgtcgcgcagcaccgtcagccgatcgcaaatgtcgctcagttcgtggatgcggtgggaaataaatacgatgccgataccttcggattgcaggcggcgcaccacgttaaacaggcgctcgctctcggcgcgatcgagcggggcggtcggttcgtcgagcaccagaaaacggcagcggtgcgacagcgcgcgcgccagcagcacctgctgtttttccgccagcgtgcagtccgccagccgcctgcgcgggttgagcggcagcgcccattgctgcagcagctgcgcggcgcggcggtgcagctccgcccaattcagccagtggcccggttcgttcagccagtccagcatgatgttttccgccaccgacagcgtggggatcagcgcgacgtcgacctcttgctgcaccacgtgaataccgtggcggcgcgcctgcagcggggagtggatcgccaccgcctggccgtcgatcaggatctcgccgcgataatgatcgtgggcgccggagaggatcgccatcagcgtcgacttgcccgcgccgttggcgccgaccagcgcgtggattga

SEQ ID NO: 448237 - DNA, 357 bp, Serratia marcescens; identical to SEQ ID NO: 423760

SEQ ID NO: 448238 - DNA, 234 bp, Serratia marcescens
atggaacaattaacggtaaacaataaaaagattgcggcgaagttgaattgtctggcgcgtgtgggattaaaggttgttgagtgccatgttaattttcgccgcccggttattgaagttgaagcaccactgcaagattgggtaaagggtgccgtggaaatcacggaaacacgaaacggaattaagcgtactgtcaaaatgacgatatggcatggcgcacacatcatctggtgttaa

SEQ ID NO: 448239 - DNA, 249 bp, Serratia marcescens; identical to SEQ ID NO: 423494

SEQ ID NO: 448240 - DNA, 198 bp, Serratia marcescens
atgaagtaccccaagggcagcgtggttaagttgccgccccggcctggtcggggcgttgttctcaacgtgtttccaatgccggatgagcgatttcgttacggcgtgcagtgggacggcggcgcttaccaggtctacgacgagaaagagatccagtgggcgacggttgaccgccccaaagtgtacgggagtttggtatga

SEQ ID NO: 448241 - DNA, 285 bp, Serratia marcescens; identical to SEQ ID NO: 423489

SEQ ID NO: 448242 - DNA, 279 bp, Serratia marcescens
atgaaaaaagtattattgcctttggctgccctggtattgtctgcaactgcttccaacgcaatggcagcaaacggcactgttaaattcaccggtgaaatcaaacagtctacctgccaggtaactagcgatactcagaataaagaagtttacctgggtacttacccaacttctgctttcccaaccgtgggttctaaatccgcttctaaagctttccagatctctctggaaaaatgtgatgccggtgattacagcctgcgggtgatgctgccaacttactga

SEQ ID NO: 448243 - DNA, 186 bp, Serratia marcescens
atgagtcaatttgagaatgcatcgatcgtattgaacagccaccctgatggcgccgctacgctggaaaacttcagattggagaccagctcgttgaggccattggatccaggagagtttctggttgagaacaaatggttatcgatctctatctccggccacggctcaataaaagcaccaaatacgtga

SEQ ID NO: 448244 - DNA, 318 bp, Serratia marcescens
atggcctttgaaatccagttccagcggttttcgcgctcggtcggggatttggcctcggcatcggtgatcaggtcatcgcccagcagcaatttggggcggctggccccgtggaacgtaccacggatagcctgctcggcaccgaacgcctcgaccttcacgccggtgcgggtggtgaactcgccaatcttccattgtccgctgcggccgcagacctccgggaaatccagcatcagcgccgcgttcatggtcagttcggttttgaccacctccagcagcttggtcggcagtttggtctccgcgccgagcaagatgatgtag

SEQ ID NO: 448245 - DNA, 345 bp, Serratia marcescens
atgataagccatctgggcggcatcaccttcaaggtcggcaagtccgtgcgtaaaaagggcaaccggcgcggcgagctgctggtcgaacttttgggaaaggagacggcaaaggtgattgaaaaacacttcggcagcgaaccgctgtacattccgcgctgtgacagcgcgttgcgcgagtggcgtaaccgccgtttcatcgacgagcacaacgccctggtggcggccggtgaaagttctcgctttgcgcgcattacgctttgtcccaaatacggcgtgactgaccggtgggcgcaaaagctgttggctgagcgacaggtatcgtcacagcaattagatctgttatag

SEQ ID NO: 448246 - DNA, 546 bp, Serratia marcescens
  misc_feature (383)..(392): n is a, c, g, or t
atgaaacaagcctgtgtagatgtaattgcccaaacgcttggccggtcgccgaaagcggatgaactgaagaacatagaagatcggataaaggaggctatccggcaagttggacgtacaaatgcccgcgctggtaaaactggcatccccgacgctgaaacctatcgtcaggctgctgatctcgtcgctcagcgagtggtgcacgacgttttcaaaaagcgccaacgcctggcgcagaacgcgatagcgattaaccgcgtttcggaggatatcgcgaggaacttcacggatgcagagcaaaccccgcaggctctgtcccagtttatttttgctggacgtaaaacgcgtgacgggaaaaatgttgatgtcacctcggccgaagaacnnnnnnnnnntatcaggactggtcgcgccagctttctgcagaattggttaaggcgggtcccgaggtgcaaaagtttttccacactgccaatgcccttggcgagcgtaggatcactgacgttttcggaaacaaggctgctcagtacggtcagttgcagatcttga

SEQ ID NO: 448247 - DNA, 603 bp, Serratia marcescens
atgcacagcatcggcgtgatactggtcttcgaagtcagcaatgcgtttggccatgatcaggtcatcggtggttttgctgccacgccagagaagcttcgcatgcagcccgcgccgcatgtagatcactgcgtcgtcggcgccggagtatgccgggtcgacaccgatgattgtcggggcgtgcgccacatcgcgctcggtaactacccgcgccagcgctgcatcagtgaggccagttgggataaattgtgtctcagaggcgtcagggaatatcccgcgcacacgcactttgaagaagtcgctatcctcgccgttgtcctcctcccacttggcgatctgctctttgtttgtgccttccactgtgcggctgtcgatctgcttacccttccagcggtggcgatacttgcggaagcactcgcggaacctacccatgttgcgcgtcgggtttccgaacgctacccagataatctctgtcccttcatcggtcagcgcgccctcggcaacctcccacaccagatcggcaatgttggatgcctcatcgaaaatcaggatgatgcgcttgcccttgttgtgcaggccggcgaaggcctccgtgttgttctctga

SEQ ID NO: 448248 - DNA, 678 bp, Serratia marcescens
atgcgcccacttgtatgttgccgactcggagccaactacctgcccgggcagctcgatctcgccatccttgcggatcaccacttcggcggtggcggtcattccgtcgccgcttacggccgtaatgcggcaaattcctcggccggaatgcaagtaacgccatttgacgccataggcatcagaaccggctacggcccagccatcccagctatcaccagtggtatgagttggcgccactggcccggtgtgccctcgctctccggcatcaacgcaacgataatagttctcctggtatcggcagatatttccaacgctaacctgctcaccggtaacccagcgcccaaccgtgtcgacgttcttctgctccatgtagaacagcttgccaacatgccagcttttgaagatcgatgcactggctgtaaggtctacagttccgcttgtcgagctggcgtagacagtgatcgactcgtcaatattcacgttagcaaatggaccgctgactgtggccacctctgcagtacgccagtcatcgtgcgcatagcgttggatttccataggtgggtagttcgggtggcaaaccgtcatcacgtctgcgctctgcgtatatttcagcaggtcgatatcagcagcggcccacggcgttgttacgtctacaggctggccagcactggtgccggatga

SEQ ID NO: 448249 - DNA, 213 bp, Serratia marcescens; identical to SEQ ID NO: 448228

SEQ ID NO: 448250 - DNA, 216 bp, Serratia marcescens
atgaaattaaactatttcacttacagaataaccgacaatcgaaatcagcaaatttgttttgataatatctcagagataataaaaaatttctgcctgcatagaaagaaaccactttttgaaaaaaaacagaggtttaaagagactttatttagcaatgccttcatcattcgatggaatatattacctgaccactccagcaattaccacagcatttaa

SEQ ID NO: 448251 - DNA, 789 bp, Serratia marcescens
atgccttcatcattcgatggaatatattacctgaccactccagcaattaccacagcatttaaggcagttgatcgagctaccggtgtagtaaatgatttgtcatcagtgcttggtaaagatagtctcgagaaagtaacttacttttttattgaccctaaactctctttaatcggagtaaccgaaggtaagggtaatgctgatattgatgacttacaattttttattaacgaaataataaaccaagactttaaatcacagatatttacatttgagctttgtacattaaaaatagaaataaaatccagatcagcctcaaagttcaaacttataactgaagctagagtgaagttgaataatgactcagttgcagatgtaatcaatggcttatttgggaaagagccatcaagtaatatggaagtgcaaatcatcgttaaaaggaaggacaggaaggagaatgtgaaagattatattcagccgctactgacaagcttatctacctctgatgataaagactatgcggaaatttatttcagagctaaagcagatgaattccagtcgaacgtgaaagagtttattttagaccaaaaccaaaatatctttgatataataaaccctcatcttaaagcaaagattgaagagcaaatattagagaaaagatataaaaatcaagttgttataagtgagtgtgacgcttatgcacaaaaatttattgggcgcatacattcaactattactgactcactctggaacgagataaaaacagaaaatcaccataaaacaagaggttga

SEQ ID NO: 448252 - DNA, 255 bp, Serratia marcescens
atgaaagagcgcccagtgatgccagcaaatgaactgaagccgtgcccgttctgcggtggccatgcagagatgcagcgcataggcaatgagtacacgaaaaaacgctcaattgtcgttaagtgcacaggctgtcgaatccagctcaccaactcagcaattatgcattacgggtttgatttccttcaccagaaaactgttgaggcatggaaccgacgggtcagtgactgcgctagggaggtggagcgtgaggtatga

SEQ ID NO: 448253 - DNA, 678 bp, Serratia marcescens
atgcagggcgacccgcgcacggacgaagaccggacgtttatcaacatccagttctttacccagcgctggcgcgactggctgattttcggtgcctgtgacccctctatgggccagggtgagaccagcgacccttcggcaattcttgtgggcggctgggacaagcagcgcagccggctgcatgtgatggaagcggagatcaagcgccgtgtaccgtccaaactggaagccgacctgatagcgatgcagcggcaattcaggtgcctggccatcggctttgagaacaacaacgcctacgagcactcgcgctcgacgttcatcaaaaatgcgctgcgccaaagcgtggcgctgccgttggtgggtgtgacggccaaagtgccgttggaagtgcgcgtcgaagggctggagccgtacatcaacgaccagctcaacccctctattttgttcaatcctggtctgacgctgttgctgtcggagctggagacctggccagagccgcagaccggtcaccactatgacggactgtcggcgctgcagctactttggatgattgccgttagccgcggcgcaggttcgttcgcctgggagccgataccgcgccgggaggcgtcccggtacggcggcgatcattttcttgatgatgacgacgagccggattacggcggtcgcggtttatggtga

SEQ ID NO: 448254 - DNA, 807 bp, Serratia marcescens
atgggaacgtgtggcctgctcactcaacttgctagcggcgaaatggttgttggggcagagggggagaaactgactaaccattacactttttatgccgtgtttaatacaccagaagagttccgtattgtcaccggaaacagaacccttggaacgatacctgtggactccccactgctaccagaccaacacatcatcttcggtgggcggcgctggaaagttatagagatcgagacagagaaaaaggttatctatgttgaggcgaccaaaggcggtcagccaccacaatttagtgggggaggaatgtctattcatgatgccgttcgtcaggaaatgctcgctatctatagggaaagtgattaccgcatagcgataggtagcaagagagtagattatgccgattctgccgccagaaacctatttgcggaaggctgtagtaactttcagcgttataacctgcaaaatgagcattttattatgagtgggcaacactgttacgtaattccctggatgggggataaagttgtgaatacggttacagccttgctcctgcgctgtggttttaaagcaaattcatttgctggtgttatagaaatcgataattcaagtgtagcttccgttcagcacgtgctcaaagaaatgctgttatcaggcttaccatctgcattcgatcttgccacagatgttccagaaaagtacttggataaatatgacgagtatttaccagagtcccttcttgcgaaagggtttggggaaaaagcgtatgacattgaaggcacttgtgtttggttggagcggcatcttaagtaa

SEQ ID NO: 448255 - DNA, 624 bp, Serratia marcescens
atgtccaaggccattctgggcggtacgctgaccacgcaggccgacggcaagacctccaccaatgccctgggcgtgatccacaacgaagtgcgtcacgatcttctttcgtcagacagccgtcagttagccatgacactgcgcagcgacctgttctggccgctgctggtgctcaaccgccgggcaaacgccgacccacgccgcacaccgcgcatcaaattcaaggtgcctgaaccccaggcacccgaacctgttggggcaagtcgcaccgtgcaggttaatttgggcgcgtcggcagcgccgacgccggcacgcagttatgattcccaggtcattgccgcgttagtggccgctttgacccgcaaacccggtgcggatgacacgcaaacagggattgatgaggcattaacggcactgttaagcggcaataaacccgctgaggggctgattgccatgttgcagccggctatcgctgcgttgtccggggaactggatgagcaaagcctactgggtgcgctggctgatgcgttccctcagctcgatccgaccttactgcaagctaacctcggtgatacgcagaccatcgcgcgcctgattggcctgtatgcccagcaggaggggcagtaa

SEQ ID NO: 448256 - DNA, 582 bp, Serratia marcescens
atgcagtcgggcatggctggggcgggtctttgcatccatgaccgccacataccgccaatatgggcggttttcggcgttggccaacatggactcatggcgcgccgacatgtaggccgcctgggtgttggtgcggtagatggtactcagccgggccgggttgccgagctggcgggtggtgatctcgccggtatcggtgtcgatattttcctcgctgccccaccaaccctttttgcgcagtaccggctccagatttttgacgaaccactccggcgtctggccggcggccaggccctcgcgcaacccgttcaccaaatcctgggcaatatccaggcgcgcaagattggcaaagccgaatgcgtgcgcatgatctactgcctgcatggcgtcggcatcagtacggatgcgcaatcccttgttttcgaggtagcgcaacgcggcttccggcttcatgccgaacagcgcgctgatttctgccttcgatattggcattactgcccctcctgctgggcatacaggccaatcaggcgcgcgatggtctgcgtatcaccgaggttagcttgcagtaaggtcggatcgagctga

SEQ ID NO: 448257 - DNA, 894 bp, Serratia marcescens
atgagtgaacaatatcaacaaagtgtcgactctttagttgaaacccgcggagctgttgcaggtatctgggaagaatgtaaagatattccactagcaatggctgcattacacgatgtgatgaaagttaaccaacatcaaatcaacgagctatctcaacatcttgatgcctttgttttgttacgtgataaagctacagatgcggttcctgttatccatgaaaaattggacgaggtaggcgaattgctcaaagcaggggcattgagtgtcagttcatctctggaccaaacaggggctgaattactcgccaatgcgaatgctatgcgaattgctcttgatgaaggctctgaagggttcaggcagtcggttacacagactcagcaagcatttgcatcaatggcccatgatgtaagtaactcttctgaaactttaacctcaacactgggtgaaactattaccgaaatgaaacaaagtggtgatgacttcctcaaatctctggaggcacattctaaagaactgcatcgtaatatggaaaaaaatacaactgatgtgatcgaactctttagtaaatccggcgataaatttaatcaacaattgtctagtaatgcagaaaatatgtttggagcgatgcaatcgtcctttgacaaagcaagtgctggtttaacttcacaggttaaagagtctgttgatcgctttggtggtgcaattaacgaacagctacatgcttttgaacaagcgactgagcgtgaaatgaatagggaaatgcaatctctggggaatgctctcctgtcaatcagccaaggatttgtcaaaaactacgaccatttgatcaaagagtatcaaagtgttcttgggcagctgcagccattaattaactcaagacaacaccgcgggtaa

SEQ ID NO: 448258 - DNA, 339 bp, Serratia marcescens; identical to SEQ ID NO: 426822

SEQ ID NO: 448259 - DNA, 447 bp, Serratia marcescens
atgaaacggtttaccccagattgttcaatgcatatgtcgcatgaaatggcatttatgcgagaaacccctgacggtgcatatatggagtatcaagaccacctcgccgtaaaaacgcagcgggataatttggctgcacgggttaccgagttggaattactggtgaatgagtatttctacaagttccaaaaggtgcaggatgcatcaaaacatctattaatcatgaatgaccgcaatgaggcagaagtcgcgcgcctgaatgaacttttggcgcagaaagaaaacaagctgacagataaccagggagcgcaacaggtaaaggcgtctggttttattttgggttatggcaacggttgcgatgaatacattttcaaatctttttacggacaagaaataaaaattggtgatcggctctacaccgcctctggctctaagtctgggggcgaatga

SEQ ID NO: 448260 - DNA, 213 bp, Serratia marcescens
atgatccgcctggcaagcgaccattacgttgcctacaacacaattggcgatatgcatattgacagtaatcgccaggtcaaagtgctgttgagtgacgggcgtattgcattggctgaacagagtcacggacagaccgcctgggcgcgcctggcgcagttggtggatgaggtgaatatcgccagcgcgagtgatgcgcctggctcactgcagtaa

SEQ ID NO: 448261 - DNA, 345 bp, Serratia marcescens; identical to SEQ ID NO: 448245

SEQ ID NO: 448262 - DNA, 912 bp, Serratia marcescens
atgaaaatttcacttgtagttcccgtattcaacgaggaagaagcaattcctctattctaccaatctgtgcgtcagtttaaaccttttcagcatatagatgtagagatcgttttcgtcaacgatggtagctcagatagaacggaagaaatactgtcttccttatctaatgatgatctaaatgttaaatcgataaatttttccaggaatttcgggaaagaacctgcattatttgctggtttggaagccgctaccggcgatgctattatcccaattgacgttgaccttcaagatccaattgatgttatcccactattattgaataagtggcaagatggtgcagacgtggtgttggctaaacgtatggataggcaatgcgatggccgaatgaagagaaaaacagcagaatggttttatcgagtacacaataaaataagtaaaccggccatagaggagaatgtaggtgattttaggctgatgaccagggaagtggtagaaagcattaaattacttccagagagaaacctatttatgaaaggtatccttagctgggttggcggaaatgttgaaattgttgaatactctagagccgagcgagtcgcaggaaccagcaaatttaatggctggaagctttggaatttggcaatagagggaattacaagtttttccaccttccctcttcgtgtttgggcttacattggattttttgttgctgcaatttccttcatgtatggcgcatggatgatcatagataaggttatttggggcaacccggtagctggctacccttcaattattgtttccattcttttccttggcggtgtacagcttataggaatcggagtgcttggggaatatattggtagaatatacattgaaaccaaacgtcgcccacgctatataataaagaagtga

SEQ ID NO: 448263 - DNA, 606 bp, Serratia marcescens
atgaaaccaagcaagagtataatcgcactgcgagaaaaaatcattcatagcagcaaatttgagccaagcaaatcaggattaaagcatgcaaatgaaattgaagttctgttggacatacttaatatagtatatattgatataattccaaagtcagcgaatactcaaaccatcgacaacataacgtcagttgcaaatacatttagcgcttgcgttgaagcgtatgagtctgaaaatttaaaatccatatttaaaaatcttatttttgtcgaagaattgattgaaaacatagaacataactttataaatacaccgaccaatgaaattagagacaaactggaagttttgtattcggcgagcaccaagctgacacacaataactacttaaccaacaatataattcattttgtttggattggttcaataacaaacgagcgccttaaatatcttgagttgtgggcagagtgcaataaaggttttcgcatcatgctgtggatcgaccctctcacatacctggcggacacgctattaaaagaaaaaaaaagggtattacaatgcgaaaaaaacgaaaggaaggcactaattttacaaagtgaatgtcttcagtaa

SEQ ID NO: 448264 - DNA, 855 bp, Serratia marcescens
atgcagcgtgatttccatctccttgggaatgatgccgccggcatagcgtcccagctcggtgacggcgcgcatcagttcgtttttctctttcttgccgatgccttccgggtatttaccgatgcgcagcggaataccgtagatctccaacagctccgccaggctctgagtgccgaagttacggcacacatatggccaggacagagtacgcagcagcccagcacgcgcaacatagccgctgcgcgacttatggcggtgctgtatccagccgaacggttgcagcggtgcgcccatgccgtcatcggttcgcagcagcagctgatcctgattgtcccgcgccagttcgaaccaggacgccggccggtggttaaacgccttcgggaaccactcgcggccgagctgttgccattcaatctcgatgttgctgaacccctggccgatggcgtcgagcatatcgatgatcaaatcctcccagccgtcttgctcggtgatgtactccgccagccaggccgcatccgcttgctctgccggtgtggcattgggcggtggcgtgatttcgtgcggaatggtcagcagcgcacgcttgcgcttttgcatctcggcaaacaaatgggcgtcccgttcttccatatcggtgaacaggtcggcctgggcctgcaggttgcccagctcggcctcgttgagaatttgctccaggcgctggggcgtcaaccgctggctggggtgctcggcatacaggccggccagtgcggccacatgcgaggattgcggctcgcgcagcacatcgcggcggatcggtttcccgttgatatcgacaatttgaaccatttttttcaccataaaccgcgaccgccgtaa

SEQ ID NO: 448265 - DNA, 429 bp, Serratia marcescens
atgagccattaccgcttatcgaagcttcatgaacaacatctgaagctgcaggaagatgcggaagaataccaaatcacaccgggtaacgatattggtaccgcgaagccaaaagacaagaaagaagagtttctgtccaatattctggcgcgcctgaatgatctgtttgttacggataatcttagtgataaagacatgatcaactacgcctttaccgtgcgtgacaaactatcggaaaaccaggcggtgatgacgcagatcgctaacaatacgcgtgaacaggcgatgctgggtgatttcccgaaagcgatcgatgatgcagtgatggacagcaacgaagcccagcatgagatgatggtgcagtatctgtccaaccctgaactcgccagggggttcgcccgcgtggtgtttgatatgctcaaaggtgcttaa

SEQ ID NO: 448266 - DNA, 2748 bp, Serratia marcescens
  misc_feature (2713)..(2722): n is a, c, g, or t
atgagtatggacaccactaaagagctgattttccaaaatgaaatgattgctcagatggtcgaaacgggttggattgttggtaaaggcgagggctacgatcgcgaacgtgctctatattcgcaggacgcgttgacctttgtgcaaaccacgcagccgcaggagtgggaaaagttcgccaaaatttatcctaccgataccgaacgccacttcctcgatgcgctggtcgctcagctgagaaaagcggatatcaacgctaccgatatgctgtcgcgtacttacggcaccctcggcgtgctgcgacacgggatcaaaagccatagcgcccgtttttctctgtgtcagtttaagccggagcacagcctcaatccggaaacgctcacccgctatcagcagaatatctgccgtattgtgccggaactggtgtatagcccacacgcttcgaaagcggcatttgaagaagcgggtacaaaagcgaaaaagtggcgtatcgacctggtgttgttcgtcaacggtttgccggtggcaacgttggagctgaagtctgagtttaaacaggcagtgcaaaacgccattacgcaatataagaaaacgcgtttgccaaaggatcccgttaccaacaaacctgagccgctgcttactttcaaacgcggggcactggtgcactttgccgtcagtcagtacgaagtgtttatggcgaccaaactcgacggtgataaaacctacttcctgccatttaacaaaggtactcacgacggtggtgcggggaacgacatcccggaagatgcgaacgattacgctactcgctacctgtggaatgaggtgctgctcccggacaatttgctgaaaattcttgctagctttgtgcatctacaaatcgaagagaaagaagagtggaatggcctcaagggcaagaaagagagtctgatcttcccgcgttatcatcagtgggatgtcgtgaacaaactgattattgctgtggcggaagagggtactggcaataagtacctgattcagcacagcgcaggctccggtaaatctaactccattgcctggaccgcccaccaactttctcggctgcatgatgagcatggtgagaagcagttccactcggtgattgtggtgacggaccgtaccgtgctggacgatcagttgcaggacaccatctaccagtttgagcatcaggatggcgtggtcggccgtatcaataacaaagaaggcgacggttctaaatcggagaagctggccagcgcgctggaaaactcgcagccaattattatcgttaccatccaaaccttcccgcatgtgctgaaggcgattgaaaacagcgtcagccttaagcagcgtaagtatgcggtgattgctgatgaagcgcactcttctcagagcggttccactgcgcgtcagttgaaagaagtactgatgacggaggagacggatgacgatgcggtgatgacctcggaagatattctcgatgccaccgtcgccgcacgtaaaggcagcaacaatctcaactactatgcttttaccgccacgccaaaagccaaaacgttagagctgtttggccgtcgtcctaacccatttgagcctgcctcaaaaaccaataagccggaagcatttcacgtctactccatgcgccaggcgattgaagagggtttcattctcgatgtcctgaagaattacaccaactataaggtggcctataagcttctgcagaaactggacgatcccgatcgggaagtcgacagcaataaagcaaaggtcaaactgaatcagtgggttgcgttgcatgagcataatgtttcgcagaaggtaaaggtgattgttgagcactaccgtaagcatgtgatgcatctgttgggagggcaggctaaggcgatggtagtcaccagctcccgtaaagccgcggtgcgttacaagctggcctttgataaatacatcgctgagaacaactatccgaagatcaatgccatggtggcgttttccggcgaagtggaattctatgaaagtgaccacaatagccttgcgttactgaaccagaagtttactgaaatcaacatgaaccctgggttgaaaggccgggacatgcgcaaagcgtttgatactgatgattaccaggtgatgttggtcgcgaataagttccagaccggttttgaccaacccaagctatgcgccatgtatgtggataaagcgctgggcggcgtggaatgcgtccagacactctcacggctcaaccgcacttatccagggaaaaaagaatcaggaacctttgtactcgatttctataatgagccggatgacattctggcggcatttcagccttactaccaaacggcagaactgactgatgtcagcgatccgcagctagtctttgagctgttcgagaaacttcgcaccagcggcattttcctgtggaacgaagtggagcaattctgcgaagcgttcttcaccaagaacaaatccaatgctgcaataagcaatatctgcaagccggcggttgaacgctggaagcaccgttatacctcagcgattgatgcctatgtgttggctaaagagatgtttgaacgcaccaagaagaccggcgatgtggtgctgataactaatgcagaaaacagctttaagacgtgcaaacaggaaaaagacaagctggatatcttcaaaaaagatctcggtagctttgttcgtttttatgagtttatgtcgcagatcgtagatnnnnnnnnnncggcatcttcgcccgttgctgcatga

SEQ ID NO: 448267 - DNA, 1968 bp, Serratia marcescens
atggatgctttagaagttgctattattcatcatgctaatatcaattctgagtggtggcaaaacaatcgtgaacgtttatgctttaatctggaaggatcgcttcgttactttgcattgttagcgtgcattaattctccgctaactaatcttgacatatcctctcgtttgctgtcgaaatcggatttattagagtctgagctttcacatgaactgggcactttagtgcagaaagtttttatccatttgagctcagaatcccaagacgcaatacaggttataatacttgctctttctcagagatatgctgatttccctgagtataggcaatatatgcttaaagatcaggtcaagtttattatttgtataccgtgctatttacgttcgccgtcatgtgtaagtatttttgatgaatatagtcgttcaaactggccacttgaacataaaccagatgttaatggatggtgcgggatagtaagagctccgttctcatttgaagtttttaataagattagcaatgaaggcgttctcagtcttcttgagcactataatgggtataggcgagactcatttagcgatatgttaattggtggagaggagcaagtcgctcagcaactgagtgaggcatcttcaagggatccattacgatttttgagtttgttatcttcttactggcaagatataaatgaaaatttccgaaataatattatgaatggtattgcgcgttatttgaattatcgttatggcaaccttcggcaaaataatgactggaaaccgattaatgaacctaatattgatattttagttagcaatactttagatgaactggaacgacattctgtctattggcggcaaaaccgctctgcttccgaagtgctacaagggtgctcacatgtagtaaaagatatcaataatgcggaaagaataacctttttatctattccctatttagccgtggaggaaagagatcctatctcaggagatggtgtcacttttattggtataggtattaatatgattcgagggcatatcgctgatgcccttatggttatggcaataaagttacatgaagaacatatttcttggcctgaattattgttaccgacactacaccaatttgctactaacgagcatcctgcagtgcgagctgtagtattacgccgtttacctcatttacagcatattttacctgaggttggttgggtggtatttgaattaataatgcgaaaaggtagcgaacgactttgggatatggcagaacgttgtctctattatacctatcatcatgagctcgacagagtttccccatggttaaataagattgtatctgaaggtattaaaggcggattgcaagcgtggggaagaatatctgcattggctgtattgtcagaaaaaatagaaagtcgtgattttatcaaacaattaaaagaattaagcgatagtgatgcatgggaaggtgctgtcgatgtttggacacatcgtgagaattttcaacggcatcaggatttatgtcttgctggtttggatgctgcgttaagtgatgataatcaatattcctcagaattaatagcgtcaatgggtggtatttttagagggaaagagccggttattattttacccatgcaagtgttagagcgttatttttcattagtatttacgagttcagagtcatcgaaaattgatttgttcgattttggctcgtggttaaatattgtttcatgcatagaaccattgtatgcattgagggctacggagatttatcttgaatatgctcgtacaacaaaagtctatttacatgattacaataataatttaatgcagctattgactcgtttatttgcacaagcagaagagcaggaagaatcggatggcggagaaatgctatatcgagtggttgttttgcaagacactatgttggccttgggtgttgatggggtgagtacatggttagaggccgctgagagagcataa

SEQ ID NO: 448268 - DNA, 447 bp, Serratia marcescens; identical to SEQ ID NO: 448259

SEQ ID NO: 448269 - DNA, 789 bp, Serratia marcescens; identical to SEQ ID NO: 448251

SEQ ID NO: 448270 - DNA, 126 bp, Serratia marcescens
atggccacaggatcccttgccctcctggccgccttggccgccttggccggcattgcgagctatgcgctctataaacactttaaatttcagaagaaaagtacattcgttcgcccgcacgatcggtaa

SEQ ID NO: 448271 - DNA, 204 bp, Serratia marcescens
atgagtagggtgggcaaacaaatgacattcgataagccacatatcaaatttgacccattggttaagatgttttactgcgagtgcgtcaaagaggttcccggcgagagatgctacctggtcggtagtggtaaaacaccaagcgaagcattcaaagaatggcagcagtctacggagttttttgaacgcaacaatggcacattctga

SEQ ID NO: 448272 - DNA, 411 bp, Serratia marcescens
atgacaaccatcaagcgctttacccctgactacaaaatgcacgcagttcgttttgaggctttcgcccgtgaaacggagcacggcgagcttgttcggtttgatgtccaccagcaagtagtgagcgcgttagaagctgagcgcgatgcgcagcagaaacgagccgatgcgctggctgtggagaatcaggcgctggccgacgcgctttctttgatttcccattgctacaaacattctccgcacattcaaagcatgtgtgttgttgaaaccccagccactgacgcagcacttgcagctatcaaaaagcaagctggtatcgaagccgtagaggaagccgcgtattcgctttacgggaaaggatacatcttcgacacaatcatggattacgccaccgagctgcgggagggtaaataa

SEQ ID NO: 448273 - DNA, 345 bp, Serratia marcescens
atggacaataagctgagcgaactgagcaagcctgtggcgtatacagattcggaggagctgcgattccaccatgcaacaagtgacatgtggcccgtaccgcttggattcgggaaagacgtgcccctctactcgcaagagtacgtctccgccctgcttgcgcgtatcgaagaattggagtccacagaaattaagccggaaggcatgaggatgatgagtgaggctatcggggcccacggctatatcgttggctgcatcgtccagggccgccctgacttggcactggaagaatcacgtaagtgggtcgatgcgttttcacaggcagcggagctaatcaacaatggataa

SEQ ID NO: 448274 - DNA, 471 bp, Serratia marcescens
atggataaattcagcgaactgagtagcaacgccaggaaagcggcaaacacattttacaactggtcgcagctggcaaactgcacatccgaacgtgtgagctgcctgacggtggagcagttgaaggagacatccgagctgttctcaactctgctggcagaactggaagcgaaggataagcgcatcgccgagctggagttcgccaatcaatcgcaggacgatcatatcaatcagcagcaggacagaatcgattcgctggagaaaactaacaccgggttaggtcagcggcttggcgcagcagaaaagcggctggctacgccggtggacattaatctgccagagcgacgtgatgacagttatgactgggatggcgcttcaccatccgaggcgttcaatacgtgccggtctatctgcgggctgatgttccgtcagcaactgcgcgccggaggggtcaaagtcgagggggatgagtag

SEQ ID NO: 448275 - DNA, 303 bp, Serratia marcescens
atgacattagaagaccttatcgaactcaccccggcgcagcttaaagcgtggaaacagattgaatcaggggtgaaagcattcaaaaaagcaggtggaaagttctacacggtacttgagtcggttcacggctataacggggcttacgttgacgaaattgacggcggcgagcgcggaaagggcatatccacgaatgacgcttatatgccaagcatttttgatgcgggactggcggggtttgccgacgacccgcacttcttccatttaaccgacaaaggcgaagcactgcttgagggggatgcatga

SEQ ID NO: 448276 - DNA, 879 bp, Serratia marcescens; identical to SEQ ID NO: 447974

SEQ ID NO: 448277 - DNA, 657 bp, Serratia marcescens
gtgcagccggaaatccggtacgcgaaccgcaccgcctcgatgtggcttggcagtcagcagattgtcggcgctatcgcctggtgggacgtggccacaggcaaagcgaaagcggacgccagtgccttttcgctggtgctgaccgatgcacgtgggcacctgtactggcatgtgtgccaggagctgatcggtgatctggccgagttcggcgagcgcgacaagatcatcggcggccaggtggtgcagatctgcgagctggtgatccggtaccagataccgctagtggtggtcgaagtgaacggccccggtagtttcgccggcaagttgctccgccaggcgctgaaaggtaccggctgcggggttcgtgaggagttcaccataaccaacaaacaaaaacgcatcctcgacgcgtttgaggcgccgttgtcgtcccgtttcctctgggcgcatagcgacgttctcgacggcccggcctacgaccaaatgcgagatttcaacccggcggtgaccaaccagccggacgactttatcaactctggtgcgggggctatcagcgaaacgccggtgcgtatcggcaaattggtcgggaaaccgaccgctcaggggcgggaagattggcagccaacagatggcgatcatgaggtcgcagtggactattaa

SEQ ID NO: 448278 - DNA, 975 bp, Serratia marcescens
atgaaaattaatgaaatgtatgatgctttacgtgatgatattgacttggtgaattcatctttgggtattataaagaaatataggttgttttatactacatctgtcgatcccgattattcatactccaatggttatgatggctatgcagaaaagaactattacttcaaaggaaattggggatttgattacgatttctttaaggtttttgaagtggaggttgtgaacaagatttttgttttggatgaaataaaacaaaagataaattctgtttgccctgcaaccaaggcagcttttcctaatataaaatcattgaattctgatggatttattaattcatatttcacaagcaaccctcacaaagaaaatctatctgaatttgatgattgcatatttcacatggatggtaataatccgccatatatatcggcgatggaaattgatgctatagataataatttaagcaagattatttatagcggttcatattactctacgggtatggatcatggaaactcagatgaagttgtttgcgagttaaatattgtaggggctaaaaaccaccagcctttttactttgagctactcatagaagcatacgcattactcaatgagaataatttcaaaatgtcctgttttatgtcatatgcggcattagagagttatataaatcaaaagatatacggtcaagataccgatgagcggttttcagataagtttaaaaaagcatatgatacagtgcctggattaacaacccatgaaactttctctaagttaaattcactgttaagcgattatacacttgttagaaacaccattgcgcatggtagagatgatgatgagataattgataatatagacgttgactcagcaaaagaaatgtatatttacgtttcggctgtgattttagcgattgaaaatggatttcagaagctaaatgatattaaacttcacattaagcctaaaaagaagagataa

SEQ ID NO: 448279 - DNA, 978 bp, Serratia marcescens
atgaacgtgaccagtgaaataaaaaataaagaaaaatcgctcgccgagttaatggtgaaaatactcaaggagccgctcaatccccttgagagttcgttaaaaaaactcaacacagaggttctggacaccaaagataaggttgaagaaatcaatgatgccattaatgcggtaggtgcaaacaccgaagaaatcattaatccactgaaaaaatcgttacgtgagctgcaagacgacgatgtccctggggcgataagtaagctgagagattttatttcgacgcaggttgaagaaaaaaaacagaatattagtgccgcgcttagccaacaatcggcacactatgatagccagctcaaagccgcgaccggtgaggtctttgaaaaactgtcggatgttcttggccagcaaaatgagagtgtccaggcagcaatacagcagtatcagcaaacgggtatcgacagtgctgaggccttattgcagcaactgctgaatgctaaccgcttcctggaggaaacctgcgctgcgaatgccagcgagcaacagtcgacgcgagagcgtgaccagcggttggctgaacggctggaaagtatcatgcaggcccagcagcaaataaagcagtcgataagcgaacttgaccagcagctcaagggcgtaagccaaggagtgcaaacgacgcgaaccatgctcgcggaacggcaggaaagcgatcggaggcaagtgttaagcagccttgaaacgttgtcttccgacgtcccggcagcactggtgcagcatttgaccccactaacccaggcaattgagtctctgcaaaccagtcagcaggcgttgaccgaggcagtgagccagcaaaagagctatctggaggcgaaaattgccgcaagtcagggtagattccgctacgttgtcatcatttttgccctgtttgctacctcaacgctagcttatatcggctatgacatctggaaaaatttaactccctga

SEQ ID NO: 448280 - DNA, 1932 bp, Serratia marcescens
atgacgtccgggaaagttattgattattggcagcggttagagtcacggcagtcggagtgggcttttcgcgcctacgatcggctgattaagacattaagtcatgacgttcaggaaaggatacaacttaaggaaagcgatgccgaaccgtacgtggtcatatttggtaagacgcaggtcggcaaaaccaccttactgctagacctgatggatatcgatctgcagcagatggcaacgctatcgcacgtgctacgcggcgggcgggaagccggaaaatcatccaccgccaccgccatggagtatcgtcgttcaacggaccagcgctggggattgtttgtgcaatcgaaaacgcactggtttgcctctgacgacgatatgacagagaccttagcgcagctcagaaagcagatggaacggggtgaactggttgttgattctccctgtattgtgcatattccgaggcgttttttcaggataaaaacttcgggagcgcccggtgtgcgtattctggatctgcctggtgataatcccgccaatatggaagagcaaaagcatgtaaatcacatggcgaagacctatcttcccttcgctgatttggtcctgctgattggtcgtggcgacgatttgagcttcctgcagccacaggttatcaccctgccgggtattgaggactggcaggcgatgccgcatcggtttcgtatcgtgacgacctattcttactcagcgcagtcggtgaagaccctgattcgcaacgatccggctatcgatatcgcgcagttacgtcagcgccttattgaacagattgaacgctttagcaacctgagcgacgcggcgaaagatcggaacctctactttccgctcgagtttggcagcagttggctgagtatggccgaaaacgataccgccctttacgcccgggttgcccccatggtcagccacttgcgtagcgaactgttggaacaaattgcaacatcgacaagcccactcggacggctgcgaagtaccctggatacccacctcagcgttaaatatatccaggaggaaaaaacggcggcaatcgaaagagaactgctggggctaaaaaaacagcaacaagagacaaaagataaactgacggtttggaaaaacgctattactcagacgcagcagaaattaaaaaaaacagagaggttattaaaagataacgcttcacctgtcagccgacggcttatcgataaagctgcggaagaggccgcaaactttaaattgaagggaagttacagcagtgaaaaatgtaccactttacatagcatgatcgccgactattgctctaaaattaagaatatccagctggatgtgaaaaataaggcggtctactggcgaaaagtggcccgcaacaaagttgaacctacgagacaggcggttcaggatattcttgatgaaaacttcagtgctattcgctataggctcaatgactactggatcgacacctatcttagttctgcgaattatttatcggataaaaacagtgtcatccatgccgctgataatgccaaagtggaagtcattcggttgtggacctcacaatggatgactgccgcagagaacgtccataatcaatacaaaagcgaactcaccaaagatggggtaattctcgaggagttgcgggtagagcagaataaatcccttcagaaacagatatcacttaagcaacaggccgtatcgtgcgaagacgagttaaagagaattgctgttgaatcacaagaggatcttgtccgctgcaagcagtttgttcactttcttgatgaagagtatctcaaaacattaagtacgcgtctggattcagtctttcaggaacgtaatgattgtgatgcgttattacaagttttctcctgcgttgcgttgaaaaatcagcgagaagatttaatgaatttaactgaaaagtattctggataa

SEQ ID NO: 448281 - DNA, 2205 bp, Serratia marcescens
atgacaatggaatcacctgaagtccagctcaaggctttgaataatgctttgcgtcgtttacgtggggcctgctccgcacttgacggcgaggagcttgatgaaaaattacttgaggtcatgcgacgactgctacttgctgaggtgctcgccgatacttggattgtggcgataggcggctcgcaaggggcgggtaaaacgacgctgatggcgagtttgtatgacctgcatcatgacaatagcggctggttacgcagtaatgaaggacgcggcgagaaaatgccggtactgatcctcgagagtcgtgagactaaagtagcgcagggttatgtccgccgcctggtcgaaactggaaatggtttgacgctggatgatatcggcgtcgacgtcaacgagtttcagcgcgcggtctgcgatcctgatgccggggatttactgccgatactgaaggtaccgcagcgttattttacccgcaataaccaggcctggttactgcttcctggttatgaaaaacaagagcgtgaaaatcgtgagtggcaggaactgatgcgtcaggcgatgatagcggcaggcggttgtattatcgtgaccgatgagacgcgactggcaaaccaacagcagctcgaaatcgtcaaagatatgctggaaaaagagcttaagaattgtaaaccttatattgttatctccaagacagaagcgtttcgccacaatccgcaacgtcaagctgaattaagaaaaagcgcggccggaaccttcaatgtcgctgccgaatatgccgataacaacattattttaaccggcaccgacgatccggaatacgtaacagaatggatgccgcaccttcgtcgggccattgacgaccttaacttttccggacaaaccaaccgttatctccagttaacccaccttactgggattgttagtaaggatctgccgcgcgtcatgaatatgatccgcacccagtcacgtctgtattaccacagtgataaaggcggccaggacgatggcagccaggtgctggccgaagctctggaagtgtttgacactgccgtgcaggaactgcgggaggagcataccaaaaaggtaaaaatgtgcatcgctaaaacttttgaggcggcgaaggctaatatggaccgtaggctggtcaaggagcatgagggatttgccaactggatatcgaatgcatttgataccaccagtgagacaaaaggcaaattgcagcaactggttcaggattcatggcaggacgcatcagctgatttcttcgacgactatgtgaacagtctgcaacaattgacggcggcgaaactcaagcccattccaaacgacaacgatcgcccaaacttgcctgcatcaccgaagctggagaagctggtagcacttggctatatgaatagcgccgggcagcccgtgcaacacgaacagctggatgcggaaaaaataagcaatatcaaaatgttgctaaatcatggtgccacgtcgaatgcggaaaacatcccagtggtgaataaacagctgaggaagagcgtggaattgatcccggtgctctcgctagagtacacccgccttgtgtacgccatgcctgagatttgcaaagagctgcggccctacgtcacgcttgagcaggacgatggcgagacatccgcgggtaacgtcgcggcagaaggggttcaaactctcaacgcaggggttgatcttggcaagaccgcaataaaatcactggccgcggtgctggcgattgacgttgtcagcgatggcgattccgatatcctcggcgcgctctttggccaggataagccttctgctgacccgacgggttcacctcttccccccgcaccggtgatgatgcatcctgctgccgttgcggtaacagccgttgtggcggcggcctacgtgaccgcggctgcagtaacgcgaatgcgtacttttgagaaaaaagcgagcagccaggcacacgtcatgcttgccagtgttcatgaccaccatattgagcatttacgcaatcaattcgatgacacgatgagcgcggcgcgtaagcggattagcgaaacgttacgtgcgcgttatcacatggacgaaatgctgatgcgcaaggatcggctcgcgaaagccatcgccgatgtgaatgcccttatcgacgacctgcgcaatgagctgggttcatcggctacgggcctgcaagtattaatcaccagccgtggtgagtga

SEQ ID NO: 448282 - DNA, 396 bp, Serratia marcescens
atgctgagcgcacaaacgctgcatgttgccatcaaccgcccttgtgacgaggtgtatgcctttctcagccagccggaaaacttccccttgtgggccaaagggttagccaacagcttgcggcgggaagatgaagactgggtggcggacaccccacaggggcggatccgcattcgcttcagcgcgccgaatgccttcggcgtgctggatcattgggtgacgctgccggacggcggcgtggtctacgtgccgctgcgtgcgctcgccaaccggcacggtaccgaggtgatcttcaccctgttccgccagccggacatggacgatgcgctgtttgcccgcgacgccgggctggtgaacgccgatctgcaggcgctgaagcgctgtcttgagtccggttaa

SEQ ID NO: 448283 - DNA, 189 bp, Serratia marcescens
atgaataaagcatcttggatcaaaacttggttttctggggctacagtttacacatgcctcgatctcagcaagcatgtgggggacaactttctttgtggcgcaatatggccacagctggtaggtattgtactcatatttatcatttgcttcggcgcgcgttctaagctgaaggagttgagggagaactga

SEQ ID NO: 448284 - DNA, 336 bp, Serratia marcescens
atgttacgcaacctcattctttattggctgacacatgggtatgcaattatttgcagcattgccattgcggctggggattattttatgctggctgcattggttgagaagagccgattggggggcggaagaatacgtttggggcgcgatctaacagatcgcgccctggggttgacgttgggggggaagcgttacagcagccagtccagcaacaccacgccgcacaggctaatagcccaggcgatagtggtgggcaccgaccacaccatcatctgttggcgcacgtccttgatgcccatcatgcggttgaccacccagaacatgctgtcgttgaagtag

SEQ ID NO: 448285 - DNA, 747 bp, Serratia marcescens
atgattaaattagaaaggaattttactcctgatttctttactcgcacggatcttcaatccttaactcaggagtttaaagataacggaacagctgtatggcatcatccggaagtaaaatctgcatgcctgaaattaagtgatggtaaatgcgcattttgtgaggtaaagcttgaagaggctagcacctataatgaagtcgagcattttaaggacaaaaaaaccttccctgacgatgttatcagatgggaaaatctcttgccttcatgccgtcattgtaatggttcaaaacaacgtcataatgtagtactaaaccctattataaacccatgtaatgatttaccttcagaacatctttacatgagaggttatcgtattaaaggtaaaacggatttaggtacaacaacaattgatgttttaaattttaatcacagagagcacaaattcataccgcgatgtaaagcaggggaagttattgatagcagtattgacgatgcaactgaaaagtttaattggtttattgaaagtccaagcacgagacgtaaaaatattcttatgaatttagtcgaggcaattttagatgaatgtcagaaaaaatctcctttttctgctgtgtcggcaacaatgcttcatcgttcagtcgaatatgctcatctgagagaatccatgcagatgcgaggtttgtggacagattatatgcaagaacttcatgatgaatctttgaacttaacgttgccatcaattcgctaa

SEQ ID NO: 448286 - DNA, 852 bp, Serratia marcescens
atgcgtaacttcgattataagcatcttgatgcattgaatgcagataaatccctatccgatgatgctgtatcgcaacaacttaattcaggtgtcaatttaagtgatatcaaagattggtttgctaagcgggacttgtttgaaaatgtaaaaaatggttatgggcctaatacaataaaaaacatacatcttgcaagagaatgtatatcaatattgaatcctcaattttccttcaaccgggttgatcctaaaacttacgatatttttgtgaatacaccaaccggggtaatttggtatgaatatctttcctcgggatttaaatcatgtatgagcctccttcttggcattatcaaagagatcgagctgcgttatccggatcaagacatttatgcacaagaatttgatggagtgattcttatcgatgaaattgagatccacttgcatcctgagtggcaggcaagaatcactgaagccctaacgacaacatttccagcagcacaatttattgtcacaactcacagcccacatgtagtacagaatgcaaaaccataccagatcatagcgttagtaccagatagtaatggcacagtaaaagtaaaagaacttcctgaaaatggcttgggctattcggcttggacagtcgaagaagttttgttggatgtaatgggaatggaaagcactctcagcagaaaattacaagaactgcttgataatttcgaacgtttagttgatgaggaaaatttcgaaaaagctaaagaaatttatgattatttggatatagcgttgcatcaaaacagtgttctccgtaaatctcttagaatcagcctgatgtcaattcgggagagagacgagtaa

SEQ ID NO: 448287 - DNA, 342 bp, Serratia marcescens
atgacgtcagaaatgaacttgctagacactaaaaaagcattgtcgaatatttttattcgcataaaagatgaaagaacaccacacgggaattttttcttccgcctagatcaactgacttttgtatcagtaatagataacaaagggctgactcctttgttggtgatttctggggggcatatcgatcccagcgtgtcatatgaacaatttatagactttatcacttttgttattaacgacgtcaacaagagtggtgatgacataaaaatatatgagctaatcattaataatgaaactgtgcgggagttaaaccaccgcacagagaaaaactcacgagttaattaa

SEQ ID NO: 448288 - DNA, 186 bp, Serratia marcescens
atggtagcagacgtgattattgtaattaatagtgagtctattgagaagtcctcgtgggctcaatatgaaatttctttagctaaaacacatgataaaaaaataattatgattgacttttgtaccgatactaatatatttgaatttgtagaaagcataaaaaataagttgctagataataagctataa

SEQ ID NO: 448289 - DNA, 231 bp, Serratia marcescens
gtgaagcttaaatatgttgtcttttgcctggcgacgggcgcccgcaggggggaagtggcgaagctacggaaggaagagctgatcggcaataaggtcacctacctgaacaccaagaacaacaaaaaccggacggtgacgatctcgcccgaactctgcaaagagatcaccagcggcgtaaaagcgggggcgttgttcaaggatttgattacccctatgtcaggttgtgcgtga

SEQ ID NO: 448290 - DNA, 906 bp, Serratia marcescens
atggcgaaatatgaactagatatattgaataatgcacttgatagtttgaatgaggcacttgaaaaatatgaacaaggacagggaggtaatgttaggcagcacaaatttgcattactccatttttgccattttatggagttaatacttaagtattatctaactacaaaaaatgataacctgatatataaaaaagtatatgattttattctaaggaaatctagggacgaaggtttaacattggctgaagcatatgaggaactggaagaagatggatatgatttcagtaggctaatagcaggaaaccctaacccgttcacaattacaccagatcaaatattggcctttattaaatctgatgatgcagggatcactgatgagtttataacggaaatttcatcaatgaaggcgttgagaaataatatcgagcattataaatttgaaatggatactaaagatgttcggatagctcttggccgtttaacccggggatttgatgaattctatgagtatgttggcttgggaacattgcagcagtcaataaacaaagctcagctaggcatattccaaaccttggcggatgaatacgagcataatttagctgaagcaaaagttgttgctcaggaagcgcatagagatgcatttcgaggggtaaggccaaagcactatctgttcgttaactttacaacatatgactgccctgcatgttgcgaatcggacttgatgatacctaatcaagagtcaggaacagggtatcggtgtacgcattgcggtaacgaagagtctgatgatattgaagttgattgtgaaatttgcggtgcgtcttggcctaagggggaaatgtcctcttgggtggacacatatacttatacttgtcccaattgtaatgacttctccagtaaggattga

SEQ ID NO: 448291 - DNA, 213 bp, Serratia marcescens
atgccggtgcattcgatgatcagccgatcgaacaccagctggccgctgtcgacgccgtccagcagatccagcagcgcgtccgccagttcgttggacttgctgcagcagatgcagccgttactcaacgtggtgatgcggctggcgcgatcgccgatcagcgcatcgtcgatcggcacttcgccgaactcgttctcgatgaccgcgattttatag

SEQ ID NO: 448292 - DNA, 987 bp, Serratia marcescens
atgagaaaaattgtatatattactctaatcgacttagatgagatatcctctggcgttgcaaagaaaattgtggcgcaatgtaaggctctcactgattgtgaatatggtgttacggtgctttatatggtgccgtcaggaattaaagtgtgggacttcgctaataataggaaggaattcgtatttactgaaaaattaattgtcgaaatacctacttatccgtttgtgcaagaaagcaaatccgcaaaggctctcagttacaacgcgtatatagtattcttctcatggctgttcaataaacgaattgataccatcagttacatgggagcgttggaaaaaaaaatttggggtgtcaaggctgtaaggatctttaactccgtaccgctcggtgctgttccgttgaaaggcgatgttgcacatgaaggggtgagatttattggcgtggctcagttatcatattggcatggctacgacagagttataacagggatttccgattataataagcggaatccggatactccagtttttttccatatcgtcggcaatgccttgtcaagtaataatgatgaattaaaacggctgaaggaattatctgaaaaactgggtgttgacaagcaggttatttttcacggcgcgatgagtggcgaaaagctcgacagcgtctttgatggtatcgatatcgcagttgactctctggggcggcatcgcagcggtaactattataattgctctataaaatctaaagagtactgtgctcgcggtattccgtttatcaaaagccatcaggatgattcttttaatggcactaactatttctatcaatgcagtgcggatgactctgctgtggatatttcagccattctctcgtggttcgagagcaaggggcattctaaagaggagttacgagcatatgcggaaggtatctttgactggaaaattcagctttccaaggttatgagtgaggtagagaagcgtaatcccgtctag

SEQ ID NO: 448293 - DNA, 147 bp, Serratia marcescens
atgctgatgctgccaaacatgggcaagctcatgaataaagaaatgttgttttgcttaattatttaccttagagaaatcagccagatattcctcctctcggaaatatatctcgccgttgggggacataccaacatgcttgccttgtaa

SEQ ID NO: 448294 - DNA, 1224 bp, Serratia marcescens
atgaactttgaaatagagccattaaaaaaggaatttgcaaatattttaaatgaaacattacaagaaaagttattatcaccgccatttaaaattaaaacagggaaagacttggttgaggattttaaaattagatgcgtcaagtatatagatagcattaataacctggtggaaacagagaacactgatgacttggttagcgaaataaaatcgaaatccaacacaatacatagactatatcaaactataacctctgcaatggagaattttttagcaggggatataaaagaagcatatgatgtatttgatcaaggactgtcagaaactgaaattagcaggattatatttgaaatatctatacctctatcagatttattcgatgagaaaaataaactgtatagagtaaggaaaagtgacaaacctctaaagagtaggcaagacatgtttcacttaccatttaataaacgtcatttggtaggtgctcagcggtattcagttgcaggattaccatgtttatacttaggtacttcaatttttgtatgctggttagagatggaaaagcctgattttgacaaactatatatctcagcctttgaaccagctaacaaatcgaatgaactaaatattattgattttgcctacactatccactcaatgtttaacttcgaaagaaatgaaattcttttcaatactgagacaaccgatgagtttaagaaaagagccttagccaggttggttttattacccttagttattgcctgcaattatatcaagtcagaaagcaatgcccattttaatgtcgagtatatcatcccaaacttattgatgcagtggattagcagaacaaaaagagataatgtagatggcataatgtataaaaccaccaaaatgaaaaatgaagttaacagtaaaattggtataaatgtaatcataccacctaaaattacatacaatgattcaatttcaaataattactgccctagattagcatctacatttaaactaaccaacccagtcccttggcaggttttcagaactctggaatttaaggactttgacttttattctgactcagaaagcagcattaaaaaatacaagggaattagaaatcttgatgaagccttagttaagcattataaggctactgagttttataaaatcgaaagaaccattaatgagttgatggagtcaaatctgattagcgaaagatatataaaagtatcttag

SEQ ID NO: 448295 - DNA, 1494 bp, Serratia marcescens
atggttctgcactttgagcagcgcttaaaatccaatgccgatcatggtaagggcatgattgttaccatgtcccgccgtattgctgctgaactatataaagaaatcatagccttaaaacctgaatggcacagcgatgatttaaatgacggtataataaaagtcgtcatgacctcttctgctgctgacgggccagaaattgccaaacaccacaccaccaaaaaagaacgtcaggttctggctaaccgtatgaaggatgacgacgacaagctgaaactggtgatagtacgtgatatgtggcttaccggctttgatgcaccaagtatgcatactctttatatcgacaaaccgatgaagggccataacctgatgcaggccattgcccgcgttaaccgggtatacaaggataaaatcggtggtctggttgttgactatctgggcattgcttctgatttaaaagaagccttgtcgttctactctgatgccggaggacgtggagatcctgctgaggttcaggaagaagccgttacgcccatgcaggaaaaactggaaatcctggaaagtatgatgcatggctatgattacaaagcctactttactgcaacaacttcacagcgcctgacgattatccttgaatcagaaaaccacattttaggtttggataacggcaaagggaaaatgcgcttccttgccgctgttgctgccatgtcccaggcttttgcactggcaacgccacatgataaagcaatggaagcggcacccgaagtagcattcttccaggctgtaaaagccagactgaataaatttactgaaaactcagacggatcagaagaagaacacaatgacagtctcgaagttcgggtaaaacagactatcgatcaggctctggttaccgataaagttgttgatatctttgacgctgcggggatacaaaagccagatatttccgttctttctgaagaattccttcaggaaatgaaggattaccaacacagaaatattgctttggaaacgcttaaaaaactgctttctgacgagatcaaggttcgctcgaatcaaagtatcacccaaggcaaaaaactgattgatatgctgacctctgcaatcaatggctaccagaacaagatactgaccgcagcggaggtaattgatgagctaatcaagcttgccaagactatccaggaatctgacagccttgccagccagttaaacctcagcgcttatgaatatgccttctattctgctgttgcagataacgacagtgctcgcgagttaatggaaaaggaaaaactacgagaactggcagtcgtacttacggaggctatccgcaacaatgtcagtcttgactggacagtgaaagaagcagctagagcaaaaattcgcgtggtggtaaaacgtctgctcaaaaaatatggttatccacccgatatgtccttgctcgccacagagaccattttgaagcaggctgaacttttagctggagaattaggaaaatga

SEQ ID NO: 448296 - DNA, 564 bp, Serratia marcescens
atggcagttatctacaagatttttgacttccccaaagaaacatttattttacctgcattcgttctatatatccttaattctgttgccggaatagtttatttgtttacacctataattcccggtataaagttcatgctcaacttcaaaaaagaaattttcaatgacttaatttgtgaaattgacaatgatgaacaaaatgtagaaaaactgatgccttattcgattactgaattgaactatgcgattgattggttgaacattaagatacaaagattgaaattaaggatcaatgatttttttggagaaaaaactgcggtcttatcaataataggattggcatactcagcaattcaaggttttggtggcttaaacaaattaggtgataccatatcaaaagggctcttcaattctggcacaacaaatacactaattgtattcgggttgtttttccttttaggattatcacttggagcattagcacttaaaaatgtagcaaataatttgcaatatctgaaagaaatgcttgagttagcaaaaaaaataaagcaacagaataatgagtaa

SEQ ID NO: 448297 - DNA, 555 bp, Serratia marcescens
atgatgagaaaaatagcactgcccttgacgctgctcggcgccgccatgctggcaccgccgctgcaggcggcggatgggagtattaatgtgactggcagagtcaccgaaagcagctgcgtgctggatgccagttctaaaaatcagactgtgatctgggggaagacggaagccgtcgtaccaaagatggttttagcgtattcccgaagtatctatgtacagctggcggattgcccagacagcatagaccaggtgaaagtcaggttcgaggggacgcaggcaaatacccagcaactctctggaaacgtttttgctaccgataatagcgatcaacccgatgcggcagaaaatgttggtttcataattagtaatgctcaaggaaaaaatggtggtttctggaacgatcttctgagggttaatgagttcagtcctgctattgaattgaataaaagggaggtgaataaacttgaattccggacgggatattccaccgataacaaaatgcctaccgccggggttgcgcgaacgcgaattcagtttagcctgatttatccttaa

SEQ ID NO: 448298 - DNA, 513 bp, Serratia marcescens
atgaaaaatatcacaaggggattgttgctggcctatagtggattgatttttagcgttagtggtgctgatggtagtgtagatctagaagtgcgccttgtgcatgggacatgtagtttgacaacagatagcaagaatatgcaggtgtcgctaggtaatatttctcgcactgagttggcatcgattggtacagttagtaagccagtttcgtttaccatcaagggtactgactgtgtacctgatatggtcacctggttccgttttgacggcactacagacgaacaggattcatttgcgttaaatgaggggtccgaagctaaaggagtaggtgttcggctgcttgaatatgatggtattcaagcaaaaagacctaatacttctagcggctatgggacatattcagacggtaatgggactttttctcagtcatataaggtgcaatatatcgctttatctgatcaggtaactcctggtgcagcaaatgtcactgcgcaactcaatctggtctataaataa

SEQ ID NO: 448299 - DNA, 699 bp, Serratia marcescens
atgaaacaggtaagcgacctgatgggacaactggatattggcgcgggaatgccgccgaaggggtatacgccgcactcacagaacagttgcgatcagacggacttagcgaaagccagatacgcaaaattttggatgaggatgatggagatctattcggatcggtggacggcgaagaacggcagggcaccgtcgttactttggaagcaggcgattacagcgctcactgatcagcagatccaacaggcgatagccgcatgtgtgcagcgttgctgggacggaaacagctatgcgcctgacctggccgacttcatggcgatagtgagccaagtgtctgccaacgcgtttggtcttacggctgaagacgtcatggatgaattcaggaaatacaaccgggataaataccgtcacagctgcgccgaaacgtacccatggcgccacgacgtgttgtattggattgtttgtgacctgagaagggaaatgatccagaaggatttaaacgatgttgaacttgagaagcgcgccgggaagcatctaaagcggtgggctgaaaaggtcaaagccggggaaacaatcccgaaaccagtacctttgctgtcagaaaaagcttctgagattaagcgcggtgcacctggtgccggacattcagcagcgatggaaatgttggcaagattgcgaagcggaaaaccgaatacgaattga

SEQ ID NO: 448300 - DNA, 261 bp, Serratia marcescens
atgggtaaggggattcaggctcaaacggtaaaggtgtattactcgcccacaaaaaaccgccgctacttttcaaaaagcgcagctattcatgcagaaacaaaagccaaaatttttgcccgctacccttcagaaacgccggattatgacaacggccaccttacctaccagggttggaatattgcagaagacgaaccagagcgttaccgaaagatgtaccgccgcttgcgtcgccttgtcgcgaagtcagtagggggtatgtga

SEQ ID NO: 448301 - DNA, 936 bp, Serratia marcescens
atgagcaaccaaatcacaaccatagattctccagtaagcaattccgtagccggtacagcagcaacaatatttagccctgaaggccttaaccagttgatgaagtttgccgaagtaatggcacaaagcagagtaacggtgccagcacacttagccggaaagcctgctgattgcatggcagtggcaatgcaggcagcacagtggggaatgaacccgttcgcggtcgcgcagaaaacccacgttgtaagcggaacattgggctacgaggcgcagctagtaaatgccgtcatcacaacaatgtcaccaaccaaagaccgcattaattacgagtggtttggaccttgggaacaagtgatcggaaagttcgtggaaaaaacctcacaaaaaggtaacgcctacattgcaccagcatggacgctgaaagacgaagccggatgcggtgtaaaggtttgggcaacgattaagggagaggaaaatccacgcgtactggagcttctgctgtctcaggctcaggtaagaaactccacgctatgggcaagcgatcccaaacaacagttggcttaccttgccgttaaacggtggtcacgtctgcattgccctgatgtgatcatgggagtttacaccccggatgagttggcagaaatgccacgcgttgaacgcgacgtcaccccacccgccaccagcgccgccggcgtaaatagccttatcaacggcaagaagccggaaaaagagatcaagacagtgaaccaagatgagcggtcgcctgacgatctgctggctgcatttaccgaagcggcaaacaaagccgcaagcgtggaagacctggacaaagcctataaatacggcgcccacgttctggcgtcacatgaagaacagttgcaggcagccaccgacgtttacaacatccgtcgcgatgagttgaacgaagtcccaatgtaa

SEQ ID NO: 448302 - DNA, 1914 bp, Serratia marcescens
atgctattaatttcatgtcacgctgaaaacttgggggttatggataaaaatattagtaatttacatatggattttgatgaaagtgatattgatgtttttgttggaaaaaacgcaagcggaaaatcaaatttatttgaagcgatagttgaaatatttcgtcatattgatcagtttgaacaagaaggaaatacgattatttatgattatggaattagctacgagattgaccatgtcataactaaaattgaatggaatggagggcggttgctcattaatggtactgaagggcataggaagttaaataaattacctttccctgataatatcttaatctattatactggacacaatacgacgatttctggtttgattgatagatatagagagatatttcaacgtaaaattaaaggggctggtttttccgactcccgtaaatttataggaattggttcaagttataaaaatttacttttatctcttattatctctcaaagagatggtagcccagcacgagagtatattttaaataaattaaaaataggcaagctaggcataacaatacctggaacgaaaaatgttacagaaccggttataagattgagattgaatcgtcctgaatatgccatgaacaaggcaaactttaatataaaaataaacgataagactgatcgctactggaaagtagagggtattgctaaggtttttttggatgagttaactcaatgttcatgggataatgctgaacaactctcaattaacgaaggttattttcaagatggtgactattatattcttttgatatctataaaaaaaatgcaagacctatttgaaaatcgatggggagatcttttcttacagtttgatagtttagatgtactaggaatgcttgctgatataactgtgccccttaggttgacttcagatatcgaaggtgatattggcactttcagtgatggacaatttcaatctgtttatatttattctatagcggagttttttaaaaatagaaactgcgtgacattgctcgatgagcctgatgcgtttttacatccagagtggcagcatcagtttattaaccaagtgagagatataagtcctgttacattgcataaaaaccatatattattgacaacgcatagcgcttcgacaatagcttcatttagtcaagaagatataaagataatatcttcagaagaaaataaaactaatatctgcaaaacaaacaaaagcgaagtaatacgtgatttgtcatctgggttaatatctttttcagaaactgaagctcggctagttctgaaccaatttcttaaaacatcctctgggaatgtgctttttactgaaggtgtcactgatgagattattctttcgactgcatggagcaaactaaatccaaatagaccgtgcccttttggaatccaaaatgcttttgatcgtaattttttgagggtattattttcacgcgatgatttgaaagttaacttccctgaaagaaaaatgtttgccttatttgattttgatgatgcatataatgactggaaagggttgaagggacagggtttaattgacaatccatattatgggttggctaagaaactaaattatgagcatcactatgcattgcttcttcctgtccctaaggacactgggattagagatcaagttatcgatgagtataatgtcgcttggggagctcgtgggggttctcatttatctattgaacttttattttataaggagaatgtacttgaaaaatggttttccaaacgttcggttttaggtggtggctcaattattgagtttgttggcgataaagctgaattcgcaaaaaaaatagttccaacattatcagtggagagttttgagatatttagaactttatttgattttgtagaggataaatgttcatgcgattaa

SEQ ID NO: 448303 - DNA, 1779 bp, Serratia marcescens
atgagcgttggaaaactgattaccgatcatatcgatatctggtcttcggccttacaaactcgctccagcgccgggcgaggcagcaacggtaaaatcgacctctatggcattaagaaactgcgcgagctgattcttgagctggcagtgcgcggcaaattagtgccgcaggatccaaatgatgaaccggcgtctgaactgctaaaacgtatcgcggctgagaaagcagagttagtaaagcaggggaagattaaaaagcagaagccgctgccggaaattagtgaggatgagaagccgtttgaattgccggaggggtgggagtggcaaagattgatcgagttgggttcatgggctataggatcagggtttccaacttctattcaaggcattacctgtgaagatattctgatgtgtaaagtcagtgacatgaatcttcaaggaaatgaaaaatttattaaagttacaaacaatactatctctgaggaatcggctattcagaggaaaataaatgtttccgaacccggaacggtaatatttccaaaaattggtggggctattgctacaaataaaagacgaattcttgtcaaaaaaacagctattgataataactgcttagggataagaccttttgaacgaataaatcttgagtggttttttttaatcctgaatgtcattgatatggcgaagtatcaatcaggaacgtctatgcctgctataaatcagagcgtgattggcaatattgttattgctcttccatctgaatgcatgcaagccagaatagtagcaaaagttgaagagttaatgttcctttgcgaccaactggaacagcgatccctgaccagtctagatgcgcatcagcaactggtggaaaccctgctggcaacgctgaccgacagcaaaaatgccgaagaactcgccgaaaactgggcgcgaattagtcagtgtttcgatatgttgtttaccaccgaagcgagcattgacgggcttaaacaaaccatactgcaactggcggtgatgggcaagctggtgccgcaagatcctaacgacgaaccggcttctgaactgcttaaacgtattgagcaggaaaaagcgcagctggtgaaagaaggtaaaattaaaaagcaaaaaccgttgccgccagtgagtgatgaggaaaaaccgtttgagttgccgaaggggtgggagtggtgtcgtttaggtgatatagcgcttggttcggaggctggttggagtccgcagtgtgagtcacacccaagaaatgatgaagaatggggagtgttaaaaattagtgctgttacttggggggtgtttaaccctgaggaaaacaaagctctacctgtgaaattggagcctaaaaaagaatatgaagtcaaaggaagtgacttccttttatcaagagctaatacctctgagttggttgctcgatctgtcgttgtccctcaaacagtacctaagcatttaatgattagcgacaaaataatacgcttccaatttccaaatttactggacgttaactatataaatatggtgaataactctattttttcccgggagtattacggcactgtagcaggaggtactagtacgtctatgaaaaatgtcacacgaaaccatgtttcattgctgccagtgccattatcctctcgtaatgaacaagggagaataatttcaactgtcactagtatttttagcttatgtgactttcttaaaactcgaattatcagaagtgaagagattaagaaaaacttaacagatactgttactttttatcttgagcattaa

SEQ ID NO: 448304 - DNA, 1746 bp, Serratia marcescens
atgtatctggccgaactgaacataaagaattttcgaaagttgaaggatgcaaagctctgcttccaggcaggcttgaacgtactggttggggctaacaacgtagggaagacagccattgttgacgcactccgtgcattgttggctggccatgaagaatcctatcctcgctttagtatagatgatcgccatcgaccaaaagtggggcaatctgatggcgatatcaccttccactatgtatttcgtgggcttgatgcggatgaagaagcagatttcttggctgcgctccaacccgggaacgacgacaagctggaggcacacatctggattagatattcagatgcggacaaggtaggacgcttcagaatcaagcgttggtgtgggaaccatgaggatatcggccttacatcggatatgatggagaatctgcgaggtgtctatctgcagcctctgcgcgatgcatctcagagcctgaggccaagtcggaatagccaactatctcgactattgcaattgctggctgatgaggcgggacgtgcgggtattaatgatgccctgaagcgcctagatgatgagttaaaaaagcatgaacccattatgcgcacccaagatgcgatttcaacacggcatagttcgatgctcggtgaacagctatcgcaaattttggaggtcggtcttagtgcaagcgatttccaaaagctatcgtcacggttgtctctatcggtggactcgtttgagatcgcgcaaaatggacttggtttcaataacctcatttttatggctgtagttctcagcgaacttgcaaagaatccagaagccacgtaccgaggattggtcgttgaggaaccagaggcacatctgcaccctcagcttcaagccgttttgttgcgctacctagagagcatccaagtcatcgcgggggagaaacccgttcaactatttgtgaccagccattcgcccaattttgcaagtatcgctaatctggattgcctcacttgcttggttgatacggatgagggagttgaaacgttcttcccacggacgatcaagttcgataagggtaaacgagaaaagctagagcgttatctggacgtgacccgagcggagttgttctttgcccgacgagtaatattcgttgaaggcgcagctgagttgatgttgatagatgctttggcaacaaaatctggtcacaaccttagggagcatggggtcagccttattagtgttgaagggttgaatttcgactcgtttctaccgctatttggcgaacatgcgttgaagatccctacggccctaatcacagatgctgaccccgaggcagaggtcgctgaaggagaagagcccaaagcactatacccagcagccggcgacgttgtaaaagtatctgacaacacggcgaagatgaaggcgctcgaagataagttcgtgcaagtatgccatggcgttaaaacacttgagtacgatctggcgctgtatgcggacaacagggacgcaatgctgagggcgcttgcagaaatgcacccgaagattgctgtaacggtaaaggcagcggtggatgctgcgggtaacgatgcagagaaagctcgggcccttttctccggcatgttcgagcgtcctcagaacaacgtgcagaaggggcgattcggccaagagctcgcgcaagtgttgaaggatggcgcagcttgcatcgtgcctacttacattcgcgaagccattgagcacgtctgccaagtccgggtggcaccatga

SEQ ID NO: 448305 - DNA, 1737 bp, Serratia marcescens
atgaacgagctttctccggaacagcgggcgattgtcgatgcgcccatggcaccattagcggttatcgcgtgcgcaggcagtgggaagacaggaaccgccgtgcatcgagtagttgaaatacggagacggcttggggaaaatcgcggcagggtggcgttgctttcattctccaatgttgctgtcgagacgttcagaaaaggctatcagtcattggctcaggtgctgcccgctgactctgggcgcagtcgcgtggatattgatacgctggatgggttcattactaccaatgtcctacgaccacatacatatcgaacgatgggtgccactcagtctgcgtttctcgttgtcggtagtgaaccgtttttaaacgggtttacatacaggacaggccagtaccctcttcctgtgacgaaaatacaggtggcgtttcatgagggcgcaccgatcttctactacgacgtttttgggaaacctgaacagttgaatcaagccgtcgcccgtcagctggtcgatcagcttggccgtattggtgcctacactcacgaccttggccgatattgggtctatcgaactctgcaagagcaaccagccatcctgcaggcgctggcgcgtcgctatccccatatcgtcgttgacgaatcgcaggacattggtacggcgcaccaagccatcttggatctgttggcagctgctggcgtgcaaatctcgctgataggagatccaaaccaggggatctacgagttcgccggagcggatggaaccttcttaaagggatataacgctcgtgttggcgtcgctgcgtttgagctaacccgcaactatcgctcggtcccatccattcttgatttagccaacagactatcgggacgcgatgacacgccggaacgggaaccaagagaggaaggtggcggtgcctactttatcggttacgccaaagcagagctcccacaactgatggatgcgttccatgcggaagtggccaacttggggcttcgtccagagaagtctgccatcctctgccgtgggagaacgcaggccgacgaattagcaggagtggatgctcctgcgggccaaggtgcggtaaagggatttgcttcggcagcagtcttgcgcgacaagcagcgggactaccattcagcattcaagctggtaaccagtagcgttgtcgcgctcatggataatcctccgaacggactgttatcgaagctcgccaaaccagctcagttccccgaggtaaaaggacttcatcgattaatatggacatttacgcgcaattccgataccggcctgccaccgtcgaagctcgtcgccgcgaacgagtggcacgcagcattgttggagcggactcggaacctgttggatcggattcgtgttgagttcggttttgctccggcgaagaaccttggtagaaagctggcaaagaggggtttaccagaaacgcctcttgcattagcagaagacttggcagcggaacgtggtgccaagattcgcgtggataccgttcaccaagtcaaaggcgaaagcatcgatgcggtactgtacgtcgccaccaaagaacatgtcttggccatgctcgacggggttaatacggagcttggacgtatcggctatgttgccgtcacacgagcgaggaacctattgtgggttggcgtaccggaaaaagcactcaaagaactaaggcccgcacttgtggctgcgggttttcaggaagctggggcagtagttagggctgggtag

SEQ ID NO: 448306 - DNA, 1071 bp, Serratia marcescens
atgaatgaaatggaaccatctttggagtctgaaaaatacttaaagtggaaggctgaaaggctacaacgttatagattgataatggcagttgtccctgcaattattggttctatggcaatagtttataacatgcttgcaccatcgtatgacgatacattttatagtcgtacgatgacgttagttggaccaggggcattgttgatttcatgcatggctataataatgacatatctccaaactggattcaaaagacaatcagaattgactatcgactacgaaaaatatgatcatgagctaagaaatttgaggagtagcttggaacacagtagtaaaataagttcatcggagttgagtgtgttacaaggtgatatattacagcttaaagaacagttaaagaatagagagtccataagtgaagctataacggctgaacataaagaagaattggttgatttattaaagaccgaaattctaaatgagtcttatcaggaggctagttcagatatactgaagaatattgaatcactggtggcgagtaaaaataatctaagggaggttgagaaagttttctttagaacgattgatcgcttatattcagaaataaattcgttgactagaagaggaaacctaaatctgagcctaggggttataactacaataataggtctgttgattttaggatatttcgttttagaaataggctctataccagaggataagatggcatttatcgctaattttatacctaggttatcacttgtagtgttgatcgaagtatttgcatatttttttcttaagctatacaaatctagcctgtcagaaattaagtattttcaaaatgagatgactaatgtcgaggccaagcttgctgcgattaaatgttcaataattgtgtcggataatattgccatttctagtgtaatacaagcactgacgacgactgaacgtaatgcacttcttgagaaagggcagacgactgctgagattgaaaagtcaagaattgaacatcaaaatatatctgtgctttcagagaaagtatcaaatttcattgggatcagaaaacaaaaataa

SEQ ID NO: 448307 - DNA, 237 bp, Serratia marcescens
ttgaacatcaaaaacgtcacccgcgatgatcagcttgccgcgcagcgcacaccgccgcaactgatggggattttgccgaacaataccggtggttttggtgacgttgaaaaagctgcacgggttttcgcgattaatgagttggctccgctgcaagagcgactgtgtgagttaaacgagtgggcaggggaagatgtgatcagctttaagccttatgagctgttgaaacaggactcataa

SEQ ID NO: 448308 - DNA, 390 bp, Serratia marcescens
atgaacattaacgatgacggcgtttatctgatcgacggcacgcgcacggcgatcggcgcctatggcggcagcctggcgcatacccgccccgacgacatggcggcgacgatccttcgcggcctgctgcagcgccatccggcggcggaagcgaatctggacgaagtggttctgggctgcgccaaccaggccggcgaagacaaccgcaacgtcgctcgcatggcaacactgctttccgggttagacccgtcggtgccggccatcaccctcaaccgcctttgcgcatccgggttggatgcggtgatctacgccgcggcgaaaatccgcagcggtcttagcgaactggttttggccggcggtgtggaaagcatgagccgcgcacctatgtgctga

SEQ ID NO: 448309 - DNA, 900 bp, Serratia marcescens
atggtccgccttgaagatgtgagaatttttgttcgcgcagcggcacttggaagcttttcgcaagcggctcgcgaagcggacattctacctgcacaagcaagtgcggcgatccagaggctggagagagatcttgatacccggctttttgttcgctcaactcgcagcctacgattatctgcccaaggggagaaatacctgccttttgcccaagaaatgctaagtgtgattagagctggttatgacagcctgaaaaacaatgacgacattctggagggaaaattaaaaatctcgctaccctccgatatcggacgtaatatcttgcttccgctaatttctgacttttgccagaagcatactaaagtttcggtaaagttgctgttctccgatgaagtcagtaatatttatcgcgatccagtagatattgctgtgcgctatggattgctgcaaaacagcagttacgtagcccaacctctggtcgtgaataaccgccgctgtctcgtcgcatccccagattatatcgcccgcaaaggtccactggaaacattaacacagctggcagagcgggagtgtcttctttatctgctcgatggtcagactcatgatgtctggccattcgaagatgaaaacggaaaaaaaaaggtgactgttcatagccgttttgtagcgaacgatgctgatgttacacgccgctgggctgttgctgggcttggtattgcctataaatcatggttggatgtcggcccagatattgaacaaggccgtctgatacagctcttgcctgatatattgggcgaagcagccccactcaacttcatctgtccacatcgtagccaattatctttagtcgtacgtaaactatatcatcatctaagagatcattttgatagtcaaaataattaa

SEQ ID NO: 448310 - DNA, 1002 bp, Serratia marcescens
atgaaagccattgtctacagccaaaacgatctgcccatcactaacgaagaatcactctatgagattgaccttcctaaacctcaaccaggtgagcgcgatctattagttaagatttcagctattgccgtaaacccagtcgatacgaaggtacgtaaaaattcgccagtaacagaaccacggattctggggtgggacgccactggaattgttgaagctgtgggctcaaaagtcactttgttcaaaccgggtgatgaagttttctacgctggttccatcatacgtcctggttcttatgctgaatatggtctggtggatgagcgtatcgctggcaaaaaaccatatacattgtcaaatgctgaagcggctgcgctgcctttgacttctctgactgcgtgggaactcctgtttgatcgtttggaagtcgggcagagtaacaacgaagctattctgattgtgggggctggcggcggtgtggggtctatcctgactcagttagccagtaaactgactaacttgactgtcattggtaccagctcacgcccggaaacttctgaatgggttaaagccttaggtgcagatcatattatcgatcatcgtaaacctttcgctgaacaactaaaggccctgggtatcgaaaatgtgcgctatgtggctagcctgactcataccgacctgcactatacgcagattatcgacgttttgaagccacaaggccgtcttgcagtcatcgacgatccgaatgatcttgatgctatgccattgaaacgaaaggctatctctcttcactgggaactaatgtttactcgctccatgttccaaactacggatatgcaacgtcagcatgaaattctgatggaagtcagcaaactgatcgatgcgggtaaattacaaagtaccttaggtgagcactatggcaaaatttccgccgctaatctgcgtaaagcccatgcattaattgaaagcaacaaagctaaaggaaaaatcgtactcgagggcttctaa

SEQ ID NO: 448311 - DNA, 1644 bp, Serratia marcescens
atgggatactattttgattttttaaacgcccctgaggtcgtagatgaaaaactggagtttttcatacgagatcgcggtgaagaagaaagacttgataatatgttgatcacccaaggtgttaatgtgcgcttctcatttgcattttactgtcagtatttgaatcatgttatttctatctataacgatgtaaaatacgaacggataaaattgctgacattcctaaaaaacgatgatattagatttcttaattatatttttcataagtcacctcacccagagtacattatacggctgttagatttcacaaaagaattacgactgaaactgaatattaaatctccatacataagtgcagtggattttgggatagataatatcatttcagaaattgacgtatccaacggggatcttctgaatgcttcatacaattcagtgttccgtgatgttcgtaaatgcagctttggttatgcatttttagacagaaacataaatttttatgtatgtaataatcttggtaatttctatgaggaggtcaacagcgcgagtgtagcaatacgtcaatgtgttatcattattaatgctgacgttgacaacaacgtattatctgaattattcatccaatacctccctgttagaatagtctctaagaaggatggtaaatggaaaaaatggctggatagtcgcagtggttttaggttaggcttccaacatattatggttcgatgcgaaagcatcctgaattcaaaaaaatatattgaacctgagtttaaacagatcattattgatctaaattcttggctctaccatacaagaaataaagttgagcgttattttgaagactatcatactttacacgtaaagaagcgtgattttactgctttgaacagcactatgagaattttttcgcataaattagcgaacacaatttcgtttgtttttcatcgagatacagaaataatagaaagaaaacttaatgatgttggagatgcgctgtctttttattttgatcaattaaatattctttatgaactgccttcaacaattttttcgggtatcaaatgcatccgagaagatgccaatctttatcgtgttgatgcaaaaacaccatttaaagagaataaccttagtgcggctcttaataactggttaaatggccgttttgtggggcatgatctggaggccaaaagtgaagaaaatataggtaatggacgaactgacatctcaattttttttaagtcatcacgggttgccattattgaatcaaagctgatacgagttcatagtgacaagaataacataaaacaaagcatccaaaatggtttccatcaggttttcaccaagtattcgtcgtttctgaatcaagagtttcttttcccgcccagactctacctcgtacttttcgccatcgatgcggattataaaaaaatacgtgaccagatttttagtgttataaatgatctccagaatgagccggggctcactcttattgaaggacgaaaggtatcttctacatggtaccaatacattgcctcctccttagcaggggactccccttgcgataaggtattcattgatattattctggctgatctgcgggttaacgataatcttgataggaagcatggacggtacccgttaaggtga

SEQ ID NO: 448312 - DNA, 441 bp, Serratia marcescens
atgcagataagtaaaacaggcattgagctgattaagcgcttcgaaggtttagagctgaaagcttatcaagactcagttggtgtctggacgatcggatatggttggactcagcctgttgatggtaagaaggtcggccccgacatggtgattgaccaggcaactgcagatcggctgttaaagtgtggtgtagttcagtatgaacagggtgttaatcagttggtgaaagtgaaaatcactcagggccagttcgatgcgttggtgagctttgcttacaacctcggcctgcggtcgctgagcacatcaacactcctgcaaaaactgaacgctggcgataaccaaggctccgctgatcaatttggttgctgggttaatgctggcggtgtggaattgaaagggctggtgaagcgtcgttcggcagagcgcgagatgtttttgtcatga

SEQ ID NO: 448313 - DNA, 429 bp, Serratia marcescens
ttgtatctggcggtggttatcgacctctttgcccgtaacgtggtgggttggtcgatgaagccgaccctctcacgcgaactggctctggatgcgctgatgatggcggtctggcgacgtaaaccggacatcgaggtcatcgtgcactcagaccagggcaaccagtacggcagcgacgactggcaacggttctgtcgggccaataacctggcacccagtatgagccggcgtggcaactgttgggataatgcggtggccgaatcgttcttcagttcactgaaaaaagaacgcatcaggaagagaatatacaaaacccgggatctggcccgggcggatatcttcgattacattgaagtgttctacaaccgggcccggcgtcacagtcaccttggcggcgtcagtccagaggcctttgaacaggcttcgtcgtga

SEQ ID NO: 448314 - DNA, 285 bp, Serratia marcescens
atgggcacaccacgatttacacctgaatttaaggaagaagctgtccgtcagataacggaacgcggttattccgttgccgaagtatctgaccgtttgggtgtttctgcacacagcctctataagtggctacgggctatcaaacctggtaacagcgaacagcatgccagggatttactggaagccaaaagcgagatcctgaaactacgggcacagctaaaacgtactgaagaagaacgggatatcctgaaaaaggccgcgcggtactttgcaagggagcccgactga

SEQ ID NO: 448315 - DNA, 999 bp, Serratia marcescens
atggccactcacgaaagaagagcatgttctgccttccttaacttagttgtagcaccaattgcaaattcaatggtctcaaatattaagaaaagtgaatcgcaatttatcgagactttacgagaaagccatttttatatgatatgcggaagagcggaggccaagtttgagaaggttaaggtttcgcaattaggtaccattgatatcgaaataacgcttaaatccggtcttgtttctaatggtacgcttcacatacctaaaatgaaatttattcgtgctgtaatgcctgattctagcatgaatataaagctaaaaattaaaagtgatagtgattcattgctaatttatcatgacggtttgcttgtgtttggaacgacacccgacgaattactaatgaatcgtggaaggcataaaggtttagtttctggcttcaacaactatctcgaaatgatgacatttgacttgctttacacaggaatcgctaaggaaaaccaagatagctatagcagattgattgaaaagggtcataaggccagaatggacatattagcacaggaggaacaacgctcacccggagcaagggttagtgatgaaacttacttgcttttatttaaaatagaaccgcttaccgtaactgttttcggggctggtgattttgatgatgaagactttgatttctctattgactatcacagaataatagctgatgcagaaaaagcgatcataagcacattcaaaccaaaatataatatacagctttatggtaattacccaaagggcaaggatggtttatatcagcagggctatgatggatattcatattctattgcggaaggattcgcttttaatacagcttatgggagaattaaaggagccagagatgctgaggacatacttccatctaacgaagctgactttatttctgttgatggagacatggttactctaaacatttctggtgaggattttaatattcctctagataaaatcgagtcagaataa

SEQ ID NO: 448316 - DNA, 693 bp, Serratia marcescens
atgttatttgggatcgtggagataaagcatggcgcaaaagaaactctcgtgataaacccggaaggcaacaagaataaaaatagacagttaaagccgcttatgcggattaattttatctcacctattcaccaacgctgtgcagagttagctgaaagctcgtactactatatgaaaaatatgtgggaagtgcatatgaaagaacaaatcaaacaaattaatgaaataatgaaagaagtgctcggtataactaataaaaaggaaggtgtatgcctgtatatgggggcgctattatttgctcaaatacatgataatttcgagctaaaaccaaggttcgttactggaagtctaactttatatgacagacttgtctttgcacacaaacctatcaaaccagttttttccgctggatccgatttttctggcatctgggatggacatgcatgggttgaagtggatgactatatttttgatgcatccatattctggactatttattcttcaaatactccagaagagttgcaatcattatttaatctcgcatttaacgggaaacgtgactacttaattggatctcgtactttgcttgaaaaatctggtgttgtttataaagcctttgaagagctgtcagatggtgatgcgacaattttgattaacagtgggttcaacgcagggatctttgacagaagcatatga

SEQ ID NO: 448317 - DNA, 285 bp, Serratia marcescens
atgggcacaccacgatttacacctgaatttaaggaagaagctgtccgtcagataacggaacgcggttattccgttgccgaagtatctgaccgtctgggtgtttctgcacacagcctctataagtggctacgggctatcaaacctgataacagcgaacagcatgccagggatttactggaagccaaaagcgagatcctgaaactacgggcacagctaaaacgtaccgaagaagaacgggatatcctgaaaaaggccacgcggtactttgcaagggagcccgactga

SEQ ID NO: 448318 - DNA, 429 bp, Serratia marcescens; identical to SEQ ID NO: 448313

SEQ ID NO: 448319 - DNA, 396 bp, Serratia marcescens
atgccccacaatgacaatgccttccttagctggttggcaaatctctattcgaacaattctaactggataaacggcatggtgattacatcagccttggcattcggtcgcgttcttttctacggcggtaagatccgcacagccttggtggatgcattactcaccggcctgattgcagtaactacggttccagttctttccccgttactagttcggtccattgagatgctaccgggcatgggggacgtgctatccaaaactgagacgatgaaaatcgaactgtttgtattctcggtactgggggttatcggtgccagggtaattcgcgaagcggctatttcactattgcagcgcatcagcggcttgaacagggagggggttagtgatgcagataagtaa

SEQ ID NO: 448320 - DNA, 954 bp, Serratia marcescens
atgtacgaagaaactataaaagatacatttaaaaatctcgacgttgaaaatttctcagtaaacaatagtagtctagatttaatattcgtttgcggaggactagtagatgtaagagaagatattccttccagtatgcgtgggcagctttacgcttataccgccactgcacacacagattttcataattgcctccggatggctgagtcttttaaagattatatagagtctggtcaatatgatgatttacttcattttgagcatgacatcgctaagatatcatcgcaagtgctattatttcttgaaagtcctggttcattagttgaattaggcattttttcttctttcgagaatctttatgataaaatttgtgttattgctcctgaaggtcatgtagaggccgaggactcttttattttcctaggacccctaaaaagaatatcctctcacgtcagcgatgctgtattcacttatccatatgattcagaaaatggaaagtttgataaggaagtatggaaagagatctgcgaagatatattctacagactaaaatccaaagtcaaggttgaaaaattcagaaaaaatgatgacggtcatttatgcatgctaatacttgaaataataaacatctgtttccctgttcaactttctgaaatagactcagtcctttcgttattcatgatgaatatatcacaaaaacgcctttctcaattaatatatttattattaaccttagatctcatacaaaagaaaaaaagaagcactaacacttatttccttccaattaagaaattggaaagtgatacttatataaagtttggatcttatatagataaaaaaccattcgataaagcaaaaaacaagatgaagttaaaacaagaacttgttataaaattaggtgataaagagcagcgacgcattcgtgttttagctaagtatggtgaagaaaatgtctaa

SEQ ID NO: 448321 - DNA, 345 bp, Serratia marcescens
atgaccacttcagcagaacgtaaacgcgcccagcgtcagcgcgacaaggcgaaaggcatcactacgatcaccctgcgcgtagacagtcaggaaatggcgatgattctggaaggctgccagcagcgccggatcgcgagagagccttacgaggtaacagaatacttgctcggcctcatccgccaggataataagctgttgcataaacagctggcagagctgcgtaaaagtagctgcgggaagtgcggagacaccctaccgggcgagctaggcgggtgttgcatgcagggagattctgagtgctggcaaacatcaggctataaaaaactaatgctgacaacgctatag

SEQ ID NO: 448322 - DNA, 555 bp, Serratia marcescens
atgctccggcgaatacgcagcgcaccgccagaacccatgaaaaatccatttacgagcgtcgccgagggcttcgcattgccagacgaggggctaaatctgccatcaataaggtcgatactgccagatccggccagcaataagcggtggcgggaacaggtgcgccacgaacaagagcaacgtgccctggcttatttcagtttggatgctgggcaggaggctgataatcaccggccacctacgaccagtattggcattaacacaatcaagcggccactcagcaagctggaacgccagatcagcagcttcgccgagtccattggtttcagtctggatgcctgcattttgaaatcggtggccaggggggcaacggtcactatagacggtcagcgctatcaggcgcgtactgacggttgtctgtataggcaatcaacgccggcagcaaccaccgcgctgacgcgactaactgccctatggcatcggcaggtgccggaacaaacgcgccttgtcggcgaccacctgagaaaagaagccataaaacagcaagcggaggaatag

SEQ ID NO: 448323 - DNA, 687 bp, Serratia marcescens
atggcgctttataaaggggctgccgcgctcacccgcaggtttaagcaaaaaccgccactgtggaaaacctaccaggtggcccgctggaaaatgacagtggagaacacctcaccggcaatcatgcgcatgatgtcagaagattggtggctgcgccgtttgcgacgccatgccgaccgctggaaagagcacctgcatattgccattggtcacgtcagcaaaaaagcgacgccctatgccagccggccaactgtcagcgattggcgggagcaaaaacgccgcacccgtgaattcttaaaatcgatggaactggaagacgacgaaggcaaccgcatttcggtgatcgacaaatacgatcacagcgttgcaaatccagccattcgtcggtgcgagctgatgaaccgcattcgtggttttgaggatatctgcaacgagatggggttcgtgggggagttttacaccctgacagccccttcccgcttccatgccaccaacagacatgccaccgcaatcgcaaatggtgtggagccagcccggacgaaacgcagcgctatctgcgtaatgtgtgggaacgcgcacgcgccaagctacatcgtaaagggtttcgtatcttcgggatccgtgtggctgagccgcacagtgacggcacgcctcactggcatatgctgctattcatgcggcccgaggtag

SEQ ID NO: 448324 - DNA, 213 bp, Serratia marcescens
atgcgatcaagcaaacacgctatcaccaaaattagccgtaattcatcacgctatcgcagctttgttattgtttaccgcccatgcaccatcgctaacccgatcgctaggtatgaagtcagccaaggcgatcagtcttacggtttgttcgatgcacaggcactggcaacggattacatcgaccaactttacgcacaacagcaggtgacagcatga

SEQ ID NO: 448325 - DNA, 999 bp, Serratia marcescens
atgagtattaaatcgctcggcgcggaaggctatatggtggatgtgcgcccccagggtcgcacgggtaagcgtatccgcaagaagtttaagacgaaatccgaggcacagcagtttgaacgctgggttatcgcgacacagaacaataaagactgggtagataaaccagccgaccaacgaccattaacggaattgatagacctttggtttaagcatcatggccagaacctgaaagatggcgtgaagatagagcataaattgcaggtgatggcggccaaaatgggtaaccctaaggcctgccagatcacccgatcgttcttttctgattatcgtgtgcttcgcctcgccgaaggcagaaaggcaaaaaccgtcaatctcgaccaagaaaagctgggcggggtgtattccgttctcatcgatttggggctttaccacggtgagcatccgctcaaagagatgaaaaaaataaagctgccggatcaggaaatgggtttcttaactcatgacgaaatctggcaactgctagaccggttggaaggtgatcatttgaaggcggttaagttgtgcctggcaacaggggcacgctggggtgaggtggtcaaagttcggcgcgaagagctgatcggtaacaaagtgacttacctcaacaccaagaacagcaaaaacagaactgtcccggtctcaaccgaactctgtaaagaaattacttctgggatcaaggctgggccaatattcgccgaactcaattattcgtacgtgagaatgtgtatcaaggaggttgcccccgggttgccggcaggacaggccgttcacgttttgcgccataccttcgctagccacttcatgatgaatgggggcaacattttggcactgcaacgaattttggggcattcaagcattttgcaaacaatgtcttatgcgcactttgcaccagactatttggaagacgcagtaagatttaacccacttataaacgtaaaggagagcgttatccatgcctga

SEQ ID NO: 448326 - DNA, 531 bp, Serratia marcescens
atgaacttctatactttcaatagctttacatttggcgataacttgatttgttttcccgatccgaaatcaagattgtccagcttttttatttggaatgaaggtgatggtaatttcctatcctactcactgccaaaagggaaaatgccaagcgcttcgagtagcgatatttttaatttgcatgactattttcctgccagtctcggaattccaatcttttcaaaaagagctaaggctgtatttgaacgcaaggtttcgtctgagatgttattctatgaatgtgcggtagaaaacgtaactgaaacaatttttctgtgtaaagtgaataattattttcaaattattgatgaggaagcctcgacgttcagagaacttgaagatggaagcaagctcattgatgtgcctgcttacaagtgtgacagggagttctttattgctagggatagcatctattgtgaaagaataattgtctctcagcagtttgttgacctatgtaatgaagaacagctaaacataggctttgagcgttgctaa

SEQ ID NO: 448327 - DNA, 342 bp, Serratia marcescens
ttgaacctgtatgccgccctgcgtcagcgcgtggaaaatacgccctggtacgccaaacggaaaagctaccgcgtgctgttctggcgcgagatcacgccgctggcggtgccgatcttcctggagaacgcctgcgtgctgctgatgggggtgctgagcacctttctggtgagctggctcggcaaagaggcgatggccggggtggggctggcggacagcttcaacatggtgatcatcgcttttttgccgcggtggatctcggcaccaccgtggtggtggccttcagcctcggcaagcgggatcgcaggcgcgcgcgggcggcggcgcgtcagtcgctggtcttga

SEQ ID NO: 448328 - DNA, 777 bp, Serratia marcescens
atgggaacattcttcaagtcgtatcaggccgaacgctgttgcttatgtgggtctggtaactcccttaccggagaacacaaaataaaagcttcggcgttgagaaaaatttttggtgccaacgctatggtcattggaaatttcgatgatggcggcattcttcgtacggcacaaggtcctaagtctaaggcatttcatttttctgctcgaatgtgtgctttatgcaatggctctcggacacagcctgcagatcaggagtttgatcgatttcatactatcgtttcttcgcttttatcagaaggcagggatccttatgaggtgtttaatgcgccacagtatgattttggctcagaagcttatctcaatgtgtttagatatttttccaaaattttatgttgccatgttgcagagtcatgtggtccccgcccattagaagcttgtgaattcgctatagggaagacaagtaggaatattgtctttctagaaattgacgtagatccaatctatcagacttatcgagatttatacggagaacaaagttatgcaagacatggaggacttgtcgtcccctttgatcccgaaaaatacaacccaacatgtttcaaaagcacgttaagtttgggggctgtaagatatattttttgggttagatttgatgcagttattggaactgagttacgtacatcccataatgaattttggctaaaatgtgaggccgcgtataaagatgcaataaaaaatccactatcggatgaggagcgatatcgcttaggtatttaa

SEQ ID NO: 448329 - DNA, 999 bp, Serratia marcescens
atgagcattaagtctcttggcgctgacggttacatggtggatgtgcggccccaaggtagagacgggaagcgcgtccgcaaaaagtttaaaacgaagtctgaagcgcaacagttcgagcgctgggtgattgcgacacagaacaacaaagaatggctcgataagcccgctgaccatcgcccattaacagacctgatcgatctgtggtggaaccatcacggccagcacctaaaagacggggtgaagagggcgcagaaattgcgcgtcatggcggagaaaatggggcaacccaaagcgagccagatcacccgtacttacttcgccgactaccgggcgctgcgatttgctgaaggcaagaaagccaagacggtcaaccttgaccaggagatgctgggcggcgtgttctccgttctcatcgagctggggcattaccacggcgagcacccgcttaaggccatgaagaaaatgaagttgccggcgcaggaaatgggttttcttacccagaccgagatcgccgcgttgcaagagcggctcgacggcgatcacctgaaagctgtccgtctttgcctggcgacgggcgcccgctggggtgaagtggcgaagctgcgaaaggaggaggtgatcggcaacaaggtcacctacctgaacaccaagaacaataagaaccgaacggtgcctatctcgcccgaactctgcaaagagataaccaacggcgtgaagtcggggccgctgttcaaggatctgaattatccctatgtccggctgtgcgtgaaggaagtcgcgcccggtctgccagcagggcaggcggtgcatgtgctgcgacatacgttcgccagtcatttcatgatgaacggcggcaacattctggcgttgcagcgaattttaggacactcaagcattctacaaacaatggcttatgcgcattttgcgccagactatttagaagacgcggtgagatttaacccactagtaaacgtaaaggagagcgttgcccatgcctga

SEQ ID NO: 448330 - DNA, 291 bp, Serratia marcescens
atgctgaagacacctatagctactgccattgcggccctaaatccccgacacaatcacattcaagattttcatgtgctggcgcatctcaatcgagtgcgtgccttcacctggggtggccgtcgttgcgggaaaaccttcgcagctcgccaacgggagttgatccgcgcagcgttcaagctttccacgggcgcaacgctgagacttcttcatatcagcagaaagccgccttttatggcgcggattgactgggtgaattacccggagtggattaaagaggtgccggtagcatga

SEQ ID NO: 448331 - DNA, 180 bp, Serratia marcescens
atggacgagaaattgaccgccgccggttaccgccattctgccaactgcgtgcgtggcaacgcggctatttttaccctgaaccgccgcccgtggattatgccggacaatgccgagccggccggagtgaaacgcgtcatcgacagctgccccagcggcgcactgaaatatagggagaaataa

SEQ ID NO: 448332 - DNA, 756 bp, Serratia marcescens
atgcaacttctgattgatggtaatataagcagagttcatcttaacgattcttctatccatatttacgctttttggcattctattcttaatagaactgaagacttttgtagagctatatcaaagtcactaatgacaattgatgagtggaaggcgcatcgtgaagttgttcgaaatcctaatgatcacgatttgtttaatttaggattttcaacgttttatcttaatagaacaaatcgttctggtgtgttaagtggcggtgtgattggtggcttgtcacaggcgggacattggaaaatagatgcaagattcccgcataaggcattaattgagcgcatcgagttaattgcgactaaaagccaatatatccatatttataataatgatgctgaagattttttttcagatgtggtaccaaacctacctaaagatactttgatgtactgtgatcctccttactttgaaaaggctagcggtctttatttgaacttttataagccggaagatcatgagcgtatagcaaatatcatccagaatattaataatgttaagtgggttgtttcatatgatggtgtaaaaaatattttagattattattctcacagaagatactttttatatgatctccaatataatgtgtctcgagtatataagggaagtgaggttttcatattctctgatgatcttgatatacctcgtagttcttcggtgaagttcattgagcaagcaataaataataatagttcactattcagatga

SEQ ID NO: 448333 - DNA, 1464 bp, Serratia marcescens
atgcctattactcaacaggttagagttagtgacttaacggtagatttgcaaaattaccgtactgtgcctcagaaagatgaggttgctgcgatacaagcaatgataactattagtccagaatacttttgggctttaatgggcagtcttatcgatgatggctatctccctacagaaaatattatagttatagatgaaggcaataatcagaatatcgtcaaagaaggcaatcggcgagttgcatctctcaagataattcatggttatgtcaaccaacagttgttcgatattcctgaggcgataaaaaatcgtatatcaaacatttcacagagctggcgtcaagcgaatgaatctataccttgcacaatttatgaaagaaaagatgcagcattagtcgataaaattgtaactcttactcatggtaaggggcaaaaagctggccgtgatgattgggaaacagtcgcaagagctcgccataaccaaaaaaacaactcttcacctgaatatggattagtattgcttgaaaaataccttttgaacggagtgaatcattcaactgagcaaaagcttagatggtctgggaaatataatctttctgttcttgatgaggctttgccaaagattttttctagagttggatgttcgtcaacttctgatcttgctgcgaaatatccaactgtaaaacacaaaaaagagctggataatgtttttctagctattggtttaggtgagttaaatttccctgcgattcgtggtccagttgattttcttttacggtatggaatacctcctataagcccacctggcacgggagctacgggtaatataattgggaccagtctacctgcatctaaccctgctagtacaggtatgaaacccgtaaatacatcatcaacaccagttcctgccccgacaagtacggtaggcactaatcctcaagccgtaacatctgggactaatacagtaaaacctactcaaagaattactacaacgtcaacgcatgacataaaaacagtgagaaggcttttgcgtgggttgaaattgtatgggaataacagagtaaagctattagatattaaaaaagaaatgattgagttaaagcttgatgataaccccatcgcttttgtgttcttattaagatgtatggtggagctatcggccaaggcattttgcgaagataaagcatcagaacctaatgcccctagttataggaaaaaagatgggagtgagaaacccttaggtgatttacttagggatgttgtggaattcttaacgcaaaaaaaacaagataaacagatgcttaagttgttacatgggccgattactgagctaaatcgtcatgatggtatcttatcgataacatcaatgaatcagttagtgcataacccgagattcattattagaagtacagatataccagctctattttctagtatattcccaattattgagcagatgaataagtaa

SEQ ID NO: 448334 - DNA, 891 bp, Serratia marcescens
atgcagtatgcgctggataatcagaaagacattttggccgctgataaaggtgatgttgctgcggcaaaacgtgttgtggctcgccgagaagctgccgcaatagtggcgaccgtcggtggtggcggtctggtacttgctgcggggggaatgacgctggtgggagctgcgccagaattggttctggcggcacgattggcgattgccggttgcaaaaccaaccccgcgctttgtctgaaccaggccggtatttatgcggcagacattgtagcaccagaggccatcattggtactggtgccgtaaccaccggcagcacattgattttgggtaagaccgaagacagcgtgaggaagttgagccgacagctggtgaacgcttccgatgaactatacaaaacaaaaacgctcaaaactcagccggttgccgattttatcaaaggagaaacggtagccggggcgaatttgtcgactaaaacggcagattatctgcgggccatgcagaaagctaacactaaccagttggtcaaggtgtttgacccgaaacagaacgaaagtaagctgaatgtgttcggtcagcagtttgagcaggttctgggcgaaggtggaagcaataaatatggaacaaccaaggtttttgcgacaggaaaactgtcaagacaagaaatcatcgactacgctcagtcgctagctggaacggtaccattggaagagaagaaaactccgaaaggcatggtttactttgcaaaaaaagatggaatggttatcaatcttagagatttttccaaaagtgaggatagcacaaaggctcgatggacgattgaaattataaaaaatgaacaactcaataatctacagggaaaagttaaaaaacctattgaaattaaatttaggtaa

SEQ ID NO: 448335 - DNA, 885 bp, Serratia marcescens
atgattgctgtattcttaccgccatatccgtttaggggagtgaaagctccctatttatggatattttatcgcttgcttaactcattgcagcagcgttcactttttatcgccggtaatgattacttgttgtctccggaagagtggcgcaagtcagaacgttgggaatttgatgtacctacaatgaataatttgggttacagcatcccgtctggtgagctattggctagccatgattattaccatttgagcgatagtgtatttgagagtttattagactcttcaaaccacaatccgatgttggcgttcaagaaaatgctgacccagcgaatccccgagctggaagcagagctgctaaactacctccaaggctatgagtctggaaagatagagggaatactgtcaatctgcaattgcccttctctggaggccgttgccgagtctttatctattcctgttatgcactttgaagtggggccgttgagaatgccctcttattatagtacagggtatttggatttctcaggtgttaacggtcacacagaggcagagaagcgctatttggcggttcaggaacagtgccaggtcgatctttccatagaggagttgcatcgttacttcctgcgtgtgccaaatactcacgagcagcaatgtgatgccgatctggggatcgcattacaggttgaagacgattcaaatcttgttgcttatggtgaagagtttactaatctgacgttgctttcatatgcacgtacacgttttccaaagaaaaaattattaattcgcactcatcctggtagtcagttccagctcaaggaaggggactatgagattggcattttatctattctcatacttagttccattcgaattgattttcgatattga

SEQ ID NO: 448336 - DNA, 747 bp, Serratia marcescens
gtggcagagtttttttttagtttaaagttgtggaaagcaacctcttcgatacccgtaatgaagatgcttgcagagcagacagaagcaaatatatcccgcgctctagatgatgctgataaaccagaggctgttgaatcaggggaatttactgacgagcgagataatgaagatggtacagttacaacatttcaacgaacctattactcatgtggctcttgtgctggttatgatgaagatgaagtcagggctgaatacaaacatcttatagcgcagcttgctcgacgctcaacatttcttaccatttttggtcttttcgaaaacaatatggttgagtgtctcgaggtgatggatgatctctcatgtaagattacagacaaaagacacaagacagttgaggattgtcacaagcgtcttaaatgcgattttggggggcggaacattaaagacatcgaacacctagctgtgatcagaaatataatggcccataatgatggaattgcagataattacaaaatactttcatgcaaacaaatggaaaaaaatggatatgaaaaacgactccttcgagctatttcgcgaaccatatcagagaactctggcgtgtcaattagtgaatttaataacgtgcttatggatgatcgattcctgatgtatgccatcagtgaatttgagcgctatacaaacgagttaaagaccgcggttctaacttaccaaacacagatgaattccactagcgcaaatcaatga

SEQ ID NO: 448337 - DNA, 147 bp, Serratia marcescens
atgggtaagtatcccacactccccgcactaccgctgcgacagatggccctcgtccatacccccaaatacctgcgggtaccggagattcgcgccctgttccactacgtaccggatctgcatcgcaaactgctgctggccatgcagtag

SEQ ID NO: 448338 - DNA, 315 bp, Serratia marcescens
atgaacaatctaaaaattagttttgaaactgcgcatgccgcagtgtgttttcttcaagacgggatgggtcaccgtcgtctgtggatcaccaagttttatgtggggatggcaggtgtcgaaaactactacgctcttgttgactgggctcaccgtgtgcttgccgactggaatgaggaaacttgtcgctgggatttacgatctgaagcctggacagttgttcaggacagcagagactatctaccggaagatgttttgactgaggtcatttctgaggagaaactctttcagctctccactgtggaaggcttttcataa

SEQ ID NO: 448339 - DNA, 180 bp, Serratia marcescens
atgctaagccagatgaacctacgctttccgaaatctctgatcgccgccctgaaaaaccgggccgccgccgaagcagtgccggtcaacatcctaggccagctgtaccgcaaggtagtgcgcgcggaaaccgtcgacggccaggcgctggccgagctcgccgcgctgtacggagatttgtaa

SEQ ID NO: 448340 - DNA, 195 bp, Serratia marcescens
gtgttcgccgagctacacacccacagttatcaggggcggcaagtctcgctgcatgtgtcggagagcggagacatcggtttggtgcggccgaatctgcagttgctgcaggcgccgaacaccttcatcccgcctgagaccgatctactgacgcagctggaaaacccggtggcgttcaccccggatgggtattggtga

SEQ ID NO: 448341 - DNA, 561 bp, Serratia marcescens
atgaaaaccgaaatccgaaatcatgtcgaagcctttcgtaaagcactagaattagcagctaataccagaaaagaagaatgcagagaaatggaccgttggtttaatgaacttgaaaatttccctcaaggttgctgcgatctggcaagcaatttcttagctaaatatctgagcgagttagaatgggacttgtccccttatattatctgcttaagttggaatgaaaatgagattaaaaagggacatgtaatcgtggctttggatggagactatattgatataacattggatcaatttgacgaatgcaagcagaatctcaaagataaccccgtggtgatagaacagattgaatcagaaggagagttaagtaagttcataaaaaaaatacaaaaagaagaaagcacaaaaataaccactcgcaatattaatatagacacagaaacaaagaatggccacgatctttatcaatggatacacacaactgcaaataactttgtaaaacctaattcccattcggaaaaatggccaaaacttatagatacggaaatcagaaaggcatggtga

SEQ ID NO: 448342 - DNA, 1215 bp, Serratia marcescens
atgatgagagataaattcagtggtttttacggttatactaatgcagtagtcgatgctgcttacaaagatgctacaacagtatttgtatttgatactaatatccttttgtctctctacagatgtgaagaatcgacacgagaacaattcattaatgtctggagaaaattacaagaacaggtatggttaccttttcatgtatgcttggagtatcaacgtaataggttaaccactattaatgatgcgcgtgactcgttaaaatcaattaacacatcaattgaaaaaggtatctgtgatgtttttccgaagctgaataatggtacgatttctcggtatacaaaattaaagagtgaaatcgatgaattgaagtcttccctatgtgatttggttgataaattcagcaagagtaagctcgaaaccagaagaagcaatattaattttattgatgagcacgattcgcttagggacattattgacgaactctctctagagcgagttggctcagagcccactcaagatgaagttgacaaaataaatagggagggtattgttcgctataaatataataccggacctggttacgctgatgctaaagataagagtgataaaagattttcatataatagtataaactatgactcacaatacagtgacttgtatgtttggaaacagatcttgctatatatgaaagagaaagaggtgaggaaagttgtgtatgttactaatgatgagaaaagtgatttttactatcaaattcaagggaaaacccgggggcctgtggaatctcttgttacagaaataaagagagaggccggagttgatgtttttatacttcataacataaagtcttttttgcaccacgcggttaaatcgcttgatgcaaaaatagatgagcagtctatcaatgagttagcatctgcgggtaaaaatagcaattcgataaatcgcgactataaatatattaattctatatcagggaatgaaagttatggtttaggtgagcttgaatatgctaaaggtaccgtcctatccaaaaagatggatgaattagagagggaccgtgatgttattatgtctatcattatgaatactagtaatgttttgctggatacttttgacgaagaagaaagaagaaatttgaacctatttatgagtaatcttgaagcttcacttaaaagcattaataacgagatgcatgcgttagcaaaaaaattataa

SEQ ID NO: 448343 - DNA, 561 bp, Serratia marcescens
atgtgtggtcgttttgcccagttcaatagccggtacgaatttatcgcaaccctggcgcctgattcgccgattggcaccgccgacgactggcatgcacggtataacgtcgcacccggcacgtcagtgcatgtgtttcatcactacgatggcaagctgcagctgacgccggttaaccggggttatgcaccggcatggtggtgcgaacagagaaaaccgccgctcatcaatgcccgcgttgaaaccgcggagcacagccggatgttctctccgctctggaagcatggccgcgcgctggtgccggcatcgggctggtacgaatggaaaaagtcgccggacaatccgcggctgaagcagccctattttatcggtggcgccgctcgccagccgctgttctttgcggagctgtacaaagctgatagcaacggcagcggcagctttgtcattctcacggccgccagtcatgccggcctggcggatattcatgatcgacgccctctgactttgccggccgccgccgcgcgcgactggctcggttccgccctctggtcaaatgcaggctga

SEQ ID NO: 448344 - DNA, 1578 bp, Serratia marcescens
atggcttcaacaagcaagataaccccctcgagcccacgccttgcatcattgttatcagatgttgagcgaggtaatataaaaatacctgtttttcagagagagtatatctggtcagatgatcaaattattagtcttttggactcgatatatagaggctatccagtaggctctcttttaatgtggtcaacaagagaagagttaaagcatgagcgtaatgttggaggctttgctttacctaatacacctgaggactatccagtaaactatatacttgatgggcagcagcgccttactactctgtatggggtttttcattcagatgaaaatacctctgatgcggagttagctgacagattcgacatttgttttctaccagatgaagatgtctttgttcatcatattgcagctagagggaaagtaaggattcatttaaattctatattggatacaaccaaacttttggttgagttatcaaaattcaatgatgagcaaaaggtaaagatcgcaaaactcaccgaatcgttcaaggactatgagtttcctgttgtaactattcgtgaacgaagtaataaagaggtatgtagtatatttcaaagaataaactcatctggaaccccgttgagtaatttagaactattgacagcttggacttggtccgatcaattcgatttaaggagggagattgactctttactagataacctcaaggataaagggtatgaagaaatagatcagccaatgttaatgagaatgttgtcctcacttgtctgttcttctattgattctgatgatcttgtagatgtggaacctgaagcgttagtacaaggaatgaatatccttaagacgtcagtatcagcggctgtcgattttctagaggggcagcttaaggtaaaaaatattgtattcttaccttttcctatcatgttgataccaattgttaatttttatgctctaattaaaaggcctaacgctactcaaattaagcaactaagaaagtggttttggcaatgtgcgttaactttgcgatacaaagcgggaacaaaccgattggttttggaagatttggataagataattcgtatttcaaaaggtgaaactccatttgatgaatatcacccgcctgttaaaagtgatttatttaatagcacatggaggataaactcaactgctgctaaaactgcattgtgcttaatggctcagttgcggcctagatctttcttaagtggctctgaagttgatttaggtacagttttatctgcttataacgctaggcagttccaccatatctatcctaaggcatatttggcttccaatggggtaacattccatgaggcaaatatcatatcaaatatttgtttcctttctgcttcagagaataactccattagcgataaggatcctaaggtttattttaaagagatcccaagcgagcataaagaggaaatattcgatgctgctttgattcctgaagaagcaagagatggaatgttaccttttgaagactttgttaggttaagaaaggaaaaattactcgagaaagcacagcagttaataacaacaggttatctacagggataa

SEQ ID NO: 448345 - DNA, 204 bp, Serratia marcescens
atgattacgaacctttacctaaattgttacgaagagtacactatcgacatcgtaaaaacataccgagagatcaatttggcatatcaagatgcaaaatacaataatttaatttttgataatagccaaaaagatcgcattgagataaacctttcccggattgaagtgatgattggtcgtttaatagataatattgtaggtggttaa

SEQ ID NO: 448346 - DNA, 531 bp, Serratia marcescens
atgagaaagataatttttgcattgttaatagcaattcctgtttgcggatatgcgttcacaaagccaggattttatacgatagacagttctggttgggtggctaaatcaactccttcaggagatgtttttatttgtgatgcttgccctgatatggttcaagtccagatatcctacggacctgatgctggagccaactcaccatttaaatccaatagcgaattcattaatgcattttcaactaaagagaaaaaggaggcgtttgcaaagatgctgatggatggatcaatgccgtctaccggtttcgaggttaacatcatacgtgtggatgaggatcacttaggagcgctgaaggcattgagatactcagcaactattaaaatgccagatggaaacataggaagagaaacaacgctggtagcattccacaaaaataggattatgaaatttagctccaatttttatgataacaagctaaatgaaaaatcagcaatagcgcttgataacttacataaatcaataaaacttttataa

SEQ ID NO: 448347 - DNA, 549 bp, Serratia marcescens
atggacaataagctgagcgaactgaaagcggccgcaatggccgctactccgggcccgtggatttcaggcgatgactcatggagtgatggcgaccacgccaacatttctacagcggatcgctatgacagcgggattatcaatatcgcccaggtagatggcggcggttcagaatctggctttgacgagccattcagcaccgagcaacaggcaaacgcacgttacatcactgccgctaaccctgctgtcattctcgccctgctggcagacaatgaggcgaaggataagcgcatcgccgagctggaacgcaccaatcaatcgcaggacgatcacatcaatcagcagcaggacagaatcgattcgctagagaagacaaacggagatttagggcgatcattgggagcggcagaaaagcggctggctacgccggtgcggttgaaaaaggtcgattccagcaatgttccctatgccggtgacggctttaatgctgccgttgattattgcgccgaccgcgttcgcgccgctggcttcaccgtacagggggatgagtag

SEQ ID NO: 448348 - DNA, 648 bp, Serratia marcescens
atgaaagagcgcccagtgattttcaacggcgagatggttcgcgccattctcgacggccgcaagacccagacgcggcgtgcactgaattggaagcgtcagccgtacacagagatggccgagcgtgatgatggctcattgtggccgtgggcagaagacggtgagcgtggtggtgatatctggttcccctgcccgtttggtgaagttggcgatcggctgtgggtgcgcgagacgtttcaaggcccactaattcccgaggatgagttgagtgagtatctcggtgctaatccagataagttccaatctcctgcgtactgtgaatatgcggctgatggcggcgcgaagcctgagtatgtcgattctgatgagaatactcgttatggctggcgcccatcaatccacatgccgcgctgggccagcagaatcacgctggaaatcaccgccgtgcgtgttgagcgcctgaacgatatcagcgacggtgacgcgatacgcgagggctgcagcgccgccgacatgaagagtggcgattgtgtagctgacgtatttgcgcggctgtgggcatccatctacggagttgatagctggaacgctaatccctgggtgtgggtacttgagttcaagcaggtcagcgaggagtcccagcatggctaa

SEQ ID NO: 448349 - DNA, 978 bp, Serratia marcescens
  misc_feature (232)..(241): n is a, c, g, or t
  misc_feature (853)..(862): n is a, c, g, or t
atgcttgtcggaaccagactgttggagggaagtgaggttgccgttggcgatgtgccattagtttttgtttttgataaaagtgaatggttgctacaagggcaagcatcttgcagtgtacgtggcagtcatgtgctcattgtattgccaaaggatggttgtctggcctcagagctcgaggattatgaaaccgatttttcggctttgggatgccgcgctctgattgtcaaaggannnnnnnnnngtgaaacgtatcggataaagacaggaagagagcagattatccagacagggttctctttccaggggaagcggttaaactggacaagctacccggatgaactcttccttggtgttcctggcatttcccaaaattctgagaatctattaacgcatcattataaacgttttttcaacggcacatttatagataattgtgatgtgcaagagaaaatgggtgctcagtttgtttcagtacgtaacgagaataatgaaacgttactgcgcaagaaaataggtattctccccaatgattttggtctgaagacaaaaaatggagaaaaagcaaacgaaggctccatcattattactaccaaacatccttgcttgtatagtttgaaagaaaaatcattggagattgataggaagcgattaccaggtagtacagaaataatgatgaaaactgaggggattcctccagcatctattttattacaaataacgccaaaccttgctgcaaatcctattgttatttctctccctttccctgcccgaggttgccttgtcttcgataaagacgacaaacctctatcaaaaaatttaacgattaacgatcttctgggagccagagcatacnnnnnnnnnnccttttcggaaaaaatggtgagcctacgcgataccaacttgaactgcgtttacgctcctgtagtggaatgcaggcatggtatgagtggtgctatagtgcgggagaaatcccggtag

SEQ ID NO: 448350 - DNA, 528 bp, Serratia marcescens
atgtgtgaaaaaaggcttttctctggcgagcggccgttatacagtttttgtgctgccgcaaaatcggcagccgggcgtaggaacccgtgttactcaatggcgacaccagacgcgccatgcgtctttttttgtgtctatgcctcagtgcacccattatccgggcaacggttctttcgccgttgcgccgtctgcgtaatggtggcccgggcggggcagccttcgggctggccggtatccattgaggccggtattcctacccccgtccgggctaccacccatgagcgtaggaactccggtggtagcagtaaccgctactcgatggagattgtcctcatgacaacggtccttactgccgctcactctcaattcacctttatttttgccgccgtgcgccgcactgatgccgccgcccgttcctgcatgctgcgtactgtagcaggcgatgagcgcagcgcccgcgccagcctcgcccgcgattacgtcctgtcctttgctggtcgtctgccggttaaggcggtggccgcatga

SEQ ID NO: 448351 - DNA, 891 bp, Serratia marcescens
atggatctgaagtctcttaacgtgatatttaagaaagaaaataacaaatggtttaagtttaatgtcgatagcaccaccctgaactggttgatcaatacggctctagaaaacatcaaatccgcatatttgtcccataagaaaggatttaacccaatagaaagacaattgttaaatgtttatttcatgatatctcattgcagtttatctaaagaacaggaggagagagttttagagcaactcactatgactttaaaaaaaccttttcacaatatcgcctattacgatacaacaatagaatacttaacaattagattcaataggataaagaacgatctcccacaaaaaaatatcattgaaataatagatactatcatagaaaaaataaccctcatgtcaggcgggcatgaaaaaattgcaataatccagaacggactccacaacttatatattatagctgaatttttaggtatagtttatgacaatgaagataaagtcaaattacttttgtcaacactaaaaaaatacccaatcgatgataaaatacagtcagcgaggagtattatgtatgggttattcagaataactaaaggagaaaacaaaaaaagaatcaaaagagccatgtcaagcattaacttgagcaatgttactcaagaagaaagaattacatatgaactattcttagttgccacagagataaccctaccaagaaatgatttatctttggctacggaagcatttatagattcaatagatcaaagaattaactattcctcgaatataaaacatatgcagggtttgctgagacatattgtaaaaaaaaataacctagattctttttctaatgccttaaaaatgataaatcgtgtggtatcgaagtttgaccgtcaatga

SEQ ID NO: 448352 - DNA, 627 bp, Serratia marcescens; identical to SEQ ID NO: 437478

SEQ ID NO: 448353 - DNA, 591 bp, Serratia marcescens
atgtggtgcgaccgacggcaattcgtcgagtatccgcatcgccgccgaaacccgtgcgcggtcgagcagcgtgacggccaatcctgcctcgacggcagccgccaccacactggccgaagggctgctcacaaccactcgccaatgccttcccgccctggtcaatgcatcgatcatagcctcacgataagggcaatcggcggcatgcaacgccagcggcagtggccggttagcctgcagcgccagcgaacggcctccggcccacaccggcgcagtcaccgcgagcggtgtctggcacggtttccccgcgggttgaaccaccagcgcgagatgcagccgattacggccaacttgttccgccagcgcctgactggcagcggtagagacctccagttccactgcgggaaaactgtcggcaaaccgcggcaaaatatggcctatcacatgggagcgtactcatcaggcaaccccaatttgatatggccgcttagcggcgcgccctgcagttcccgcagaatatcgtcatgggcgctcaacagcccaagcgtcgaggccagcagcttgttgcccagcggcgtcaacgccacggactga

SEQ ID NO: 448354 - DNA, 207 bp, Serratia marcescens
atgaaagaaaacacttgctttcaaaaaaaaatcaccacagagatcatgagttggatagaaaacaaccttgaacatcgcatcagtcttgcagacatttccaaggtatcaggctattcaaactggcactttcaaaggttattcaagaaacatacgggaaaaaaccttggtgactatattcttgaaagaaaattaaaaaaaatcttataa

SEQ ID NO: 448355 - DNA, 216 bp, Serratia marcescens
atgaaaaaaaccagactgctgttgatgttagcctgctcgctgtttgtcgtgaccgctcaggccaagagctatcaggtcggcgtggcgctggccaatttcgatctcaactttgtctccatcctgcgcagccaaatggcgcgagaactggctacgcacaactgcaaggccagttcgtcgatgccaaaggcgatgtcgccctgcaggtgcagcaggtag

SEQ ID NO: 448356 - DNA, 129 bp, Serratia marcescens
atgatcaaccacaatgctaacacaatcgttgtagacggtatgcgcgttgtcccatccgtgcaggccgttcgcctcaccttctttgctcgtctgcgcaaaatcctctgccagaaaggtcacccgctctaa

SEQ ID NO: 448357 - DNA, 456 bp, Serratia marcescens
atgaattacgagttttttgagcgtttaaatcggcttataccggggtcagtcaacattgaccgcgagaactctacggtgacgctggttggttggaagttagaagaattttacagctccggccaaaagcagagcggctccgatcacgtcgaagaagagaccggcgggtgtaagggttctctccctgaaagtgaagactcgttccctaaacacattttcctggtagatggccgttttaagagggtggttaatccactcgccaataccaactgccacacatccaagtgccataaggccagtagctccagctggataagcaggaaacatcccggcgccagcgaggaggaagacaaaacttccgagggcgataaggactttgtaccaagcgttaagagcaagttgcgccaatgggttttgcaagttttccggttcctgttcatggcaattcgaaaatcttaa

SEQ ID NO: 448358 - DNA, 198 bp, Serratia marcescens
atgaaagacagatcgcatgatacggcgatggctgagcacttccgcgccgatccgacctatgaggcggaattgctcgccgaagtccgccgcaatggtgatccagccgagctggccattctgttgcggcagatggccacggcctcggcaagtgacgcgaggccggatgacgccgatacagcgcgcactctacctcgctga

SEQ ID NO: 448359 - DNA, 813 bp, Serratia marcescens
atggccgacctgactgcctttgagcgtcgtaagctcgaaaagctgtttgggatggggggcggttatgttttgaatttttcagaccgcacctattccgaattcttcattgattaccgtgtggaaatcgatgcagcccagtaccgaacaggtggcgactccaaggccaagcggatgcgcacgttctgggatgttgctcccaatcatacggctggccgtgtgattgatggtttgattgctgttggtattcaagaggactgccttggagacagcaatcctctgctgatcgaggattgccggaagatcgcccagcgccttctcagtaaccagccagtggctgagctggatgcgttgaccgctattgctgatgagcgagatttcgaggtggtggcggagcacgtccgcgaggcaatcgagaagaatcaacccgagggcgggctggatcggctgcatactttcgtcaacaaattcatccgcgtgacgtgtgaaccgcacggcatcactatcactcgtgataagccgctgcatagcgttttcggagagtacgtcaaggcgctgcgggaaggtggccatcttgagtcggccatgaccgagcgcatcctaaagtccagtatttcagtgctggaagcctttaatgacgtgcgtaacaacaagagtcttgcacacgataacccgatactgaattatgaggaaagcttgttgatctttaatcacgttgcggcatcagttcgttttatcaagtccttggaggcgaagataaaagctaaagtgacacaggcaaaacacggtggttgggacgaaagtatccctttctag

SEQ ID NO: 448360 - DNA, 567 bp, Serratia marcescens
atgacgaacagccaagtccatccgcaagggtggatttctcttttgatagcaccggaacatgaagagcgggccaagcagatgcgggccgaacgtgaccgccagtatggaaacatctacaccgaggctgccactgatgagcgatgggtgggcgacctgggcgagatggttttcaactcgtggcttaagcacgaaggcgttcgaggttttgagtgggtgctggacgatgcagccggtcagcctgatttcgtgacggccctgaacatccgcatcggagtcaagacggtgaagcgcaaggtgccgccccgcgaggactacaccgcccagatcactgcccgccatgcgggagaacccatcgatcagttcttctttatgacctacgaaatcgcaaagcgccgcatgtggctgttgggtggtatcaaccgcgagtgctttctgcaggaagctcgctattacggtgctggtgaatgggtacatgccaactacaagattcgacaggggcatgagatttataacattgagatcgctaagctaattccgccaaaggtgtggattaagacggtggcgtag

SEQ ID NO: 448361 - DNA, 957 bp, Serratia marcescens
atgaaagataagaacgattacattgaggccgcgcaacaagtcattatttccttggggctaccgaaggcgcagcataacgagcgctcggccctctgccttttggccctgttggatctcacgccgggtaagtcatgggccgacgcggaaaacccgttgatcggcataactcccataatggattgggcgcgcgatcacttcgacaaggcttataagccgaacacccgtgaatcggtacgccgacagaccatgcaccagttctgcgacgcggggttggctctctacaatcctgacaagcccgaccgtcctgtgaatagcccgaaggcggtttatcaaatcgaacccgccgcactggtcctgctgcgtaccttcggaacccctgcatggcatgacagcctcgttgcttatctggccgagcgtgaaacgcttgttgcccgctacgctaaagagcgcgagcagaaccgcatcccggttgagattgcaccgggccagcaaatcaccctcagccccggagagcacagcgagctgatccgggccatcatcgaggactttgctccgcgttttgcaccgggtagcgtgctggtctatgccggcgacacgggcgacaagtggggttactttgatgcacccttgctggccggattgggcgtcgatgtggattcacacgggaagatgcccgatgtggtgttgcacttcacggagaaaaactggctgctactggtggagtccgtcaccagtcacggcccagtcgatggcaagcgccataccgagctggcgaagctgttcgccggatcgaccgccggactggtctatgtgaccgccttcccaaaccggaccatcatgggccgctacttgggcgaaatcgcttgggaaaccgaagtgtgggtggcagacgcaccgtcacacctgatccactttaacggcgtgcgcttcctcgggccgtatccggccgagggctag

SEQ ID NO: 448362 - DNA, 1470 bp, Serratia marcescens
atgaaccaacagttagacaccgcagacagcgtgcgccgtgaggtggcaccccgtaccgcgcagaaacacaaagccgaatttggccagtttatgacgccttcgagcgtggcccgcttcatggcgtctctgttcccatccagtaccgtgcagacctgccgtctgctggatgcaggcgcgggtgtgggcgctctgtcctgcgcctttctcgaccgctgggtgacgggcggctttggctttgagaccgtcgaggcgaccgcctacgagatcgacgacaacctgcgcggccaccttgcgcagcacttgggcgggtacagccgcgtgacaccccggatcatcgcgggtgattacatcgaactagcgaccgccgaaggtctgggtgatcgaggctatacccatgcaatcctcaatccgccttacaagaagatcaatagccaatcagcccaccgactggccctgcgcagtgccggtattgagacggtgaacctgtattccgcctttgtcgcgctggccgtgggcgaggcagcgccgggcgggcagatcgtggccatcatcccgcgcagcttctgcaacgggccgtattaccgcccgtttcgcgatttcatccttgcgcgggcagcgatccgccacatgcatctgtttgagtcgcgcagcaaggcattcaaggatgacgaggttctgcaggagaacatcatcatccgcttggagcgtggtggtcagcagggggcggtcacggtttcgacctctaccgatgacagcttttccgatctcaacacccacgaacatccattcgaccggatcgtgttcccggatgatccggagcggttcattcatgtgccgaccacgaccgagaaaagcgccatcgagctatcgcccgccgtgcgctattcgctggccgacattggcgtgaaggtatcgaccgggccggtagtcgatttccgcctgaaggcgcatctgcgcgacatgcccgagcagggcgccgtccccctgatttaccccggccacttgagcacgaccggcacggtctggcctgtgccggggttgaagaagccaaatgcgatcatgcgcaacgacgagacggaaaagtggctttacccgaacgggttttattgcgtggtgcgccgcttctcatcgaaggaggaaaagcgccgcgtggtggcaagcatcgttgatcctgccgcctttggcgatcattcgatgttgggcttcgagaaccacatgaatctgtttcacgagaacaagcatggcttgcccgaggcgctggcccgtgggctggtcttgttcctgaacacaacagcagtagatgagcatttccggcgcttcaacggccacacacaggtcaatgcaaccgacctcaagctgatgaagtatccaagccgggaaaccctgatccgacttggtgagtgggccatgcagcaaggaacgcttacgcaagacctgatcgacaccaagctgggaaccctgaccgaatga

SEQ ID NO: 448363 - DNA, 570 bp, Serratia marcescens
atgaatcaacgcattggatacgctcgcgtttcgacggacgaccagcatctagatctgcagcgcgacgcgctcatgcgggccggatgcagcgtgatctacgaggaagcggcgagcggcaaaaacgccgcacgtccggagcttgagcagtgccgcaaggcgctacgggcaggggataccctcgtggtgtggcggctggatcgactcgggcgcagcctccccgacctggtacagattgtggcagaccttgaacagcgtggcattggctttgagagcttgacggagaagatcgagacgggcagcgcagcgggcaagctggttttccatgtgttcgcggcgttggccgagttcgagcgcggcttgatccgggagcggacgcaggccgggctggcagcagcccgcgcacgtggccgggccggtggccgcaaaccgaagctagacgaccagcaggtgcgcgagatcaaggccctgttgcgcgatccagatattcaggtggctgaggtagcccgccgttatggcgtgtcccgaaccaccctttacaagcacgtaggcgtcatcacgccgcgtcaatga

SEQ ID NO: 448364 - DNA, 1650 bp, Serratia marcescens
atgttgttggttggcgcgaacaatgcgggcaaaagtacaatccttaatgctctgcgcgcgttttacgatgacgccaaatggacggcagaggattttccgaaggccggcacaaccgacaacgagtcatgggtgcagttgaaatttcgccttgatgacgatgagtgggcggggcttgcggacgagtataaagaagatgtggccgatcagagccttaccgtgcgccgctactttaagtctgataacaaggctcgggttcagaaggatcaaagcaatatctttggcttcactaaaggacagcttagtgatgccctgttctatggcgcgaagaatgtagggactgctaaggtcgggcaagtactttatgtgccagcgctgactacgccggccgaacagactaagatgagcgggccgtctccgctgcgcaatatgctcaactttttgctgaaaaaggtggtgtctaagagcgaggcctacaaagaaatcactacagcgttcgagaagctgaatcacgaggcccgcaaggatgatgggtttttgagtgagatttctaggcctcttaatacggcaatatcaagttggagcatcaaaattgatctatccgtgaattcggtagcgcctgaggatatctcgaagtcactggtcaaatttgccttcgtcgattcgtcactcggcgacgttggttttgatcttgagcgctatgggcacggctttcagcgctcggttatctacgaattgatacgcttggcgccgaccttcaaagacgagaagaaggctgacaaaaaggaattcaacccgtctttcaaccttgtattgttcgaagagccggaggcatttttgcatccgagtcagcaggaaagcatggccttccatttacgtcgccttggcgcagaagaagggcagcaagttattatcacaacacattcgcctacatttgcaggaaaagctgccgaacagattgggcaaattgtacgagtgcagcgctctaatggcgcaacgctgacgtttcagcctaaaggggccaaaatcactgaattgttcgagcaaggtggcgacttgttgaaggcactacaagctttcgttgccgatggaggtatcccggaggaccggaaaaagaacgctaaaaagatgattgccaacccgccgcagggagacatcggagcgcaagaggagcagtttcgcttccagctctggctcgatggtgagcgtgcatcgctgtttttcgctgataaagtactcctcttagagggcgctaccgagcgggggctgtttaattatcttctggctaacgactggcacgaccttggcacgcagcgaatctgtctggttgatgttctgggtaagtacaacttccatcgatatatggcgctaatggaggcctttggcattccacacggggtcatgctggatgatgacaatggtaaagaacaccaaagtgcagtaaatgacctcgtagaagcgtccgtaaacggtcatagcctcgccgcacctgtaaaatttgcggattgcttggagacattcttgggtctgccggtcccagcaaaggacaggaagcctatagagattctcaaggctgttactggtgggcagatcgcagccgacaaactggaagcattgcgggcagccttttgcaaggctttagcaatcgcttga

SEQ ID NO: 448365 - DNA, 777 bp, Serratia marcescens
ttggtggctcccggagctacgggtaagagcttctgggcgctggaagcggcaatggccatcgcgtgcagcgttgccggtggcgatcttttaaggctttccccggccggtactggccgcgtggtctattgcgccggagaagacccgaaagttgcacttgtgcgccgcattcattccattggccaacacctgaacccgcagtcacgcgaagccatcgcgcagaacctcactcttgagccgatcatgggtaggcgcttgaacgtgatggatgagcggcaccttgctcgcgtcattgaattttgcgccggtgcccggttgatcgtactggataccctgagccgcattcatgatagggacgagaacagcaatggtgacatggcaaggcttgtcgccactcttgagcatattgcggccagtaccggggcgtcagttctgtatctgcaccatgtcagcaagggcagtgcccgcgatgggcagacggatcaacagcaagcggcacgaggcgcatccgctctaatcgacaatgcccgctggtgcggcttcgtcgcaaagatgaccgaggacgaggccaagagcctcagcgaccgcgcctatgaccgtcagcccatcggcaacgaccggcgcggcttctttgtccgttttggtgtcagcaaacagaattacgactctaccccgcatgaccaatggtatgaacggcgggatggcggtgtgttgctgccggtggagctgttggacgccaagcagggcagcggaaaggggcgtcaacgtgagcaagtatga

SEQ ID NO: 448366 - DNA, 231 bp, Serratia marcescens
atgcaaaccaaattcacgcataagcccacggtccttatcgacaaaaagaggctgttagaaataattccgttttctgaaagaacgattttcaatcttgagcaacaaggggccttccctcgtcgcatcgcactcagcagcagaaaagttgtttgggatttggccgagatactgaaatggcttgatgcacgtaagaagggcggcccggctccccggcccggaatgggggcctga

SEQ ID NO: 448367 - DNA, 657 bp, Serratia marcescens
atgacaggcgaaaatcgtggacggggaaggccgcgaaagacagaaagtacctatgcagatactcgtaatgatctgatccgcagcggccttgaactgctgacgcagaatggttttcttgcgacgggagtcgatgccattgttaaaaatgccaatgtccctaaaggctcattttattactactttaagagtaaagaagattatgctcagaccgttctgaacgcctatgacagtttcttcgagcataaactcaaaaaacatctacatgaatcatcctgcacaccaatggtacgtctggaaaatttcatcaatgatgcctgtgaggggattaaaaaatacaatttcacccgcggctgcctggttggaaatatgatgcaggagagtccggggcttccccaatcctttattaaagtgctacagaatattcttgagagctggcaggcacttgttgcggcctgcctgtccgacgcgttatcttcaggcgaaataagttcaaatatgaataatacacaactggcggctattttctggagtggctgggaaggtgcggtaatgcgttccaaactatattgttctactgagcctgtgtacgacttctggagctatttcaaaacctctgtacgctatcagtcttctcaggaagcaacaactgaccagtaa

SEQ ID NO: 448368 - DNA, 381 bp, Serratia marcescens
atgcaaattgatgattcggattttccggttgtatggataaaaatgaatgctccgggaaaggattcggcagcacacgcgttttgtgaattcgaagcgttactggatcgcaagacccccttcgtactgcttagcggtgagggttttactgaaagtaaacatgagcattccgcagatgatatgaagatgacaacgcgctggatgaaagcgcataaaaatgaattaaaaacttttgttaaagcctcaatcctgattgagcccaacagcgtcaaaagggctgctgccagacctttcgccattatttatgaaaaattctggggctatcctttattaatggtcgcttctaaagaagaggctttagcaacagcaaaaacattgctttaa

SEQ ID NO: 448369 - DNA, 849 bp, Serratia marcescens
atgtaccggttaccttcccttgatggtgctgctttgcctgatattgatagtatcccctgtcccgtctttgcactgagcgcatccatggtttcaagaggttgggaacatgagatacaccaacatcgtaagtcgcaattgctctattcagtccgtggtgtgctcaattgtgaggtcgacgcggggatgtggattgtcccacctcagtgcgcagtttggataccgggcaatatgccacattctgcgaggggttctggaaacacagaatgctactgcctctttgttgaacccaatgcactgccagcacttcctgaaacctgctgcacactctccataaaccctcttctgcgtgaattgttgcttaaagcagcgggtttaccgaggatttatccggcagagggacccgaaacccgcttgatagccactctcctcgatgaattatcaatggcaccagttgaagacatgcatctgccaatgccacgtgaacgaaggctgcgacaacttgctgaaatgttactggctgatcccgcgaataaattatctttaagcgaatgggctcatcacatcggtatgagtgaaagaagcatgagccgccggatgctgcatgaaatcggaatgagttttggtcattggcgccggcaactgcatgttattctctcaattcagcggcttacccgtggagagagtgttcaatcagtcgcgctggaacttggctatgaaaacgcaagcggatttataaccatgtttcgaaaagcagtaggcaagccgccagcacgctaccttgcagaaaaaacagagagcgcgacaggcggaatttcaggcaatatgcccggcaaaatttatctggattga

SEQ ID NO: 448370 - DNA, 285 bp, Serratia marcescens
atggcagacttttacatctcgggtatacgcagaaacaatgcagggcaacacattcagtacgttaaaatcatcaaagccggtaatggggagaaggacgcatcaattaactcgcgtcagtttgtcgctgagttgataaatgccggtaagacaagctttaaaacaattacctacgtgaatgacaagtgggtttatggggcaatggttcatgttattgatgggatttatctcacgactgatcctaatgataccaaacgcgataacctgggtaatttgcccactttttaa

SEQ ID NO: 448371 - DNA, 1086 bp, Serratia marcescens
atggcatttcagttaaggcattgtgttatacatgaacttgtaaaagaaagcggaaaacagcgcgttgaggatattattaagcaggttcttcctacagatgacaagtatgtgcaggaattagtaaaatccttaaatgacttaattggaaagaaagaaaaccaagcagcaagaggtacttttgatattgaggaccctacttataaggtaccgaatgcgttccaagactattacaacggtagggcagggtcagattcatttcatacattttcaacagtgtgtatgaatgaacttacccgacaagcaaaagacccttcaagagttgccgcatccggtggagcaatagtatttgcccattacacaagtggtacctctaatttcatgcttattacgatggttaagcaaaaagaagctttacggctagatgaaaatttaaagccggtaggaaccgttcaaatagatatggctaagatacaccaagctgcacgggtaaactttgatagataccatcaatatgaagtattaccggaagaagagaaacctacatatctcgccttcgtcagtcctaaaataaatcaagatgcttcaggatattttgtagcagccttaggatgttcagatagtgttccctctgctaaagccactgatggtgcacttaatggagtaaaacaatacttcgaagcgaacaaagagttaactgcgtataaaaataaagcgtatgatgctgtactcaattatttaacatcaaaagaagatggtaaattagcatctcttaccgaaatcgatcatgcagttagaggtatagtttctgccgaaaagcatgaatatatggataattttataacctaccttaatagtgaagaaattggactgccgttagagttttctattaacagagctgtactcggtaggcgtgctaaagtaaaagctaagtcaaatgggtgggaattaaattttgaaaggcgatttttcggtacaactccaggatcagtaattcagtataatcgagcagataaaaaactgataatatcgaagctagacgataataccatacaaaaattagaagctgtacttaaagagagagggtaa

SEQ ID NO: 448372 - DNA, 276 bp, Serratia marcescens
atgttgatactatttcgagatgatttcttgattaagatggtgtctctgtggttaatagtaggtccaataacgattatttcatttgtctatattataaaggcgtttacaaaccctgacttttgtcgttcggagaagcatgtgcaagtcatgcgtaaaatagaagttgagagctttggaactgagcaaaagcaaatcccatcaggctctttcattgatatggattctgatgaagatgtgaatgatatggctattattgaaagtaaggataacttatga

SEQ ID NO: 448373 - DNA, 3201 bp, Serratia marcescens
gtgaatcaggcatatgattatctttatggcaccgatggttggggagggtactggttacaacgcaagcagataacaaacctgacctattacacgtcagaagagaacccaacgccggtagtcacacctgatagcaataataaggggtatgtaattggtcagattgagcattttttaagggctaaatctagtcaatctgggcaaattccctttaaacaactgggtgataagttctactatatagacgtggacgctgagaaagccctcaacgcaggaaaccccatagaagagaaatacttttacggcacttttggtgtgggggatttcctgtctaccgataggaataataatcccaatgggggcagcccgtttgccactgtgactacaacaggttttattgtcgcgggtaatgacaattcaagcgaaaatggtaaaacgctttcgccaggctgtgcgccttgcagcatcctgcatttaacgcccagcctgcgagcgcagttcgacaccctggtcccctgggcaccgacacgtgacgaaggcgatattacccacttccccaattccggggcgcccgcgtcatcacagcatgaaggacggtttaaatatgccttcacgcttaacattaatgggcaagaaagcacgattgagcttcccggggacgctctgagtggcgccatcttattcgacacgggcaatgcctcgcatgtcacgatagacagtcaaaaactcggggagattttagagaaaaacggggtgaaatttgatggagacgaggccaaaacagccaggattgtggacttgacactccagcccgtcgatatcaatggaaaaaacgttggaaacgggatccttctggcagagaatagtgataaggacctgttggttatcaataaagatggcagtgataccaaaacctggaatattaccctggggttgggttttttccttcaatacgcagtgatgtatgatttgcaaaaccagctcacagcctttagtcccttttttgtcagtgcggatgacttttctaccgatgctaatggccacagggggcaacttaaccagataacaaaacaaatgggtaacctgatgcctgcgcctcccggagacccttcgggcgatcccaatcgcggaaaaggttttctggggctggcgggcactatttccggcaacggtcccctgacgctcatgtcggatgtagtggttaatatgactggcgtaaatacctataccggagcaacccatatcaataaaggtgcagtactgtatctttccggtcctgggagtattgccaactcatcccggctggtaaacaacggatggttcgatatttccgagcatggaaattattattctgagtggcaagtgccggatggcatgaatgatgccactatccgcagcttaagcggcaacggtgtggtcacgctgggcgacagaacgctggtattgagccaggcacgggacgatttctcggggcgtatcaccgacgtgtcgcttggcgataaagacgggacacactataagggggggctgactattaccggtggcagccagacgctcagtggcgagagtgactatacgggaccgacgttaattgccaggggagcggcattgcatttggctgacaccggttcactggtgagtgatgttgcggcctatggggcattcatcactgacggcaaggcaacgggtgcggttatggttggggacggagggctggttggcggtaatgggagaattggagcgctgacagcccgcaatggggggacggtttcgccaggaaactccatcggcacgctgacgatagacaataatctgaccctggaacagggctcccgttatctggccgaggtagaggcggggcgtagtgatttgctgcaggtagatgggcaggcgaccctgaatgggggggagattagcgtcgtgccgggggcggggcgtaacctgttggcgacacctgacgttgccagcaatattctggcccagcgctacaccgtgctcaacgccgggcaaggtgtcaccgggcaatttggttcagcccgcgccggactgtttttagcccctgatgtactgtatcagccaaatagcgtcaccctgggattgcaacgcaactccactcgttttgcggatgtggcaaatacgccgaatcaacgtaatctcgctgctgcgattgagcacctgccgattgatcatccggtttatcaaagcctgttggttgccccttctgttgaacaagcacgtcaggcttaccgccagctctcgggacaagtgcatgcggatatcgcctccgcctcggtgaataacagccgctacgtacgcgatacgctgaatggccggctgcgacaagctcagggggcaacggacagtggtgaaataaaacaggacgaacaaggggcctgggtcagtttactgggcaactgggctcatgccagtggtaatgacaatgcggcgggttttcatgactcaactttcggagtcttgctcggtgctgacagcgaactggccaataaatggcgactgggtctggccacgggctatacccgcacctcgttgcacggtaacagcgcatcggcggacagtgacaactaccacctggcgttctataccggaaaatcctatgaccatctgaacctgcgcgccggtacggcttatacgtggcatcggattgaaacgtcgcgcagcgtggggtattacgggcagtcaggtagcgataaagcccattatggcgccggtaccggacaagtatttgccgaagcgggataccgtctgaacgctgcctgggtcaatatggagccttttgccaatctggcttgggtgaattataaaagcaatggctttaatgaacatggcggagccagtgcgttgagtggggagagtcaaagcacgagtgcgacgctgtctacgcttgggttacgcgtggacaagcgctggagcatgggtaaagagcatgcggtgacactgcggggggagatgggctggcaacatcaatataatcaccctgaacgcgaggtgggtttgcgctttgccggcagtgacgcgaccttcaatacggccagcgtcgcggcctccagggacgggatggtgatgaaggccggcgcgcaagtcaatgtgggggaaactctcgatatctcgctaagctataccggcctgttatcagaaaactatcaggacaacggagttacggcggggattcagtggcgattctga

SEQ ID NO: 448374 - DNA, 342 bp, Serratia marcescens
atgaaaagtgaatgcaaacgacacagtgtggttgctttggttatctttttatttagcattctggtgcttcaggggtgtgttaatccggatccacgtgttgctgctgccgttgaagataaacccttttatagctggttcaataagctcgtcagtcagatagaaaaagacccaacgtacaaacggatccccattgacacgacggcgcaatcaaacgaattccttgttttattgcatgacacttatcggcacagggtaacaaaagaggaattttctcagcagatcaacgcgcaatacccgaaccatcaatatgaaacggccttcatcgtcgccagatttccctaa

SEQ ID NO: 448375 - DNA, 657 bp, Serratia marcescens
atgaattatcccttgggttttggtctggcactgttagcactctcagtttcttcttttgccatcgcgcaggaggagcccagttttgactgtacaaaagcaaggacgcatgttgaaaaggtgctttgttcgggcggtaactctggaatgggagatttagacaatacgatggccaacctgtatagggccgtcagtcaatccctcggtgttgatgtcgttgcattgaaaaagagccagcaggactggcttgcgaaacgaaataaatgcaaaggttcggacattaaagtgatgaattgtcttctcgatagctatcgggcccgctatatcgagctcagtgccagttatgatcaccaacatgtgacggggaccttctctaataatttcggggttatcgagagcgtgttatttcccgacggaaaactggccgttaacatagacactaatattggtgaaccttcctatgattcttgctcggtcactttttttgcgccactgaaaggggcgtccgttcagcatacatttactgctgaagagaccgggggggatgagaaatgtacggtaaacatgaacgtcacaggctctcaaataaacgtctcttctgcagggtgccgagctttctgcggaaactccgcaacttttgatggtacatataaaaagtaa

SEQ ID NO: 448376 - DNA, 183 bp, Serratia marcescens
atgcgcatccgcgccaccaagagaaataagtaccttacgcccctgaagatgaaccagatcgacctcacggcggaattcagattcagtatctttatacggtttaaaatcagggatgtgatcgtcattatccaatactttcataaaggcaacgacaataacgttataatttacggggatttctga

SEQ ID NO: 448377 - DNA, 159 bp, Serratia marcescens
atggtccttaactattttcagtgcagatggaataacagtttgattgttagcggcagtaatggcagcctgctcaaggtcaatgtccaacccatcaaaatcgtactgcttagtcagcgcaatgatacggtttgccagcgcaacctcgtccccattgtgtag

SEQ ID NO: 448378 - DNA, 1467 bp, Serratia marcescens
atggttcatgactcaaatagctactgggcaccgaatgtggctacttctctctggcgttcatctgtcattgataataaccgtaaaggaaaaatagccgtggaaaaatgttcttcagataaaatcagcactcgaaaatctggccaacagccccgtcacggccacgttttttctccggcttcacgcgcctatattgcatggcaggaaggtaaaatcgatacgggaatgttgaaccaacgcgaatgcggcaagttttttcctgccctggatagtggcttgacagacatagtcgctcctagcgacgtgacaaactttttaccgccgccagatggtaaaattgctagtgcgaatcaggggaacggtaattttctggatgatgcaggtacacattggccaaagcataacgtgatgtctgccgagatgttaaaaatctcctggtattattctgctccccattcaacccgacgctggaattattttatcacccgaaaagattggaatccaaatctaccactgagccgcgcgcagtttgaggataagccattctataaagtagagttgactgaacaaccatattggagtcatggcgcagcgctgaccccaccacagcctactgaacataatgtgatgttgccacagcgttcaggttaccatgttctgctggccgtttgggaagtggcgaataccggtaatgctttttaccacgtcattgatctggatttcagcgataacaataacggcagtgacgttgacccggttgcgccagatggtctgcgggccaatagcgttacagccagtagtatcacattgaaatggaatgcttcagtaactccggctttcgcctaccgcctataccgcgatggcaatccagttgggcaagttacagaactaacctttattgacagtggattgagccaaaatacagcttacagttatgctgtgagcactcttaatgaagaaggtaccgaatcagcactgagtcaagcgattactgtcagaactagtgacgtgattatcccgggcacaccaccaacgcaaccatcacatttgcatagtatggggattaccgttgatactgtgaagttgatgtgggggggggcgacaagcaacggtacacttgctgggtatatcatttaccgtgatggtaatgaaatagctcgtacaagtgttgctcaactaacttatgatgacaccgccttaaaggctggaactgtttatcgttatttcgttgtcgcttttgatactcaggcgcaactttcagttccatctaatatgctttcagtgacaacatcctcgaatgaagataatggaggtagccagtatcctgaatggaaactaggtacatactatccaactggtaaaaaggtcagctaccaaggtaaaaattggatttgcctgcaagcccatactgcctatgtgcctgaatgggcaccgagtgtggctgaaagcttatggagagaaacagcctga

SEQ ID NO: 448379 - DNA, 450 bp, Serratia marcescens
atggctactaccgcagacgacattgcagtgcaatatcccattcctacctatcgctttattgtgaccctgggcgatgagcaagtgccgtttaccagcgcctccggtctggatattaatttcgacaccattgaataccgggacgggaccggcaattggttcaaaatgcccggtcagcgacaggtgcctaacattacgctaagtaaaggggtattcccgggaaaaaatgcgatgtatgagtggattaattccattcagctcaatcaggttgaaaagaaagacatcatgatcagcctgaccaatgaagccggcacggaagtgctggtcagctggaatgtgagcaacgccttcccaacttcactgacctccccgtcatttgatgcgaccagtaacgaaatcgcggtacagcaaatcacgctcatggccgatcgcgtgaccattcagactgcctaa

SEQ ID NO: 448380 - DNA, 1083 bp, Serratia marcescens
atgacagtgacaaccacttaccccggcgtttatctcattgaagatgccgtatcgagcttttcggtcaacggtgccgccaccgccgtgcccctgtttgcgtacgacagtaacagtaatagtgccgctaccacgaatacaccgattcaggttttccgcaactgggcggaatttaccgccgtttaccctgcgccgccgaaagacgctttttataccagtctgaaattgtggtttatgcacggtggcggtaaatgttatctggttgacgtgactaaaatcgccgatgcggtggcgcaatacgatgatattacgctgattgttgccgcagggacggataccacgacggctccccctatttatgatgcgttcaacctggtggtgagtcagggctaccgtatttttggcctgtttgacggcccgcaagcgaaaattgctggtacagataagcccgatgaggtcatgggcgcgtatccgacctccccgtttggcgcggtgttttacccgtggtgtaccctggcatcgggtgatgcggtgccgccgagcgccatcgccgcggccgccattgcccaaaccgaccgtacgcatggcgtgtggaaagcgctggccaaccaggccgtgaatggcgtaacccccatgtacgccgtcagcgatgattttcagggcacgtataaccagggcaaggcgctgaacatgatccgcacgttctcgggccagggcaccgtggtgtggggcgcccgcacgctggaggacagcgataactggcgctatatcccggttcgccgcctgttcaacgcggttgagcgggatattcaaaaggccctgaataaactcgtgtttgaacccaacagccagccgacctggcagcgcgtcaaagccgccgtagacagttatctgcacggtctgtggcagcagggtgcgctggccggcagtacccctgccgaggcctggtttgttcaggtcggcaaagatctcaccatgacccaggaagagatcaatcaggggaagatgatcatcaaaatcggcctggccgcggttcgcccggcagaattcatcatcctgcagttcagccaggatatcgcgcaataa

SEQ ID NO: 448381 - DNA, 1341 bp, Serratia marcescens
atggctacagtcacatctgtaccgggtgtttatattgaagaagatgcctcgccggcgatgtcggtgggcgcgagagcgaccgccgtgccgttatttgtcgcgcgttttagcccgttcaagtcagaactggcgggcgtgatcacccgcattggcagttggctggactacaccaccctgtttgacagcaacgtgccttcttccgccactgtcaccgtgacgtcaatggaggatgcaccgcttcctgaaaccgacgcactgaaaatggagccgtctaaagcgtatcagattgcaaatactgaggtcgtggaccatacagcctccgtcgccctgcggctctatttccagaacggcggcggcccttgctacctctacccgctggaaaaatcaggcgataatgacaaattggccgcgctgccgggccttatcgacgaggtgggggagatcacactgctgacctgtccggatcccgatgaggcttaccgcacggcggtgtatggcgcactggccgcctcactgggccagcataaagggtacttcctgctggccgacagcgtccatggcgacgcgcccagtgcggtcagtggttctgcccaggtggcggtgtattacccgaatgtagaggtgccgcacacccggacgctggatgataagcaggtcgctatcgctggctacaccgacgggacgggcacgaccatcgccacgctggtcgagcttcgtaccgctaacgccgactttgccggtgtgattgatcaagccctgtcaggttacctgagtgcgccactgtcgctgccgccttccgcattgatggcgggggtgtacggcaagactgacggtgaacgcggggtgtggaaagcgccggcgaacgtggtgctcaatggcgtcagcgatgtcagcgtccgggtcaccaatgagcaacaggcggagttgaacccgaaaggcatcaatgtcattcgtcactttagcgatcgcgggctggtcgtgtggggcagccgcacgcagaaagatgatgatgactggcgctatatcccggtgcgccgcctgttcgatgcggcagaacgcgacatcaaaaaggccctacagccgatggtgtttgaacccaacagccagccgacctggaaacgggtgcaggcagcgattgaacactaccttcaccgcctgtggcaacagggcgccctggccggcaataaagcggaagaggcgtattttgtgcgcgtcggtaaggggatcaccatgacacaagacgagattaaccaagggcaaatgatcattcaggtggggatggccgccgtgcgcccggccgagttcatcatccttaagtttactcaggacatgtctcagtaa

SEQ ID NO: 448382 - DNA, 1236 bp, Serratia marcescens
atggttatggttcttcctggggtttcgtacgaagaaacgctgttaacgcaggcgtcaaacgacgatccggtgacgatgcccctgtttattggttataccttccctgatgtggcgataccggtcacggcgatgcagcccgtcagcgtgggatcactgacgcaggcgatcgtccactttggtcaatgtgggacgctggcgtattccctgcgccacttctttgagaacggtgggcggcagtgctacgtgctgcccctcgggccagggcagggagaaccggtcgcgcgtctgcacgcgctgattgctgcattacagacgccgcagatgctggagacgctgttggcggatgacaagaccggcctggtcctggtaccggagctgagtaagctcaatgaggtgaatacgttcgggggagcggatacggctgaagttgacgtcgatgccctgtggtatcagggctggcaagcgttactgactctgtgtcgtcaggccccgcagcgctttgcgctgctggagttaccggattccccggcgcaggcggtgacgctgaccgggcagtctttttcagcagacctgtgtcagcgcggggcggcctggtggccacgactggaaaccagttacgaagatgaggcgtcggcacccgtggtgttgtcacctctcccggccgtcgcggcggccattcagcgcagtgcccacgataacggggtctggaaggcaccggccaacctcccgttggccaaaacccgtcgacccacccaaagtatcctgacgtctcaggcattactgaataaccagggggtgtcctgcaacctgatccgcagttttgtcgggaaaggcgtgcgcctgtggggatgccggaccttgctcaacgaggagaatacggcctggcgctatatccagacccgtttgctggtcagcagcgtggagcactacctgagcaaactggcgcgcgcctacctgtttgagccgaatacggccccgacctggatgaaattaaagggccaggtctggacgtggctgcggcagcaatggctggccggggcttttttcggcacggtggaggaggaggccttttcgctcagtatcgggctggatgaaaccatgacgcaagacgatattcaccagggaaagatgatcctgcaggtccgtctggcgctgctggcccccgctgaatttattgctgtcagcctgacgctggatctgcgcgacggcacggccagcgcgcagatcggaggataa

SEQ ID NO: 448383 - DNA, 453 bp, Serratia marcescens
atgttgaatacacctgcggtatcccatcgttttctcgtcaattttttatttaacaacattcccagtccgtttgacattgcgttccagcgcgtctccgggttgtcgcgcacgctggccgtgagccagcaccgggaagggggcgaaaatgcccgcaacctctggctggccgaacaggtggatcacggcagcctggtgctggagcgcggcgtgatgaacgcttcccccctgacgctgcagtttgaccgcgtgttgcgccgggaaagcacgcagtgggccaacgtggtgatcatgttgctgaacgagctttcattaccggtgaccacctggacactgagccatgccctgccggtgcgctggcagatgggcgatttggatgccggcagtaaccaggtactcatcaacacacttgagctgcgctaccaggatatgcgcatgctgggggtaaaactatga

SEQ ID NO: 448384 - DNA, 168 bp, Serratia marcescens
atgaccgtcgaaattcgtgagttgatcgttcaggttgaagtcaccgagccggccccttctgctccgtccctgccttttgcgcagcaccgtgagtgggacgagcagcggtgggtggagaggattaaacaagaggtgctggaacaactgcttgaaagggggcgtcagtga

SEQ ID NO: 448385 - DNA, 690 bp, Serratia marcescens
gtgagcttacttgaacgggggctgtcaaagctgaccctcaacgcctggaaagatcgcgaagggaaaatccctgcgggcagcatgagcgcgatgtataacccggagacaatccagctggattatcagacgcggtttgacaccgaagataccatcaacacggcgtcgcaaagcaaccgctatgtgatttccgagccagtcggcctcaacctgaccttgttgttcgacagccagatgcccggaaataccaccccgatagagacgcaactggcgatactgaaatccctctgcgccgtggatgcggccactgggtcaccttactttttgcgcatcacatggggaaaaatgcgctgggagaatagggggtggtttgccggccgcgcccgtgatttgtcggttacctatacgctgtttgaccgtgatgccacgccgctacgggccaccgtgcgtttaactctggtggcggatgagagctttgtgatccagcaatcccttaaggcgcaaaacgcccccgatcgtgcgctggtcagcgtaccggatctggcctcgttaccgctgttggcgctcagtgccggcggggcgctggccagcagcgtagatcctctgtcgctggcctgggataacgatttggataatcttgatgattttcagtccggggacctgctgcgggcgacgaaaggggaggaggtatga

SEQ ID NO: 448386 - DNA, 1590 bp, Serratia marcescens
atgagcgacttcaccctatatattgcgggacaacagagtgcattggggatccgtagtctgcgggtacagcagctgatcaatgagatcccgctcgcgcagttggagctgcgtattcccacggataatcatagcgcggcggatgaagcggtacaacgcgaagtcagtcgtttctccctgggcgcgcacgtggtgattgcacgggggaaaataacgctttttaacggttatctggtgcaaaagaagatacagctgaaggggaaatactggtccgtgagactggaggcccgccatgcgttgcagaaactgacgtttttgccccgtagccgagtgtttgtaaatgataatgaccacgacctgctgaagaagctgttgctgcctgcgaacgtgagcctgacccagaaagcctatgcgcaactgagcagtaagcacgagcaactgatccagtttcgtctcaccgattggcagtttatccgcagcagattgctgtccatgaattgctggttgctgcccgatgccaccagtgacgcagtggtgattagcccgctgtccgacgcggccattgctccccggacgctgactcgcgaaagtcgcgactacacattgtatgaagtcaatctgagttttgataaccgctttacggtggacaacgtgtcactgcaggggtgggatattgccgcacaacggctcacgccggcacagaatagcccggctagcgcgtttcgtccctggaaacctgagggtaaggccggtcaatccccctctggggagcaagactatgcgctggcgtttagcatgctgcctgaaaccacgctaaaaaccctgtcggactcctggctgaatcaccaacagatgactggtgtgcagggctatattgagctggcggggacccgggacttcgcgccgggcgaaagtatcatactgagcgggtttggcgcggggctggacggtactgtaatcctgagcggggtgaatcaacggtttgatagcaaggatggctggcgcagtgagctggttattgggatgccgacgtcaatgctggagcccgcgccaccggtccggtcgctgcatattggcactgtagcggcttttaccagcgatcctcaacatctggatcggatcgcccttcatttgccggccctgaatctgtccgattcgccgatttttgcccgcctaagtaagccctgggccagtaaagcgagtggtttttgtttttacccggaacccggagatgaagtggtggtggggtttatcgacagcgatccgcgttacccgataattctgggtgcgatgcacaatccgaaaaataccgcaccgttcccaccggataaaaagaacaatcgtaagggggtgatcgtgaataaagccgaccagacacaagccttgatgatcgataccgacgagaaaacactgaggctgatggcgggggacaataccctcaccttaaccggcgaaggggacattgccgtgagtacaccgaacgtcctgcaactgcaggccgatacgttgggtctgcaggctgacagtaacctgtctatcaacggtaaacagcaggtggagatcaccagcgcgaaaattaatatgaaaaaataa

SEQ ID NO: 448387 - DNA, 423 bp, Serratia marcescens
atgagtaacgacatattgacagcgaccctggggcaatgctggtcatttccgccccggtttgcccccgacacgggcgtgtccctgacggcgggcgttgaggcggtgatgcagagcctgcgtgtgctgtttatgactgagcctggcgaacgcattatgcgtgagagctggggcgggggcatgtatgactttatctttgagaatgtcaccgatgaactgctggccaacatccacaatcgcatcgaagaaagcattctgcgccatgagccccgggcggcactcaaggacgtcattatccagccgagcaaacacgaagcgagccgtcttcgggtgcagatcaccgtgcatctgtcgggcagtgatctgaccgaaatgatggaagggacgctgaacatcaatgacggccagacgctgaggttactatga

SEQ ID NO: 448388 - DNA, 423 bp, Serratia marcescens
atgagcaacctggtggtcattgacggtgacgcgctgacattcaacccgcagtttggcgctcttacgatcacgccaccgccccagccacggatgagcggcaacggagaggccagcattgaggggaaaaagatctgcattgtcggggatgaaaagcaggtttcctttaccgttgactatatcaagcctccctttgtcgcctcccctggaaaagggacgctcaccatcaaacagttggcatccgatcagcaggctgagtttacgatggcaacggcgccgatgattgtggtcggcagccagtttacgacgcaatttcagcccacaacaccggcccaggatccgcaaggaaaaccggatacggatctgagtccggtcatcggggttggaacatttatcaacagccagtcgtttgtcacagccgggtga

SEQ ID NO: 448389 - DNA, 1812 bp, Serratia marcescens
atgtctgacttggagcaactgaaacagagattgggcagcggattaacagaccagaccttcctgctggatccactgacagagaaggatcgactcgacttggtggcaaaatataccgaagccgtgccgtttgctggccatgccgacgctgactggaaaggcttctggatggccggccgcacgctgcaagggctgagtgacatctatcagcgccccggcctggcagagaaaaagctgccggtgcagcaggcgtttctgttggcgttgctgcatctgctcgaaacacccagagccctgctgaacacgctgccagcacggcaccgttcactttactaccgtgatttattgggctttgccccccgctccccgcagccggacagcgtggcggtgagctttacgctgaaaaaaaatgcggccccgtatgtgttacccgccggcagtctgctggatggcggtcaggacagcgccgggaacagcatcacctatcagactgacgacagtctgctgatcaccggccagcaactggaactgctgtattggacggctccggttggcgagacgtggaaacggtataccgccatcgacagcgcaacgggagttacgctaccggctgaggggctgcgactttttactgaaacaggggttgggacggacaccaaagagaaaaccctcgtgctttatctgggggtcagcggcacgtctgcgcaggacacactgtcggtttattggtctgtaagcgcctcatcggcgctggatgttacctggtggtattacaacgataaaggcaaatgggcttcgctggatgccgagctgcaggactatacggcgggcttgtccgtcagcaacctgtggcgggcgcggctgccggcggacagccagccggggggcaatctgccgcagggcgacgagccgctggaggcagggtattactggattaaaggcacgctggccgacggaagcgtcctgccgtcagaggcgatgccgaaactgcaggccgtgctggccaatgcgatgaccgcaaccctgaatagggcgcaggcgattgatgatagccactttgcccagccgttgccagccaacacgatcagccagcttgtgacgccggttgccgccatcagcgacgttcgccagtctctgccttctatcggcgggcagccacgggaaacggaggcggcgatgttacagcgcgccgcgacccggatagcccaccggcagcgggcgatcacctggaacaatatgcgcagcctgctgatggagcactacccggcgatttttgatgtccgttttcccgatgtggacaaactgagtcgtctgccggcgctggaggtgcaatcgctgatggttattcctgatggccgttatggtgacaacgatgatgcgttgcgcccggcgctcagtgacggaaggctgactcggatggcgcagtggttggcgcagtacacctcgctgtgggcggcgccggcgctcaataacccgaaatatatcgatgtgactgcccgctatcgggtgacattcgtggcgggtattaacccggattatggctatcgacagctcgcggcgcagttacaacacgactatatgccctgggcgaccgatcggcgccaggcggtcacgccgggcaatcaggtggactactaccggctgctggccacgctgcaacagtcaccgctggtgcagtccgtgaacgcgctggtccttattcacgacgttattgatgaaacgggaaaacccacctcgatggaaacacaaaaaaccgtcaccgccagggatgatgaggtcctgattttatgtccggaaggagatccccatgtctaa

SEQ ID NO: 448390 - DNA, 2895 bp, Serratia marcescens
atgtctaaagaaaacgccctgttcccggaggtgaaagacgcgattgcgtttgatgcgctgtggcaacaggctcacgagaaagtcactgcgctcagtggtgagatttggacggataccggcgatcacgatccgggcgtcaccctgttacagtccgcgacctggaactgttccgacctcagttaccgcgcgtcgctgtctctgaacgatctgctgacccatcaagaccagagcacgttgttcccggaagagttcggtcctgaacaggtgctcacctgcaatgcggtgacggcagaggattatcgccgggccttactggacttgcacagcagcgatattgacaccctggacacccccgagcaggattttttattcagcgatgtcagcctgattcaagaacctgaagcgcaccgttttcactggtggtataacgcggaaaaacgcgaatacagcttcaaggaaccgacggtcacccagcctgaagacaagaccacgctgtctctgcggggaaatctctggctgtcgctggtccccacccgctatacccagtccctgtcgcccgataaccgggcggcggtggagcaacgcctggctgattttctcgcggcacaccgtaatctcggtgaggcggtgtcgcgcattatctgtctgcaaccggcgacctttagcccgcggatgacgattgcactggtcgataacatcagcgacatcaaccaggtggcggcacacatctatcaggtcaccgacgcgtttttgcgcccgacggtagcccgttataccaccgaacaacggcgtgcgctcggtgacgccgatgacgccatttttgcggggccgaggctgaaacacggctggcagcaaacggcgccctcgcagatcacctcagggggatacgtcctcaatcttggcccgctggtgaaccggttgctggctatccccggcgtggccagcctgagcaccttgtcggtcgatacaggcgatggccacattacggccgttgagggtgacaactggcgctggcaggtggctgacagttattatcccttgctgtggggggcggagccgctggatctgctggccgtggccggcggcccgttaaccctggtgtcgaaaggcggtattcgcaacacgctggacagtaaggcgatggcgggctacctgacgcaggcagacctgattgtaacgactcccacagtgttacctgccggccgctttcgtgatcagacgtgctatattcccgtcgggcagcgcctgcctgaatgctatgccttgcagcagcctgatgccgtgattgacgaccagacgcgcgcggtgcatcagtttttgctgcctgtcgaccaactgctggccgacggcacggcagaactggcgcagctgccgaccttactggcctttaaagaccggggcgacgtcattcgggggacccgctggccctatacgaatgcgagggtgcaacaggctattcatcagccctacgcgaaaacgctggaagcgattgcgcagcaggatgcggctatcttcacgcaagacaagcagcctattggggccaattttacccgtgaactcaattttcttcagtatctgttggggtatttcggcacccaaggggccgccttgccactgacactggatttgccggattttctggcgacgcagcgggcgtatctggcgcagcaacccgtcttaggctatgaccgtatcaatatccgtattgaccgagtctccgccctgcaaaaacgcattgcggcatgtatcggccttggcagcatctgctttgcggataatccggacctgagtcaactgccgttttacctgattgagcatcgtcagttgctgccccagaccccggacagcacctttgacagtgaacagaccccgaccggttttacggtggccgagcctaaaattaccctgacgcaggcgggcagtgccggcaaggtggtccaggggcagcttatcgacctgattgcgatagaagggggcagtcgactgcatgtcagccggctgctggttattaaggccgagggagacagttttaccgtcagcacggaaaacagtcagcaactgcacaataccttgtcacgccttcagacggcctgggcgagtcacaacctgcgctggcaaaacagcaatgtctggctgcaggatatggattaccggctgaactatggccagccggagaagccactgccagataaccagcgcttactggcgagcaacgcgcaaaccccgtatcccgccatggtcagcgtcggggatggcattgtcatccgcccggccggcctgcagtattctcagccggggatgaaagcctttcgcgcttccactatggatgcggactggcagcttgaggcgaccgtgatcgaggccgatccgattgcgggcacgttacttatcgaaaaggcggccggcagcacagaggcatttccctcagcggaaaccagctatcgttttcagtgggcatttagccacgcgaactatgcggcgacagaccggttctcctttgtggtcagcgtggtactcaaccgccgtctgattgagtatcccaggattgtgcctgaccaactggttgcttgggtacagggaaccattatggcggagttcccggcccacgtatccctgattaatcactggcctgatgacgccgcttttaacaactttggggcaacctatgcgcgctggcaaaacagcggcatgccgctgggcgatgatgcctttgcactgatgcagatgctgaccctggggcatctccctgttacccagttggacatcggcctgatgcgcatcgccaccgatgcgcagcgcattgaggttgtcggcgacggcagccagtggcacgaagacgttatcctgcgagaagagctgctttacgtgccgcaagacgtgccaaccaccctgtaa

SEQ ID NO: 448391 - DNA, 1293 bp, Serratia marcescens
atgacggataaaacccctaagaacacggcagaaaccgcggttaatacctcggcagccttagccaaaacaacagacacagcgcgtgagggcgagttaaaaagcagagccttgccccaggccgatgcgctgaaggcgcgctttaaggcgggcagtattccgttgcagacggattttgcggacctgattgatctggccaatatagggcgccaggcggtggggggcgcagaaggccagaccggcccggcagacgggtttaccctctcatcggaggggcttctggagttaaagcacaacgcggctaaagggattagcgtcgacaacaatggtgtggcggtcatggttgatgaaagtaagggaatgcaagtaagcggttccggtattggtataaaacttttccccgattgggggcttgagcacgataataaagggatttgggttaaagtagataataaggggcttaaggttgataaaaatggtgttgctatcaaggtcgatgcaaataagggggtgcaagttagtagctccggcatcagtgttatagtcgggaatggcatcgcggtgaatagcagcggcgtaaatgtaaaactggcgaaaggcgctaacactaacggcggagaagggcatggtacagatggcgccacgtctggtagtggcggtggattaaatttaacggcgaatggattgtccgtagacgcaggtaacggcattcagattaatcaacaaggcgtgagtctcaagctggccactaatagtgggctgagtgccgatgagacgaatggcgtaaagataatggccggctcgggaattaaaatatctaatggggcagttactattgaccaagggaatgtgttgcctcgggggattattactatgttctctggtagtcaagcccctgaaggatgggctttttgtaatggtagtaatggtactccagatctaagagatagatttatcaaaggatcatcaaccattagtaccggtacaggtaccggaggcagtaaaagtatagtatttacccctactggaagtgttaccgttaatcctcatgcgcttaccatcgaagaaatgccaaaacataatcataagctttcgggcactgatacgtatgctactggtttttggttgccgcaaatgctagttgggccgataaataggccggaatcatatactcagtctatttcagatgtcggtggcaataaagcccactcacactctgcatcatttaatggtaatagctctgccattaatatcgaaccgcaatattatacgcttgcgttcattatgaagctatag

SEQ ID NO: 448392 - DNA, 1812 bp, Serratia marcescens
atgaatatcaatgtcagtaagaccatttttaatattgtcgtgccttgcaaacgtgggggtgaaaaaatattatcgtcaactttactcggtgctggacagattaaagatacgctgagaattgtggcgcaagactttattattcctggcgaaataaacgtggataaatgggtgcttaatctgggcgttattcctgcggcccaatttgacacgctatttatccctcggctggcacaggcgtttgctgaacgccttgcctgtgaacaaacatcaatcactggtcagcaggcgatgaaaatggcgacatccaatgcaactgaatcaagtgtattacttgacgggaaacaacttgatgccgagggtctcatccagcttgctcatagttgtctgacccctcaggcatttaaggcattattacaggatagtccggcataccagcttcagcagttgctgaagcggttactagagggggcatggcgatccccgaaaatgctgccggtatgttggtatggccgggtgaccgctgaccggttgtcgatagccgccatgttgtacttactcaaaagccaacgggggcatgattggctgatgcatcagcacgcccccacagccagccaagtgactgactgggcaaaggctattgatcagggagaggttcccccagagcaggtcgcggagttactgaccggcaaccggccttccgacagcatattacttggaaaaccggcctatcccgccttgctcgtgatgcgttggttgttgccattatggcgacaacccgccgtgcacaaggtgatccatcgactgaaaggcgggcggggcgtgcagcgccttgatgcttatctgagtcgctgtttacaacgccaggatgatgtcatgcagaaagaaaaggggatgccgtccgttcccgcgcaggttgtaccaccgcaagataatacggtgttatctccagacgggggaatggagtccgaggcccagcaggttgcactaccgccagagagttctgcgttgtcacaggaccgggggatgtcgtccgatgtcctgcagattacattaccgccagagagttctgcgttgccgcagaaccggggaatgtcgtccgatgccctgcagattacattaccgccagagagttctgcgttgccgcagggccaggggatgccgtccgatgccctgcagattgcgctatcgcgagataacgccatgttgctggagagcgaggagatgccggcaacatcccgagacgtgatgcagcctgggaaaggcggcctccgttcgccgaatgagccacgttcgtcaagtaagggtatcagtaacgccggtttgctcctgctgtggccgctcttgcctcagcttttttcccagttgggtctgtgggaggaagagcagtttgtcagcgatgcggcgcggtggcaggcagtgtacggtcttgacctactggtctggggcgaagttactccgacggagggccggttgacgttgaatcaggtgttatgtgggatgtcttgctcaacctccgtaccgtcgccgataccgctgagtctgttgcagctgcaacagattgacgactggctggccgctatcggccaacaacttcccggttggcaaaagctgagcctgacagacattcggcaattgttcttgcaacgggcaggtgagatcagcatggaaggggcagtcccccaaatcaatgtgtggccggaaccctatgatttcctactcagagactggccgtggccaatgacgctggcatctttcccgtggactgaacagccactgaccatcgcctggccgctaaacggtttcacaggataa

SEQ ID NO: 448393 - DNA, 2091 bp, Serratia marcescens
atgacgctttcttcagcctttccgcccgcgtttattccgcagggtgaatgccaattatcgctcttgtttagcgagctggagcgtatcgatctgctattacagtgctattattatctccattcacctcgtcacgagggttttaacacgtttctgctttgcgaagaggaggttgaggcacgcatccaacaccccgtcggcagacctcactgggccgatatcacacagccggtataccgggcgggaaacgggcatccattgttagcaaaaggtttaactgacctgattaatcatttcgagctcaccgactttgaactagacacattgttattgggattgctgccccattttgacagccgttattatgatctgttttcctggctccaggggggaaagcaaagtcagctgcccagtttttcattggccctcacgttattttgcccttcagacagggagggagggatacagcaagccagttttctgaatcaggcgccgttaatgcgctgtcagctgttaacaattgaggagaacaaaaaaaatctggtatggagccaaacccgctttatgaccgacagcagcgtgtaccattttttacttgggcatcactatttggcgccggcgttagcgtcgtgggctgaatggtcctcccctccagcgttgcccttttatcctgccgacttgaaacacgcgctggcaggcgtgttactgactgacgatattgagccgcgccccgtggtgttgctacgcggcatgccggggagcgccagagcccatgcggtgtcgagcatttttgcctctgaaaaccggcagacactgcaggtcgatatcgataagtgcaccgagagtgatgacgatgcgctgttactgcatttaacctgtctgatgcgcgaagcccgtatgcgcggcgcgggcatggtgatccgcaacctgcaggcacggatggaaaagagcacgtcactgccggagaggttatctgagcaactgaaccagccgggattaagggtggtgtgcctggtcgaaccctatgccccgcatttatggctgaaaaagacgcccacattgcagacagagatgccggtgttgacgcaggaggagaaaacgcacctgctcagggattgcctgccggaacgacgtgcggcggatatggaccttatcagtctaagccagcgctacacctttaccccggaaagcctgccgctgattgtgcaagaggccgaactgtatcggcagcaacgcgacccggcggatgttctgcaacagtgtgatattcgccaggcgctcaatttacgcacccagcagaattttggctcgttagcgcaacgtattacaccgaagcggtcattaaacgacctgttggtgtcagagagcctcttgcagcaactccaggagatgttgacggccatccgctatcgggaaaaagtcctggccggcggttttaaagataaggtgggctatggcgtcgggattagcgcgctgttctacggcgactcgggaaccgggaaaactatggcggcggaagtgctcgcccataccctgggggtggagttaatcaaggttgacctctccacggttatcaataaatacattggtgaaaccgagaaaaacctctcccgtatctttaatcttgcagagcaagatgccggtatcttgttctttgatgaggccgatgccttatttggtaagcgcagtgaaaccaaggatgcccatgaccgccatgccaatattgaggtgtcttatctgttacagcgactagagagttttcctgggttagttattttatccaccaataaccgcagtcatctcgatagcgcatttaaccggcgcttcacctttattacccgctttgcttacccggatgaaacgttacggtataagatgtggcaagaaatatggccgaaaaatatcaaaatctcaccggacgttgattttggaaaattagcgcagcgtgcaaatattaccggtgccaatatcaggaatattgccctattagcctccttctttgccgaagaaagtgatagtcaggaagtcaatcacagtcatatcgacgcagcattaacccgcgagcttgccaaaacagggcggctggctatttaa

SEQ ID NO: 448394 - DNA, 879 bp, Serratia marcescens
atgtctaattatcaagccctggtcgacgtgaataacgcgatgaataagatgctgcgcgcctacgtgaatgaggacgtggcaattcgctttgatttaccggatgtggatgccacgcagtccgacgccgcgataagcgtgttcctttatgatatccacgaagacctgcagctgcgtactgcagaatcccgcggatttaatgccggcgcgggtcggttatcacccggttgggtcaacgtgaagtgcaactacctgattacctattgggaatcaaacagccccgccatggatgccaacaacccggacagccagcccgacaaccaggccataaaggtcatgtcccaagttctggcggcgttgattaacaaccgccagctagccgatattcctggggcctatacgcaggttataccgcccaaagaaaatctgaacagcctgggtaacttctggcaatcgctgggcaatcgtccgcgtctgtcgctcaactattgtgtcaccgtaccgattagcttgagtgataaggacgaggaagtgaccccggtgaaatccttgtctaccaccgttgagccaaaagcgcccgtttctccacaggctatttccgatgtactgcgggagcgattgatagtggcgctgggcggtgatgatgcccgtcttgcgatgacgcacgttaatctggatgcctcgccggtcgccgcttcaaacgggagtgcggctgacatcagagtgtcgctgcgggtttccggtatgacgcgaacagaatacctcgccccgatgaacaccgtttttgatgaatgggaaaaggatgaggttgcagtggtcatgcccgatagctaccgtatttatatcaacgcggttgataaaaccgaactgacgggaatgtaa

SEQ ID NO: 448395 - DNA, 6009 bp, Serratia marcescens
atgggttatgaatatcagaacaaaaaagccccgttagccagcctggaagaagattttgaaggagtaaatgacaacgatacgggtatggattatgaacgggcttttttcacacaagccagtggcagtggggcagaccccaatctgaatgggctacagcagagattactggcgggctacaaagccgataaatttgatgaactccaggagttccgcaaacatggctataacatagacgagttgcgggtggataaggtgctgctggaagactttatcgaagaactcaagggggtgcctgagtttagtgactggtctatcaccagcacggccaatgctttgatgggtatgatagataacgtggagaaaatggatgttaaggctctgagtggtgaacagaagaaggtaatacgccgggttatcgacctgtcgcgtcaggcaacggatgccgtcatgatggcagcgctgcacctgccactggggggcgctctgttggcagcgcgggaggatcgcgctgccttgggggacgacgcgccaacagatgaagacattgctgaggtgacggccaacctgaaaaccacagggggggcgattaaacaggtccggcttgcagccttggatctcgatctccggatacctgataaagaaatgccctggcctactttcaagaaggatatggatcgtttgtacagacgtctgaatcaactgggcgagggcaaagtgaaaacggtcaaaaagatgttgacccctgataagacgttgatggaaaaggtgcaggcccttccccatagtgcggtcgatatggtgaaggccgccggtgctggtacggtgaaaggacttaaaaagctttcaaccaataaggaacagtggaagggaacgatacgccaggtaggtaaactgtcaaggcaggccggaacatcaatacgcaataaagggaaggcggtgcgcccatccttgaacagcctgacggcaagaatgggttgggcagtgaaaaatacgaagagccaggcgttatatggcatccaggaaaaattcctgctggcatctgatgaggaggccgagttccgtgaatcactgaagctgctggtcgagccgatagatttcgccatgtctgcgtatctgaaacattctcaggcgctggcggccacacgacaggaagaggtggagcagagagtggcgctacgccagcagagacaagcagcgattgatagggtggagttgctgaagacaatgcttgaggaaaaggaggccgttgtcctcagggagaagtatccggggcaggcagagaacgttgtgccatttttagacgggatgaaaaaagagatgggcgttttctggctggcggcggcccggttggatagcctattgggaagcctgatttcacccgcgcccgaagaggaagcgccgcttttcccgggaaataaactcggggagttgattgaggcgctgggtaaagtcacgaacgctcagaatcggctgaaacagagggtgatgaaggctaccctgaaaccttttgatgagctttctgtcgactggcgcatcgcgcgggatattgggcgctatttttacgcccggcgagaagcgctgctggagaacagtacaccggcctccatggctcagtttgacgcggtcgttgaggaggtcatctggacacaggtggcgggtgattttcgtaaaacgcgttctccacggggtaaacagatggcggtcagggcaacctgggcataccgcgaggcgatagcagggacgttacagcgtagtaaaaccgtgcaagaaatcgtcgatgagcaggataacgtggacacccaattgatcaagctcgggcaaaagagcctggtagggcgggccgtttttgcggggattagcggtaatgtcgatcgactgtttgaggccaaaccgcgcaatgtcctgatcccgaacctggggatcgtgaaggtgctgctcagtcctgtctctttctggaacgattaccgcaaactgtcgcgggcggtggagccgggggatgctttctcgtggggcagctatcggaaaatggcgcagcgcaatgccttcaggcaggcgttcaggatgttgaaatttgcgttaccgagagtggcaacaacaggcatttcaggggtgttggcgctctgggcactgtatcggggaggggttggggatacgtttaaaaaagcgctgacggagggaataacggttatgccgatagctggggggctggcgggggctgctttggggagagggtctgataaaagcgacatagtagcgtcctctgataacggtgagatagcgcaggaaggcgtaggcaaaaataatattgcggatttcagaggctcggatgcgcatactacgctgaataatagtgctgaaaataatgaaaacaaacctaaaagcaggggcaagcggcttgctggtcgagataatcaaaggcgaaaagaaatagagatattacgaaaagtagtccgcagtcagaataatgctcaacgaagcaataattctctgtcttctaatgtaacccatccatctagttatgatacatcagataaaaaaacttctgatgaaccgtatataaacctttcagaggacgaaaagaaaatcacttatctgcatgccacaaatgatatcctagataaaatagcaagagataattcaatccccggacacgctcgtcgaaatgcgcataatgcaaaaattggaatggcagttgttacccctgttgatataggtggatttaaattggctaatactttctttatacctgacacccctggttcgaagcaagggattcttgttaacttgaatgctgaaaaaaaatcttacatctatattaataagcccagcgatgtccctatggacctggcttctaattttaacaacaataatataaaagtgtatgttggccgaggtgtgggctttgaagatacttatctagatgggcgtgggctcttatgggatgcaacaaaaagtacagatgaatctttcaacgagaaattcaacaaagaaaacaataaaccaatgagtatttacgatctttcagagaatcttgctgatagtgccaaagaaaaatacgttaatcaacccaacattaatcacaataagtatgttgtggaaaaagcaatctccggttctaaattaccccccccagatatcagtgcttttccaacaccttattcattgaggtatacatgggcgtcgctgagggtttcccaatatctgagatctgttgcaaatccgttttcaacattgggaggacaagtgcagctagtggtaagtagcataaataatgattctatacaagatacagatgataaaataaaaaaggcggaatatatcgggtcatgggttgattccacggtgggaacgatcgtttccttcagccccgccggtattgtcctcaatgtagggcaatccgtagctgggatcacagccgatttggcagaaggcaaaactccagacccattagatacggcaggtttggttatgagttgctttcccggtgggaaaattgcagctcgtatcggaaaatttagcacggttggggaaaaaggagtgaaatacttcttgcgaattggagaaaaaatacttgatctggctgaattgggcagaagcattaagacagccgtagacacgggtgaaccacttgctatttaccaagcatttttggccagtggtatgagcgttaaagatgcgtatgatacgacaaagaacatgtcatccgagctaaaactcggggaaatgccatcgctggataagcttgaggctatccacaataataccccagagtcttctctaagttcaacaatgcaagcgcgcccattcagagtgggctctacagaaatgatcgggagaataaataatggggaaattgagatattcaatgagaacacccgcacctgggggaaagggagcaaacttcacttgttagcttacaggcttcaaaacgccggtggtggtctacggttccccgtattgttcagtaataaaatcgttattggggaacatacttttaaacgtgtcaaatatagtcaggataagttcaatgaaatgatgcggatcgctaagacgtataccccgacatcaaatagcacagagcgaattgcaaaaatccagcaagattatagggaggggaaagaaatgagtcatgcgtctcagcatgatcattacaatagcttatcccttgatgataagtttgacttgtttaataatccgaatacggatgcgataaccagaggtgttttagccggaaagataaatgaatcaattgcgaatatctattcatatgaagcagcgaaggctgctgatgattggaaagtgtctgcaaataaagcaacagatgttgtccttgccccgcagagtattttcttaaaaggacgggcgggtgagtgtctgcctgcatccgtattaatgggttgggctttacagagtgggcaagataaaaaattagcgaaggatttgatgggtatttattcatcatctaatattgcagataatcctttgtataagtcactcgtcgagttacatgctgatggtaatgcatctaaatttagtgcagcctcaccctccgatgttaaagtgagtgcgctaggtgatgcggaatcaagactgttcccaagagaaaattcttctgttagggttgatatccttagacatacgatgttgctatcgaaagtgaatcaggatggtaagataaagtatgttttctatgatcctaattatggtctggcttatttcgataagtataaggatatgtgtgatttctttaaaattaaactcgatgcgtataatacgccagaggattcgactaacttttataatttagactactcacgccttcctgacgttaaaatacaagggaatgacttggatgagattataagcggctccaaacagcctgatctggctcctgcttctgagcatgtacaaccatcttcagctccaacaagcagcatcgctcgcgaagggagttcccctttctctcatgccaaagatgctaaaggaaaaactctttctgagctttataatgaaaccaagacactggctatgcagcgtaaatataaactccttgccgctcatatggaagctacgaccaaagtggttgcagacaaagtcggcagtactcttcatgattatgtcagcaataaccccataccacaggatgcccaaggtaaaccgaaatttaccattagcgtggttggtttcggctctttggccagagatgagttattattagtctcggatattgacttgcaatttatagtgattgccagcgatgcacacgcagtggaagcgcgcacttatgcaaaagccatgatggacaatgtcaagagtgagtggggtaaggtgcgcaattcggtcagcactaacccggacgccacggcgcttcaggtggatagtgtgggaggcgttgagggggtcattgtggtggattctgccgacaaggcggcagcgcagatgaaaccgaaaaaaatgggttctaaaggttacagtgatgcttacgctgattctcgcgctatttatgaaactaaccccggcgtttatcaatccacattcgaaaggtatgaagcgaagctcactaatcaggaagttaacggtttagttaacgaagcgttatccgatttgacatcgttaccctcaaccttaaatagtgcaaagcagacttttatacggccaataacgcttgctgttggtggtttatatcgcaaattgcgtgaaaaaaccggtaatagcttgccatatgaaaccaacaccctgaaaagagccaaaattttaaaggagcatggactcattgatgactttgactatcagaatattgagaatgtattgttgcgtgcgttcaaatgggagcaggaagccgggttggcgagttttaaacatgggcaacaagttttacccaaacgtgcttcctcatccagaacccgtgggatgtatagaaaaacccaccatatcaaacagtcgctttcgagcgctaacgataagattaaccgtatgccaacgccggtcgagtccgtcaaggtggtgtaa

SEQ ID NO: 448396 - DNA, 342 bp, Serratia marcescens
atggacgaaacctacataaaaatcaagggccagtggaaatatctgtaccgtgctgtcgatatttcaggtcagacggtcgacttcctgttgaccgccagacatgacgctgcggctgctttgcgcttctttcgcaaggccattcgccaccacggtgagccagaggtcgttaccatcgataaaagcggtgccaacacggcggcactggccacactcaatgccggtaaacctgatgaagaaaccatcaccatcaggcagagtaaatacctgaacaacctggtggaacaggaccatcgaaatatcaaacggcgaactcgaccgatgctggggggctttgttgaataa

SEQ ID NO: 448397 - DNA, 636 bp, Serratia marcescens
ttgacctttagcaccgaaggggaatttatttattctatacacaggatcattgacacaaccttacttggatatgaatacgtccttatacaacgtttactttcccgctcgctaaaaataccaccacctgtgataggggcagttaaaaataattatggaatcactgtttctttgttaggaaaaacctttcaagtcttcgaaaaaatgacatggcaggaaagagtaaagcaacaaataaaacgattacctgaggatagtaaatcaggcaattacgaaagaaaactactacacgatatggaagaagaaattcataaagaatactttcctcttcatgaattaccaaaggatgcctgttttgtcatcaaacaaaccgagcttaataagttaatcaacatgtccgtcgaaaaaaaattgctcataccgacttcaacacgaatatccacgcctctatcacgccttttctggctcgcatgcaaaaataatgaagccatcagtccgttaatcaggcagccctataaacttttatctattttcgaacaatgggcatctgacgaaggtataactgatcgattcagtggcgacacactgaagaccgctcttgaacgaggctcccccacttccgtatcgacaccaaagtaa

SEQ ID NO: 448398 - DNA, 195 bp, Serratia marcescens
gtgacatcccatcagttattacgtctgaaacaggttcaagaaaaaaccggactgaagcgctcgcagatttatctttacatgaaaagcggcaactttccccgttcaataaaaattggtccggccagcgtggcctggcttgaatctgagattgacgggtggatcaacctcaaattaaccaaccgtttaatgcgttga

SEQ ID NO: 448399 - DNA, 585 bp, Serratia marcescens
atgatcccttcactcaattacgtcgtattaaccgatgctctgcatgcattgaaggatggcaacatccgtcactgtgaatcgctaggattcactttcgccgaaatgaatgccctcaacaaattatcaatagacgaattgtttatcattagtcgggagtctgcgacatttttggctgtgacggttcatcacgacgcattacacctgcttctaacgaaatccggtgaggagattctgcagcaacagcgtatcagccgcgccatccggcaaggcgggtcgattgctctgctaaatcactattttggcctcacatccaatgaggtcagccttcgtcgccggttgctggatatcgccatctctcatggccggacacccattccggatgaagagaccgatgcccgaatatggcgacaatggcaaaaatacagggtagctaatctcgaatcaaccgatgcacttgaggcgatgatgcaggtcactgagaaattgtccgcccagcccaatcccccctcgctcactgtagtctggaaccgtatcaagcttttcgaacgtgaagcctctgacagggagacctctcatgccggatga

SEQ ID NO: 448400 - DNA, 210 bp, Serratia marcescens
atgccggatgagatcgaccgcgatcaggagtttaatgaacagcggctggaagatatgattgaacagagccgtttcaaacccgctgtaacgccttcattgttttattgccaattctgcgggaagcctattccagagaaacggcggcagacactgccgggggtgacgacatgcacggaatgccagtccatccttgaacgtcgcaggcgctaa

SEQ ID NO: 448401 - DNA, 321 bp, Serratia marcescens
atgtcaccggaaagcgccattaagttactggccaaccccacgcgggttgctgtgctaaagtggcttaagaaccctgaagaagcgtttgctggttattctcagctctttcccttcgaacagtatggcgtatgtgccagtcttatccaggataaggcgggcttatcgcagcccgccacctcactgtgccttaaaactcttcatgatgctggtatgattgaagccagcaaggtgggtaaatggacctattaccgccgctgcgaacagcgtatactcgagatgaccagtactgtcacccagtctctgcaggaattgttacactga

SEQ ID NO: 448402 - DNA, 1119 bp, Serratia marcescens
atgtcatcacttttaaaccccctaaccttaggcgacctccacctacgcaaccgcattgctctacctccgctgacccgctgccgcagtaatcagccggggaatattcccggtgatatgatggtagagtactatcgccagcgtgccagcgctggttttatgatcacagaaggtacgcagattgagcctcgaggccagggatatgcctggactccagggattcacagcgaagcgcagattgctggctggaaaaaagttactgatgctgttcatcaggaaggcggcacaattttttgccagctctggcatgttggtcgcgtttcacatattgagcttcagccggggatgcagccgcccgttgcgccttcagccgctgtcgctaccggtgtgagagtatttattgaaacagggccggggacagggatgctgactgcacccagcgaaccgcgagagctgacgaccctagaagtgaaagagattgtggatctttaccgcatcgcagcagaaaatgccaaaaaggctggtttcgacggtgtagaactgcactcagccaacggatatctgatcaaccagtttatttctgaacatactaacttccgttccgatgagtacggcggctcacttgataaccggctgcgtttccttcgcgaagtcactgaggtagtcagctcggtattcggtagccatcgcgtcggagtgcgtattgcccccctgttttcgagcactgatgaagagcgggtctatctggggctggttgaaaacaatcctcacgccacttacatccgtgccgcggaggttctgaacgagcttgaagtgggttatctgtcaattgccgaagctgactgggacaacagcccggatatgccggagagtttccgtgttgctttgcgtgaaacttttcgttcccccattatgtattctggtcgctatacgcaggaaaaagctgagcttatgctggaaaaaggctggggagatttgtttggctttgggcgtccctttatcgctaacccggatctacctgaacggatcaaagcaggttatccgttaaatagcgcggatcaatcctctctgtatggtggtaccgagaaaggatatactgattatcctgtttactcttcctga

SEQ ID NO: 448403 - DNA, 303 bp, Serratia marcescens
atgcgctacgctcaaatttttcgctacaccctaaaactgtcggaacaggaatatccaaagcgctgggttgacccatacgcaactcatatttctaaggctcctggtctgattagcaagacttggatggcagacttcaatgaaggtttgttcgccagcttttatatttgggaggacaaagcttcaatggatgcattcatgtcctcacccgaggttgcgcttgttgccgcagaaccatttttgaaagatctcgaaatcacggccattccagttcacgaatatgcttcggtaataactcggggctaa

SEQ ID NO: 448404 - DNA, 915 bp, Serratia marcescens
atgcattcaattccagctttgagatatgctgcggctgcagcaagacttggcacttttagcgccgccgcacgagaatgtggagtcaagcaacccaccgtatcggctgccatttcagatctcgaagagtcattaggtgtggctctattcaatcgaggcgcaaggaggctagagctgacgccagctggtactcacctcatgacacggattgcggcgattttagtggctgtcgacgatctagagcgttcctccaaagcgatcacctctccatcgaaaccacaactccgtttaggtttcacgcctctgatgggggcagcccgtcttgggctactgcttgacccgtacgttaaggcacatccgggggtcgacctgtttttttttgaagcagcgagtaatgagttggaggcgcgtttggatgttggaagtcttgacgtgatttttggcgtcggattgaagccacagcgaatgcgtaagcgagcaaagttattctctgatgcgttgtgttactactcgccttctcataatgatgttagcgctatcatcaacatcacgttaacagacattactcaatcgcgactcttgctcacagaaaatctctgtggcctcgcggacgcgacccggaacctgtttgccgacgccggcctttcaatccacgaatacccaggtcgagcaatgagctacaacgcacttgaggactgggtcgatctcgggctgggtggagcggttctcccccatgcccatgttcgaaacaagctccgcgcaataacgttaattgacaatcacggtaatcctatggggattggtattgaggcggtatggcgtaaggattatttagtatcggacgctggtcaagagctcgtgtcctacttacatcgtgtagctcctaagttggcgcaagggcttggctggcacgtttga

SEQ ID NO: 448405 - DNA, 1467 bp, Serratia marcescens
atgagtgaatctattggcgagcgtagaaaagtcatcattatcggtgctggaatgtcaggggtgttaacggcaataaaattgcgttcgcaagggataacggattttatgatactggaaatggcggacaagatagggggtacctggcgcgataatacttatcccgggcttacctgtgatgtacctgcacaagcttattcctatgaatttgaaccatcatggaaatgggagaagctgtatgcaacaggaggggaaatatacgcctatattgaacactgcgttaaaaaatatgccatttcctctcatattcactatggaaaaagggtgaatcatttaatccaggttgaaaatggatgggaaatcacggctgaagataacacacaatacctcgctgatgtcgttattttatgttgtgggagtttggtttatcctaaaacccctgatatagagggcatcaatgaatttacaggaccctgttttcatagtgctcgctggaaccatgatgtgtgcatgaccgataaacgcgttggcctcataggaacaggatccagtgcagtacaaataaccagtgatttagcgggaagtaccgtgcattatgcattatttcagcgaacccctgcatggatatcacttggctttcagttggcgcgtccagaatggcttcggtatttagagagcaaatttatttatattgcgaagctgagtgggaagatacagaggaagctattggaaaagttatttttaaatgctgtttccggtcaacagatacccatgaagattattgaatggttatgtaaaaaaaacctcgacaaggtgagcgacttgacgctcaaacaacgattgacaccgagttataatataggctgtaaacgcttgatcgtttctgatactttttatgacgcaatacaacgacccaggacaacattagtcacgtctggaatagaaagagtgacttcaaatggtatttatactcaggatggtcagtttcatgaactcgatgttttaattatggctaccgggttttatgcaatggactatttgagggggattgtcattgaaaacaaaaagggtgaaaccttaaatgagaaatgggctaatggggcctttgcgcatcgttctgtttctgtcgcgggttatcccaacctttttatgatagccggtccccacagcccctatggcaacctgcccgtgacacaaatagcagaaatacaagtggattatttattggcgcttataggtgaagttataacgggtaaggtggggagtatttgcgccaaagaagttgcgcaaaataaatacaatgaaaaaataaaggctgcactaccccataccctgtgggccagcggatgcaccagttggtatcttgatgcgaataactcacccagggtttatcctttttcaccaagagagttcagaaatgaaatgaagacagtaaattttgatgaatatcatatgtcaaagttatattaa

SEQ ID NO: 448406 - DNA, 2298 bp, Serratia marcescens
atgaacgcttcaagtgatggttcgtcaacagtgcttttgttccctggtcaaggttctcaatacaaaggcatggggaaagagatatggaggaagtttccagatataacgaccgcagcgtctgatattctgggttattcaatcgtggatttatgcgttaatgacagcgatctgttattaaaaaatacgcgttatacgcaacctgcattgtatgtattgcaggtgctttattatcttcgctggaaaagtcagcacgatagcgtgccttacgcggctatcggacacagtgtgggtgaatatgcagcgttattttctgctggctgttttgactttgaaacaggcttgtatttggtccagaaacgcggaaggttgatgtccgaggctgctgctgatggggcaatgacagcggttatcggactgccgatagcggaattaaaagtgatacttcaaaataaagcattttcagagattgatgtggctaattacaatagccccttgcaaacggtcatttctggaaaaatcgacgatctggtagcgattgaagaatactttaaacacaatcaaatacgttatgtcaggcttagggtgagtgccgctttccactctcgccatatgatgcaagcaaagcgtaccttttcccaatatttacgccagttttatcttcaatcacctcaattcacggtgatatctaatgttacggcaaaaccctataaagacggcgatgtagcattattgctgggcgagcaaatagcagcaccggtgcggtgggaagaatctgttcgtttagtgatgagtcatagggaagtacagtttgtcgaaatggggattgatgatgataataaaaacagagcaatattaaccaaattagttgatgacatttccattgatgatgcacaaacgacaaagggatggaatgaaaataaatcacctgagttggtacaatccctgcatttgatgccggaggttttactctcgccgtcacaacagctcggcagtattcattttcgtgagcgttaccacttaaaatatgcttatgttgcgggagcgatgtatcgaggagtttcgtccccagagatggtcatcaggttaggtaacgccggcctgctcgggattttgggggcgggggggttaagtctcatcgatatcgagcgtgggttacaacatattaagagggcgttatcctccactaccgcctatggggtgagtctccttgctgattatgcacatcctgggcatgaacgtgacaatatcgagctttatatgaaatatcaggtcagcattattgaagctgcggcgtttatgtcgataaccccggcgctggccttgttccgtataaaaggcctcaaacgggatgtgagtgggaaaattcgctgccataatcgcatactcgccaaagtctctcgcctggaggttgcagaagcctttatgaccccagttcctgaggaaattgtggctttattgctgcaggaaggtgctataagccgggaacaaagcgagcttgcggccttagtgcctgttagccatgatatttgtgtcgaagccgattccggcgggcacaccgatggcggaaaccccttggttcttcttcccgctatgcaacaactgcgaaatcatcttagtcaaaagagggaatacgctgaaaatatttgcgttggccttgcgggaggtgtaggaacgcccgtggcagttgcatctgtattttcattgggcgccgactttattttaacgggatcaataaatcaatgctcagtcgaggccggtgcgacagagatggtaaaaaccttactgcaagacgttgggatccatgataccgcctatgcacctgctggggatatgtttgaaaccggggctaaagttcaggttcttaaaaagggaatactgtttccaatgcgagccagtaagttatattcactgtacacgctttatccgagtctggaagcgttaccttacaatgaacagcgtgatttagaaaagaatattttcaaaaaagacgctgccagtgtttgggacgagatacagcgttatttacagcgaacagagcaatatgatgccttaagaaaagccgaagggaaccctaaaattaaaatggcaagaatgtttcgttggtactttcatttctcaatgctacagacgtttagcaattccatggataatatccgtgattatcaaatccataccgggccagcgttaggtgcatttaatgcgttggttaaagatacgcaatttgcacgttgggagtccaggcatgtggatgagatggcctttttcttgctccatgaagcggttaagcaaaacagttag

SEQ ID NO: 448407 - DNA, 1149 bp, Serratia marcescens
  misc_feature (301)..(310): n is a, c, g, or t
atgaccggacgtaacagacgcaattttagccccgagtttcgcctcgaagctgcccagcttgtactcgatcagcactacaccgttgccgccgctgccactgcgatgaatgttggcaaatccacgatggacaaatgggttcgacgattgaaagaagagcgagcgggaaaatcacccgtagcgtcacccatgacacctgagcagattgagatacgtgagttgaagaaaagacttcaacgcgttgaaatggaaagggatatattaaaaaaggctaccgcgctcttgatgtcagactccctgaacnnnnnnnnnnctgttgccgttgtgtgcaacgtgtttggggttcatcgcagcagttataaatactggcggcagcccaggaagcctgacgccacgagagtggcattactgagccttgtgcgtgaagtttatcgcgaaagtaacggttcagcaggagcgcgaagcattgccgcaatggtcaccaccaaaggtataaaactgagccgctggcgggcaacaaagctgatgaaagcgctcaatattatcagctgtcagcaacctggccatcgttataagaaggcgtctaaggaacacattgagatccctaattatctggatcgccagtttgctgttaccgagcctaatcaggcctggtgcggtgatgtgacttatatctggacgggaaaacgctgggcttatctggctgttgtactcgatttgttttcccgtaaaccggttggctgggcgatgtcatttttccctgattccgcactgacaggtaaagccctgtcgatggcctgggaagcacggggaaaaccggctaatttactgtatcactcggatcaaggcagtcactataccagcaggaatttcagacagttactgtggagatatcagataaagcaaagcctgagtcgccggggaaattgctgggataacagcccaatggaacagttcttcagaagcctgaaaacagagtgggtaccggataatggctacgcgaattttagcgaagccagcacagcaataacgaattacatcacaggatattacagccagctcagacctcatcaatataatggtggtttgacgccgaatgaatcagaacgattgttctggaaaaactctaaagcggtggccagtttttgttga

SEQ ID NO: 448408 - DNA, 2127 bp, Serratia marcescens
atggacgcctgcgataccgcctacccgcgccttaagagcagtatcaccacataccagcttgaacgctggtatacgccaacagctgaagaacaggatttctgttctaagtccctgcgcgatgggcaatataaacttggttttttcctgctgttgaaaacttttcagcgcctcggatatttcgttacaacagatcaaattcccggttcgatagtcaaccatattgctggtattgaaggtctgaaggccgaacagcaacaactgtccacttacgattcgtcacgtacgcgacgacatcatcttagtttgattcgtacgtttcttaacgtcacgatctttgctggaaaaggtaaagtggtaatggtccaggcgatggcagcctgtgccccaacaaagaatgaattgtctgacatcattaatgttgcaatcgaaagcctgattaagcatcgctttgaattacctttatttagtgtgttattgcgagaagcaaaatcgcagcgagctgctgccaatcaatccctgtttaatgcgatcaacaacaaattaagtgaaacggatcgcactgatatcgatgcactctttttggttgggaaagggctgcgtaccagcccatggaacgaactaaaggctgatgcccctaaagcgacgatagaaggactccgggagttattattgcgctatgaccaactttccaggctggccagcaatatctgtgctctggaaggtatccccgagatcaagcgcaaacaattagcgctggaaggaatgagcctggatgcgaccagcatggtgaatatggagatgaaaaagcgttatgcggtaacgttatccttgatccagcgtcaactggccagaatcactgatgacctgtgtaatgtattttgcaaacaaatgattaaagtgcagcatcgggctgaagaagaactcgatgggtacctttccgctaatcaggataaaactgacgaaattattcgccgatttgctcaacttgataccgtactgaaatcagaccagccgattgaagaacaaatcgtcaacattagccagttggtatcagctcgccaggacttatgtgagttctctcgagtacatgcagaacacgggggtaaaaacgaaagccggttcatgtggcgtcatttcaaagctcgccgtacccaaatttttcgtattctgagcaagctgacatttgtagccaccagtcaggatcaaaattttgttcaggcccttgtattcgttctggccaacaaacaccggcacagtgactggctgcgcctcgatggaaaaggaaacgccatactaaccgcacaggatcttgactggatcccggaaaaatggtggggactggttaccggggaaacgaagcgcaattgcaccccacacagggtgaatcgacgagtttttgaagtctgtgtttgtcgccaactggttcaggagctgaaatctgcagatatttgcgtacccgggggagatacttattccgatgctcgcgatcagcttttgcctatgaaggaatgcatggatacactggcagagtatggcgaactggtcagcctgccagtggacggtaaagcctttgtcgaacatttgcaaggtcggctgaaggaggttgctgacagtgttgaccgtggttatatgaccaatccttatttcaccataaccaacggtcgacctgttctgacaaagctggtcaaaaaaccgttacccgcaggatttgatgcggttaataaagccctgaccaccaaattacaggcgattaacttatcggtacttgatgcgcttggcgacacgatgcgctggctgaaatggggacaacactttggtccactcagtggtcatgaaagtaaacttgaagatgaagagtatcgccaaattctgacgacctttgcctatggcacggggctgggtacagcacagctggcaaaaagcattacaggcattggtgatcgccagattgcctttctgaatcaacgccatattacagaagaaaagttggatacggcgatccgttatacggtcaacggatacaatcgattctggctacccagtctctggggagatcccaagcgagcagctgccgatggaacaaaatgggatatttatgaaaataatatactatcagaatatctgtag

SEQ ID NO: 448409 - DNA, 579 bp, Serratia marcescens
atgaaattaatcgggtatgcacgggtcagtacgggagagcaggatctcagcctgcagctggatgccctgcaacaggctggttgtgagaccgccgccatttttgtggacaaatcatccggggcaaaaacagaacgcccaggcctggacgcctgtttgaaagcgttgcagccgggagataccttgctggtatggcgcctggatcggttggggaggtcaatgactcacctggtgacgatggtagaggacttgcgtagcaaaggggtagggtttcgttcactgtgcgatggcgctattgacaccaccacggcatctggggagctggtgcttaacattttttcgtccctggcccagtttgagagacgcctcctccaggagcgaacccgggcaggcctcgcggctgcacgcgcccgggggcgaaaaggaggacgcaggactgtcagcaaaagcgcaccgaaagtgatgatggcctggcgtatgtatcaggataaatctttaagtatcaatgatatttgtgaaactctaaaaatttcgcgagcaacatttttcaggtacgtatccttatcaaaggacgcggcctag

SEQ ID NO: 448410 - DNA, 552 bp, Serratia marcescens
atgaaaaaaagaaagcacctgacaagtagtgagatagataaattgctggaagcaagtctcaatactacttatggaataagaaattactgcttaatttaccttgcgtttactcatggcttgagagtaagtgaactgtgttatttaagactgtcggatctggatttaaaacaaaaaacaatttgcatctaccggttgaaaaacggcttttcaaccgtacagcccttgagagaaaaagaaatagaaatgttggagcggtggttacttttaagaaataatttcccaggaggagacagtgactggctattcctttcgatgaaaggatcgaagttatcaaggaagagggtttatagtttaattgcatcgctcggcgaacaagccaatatttccatcaaggtccatcctcatatgctcaggcattcttgcggtttcgctttagcagatcaggggattgatacccgacttatacaagactatttaggccatagaaacattcaacacaccgtaacttataccgccagcaactccgcacgctttcttaagttatggaaataa

SEQ ID NO: 448411 - DNA, 588 bp, Serratia marcescens
atggagataatgcggcagcggcgagtggctattatcggggattcgcctattggcattctcggactaaaggtcgtgcttgaggccatggatatcaacgttcatgccgttaaaaaccgagcagaggcgatcttcgaatgtgtgtctgaccagtgtgatgcgatcttgatcgacatgtatcttgtcagcgaagcgataattttacgagaagtgaggaaattaaacgccgaatatggctgccggttcgtcatattttgtgatgggacctggacgagcggtggcggtattacctttattaagcgcactgtacgacttgatgtcatgaaaacatccctgcatcgggggatcagcggcggacgcggcgaacatctaaaagggcaggggtatcgaccgccggcgcggagcaatatcagcgtggcggaagtttttgttttgggggaatggattaatgggcggacggtaacggaaatagcaaagttatcgaatcgcagcataaaaaccatcagctcccataagcgaaatgccatgaaaaaactcatggtcaagaatgacagggagctgtatcgaaaattaaaaaaggattttgtgtga

SEQ ID NO: 448412 - DNA, 1023 bp, Serratia marcescens
gtgaccggggccgtagacgtgatgtgtgtccgtgatgacggcaccgtgttgtcggagggcggattaccctttggtgaaacggcggacgagggtaatggcataaatctggtgtcgcctgcgtggtggcgactggggaataaattgacgcaggtgacggtaaccccaagctggactgggctgccaacggtgccattttccgtgtggtatgggcctgataaggcccaagcgaaggccgactggttgttgttggatccggctctcaatgtcacgacggataaaaataagggctattcacctcagcacctgcctgagcatggccccgcaacgcttgcggggcgcgtgaccaatggttctgacattgccaggcaaatccatgtcgatgcagggtatccgagctcttccagcaatgcgttgacaaaaagcgactatttcaaggtaaaggtcgcattgtaccggcaagggaaaccactcggcaatcagagtgctgatttgtcattgtttggtaacagtagtacgccagcggggcaatcactgtgtattccgttgcaggatgtgccagcggctgcgcctgccgcgcagctgccgggcattgaggccccggcccagtggccgtggtgtgtgcgattgaacctgtcaacgtcgtttctgcataacgaatacgcggcacatgaacgagccgctctgcagacggtgatgtttttgaccgagcaaaagaccgtacaccaggtcccggtaatggttgcggcaggtaacggtggcagcgaaaaagttcataaaatggtcgaaatcgacattccgagtggtggtgggaaaaaaatgctgatgcctgccatgagagaggaaacggtttccatcgtcacaccggtggcggtcacggtgccgaaggcgaagtggaatccgccctacgtgtcgcaatggtcgggcgtccggattgactacaaggcggtcgacgagcaggtgaagcaacgtgtcatcatgccgtttgggtatcgagccggaagccctggatgtgttgttgtgtaa

SEQ ID NO: 448413 - DNA, 357 bp, Serratia marcescens
atgaaaattgatttgaccgaattatctgccccggcatccttctcgttacagccagaccgtcccggcagcaccggggcgaacctatcggtaccggatgcgctggtcagcctgagaccatggctggaatatgtggatctggcggtgcaagggctgctgttatggcagcaacaaaatgaagacgatcgcctgaacatggcggagatgctcctgtcgcaggacgagttggagactacccgcacacagcaatccgggatgccagcctggagtcgccagcccgtgttcgcaccctggctggacggattacaggtaccgcctgtggggggcggcttgccgagattgtcgagcgttttggcttaa

SEQ ID NO: 448414 - DNA, 675 bp, Serratia marcescens
gtggttcgatgtgcgctatgcccacttgattgcctatctgcaagtgaagaaaaggccaaatggcccgggatcgatttggtgctgacgttgtttagcgccaacctgacggaccggatggcgaacaggttggcgctgagcgcgcgaagcggagcgttgttgcgctgggaactggtttcggtggtcaatcataatgggcgcgattcagacgggagtgatgcggtgtatttgtgcccagaccccgtcgtgttccattttttgaacggcgaaccagcggacgcatggcgggtcgggttgggtgcagcggcccgctggagtgccccggtgcaaggggcgccactgcgtgagagcgtgtgggcaccgtacgcggatcaactcgtacatgcctgttttgcgccgcacacaggtacggagcccgcacggttaatattgctacagggtggacaagggcgtacgacgctgatggggcaactggcgagcgaggcgggacggccgatgctggagctggatctgggcatgttaccgtcggatgtgccggtggcgtggcggctgttgcgtgccgcattgcgaagtgtgcgagtgtatgccggggtcatcctgttacggggttggtccgagggcctcgagaaccatcgggctttgttgaataaatcagatttagatcgagcctgtctgtag

SEQ ID NO: 448415 - DNA, 225 bp, Serratia marcescens
atgcgtatagattaccttaacgaagatgagaagcagaaactaaaaagcgttgagttaataataggtcactgcgtggtcattttacttgccaagaaaatgaggattagcacagaaaacattctttctcagatagtaattgaaatggagagcacccctgatgaaaataagttcaaactttatcgagcggcattggaatttctgggcacaaattccaaattgcattaa

SEQ ID NO: 448416 - DNA, 213 bp, Serratia marcescens
atggcggttcattctatcaaaggcaaaatcttgttcatcgccagtggtgctataaacctaggcggtttgatcatccgcgatttaaccgctcaagatgcgaaggctattgccattcactataacgacgcatcctcagaaacagatgcctacgctgtggcgtatcacaaaatcactgcagcacatgctcctttcagcaaaaccgacaattactag

SEQ ID NO: 448417 - DNA, 3705 bp, Serratia marcescens
atggaaagcaaatctgcttcctctgggttgaggaccgggcggttatctcccgtcatggcgtacttatcttgggtaaatataggtatccagtttgcgttaccaatatcgctggcctttacgccagccattgcggcgagtgctgacaagccgcgatggctggtggcgagtggggaggtgtctgcgctggcgacgcggccttatgttctggggccaggcgagacggtggcttcggtcgccaagcattacaacatgacgcccgatgcgctgcgcaagctcaatcagttccggactttcgcgaacgggttcgatcggctgaagaccggtgatgagctggatgtgccgacggcaccgttgccgcccgtggtctgggaggggaaagcgaagggggcaacccgtccgacgcaagatgatgatctggcacaccggacggcagggttggcctcgcgtgccggcggctttttgtccaataacccgaacggtgatgcggctgcgtccatggcgcgggggatggcgaccggtgcggcgggcggcgaggtgcaaaactggctgagccagtttgggaccgcacgcgtgcaactggatgcggatgaacacttttcgctcaagaactcccagcttgatttgctggttcccctgcacgagaaaaaggaccggctggtgttcacgcagggcagcgtgcatcgcaccgatgagcgcacccagaccaacctgggcgtgggataccgtcacttcaacgacgggtggatgctgggtgggaacacctttatcgaccatgacctgtctcgctcgcacacccgtatgggggtgggcgtggagtattggcgtgattacctgaagctgggggccaacagctatctgcgcctgtctaactggaaggactcgccggatgtgacggactatgaggagcggccggccaatggctgggacgttcgggcgcaggcctggttgccggccctgccgcagttgggcggtaagctgacctatgagcagtattacggcaacgaagtggggctgttcggcaaggacaatcgccagaacaatccgcatgccatcacggcgggggtgaattacaccccggtgccgttgctgacgttcagcgccgagcatcgccaggggcaatctggccagaacgatgcacgcgtaggggtggagatgcgctaccaactgggagggtcgtggcggcaacaggtagatccgggggccgtggcggtaatgcgcagcctggcgggcagtcgtcatgacctggtcgagcggaataacaacattgttctggagtaccgtaaaaaagaagtgatcaacctgcgcaccgccgagagggtgaccggctatgccggcgagcgaaaatcgctcggggtgtcggtaaccagcaaatacggcctggagcgcattgactggtcggcgccggcgttgctggcggcgggcgggaaaattgtccatgaaggcggactaggttacggcgtggtgctgccgacgtaccagccggcggccggtggcgtcaacacctacacgatcggtggggtggcggttgacacgaaggggaactcgtcgaaccggagcgagacgcaggtgacagtgctggcaccggtcatcagtgaaagcctgagcagcttcatgccggccagcagcacgttgctggcggacgggaaaagtgctcaggtcctgactctgagcctgaaggacgggcagggacaggcggtcgatattgcggcatccgaggtggttattcatgctggggacgcgaagcgcgccctgaaaagtgcgggtgtctctgccccaaaaagaacgcaacccggcgtttatgaggtgacggtaacggccggtaaggatgcggaagtggtggcgctgacgccgacagtcagcggggtgacactggcaggggctcgcgtcaccatcaatgacatgacgccggatgcgacgcggtcgaccttcgttgcagcaccagcgacgctgtcagcggataaccaggcgaacgcgacgttgacgttgacattgaaaaatgctgcgggcgacgcgttgggggacataaaggaggggctgaccctgacactcaagggcggtgacggcaaggcgcggtcggttgagggcatcacgctgagcggcataacggaaagtgccaccaaaggggtgtataccgcgacgttgaaagggactgcagcagggcaatataccctgacgccgacctacaacggcaatgccatcggcacgctgagcgcctcggtcacgttgacggcgtccgcgcctgtacaggccaggtcgacgattgaggtcggcaagggcgtttatgcatcgggtgacgacatggcggtaaccgtggcgctgcgggacgatgccggtaacccggttcgcggcctggcgggcgagctgacggccgaggctgtgacggtgccccatgccacgctgaaggacagctggaaggacaatgacaacggtacctatagcgccctttatgctgcgaaggatgtgggggccaatctggccgcggccctgaagctcgggagttgggggagcgcctcgaactcggccccgtacgccatcacggcgggtgcggtgacggcggcgaccgtgacagtggacaaggcgagctacgtgtccggcggtgacatgaaggtgacggtgacgctgaaggatgcgcagaacaacgcggtctccggtcaggcttcagcgctgaaaggggcggtgaaggtggcgggtgcagcgacagcgccgaaggttgactgggcggaggccggcagcggcagctacacggcgacctttacggccaccacggcgggtacggggctgacggcgaggctgacgctgggcggtgcgagtgccaactccacggcgtacgccatcacggcgggtgcggtgacggcggcgaccgtgacagtggacaaggcgagctacgtgtccggcggtgacatgaaggtgacggtgacgctgaaggatgcgcagaacaacgcggtctccggtcaggcttcagcgctgaaaggggcggtgaaggtggcgggtgcagcgacagcgccgaaggttgactgggcggaggccggcagcggcagctacacggcgacctttacggccaccacggcgggtacggggctgacggcgaggctgacgctgggcggtgcgagtgccaactccacggcgtacgccatcgtcgtccccgcccccgtcgacagtgtactcgtgaatggtcatgattttgccccgacagcaggattcccgacgaccggttttgtgggggcgaaattcaagctggtattgcgcaatgccgatgtcgccgatttcacgtggacgtcaaatcagccgtgggtatcggtaaataacggcgaggtgagttttacagcgaaaggaaatgggcagaccgtgaccattacgggcactgcaaaaaacggagggggtacgattgcgtacaccttccgactgcaacgctggtttaccaatatgggtaatcagaccatgacatgggggagcgcaaatatgacgtgtactttaccgacgatagcagaattgactaagggtccgaacgtgcgaggcactggctcgctctggagtgaatgggggggactgatggcctatacaacctctggttttgtcgaaggcatttactggacgtccgagcagagcagcaatggcaaccattactacgtctacctgggcattggctacgtcatcgacagcggcggcggcggtagctactccgtggtgtgtcggcaggttctttaa

SEQ ID NO: 448418 - DNA, 1407 bp, Serratia marcescens
atggttcaactggtgatgatcctattaggcgtggactaccttcgctctcattggcgaggcttacttgtcgttggagtggttggcgctacggcaggcctggcgatattcatcgacgcattggataacgctctctatttccccttacacccctttgcctggcttttactgatagaaggtatggctaccctgctggtagcacatacaggcattggcgggcagcgaaccttacgctatgtcaaaggaagcgcattcgtgctggcggccatattgattctggcaggccatcatcatggtcatatgatcctctccatgattttcggtaccttgtttttggctgatggtttgctacaaaccgtttcggcgtttgtggtgcgttatagaaactggaagctggccgtcgccggtggcgtgatagaaatcctgttagcgattttcttctaccagccttatccgacacattacgtcggtacagttccctattgcctgggactgggactgctttttggcggctggaatatgatacttctggcaatgcgcgtcaaaaaactgcgggcaaatcctgcagtgcaaaaccctcttgccgaaaacaaggtgcataatcttgtggctgccccccaaattaccgagtggaatggccctcctgcagaagatgagcccgcattaaccgtacatgtttggactcctgtaggttcatcgaaaaacgaagccgtaccgcatcccgtcattgaccggtatatcgccgcggtagacaagaatggggttatctctacgggccatgcagcgctggactctcccgaaggaatttacattagcttgtacccggcagtcgatattgaccgttcacccgagcagttcacccgtttgctgcgagctaccgcagaaaacaatgtgccgggtaaatttcagccggattatcaaacagaatctgtcgcctggtgcccttcaaccgtacgagtccgtatacgaaattacgatcctgaacacttaaaacatttttggaatacatatcagaaagataacacttacaatctgacacatcgtaattgttccagcagcgtagcccgggggttagaagctgcactggaaggtgtggccggcaaaatatgggggcacagcggtcattggcgtgcgttgcttaaaattctcacaacccccgaactttgggttgccgtgcaaattcgtaaacgcgcaaacaccatggcatggacgccaggcttggtactggattacgcacgcgccctcagcatgttggcagatcctcgaccaacaggctggttgaacaccgcacgccgcgccgtgcaaaaaatgttttcattgcgtaagcaatggcgaaatgaccaatctgagacggcgaaaacacaagctgccgacaccaaaccgcaacacgctaaaggcacaacgcaataa

SEQ ID NO: 448419 - DNA, 981 bp, Serratia marcescens
  misc_feature (880)..(889): n is a, c, g, or t
atgttaaccggggtcttggggtatgtgggaattcatttacttgtggagttattaactattgacgaagctattatttattgccccatacgcaataaaaacggcaagaactataaagaaagatttgtcgatacattgaacaaattttctattaaccttagtcaaaatgaattatctcgcgtccacctttttcaggctgatttgtctcactctttactgggaatttcatctgacagctatgacctgatggctgaacgtatagatgtcatttatcacgccgcaagttcagtcaatttcattcacccctacaatttaattagcaatgataacattcaagggttgttggaagtattacgatttgcaggtcacaaacagacaaaaacgttaattttattatccagtatatcagtgtacagctgggggaaaatttttacgcatagggaatatgctaaagaagatgatgatatcaatcataacattcatgctatcacgtctgacattggatatgttcaaagcaaatgggtgatggaaaagttaaccgaacaggccgctcagcgtgggttaccccttatcgtcctgcgcctgggctatgccatgtatcacagcaagactggcgcttgctcggatacacaagcctgggggagtattgtaacaacgtgtctgtccacccgttcagtccctttattggaagactttcgagccgggctgacaagtgtcgattttatcgccaaagccattgttaaaatatcgatcaacggagacgcgatggggaaaaaatacaacatagttccagcctcctccaataaaatcacgttaacttacttctttaaacaactcgaatatttattcggttataaatttaattatgtaccttataaagacnnnnnnnnnntggcgggcgttcgcttattgaactttaccaacacgcttacctcctggacaacaccaatttcacgctacatttccctgacaatgaaaaaatag

SEQ ID NO: 448420 - DNA, 2175 bp, Serratia marcescens
atgaaagttagaaaaacgctttttccgcgttcttgtgcagtaatgattagtgcattaatgagttcactgtcattttcggcactgtcagctgatagtaccgcggcctccactaaacaggatacaatcactgtaacaagcgatgaagggacgaacccggcagaaaatgcctggggaccagtaggatccgtcgtggcgaagcgaagcgcgacagcgactaaaactgacacgccactgcgcaaaacacctcagtccattaccgttgtaacgcgtgaagagatggatttgctggatccaccgacgctgaaagatgcttttcgttacgctgcagatgtgatggttgacggccggggatcagtaagcggatttaattcagtcaacatacggggattcagccaaatctcggataatatttatctggacgggctcaaacttcaggccgacagctttacttcctttcaggtcgatccttacatgctggagcgtgctgaattgctgcgtggccctgcatctgtcctgtatggtctgagtgagcctggcggtgttattgcgctggtcagtaagcgtcccacggcggagagcattcatgaagtacagtttaaagcaggtaaccataatcttttccagactggttttgattttggcgacgcgcttgatgatgacgccagattaacttaccgcctgaccggtgtagccagcgatcaggaacagcaacagacgggtgaaaaagcaaagcgttattcattagcgccatcattcacatggcgtcctgatgataaaactcagtttactttattaagcagttttctcgatgaacccaatataggatggtttggctatctacccaaagaaggaacggtaaccagcggtgcgggagggaaattacccaccagttttaacgacggggaaccgggttataacaaaatttcccgcaaacagaaattagttggttatacctttgaacatcaaattaatgacaactggacggtgcgtcaaaacgtgcgctacggaacgatagatatggattaccggaccatttatggaagcagtgtttctacgtttgatcctacttttttaaaccggggtgcacttgctgccagagagcatttatcgaccttcgctgcggatactcaggtacaaaataaattttctaaaggtaacatagaccacactctacttatgggcgtagattaccggcgcacacggaatgatgtctggcaggccctcggtctggcatccagtctgaacctggttaatcctgtgtatggtaatacgtctgcgcaatatttcggttacaggagtcaggtcgatcgcctgaaacagactggcctctattttcaggatcaggccgaatggaatcactgggtactaacccttggtggtcgttatgactggtctgaagcagacagcgtcaatcgcctcagtaacgattccgcctccaggcaggacgataatgaatttacatggcgaggaggtctgaactacctctatgataatggcatttcgcctttcattagttacagtgaatctttcctgccgacagccggatcggattattcaggtaaaacatttcaggcatctcgcgccagacaatatgaagcaggaatcaaatacatacctgacgacaaattgatttccgcaaccttatcgctgttccagataacaaaagataaaaacctgacttcagatcctgagcatattttatattcagtacaaaatggcgaactacgatccagaggtattgagctggaaacgaaagcagcactgacagaaaatgtcgatattatcggcagctattcctatacgaatgcagaatatactaaagatacatcgtataaaaacaatcgccctgctgagatccccaaaaatatggcagcattatggggaaactacacttttcatgaaacagcattaagcggattgaccttgggacttggaagtcgctatatcgggacaacggaaggtgataacgcaaactcattcaaagtgaaaccctacacaatatggaatgccgccatccagtacgacctgagcaggttcaatctgccgggttcaacaattgggttaaatattaataacctttttgataagaactacgtcgcaggttgttacgccactacagcgtgtttttatggcgcggagcgacagatcacagctacggctactctcaggttctga

SEQ ID NO: 448421 - DNA, 1506 bp, Serratia marcescens
atgagtctcagtggaaacgaactcactcgattgctatggaatggcaatagtattgcagggggagcaaacgctatcgataaagagtttctggcaacgtttttagccaagtcttcttcttcgcagagcagtatttctgctaattttatcagcaaaaacgtatacttgacatctaacggcggcaatggatatgacgccgaaattataagtaatataaatcagtttttgtattttggcggtatagaacttggtggttatcgtggtacaggaaacatctatcttaacggtgagttaatctcaaccgagggaaaaaatatttttgatttcggtctattaaaccaaactgccaaggtctatggcacttatcctcagccaataaagattctggctcaaggtgaactaccgaaaacacctaccgatggaggtaaagccactggctcttcgggattaatcttgtccggtatggctgatgatgtaaaggtaattaataccagttggtccagtatgcttacgataaatggggatgcctctgctagcagtaaattgacgcttgaaatggcaaaacacctcgtcgatgatgctttcaaaatcaacataggcgctaataatggcggatggattaatgcaggagaaataaatataattagtcaagataaaacgacacaagaaagtctgaaattagagtcaagtggaaacacaataaatacaatttcactcgggggaagcgataacaatatatcaaatatcacagttaccgccagtacacgactatacctaaccattaaagaggattttagtgatacgctgcaatccatagaattacctgaaaatgatccacgccacaatgccgtcattgatcttttcctcgagaaaggtggtagtggtggtggcgctttctattcgcttctgtcttctctaaacaacatatccccttacgagcatgtcattagcagtctttttggtaacttattggatatagaaaccttcaacggcggtaactttacggtacatggcaatacaatcattggaaactcaacaactggcgtgcgaaacgtatccttcgaaaatagtaatatagagaatttggtcaccttaaatagatacagttacgatcaaatacatgctgggtcagctgatagaaagtggaattttgggccgaatgaaaaaggtaacattgaaatttatggtaacattagtcaacctaatcaaattaatacgttatttaattcattggcaataaataacactgatcgtgcgtttgatgttttagccaaggcaatgtcaaaaatcaccaaaggtgccagtgaaaatagtttagctgaggtgggcgcagtgggaatgggtgacaacatctatgttattatcgacaaaaaccacaatcagaaattcgacgaaaatgatactgttttttctatcgcaaatgaaaatatctattcattagcaaatactcttcattatcaagctcctacaattgatcttaacggttttgcgccggactattttgcttaa

SEQ ID NO: 448422 - DNA, 132 bp, Serratia marcescens
atgccgccgcatcagggcgacgtggcgcaaatttctcgcgtgaaagaggcgcggcgcgagctggaagagctgttccatcgcgaaatgcaaaaagaaagtcgccagtttgacggctgggatgaatacgaataa

SEQ ID NO: 448423 - DNA, 252 bp, Serratia marcescens
gtggctagcagtaacttcaatgccgccatccatattcaaatggaaagtggcaaaatagacttcttcagtgccactcataccaatgtcatatacgtcaacaccagcatcctgcaatccgttggcgagagccactttaagagactcgctggtcagccgtacatcgccacctacgataacgcgctgaggtttcaggtattcgccataagctcggccgatacgataggcaatatcctcattcagctcttcacctag

SEQ ID NO: 448424 - DNA, 579 bp, Serratia marcescens
  misc_feature (531)..(540): n is a, c, g, or t
atgatactggaaatggcggacaagatagggggtacctggcgcgataatacttatcccgggcttacctgtgatgtacctgcacaagcttattcctatgaatttgaaccatcatggaaatgggagaagctgtatgcaacaggaggggaaatatacgcctatattgaacactgcgttaaaaaatatgccatttcctctcatattcactatggaaaaagggtgaatcatttaatccaggttgaaaatggatgggaaatcacggctgaagataacacacaatacctcgctgatgtcgttattttatgttgtgggagtttggtttatcctaaaacccctgatatagagggcatcaatgaatttacaggaccctgttttcatagtgctcgctggaaccatgatgtgtgcatgaccgataaacgcgttggcctcataggaacaggatccagtgcagtacaaataaccagtgatttagcgggaagtaccgtgcattatgcattatttcagcgaacccctgcatggatatcacttggcttnnnnnnnnnngctttcagttggcgcgtccagaatggcttcggtatttag

SEQ ID NO: 448425 - DNA, 744 bp, Serratia marcescens
ttggaaaagttatttttaaatgctgtttccggtcaacagatacccatgaagattattgaatggttatgtaaaaaaaacctcgacaaggtgagcgacttgacgctcaaacaacgattgacaccgagttataatataggctgtaaacgcttgatcgtttctgatactttttatgacgcaatacaacgacccaggacaacattagtcacgtctggaatagaaagagtgacttcaaatggtatttatactcaggatggtcagtttcatgaactcgatgttttaattatggctaccgggttttatgcaatggactatttgagggggattgtcattgaaaacaaaaagggtgaaaccttaaatgagaaatgggctaatggggcctttgcgcatcgttctgtttctgtcgcgggttatcccaacctttttatgatagccggtccccacagcccctatggcaacctgcccgtgacacaaatagcagaaatacaagtggattatttattggcgcttataggtgaagttataacgggtaaggtggggagtatttgcgccaaagaagttgcgcaaaataaatacaatgaaaaaataaaggctgcactaccccataccctgtgggccagcggatgcaccagttggtatcttgatgcgaataactcacccagggtttatcctttttcaccaagagagttcagaaatgaaatgaagacagtaaattttgatgaatatcatatgtcaaagttatattaa

SEQ ID NO: 448426 - DNA, 651 bp, Serratia marcescens
atgatggatttttttatcggagttagtggttttttaaatagtattcctcaatggttgtcatcgtttattaccgctttaattggtgcatttattggggggtattttactcttaagggtgttgaacgcggggctaagattactcgtgcagaggctgaaaagaactctcttgagttgcagttgtctgtattaaaaggaattaagggggagatttctactttaatgaacttatatgataaaagaatgaaaaatcacattgacaacattgagccggaaaatgcactgattatccaattccctgttggagatgacaactttacattctatgagcagaacgccaaggtcattgcaaaactgaatgacgcagcaagagattcaataataaacatttacacatatgcacgttcactaattcagtcctttaaaggaaacaaccagcttgttatagactacgaaaaaataatttttgacatggctgataataataaagatagagatatgtatgaaaggctgtatgctgcaaaattcgaagtaatggtggattatgcgcaaggaataaaaagcgttgatgcagagcttaggcatgcgatcaatgaggggtttaatattattaatcaagagatagatgcgctacaaataaaattaaagctataa

SEQ ID NO: 448427 - DNA, 2004 bp, Serratia marcescens
atgactatgaagaaaatcgacatcaacaacccagaggctcagtctgctgatttggtggctggcaatattgcacagcttaagattctgttccctgaactgattaccgaagggcctgatggcgttgctgttaatgtcgatgtgctgaaagcattagtgggtgacaaaagtgtcaatgacgctgacgaaaaatatggcctcaactggcatggcaaacgccgcgcacgacagctggcgttgacgcccagcacaggaaccctgcgtccatgccccgaagagagcgtggattgggatactactcagaatctgatgatcgagggggataacctcgaggtccttaagctcatgcaaaagagctatgccgggaaggtgaagctgatctacatcgacccgccttataacaccggtaaggattttgtgtacccggataactttcaggacaatatcaaaaactatctggagttaaccgggcaagtagaaggtgggcagaagatcagcagtaataccgaagctagcgggcgctatcatacagattggttgaatatgatgtatcccaggttgaaactggctcggaaccttatgaaagatgatggctttataatggtgtcaattgatgatattgagctgcataacctcagatttattcttgatgccatttttggagaagaaaactttgaagggatttttgtttgggaaggtgggcggaaaaacgattcacgccgtatttcggtggggcatgattacatagtagtgtatgccaaaaattcttctcgattaaaagaattagatatcagatggcgtgataggaaagctggtctagaagatgtgtacgctaaagctgaagagcttatacaaaagcatggagaggatttctctgccgcatcgaaagagctacaaggttggttcaagagcctaccagaaggaaatgcagctaaagagcattcacattataaaatgattgactccgcaggggtttggtatggcgacaatatttctagtccaaacccgagagctaatcttgttttcgactggaagggctatcagccaccagcgaacggttggcgctatgaccgagatgctatgaaaagattggatgaggaagggcttttactttatcccgattctaaagataagcgtatccaatacaagcgatatttacatcacactgaaacgtggtctccttcatcgattttttacaaggatagaagagctgcgtctaagacccttagcaccttaatgggagagaacgtatttgatttccccaaggatgtagatgttattgctaggctgatgcggttggcgagcgtcccaggtgatatcattttagattttttcgctgggtctggctcaactggcgaagccgtttttagtcaaaatctaaccgacgatgcgggtagaaagtttattttggtgcagttaccagaaagtttgcgcattgagaataaggaacaaaaaacggctgcagattattgtgaccagcttggtaaaccccgtaccatcgctgaactcaccaaagaacgcctacgccgtgctggcaccaagatcaaagccgacaacccagaatggcaaggtgataccggttttcgcgtattcaagctcgatcgctccaatatccgtgcctggaaccccaatccagcgaacctggaagctacattgctcgattatgaggatcatctactggaaggccgtagagaagcagatgttctatacgagttactactcaaacttggccttgatctttgtgtgcctattgaacaacgtattattgccgagcgagaagtgtacgccgttgggggctgcgtgctaatggtctgcctggctgagcaaatcaaccgcgagcaagtggaagttcttgctcaaggtatcatcggttggtatcaagagttggcacctgctggtgataccacgtgcgtattccgcgacagcgcttttgctgatgacgtagtgaaaactaatctcgccgccattctggaacagcatggcatccagaacgtgcgcagtttgtga

SEQ ID NO: 448428 - DNA, 648 bp, Serratia marcescens
atgaagacatacattatgaaattatccacagaatcacataacaattactacctagataggtttgagcaagtaataagtatctctttagctaaacatcccagaaccttagctgtgcgtattgatctacacttgcctgataaagcatcacgtaatgacaaaaaagtcatatcacgttttaccgatgccgttaaggcgaaagtaaaagcagataggaaaagaagtaaaagaaccaatagcaaggcacacgactctgatgtccattacatatgggtaaaggaaagtaaccaaatagggagcaaagtccactaccacgctctcctaatgttcaataaggatgcttactggacactgggaagctattcggcgagagataatctttcggacataattatccaggcatggtgtagtgcacttggtatcgataaagaaaagcaccgttcccttatctattttcctaggaacccttgctatcacataaataaaaatgccctgacgaaaacaaatgactaccaagccctgttaaaccgtatcaactacatggcaaaacacaggacaaagcaatacagcaatcaagcacgctcctttggatgctcagtgaactctggtgttctgatggggaaacgaactaacaaattcatgccaacgtag

SEQ ID NO: 448429 - DNA, 798 bp, Serratia marcescens
ttgcaaaacaaaatcaaagaacttcgtacccagctatcaatcactcagcgtgagttggcagatatggttggtacaagccaacagcagattcaacgcatcgaaacagggaaggttgcggccaagttggggctggcgcaagcgatcagcgttgtcttaaaaaggccattaaacgctgtttttcctgatagtgataacttgctacagaaattgcgcaatcaaggtagtcgtagtgacgatgagctggaaaacatcgctgctaacggtattgaaatggatggttgcttttggagggtgaaactctggttacgaggtcagcaagattatttactgttacctatttccccggctgataagcgtcgtttttactcttactttcaggaaagcgcagtgctaggccgtgagcatttttttgttttcgattctgagcagcatcgttatgccttaaatgttcgagaagtgattttccaccagttcctgttcgatgcttttccacctattccagatgaggaggatagcgatgcaaatgagggaagctatgggaatgtccatatcactatggtgaacggtggtcctgttattgagctgtgttgtgagcctgagatctctgaggacgacggaattgatgatatcggccaattgaatgtattttttgacattcttgaatcagagccggaatcaacagagcgatatcagttaaccgacatagatggagaagatgctttcgttcgaattggttctattgcgatggtccgaattgcgcttgatgctttggagtctgtcgaggaagatgatgagtaa

SEQ ID NO: 448430 - DNA, 846 bp, Serratia marcescens
atgacagaactgacgcatacagaaccggaagtcttaaccaaccatactgatgtgatttgctccaccagcattgaacgtatcgtcaccggacgtaatgctgcgctggcgcagattgaggcactgatacatcagctcaacgatctctcgacactgacccgtagcatcggtggcaaaagcgcccaggactgggctatgaaacaggattttcgctgcggctgctggcttatggagaaaagagaaacggcgatgaaagccattacctgcaatctcgatcgcggtatatggcgtgatttgatgaacaagtccgggatgctggcgcttatggatgctcaggctcgtgaccagtggtacaacagcctggaaaaggacgatattccggctgtcagcgaagccaatattctcagtacctttgagcaactgcatcagagcaaaggtgaggtgtttgagcgtggcgtgattaacgtgtttaaaagccttagctggaactacaaaaacaacagcccgtgtatgtttggtaagagaatcattgtggaggggctggtgaaacacgatcggtggggatttgggctgaactggggctggcagcgtgatcgcctggcggaccttgagcgcatgctgatgctcctcgatggaaaacctgttcccgacagccgcactgacgttacccgtcgtcttggcgaccatattcatgagaacagacacaacaatcattacgaggacgagatgtttgcgattaagtactttcagaaaggtacggcgcatatcacattcaaacgcccggatctggtcgacaggttgaacgacatcatcgccagacattatccgggggccttgccagaaaaatga

SEQ ID NO: 448431 - DNA, 492 bp, Serratia marcescens
atgaaattctgcctgaatatcaatgccgacagtatcaacgccctggcgctcaatatgggaagaattgctgttgaagttgacggcattgagctcgctgaactgattaatgtggtctgtgataacgggtattcgcttcgcgttgctgacgaacccggaatgctgttgactgaagacccgctcccgtccagcgcccgctgtcacggtatccagtgcagtaccgctcatatcacgggtgaggataacgccatcctggaccaggcctcacttcagcaacacgacggcggtgacagtggctggatactatacaccggctatggatttctgctcaggctcaatgcccgccggtaccccgtgctggaacttaaacggatggggctgtcaaacgcctgtcgccggttagtggtgacactgatgcagcgctacgacattgccattctgcatctggatgcatcgggcgacatactgccgggctttgacaccttcgactggtaa

SEQ ID NO: 448432 - DNA, 381 bp, Serratia marcescens
atgcaaaccctcaccgtttcccgggcgcgggcggcatcctcctgcccgtcacccaccaaaatctggcaaatgctgttgacccggcttctgcagcaacactatggccttacacttaacgacacaccgtttggggatgacagtgtgattgagcagcacattgatgccgggatttcgctcattaacgccctcaatttcatcgtggagaagtacgacctggtgcgcaccgaccgccccgaattcagcctcaccgcacagtcgccgttcgtcacccgtatcgatattcttcgcgccagaaaggcctgtggcctgatgaaacgcgccggttataaagccgtcaccgctgtcaccgccggaaaatcaccacgggagccaggacgatga

SEQ ID NO: 448433 - DNA, 1101 bp, Serratia marcescens
atggaacaacaactgccgctgtttgcccgtgaattagcccccaccgatcagcagaccatccgggaagccttaaccctgttggaataccagctacgtgaacctggcgcgtcatttacctccagccatgccgtccgcgactggctgcgtctgcatctggccacacaggagcgtgaagagtttgtcgcgttctttctggataatcaacaccgcctgatagcccacgaaacgctgttcagcggcaccataaaccatacgcaggttcatccccgagaagtggtgaaatccgccctgaagcacaacgctgctgccgtcattgtggcccacggtcatccctccggccttgctgaacccagtcaggctgaccgccgcgtgacagaacgccttaagcaggcgctggaccttgtggatatccgcctgccggaccacctggtggtgggcgggatggaggttatctccttcgctgaaaaggttggttataaccacgggggccaccagcagaatgaaaatcatccccaaacgtcaggcgatgacgatatatcgccagcatccaggctccaggttgtttcgcttctgtaccggcaaatacacatggtccggcagtatctgccactacgcagggcgggaggtacaggacatcagcggtgtgctggcagtgttcgcggaacgccgccaggaccgcaacggtccgtatgtcatcctgcgcagcgtcacgctcaattaacgttaatcagggagtcaccattgtcgaataaaacaccgccagtaaaccatgatatcgctgagccctggtggggacttaagcccaccgtcatcccgtgctttggcgcacgtctggtgcaggagagctaccgtctgcattacctggctgaccgcgccagcatcgccagcaccttcagcgacgcggatttacgccaccttgacaaggcatttccggtacttttaaagcagatggaactgatgcagctcaacgatgaactcaatccccgccacccgcaccgcgtcacgctgtatgcgaacggactgacttgtgaggcagattccctcggctcacacggctacctttatatagctgtatatcccacaccatccactggcgaataa

SEQ ID NO: 448434 - DNA, 480 bp, Serratia marcescens
atgaccgacattatcaatcttaacgataacaacctgttactcccaccctctaccggtgatgattccatacctgcattagcagccactctcgtcccggacgaacaacgtgtggggttctggccgcagcactttggcagcattccgcagtggataatccttgaaccgacagtatttgcctggatggaccgcctctgcgcagagtactgcggcggtatctggcagttttacacgctcagcaacggcggcgcctttgtggccccggaagcggacagcgatgccccctggtcgctatttaacaccatgaacggcaacggtggtgaaatgagcgccgaagctgccgggatagtggtctgtcttatcgcatacagtcaccatgcctgccgcaccgaatgtgacgccatgacggaacactactaccgcctgcgggattacgctctggtgcatccggaatgcaacgccatcatgcacatcatcgactga

SEQ ID NO: 448435 - DNA, 357 bp, Serratia marcescens
atgatgtttaagactctgttggccaccctgctgcttgccatcgcggttcctgcactggcggatactgcgccgttttccgtcaatgcgcagaaagcttatctcccgaaagtcaattttcccgtctgggaactgacgctgaccagccttgagaatgacatcacggtgcagtcattcaccctgaaccggggtaactgtctgatttccatgccgggaaggggacagaatgtgaacaaacgtctggggtacggccagacgctgtccttcaccacccccagtaacagtaccttcacgcagtgtcgccctctggagctgaccgtacaaaccagccagggggcttatacctttaactggaaataa

SEQ ID NO: 448436 - DNA, 510 bp, Serratia marcescens
atgaacaagaggaatgtgttaacacgaatcactggcctgctgctaagcgcggggctgttgctcccggcgctgtccgttgcccgggcgtcagagtcacctgcaccgtcgccgcgctgcgccagaccggtgttttatgcgcagaccgtgaaccataaaaaggcggtggaaatctgcctggtcagccagggcgtgtcttacgcgtttggcaaaaccggtgcagaaacgaaggaaatggacaaaacggtgccggtccgcgataccacatatgcctggcagaataacggggtcatccgtattcaggaatttaccgtcagaatgggcgagacccgctatcaggtctatgccggcacgagtgatgacggtgagccggtggcctcgctgtatgtgtataaaggcgccccggagacaggcaaactgctggcagagatagcgctcgacccggcaacggtggtgaataacatcggcccttcactggcggaagagggcgtcacacaggcagacagcctctga

SEQ ID NO: 448437 - DNA, 549 bp, Serratia marcescens
atgaaagcatacccgtttgtgcgtcaggacctctgcgcctggtgtctggctgcagcgctgccctttctctgggtagtgctgtatctgaacttcccccggtccgtcgcccttgtcctttacatggtcatctcgctggtctggctcctgctggaccggtcaaacctgatgaaacaggggatcgcgccaccatcgttcctgtggttctggctcccggtggtgtacctgcgccagcgtgaccagatgctgggcaggccctggcggctgatgcaggtctggttgttgtgtacggtgctgtcgctgctggcgatatcgcagcttcagaaacagtccggcacggaactcctggcgcagaatgcctgtacggtagtgacaaaaatcatgcgggatgaagggattgatgaacgctgtatccgcgtgacggatatgcaggaagaggtgcgcgggcgtttttatcaggcccgggcgctgatgaacaccggcaggaaagaacctgtgacgattgaagtcagaggacgggaaatctatgttgtcttaccggagatggagtaa

SEQ ID NO: 448438 - DNA, 882 bp, Serratia marcescens
atgaataaagaaccgaaaaactatgggcctctgttttctttgttacagactcttcctcgagaaatatctcaaagagtatttcatcgacttgctgaagtgatcgcctatgaaccgacaatcgggttgatgggtaaaagtggcgccgggaaatccagcctgtgcaataccctgttcagcccacctcctgccaaggttgatgctgtcagcggttgcacccgcaccattcagcgctatcaggtcactcacggcacacatactctgacccttgttgattttccgggcaccggtgaaaccccggagctggacggcctttaccgccgtctgtatcaggcgtggtccggcaggctggacctgattgtctgggtgcttaaagccgacgaacgggcctggaacgaggatatccgctgctaccgggagctgctccgctgcggtgcaacaccggagcgctttctgtttgtgctcagccaggcggacaaaatggagccctgccgggaatgggacgggctgaatcaccggccatcgccgcagcagcatcagaacctgctggccaaaacccggctggctgaaaccctctttgccgctgcccacccggtcattgccgtctctgctgcagagcgctacaacctgcatcactgggtggaggccctgatactggcgttaccggcgcacagcagcagcgccgtttcccgccatctgcaccccgttctgcgaaccggtaacgttgaggagaccgcacgcgagagctttgtccgggtgaccggggagatatttgatgatgcggtgaatgccctgaaaacctcagggacgctggttcgctatctccggcaactccgccaccggttgctgactgttgcccgcggagtttggcatctcctgttctga

SEQ ID NO: 448439 - DNA, 807 bp, Serratia marcescens
atggcaagcaagtacaagataacgacctatctttccgataagacgctttatgaacaggtcattaactcagccaagaaagcagggatgacgcagtcaaaatacgtcgagtcgctccttattcaaggaaggccgcatgctaacgatgcgtggaaagtcaggcctgagatagagatttacgatcattactatcctaggcaagatattttcccttctcatggggtgttcgctcttgaagaggcattggcttctacacctcgtgataggaagcggttttatgttgaacagataattcaagcagccaatgcaggtattctcgttgatttttataaggaggtgtatggggaaaatgttcataaggttgatgatgacagtgcgatttttgtgttcctcagactgcatttttccgggagtctaatgaataactcaaatgtttcaaatgtgaatgttaaatatcgcgttatgtatcaacctattattgttacttctacggagtgggataaatatagcggttgttatgatttcttcaatattagatatttgagacagtcagacctcattaacaaagagtggcgtaggagtttctcgagtaggtattccggggttgcacctatttttgagcggagaagggagcacaaagatcatagtgggttctttattccagtttttaaggagccaaaattttttgcagatagactgaatgaaataagtaatactgctgcgggagttaatgatttgttctgtggagttaaaaataccaacaacaaagaaaggtttaatttaaagggaagggcgttgttaaagatctag

SEQ ID NO: 448440 - DNA, 741 bp, Serratia marcescens
atgccaagtgcacattgcatttgcccagattttttatctaggaatatatcagaccctatgatattccagcaggtgttcttgggctcttttttgacaacagatgatcaaatcattcttgacgccgaaggaagacttcttcttgaatatatggagtcagtaagggaagaacaaaatgcctttggctttttcaaaacatggagagccctgttagaaaaccgcacagatggaaaaatacttcttacccctggtactacgcagcaaaatgtcaaaagtctgataattgatatcgtatctcgtgcagtaactacttttaataaaagcattgttgtgcatgataataataattactcacctttcatatccgagttaaatcgacaacgtatctccttgcttaacttgcagaacatctctggacaaaacattattaatgccctaagaaaaaaagtcacatacgatgaattagattatgatctgagatggatcctccatcggctaactagattatccaatcgagggcggactgaggatgattataatgattacatccgagatatgatgctatcaaaaaaatatgaggtgcgcgaccaaacacgggaaggaatctcatcatccgggcttagcgctggtgaattggacttagcaattgaggataatggggagttattttccattattgaaccaatgaaactaacctctgttgactctaattatacaaacttctgcgaaactataatcctttaa

SEQ ID NO: 448441 - DNA, 1674 bp, Serratia marcescens
atgattgtgcgattttccggcgaaaaatataaagcattcaatgagttcgatttaagcatcaagccgttaactatattactaggcgcaaatagttgtggtaaaagtgccatcataaactctctactcatgttatctcagactgtagatacagcatccatttctgagtcagcccttagattaaatggaaagaaagttggaatgggtgaatcccttaatataataaaagataaaaaccacgacaacatactttctttttcctttgaatttgacgaatcaaaagtcataaaaaaacacttggattcattaaaaagagatataattgaagctcatttcatggtcacccgattcataactcaagtatgtcggcagaacaaagagttgttggacaaaatctatttcattacaaacgacattgacaacatatatttcaatggtgacacatacaacgtaagaagcttaaaaaaagtcgcatcaagactaattgctataattaagttatatcgcaataacaaagagaagttaaaaagaggccgtccacactcagggtttataacgaaatatgtagaagatgtgtcattcaaaaaaatgaatgactgtttgacaggcatggttcccatttccataacgagactagccgcacacaaagttaaatactccttcaaatatgacagaaaaaattccgtcctggtaatctcagaattaagtttattcaataaatccaaagaacttatagccaaaataacacgagaatcgtccgattcaataaaactagaatcagaggttattgataactccatattaaaaaactccagaaaagaaataacaaagcttcttaatttggatacattttcttttgtaagaactgatttcacaagagtagcaccagtaaattatttcaatgagtcatcaaaccccgttgcatcatattttgtaagggtgctacaagcatcaatggcagaattgatgaatgagttatctgaccttaatgttaaccacgtaagcccactgcgtgcattcccacagcgttactatttgctagacaaatcaattcatcacagccaattaaatgcattagatggaaccgaattagccgaagttctaaagaaaaacccaaatataaaagactctatcaacttgcttcttgcggagtttaacattgcagtagaagtggagaaagtaaacgacataattcataagattacagtgaatcaagaggcagtgcatttagaactcactgatgttggatttggtatatctcaagtgttaccaattttagttcaggcatatttatctcctaaatattcaataacaataatagagcaacccgaaatacatctacaccccaaaatgcaagcctggcttaccgatgccttaataaaaattgcattaagcgacaacaagagatttttaattgaaacacacagcgatgcgttagtcagacgtctaagattaagaattgttgatgaaaacagccccctcaccgagaatgaagtgggaatttatcatttagaaagaaataagaattcaaactgcactgaatttaaaagaatacccatcagcgctgatggggatatcacttggccttcagatttcatggatgtagaaattaatgacacgatcatgatccaaaagatgaaactgaataaattattaaaaagcaacggagcgctataa

SEQ ID NO: 448442 - DNA, 753 bp, Serratia marcescens
atgaatattgatataaaaagggagttatctttagtcactattggcaccgcagttgcgtatctttcggcttatttttatcagctagggtttttcgcatactttagcgtcccgcctggttttgtgtcagtggatattaatacattgcttttttctgcagttttagttgtatttattctatacgtaatccttgggccatcattaatttattgtgatatttttgatgaagaaggaattacagaaaaacaaagggtgtgtaatttaattgcattttatctgcttttttctgtaatttacagtgttgcattttatgcgttgcaaagattgaactctaatgctaaagagtttggtggtgcgatgatgataattaaatccataacggcttcgcttatttggaacgcattttcattagtgtgtacatattattttgcaaaggttgtttccctcgtgctaatgcatccaatgaaaaaatcacaatgctttttcgctatgaatataagtccagtcctcctttttattgcttatttcgccggggttaattatgctaagattgatgttgctaaatatagctttgggaatgatggttactttgttgtgacagaaagctcaaaaggaatattagtagctaagtgtgatgctaataatgggatgtcttttaaaagactagagtcatctttttctgatataaagactaacactaattccaaagagaaggctgaagttgttaactgccttaaggtttggagagataagtag

SEQ ID NO: 448443 - DNA, 165 bp, Serratia marcescens
atggctggggaaaggacgtatctcctcccctttaacgcttccatcttcatgaatggtcacgaaaatatcgcgaccactgcgaatggctttacttattgcacattggattacaccaaagtcactggccgtttttgcctgaccatgaatcttggcgtaatcggctaa

SEQ ID NO: 448444 - DNA, 150 bp, Serratia marcescens
atgctggccgtgctggaacaaaacagaacgatgaactggcaaacactaatcgagggtgtggcgattgaagaggacaggcccagcgatatggatgacgccactacggaggaaagcgatgacgacgacggactggcgaacttcaaactatga

SEQ ID NO: 448445 - DNA, 1311 bp, Serratia marcescens
atgctgatcagttccagctgcagttgcggtttggccgccagcgccagggccagcgccaggccaccagtgaccgaaaccggacagcagcgcggtggcgatcagcggcgcggtgccgcccgagaggatcgaaccgagctctttggcgaacgccatcttggagtagcgattcttcacgccgaacagttcgacgccgtaggccgcctgaacgccgaagatccccagcgacgcgatgcacatgccgaccacgatcaccgagatgacgatagccggttcactgctgtcgagcagccagaacgccgggaaggcgtacagcaccagcagcaggcagaaccagcggtaggtgatgcggcggccgaagcgatcggacagccagccggccagcgggatcaccagaaaaccgcacagcgaggcgatcaacaccgccagcgccggcaccgatttatcgaccatcagcaccttggcgacgtagccgacgataaagccctggcacaggtaggaagggccgttttcgccgatgcgcaggccgagcatcacccagaacgctttggtacgttgcaggtagctgcgcgtatccggcgcggcctgggcggcgtccagcatgcgctggtggttttgctgcagctcgcgttcgaacaccggcgtttcccgcacgtgacggcgcaggtacagcgccaccccggcgatcagaatgctggcgaggaacggaatgcgccagccccagctcatcagatcttccttgtccagctgcagcaccagcagccataccagcgacgccagcagggtgccgctgttggagccgatggcgatgatcgacgccaccagcccgcgccgcttggccggcgcgtattccgccagcatcaccgcgccgccggacagctccgcaccggcgccgaacccctgcgcgaagcgcaggatcaccaggcaggcgggcgcccagacgccgatttgcgcataggacgggatcaggccgatcagcgtggtggagaggcccatcagcgccacggtggtgatcagcaccacgcggcggcctttgcggtcgccgatccagccgaacaccagcgcgccgatcggccgcgcgacgaagccgacggagtaggtggcgaaactggccagcagcgccaccagcggcgtggcttccgggaagaacacgtcgccgaacaccatgccggccgccaggccgtacagcgcgaagtcgacgtattccatggcggtgccgagccagcaggagaaggtggcgcgccaaaattggctgcgcccctctttggttgccaggcgttcatcggccgccagcgcggcgtcggcggtctgtga

SEQ ID NO: 448446 - DNA, 288 bp, Serratia marcescens; identical to SEQ ID NO: 143278

SEQ ID NO: 448447 - DNA, 243 bp, Serratia marcescens; identical to SEQ ID NO: 80563

SEQ ID NO: 448448 - DNA, 156 bp, Serratia marcescens; identical to SEQ ID NO: 12609

SEQ ID NO: 448449 - DNA, 258 bp, Serratia marcescens
atgtgtattgatcacgtcctcacctttcccgttcccctggaagatgccagcttgctggcagactactgcgggtttgaagtgtatcccacctacagcacgaaccgggccgatgaaacgccccgtttttccgtggtggcacttcatcgccacaaagccaggctggaaacgttagccgtggccgacacggagaaaagcgcccatgctttccgcgatatggccgagattaccgccgcttattacttacattttcggcggtaa

SEQ ID NO: 448450 - DNA, 252 bp, Serratia marcescens
atgctttccgcgatatggccgagattaccgccgcttattacttacattttcggcggtaatacgatgaacgattatctatccctcatggaacaggcacgacaggcagaggatttgcgcgactggaaaactgccgcgcagctctacactcaggcaatggccgttagtccaaaagccagaacgatgcgccagcgccgcgaaaggctgaacctacagcagcgtatcgacttttgcgagcgtaacgcgaggacgtaa

SEQ ID NO: 448451 - DNA, 771 bp, Serratia marcescens
atgatcatccctacccaggaaacttacgacgagcttcaacgcgcctacgaatttttcaatcaacgcctgtttgatagtgcgctgccgccttgccttatcacccttcagcgcgaaaaacgaacgtatggctatttctcgaatggtcgctttgttggtcgctcaaccggccaaatcgttgacgaaatcgccatgaatccggtctatttctcaatccgcacgatacgcgacacgctttccacgcttgtgcatgaaatggttcaccagttgcagcaacacaccggcaaaccgggccgccgtggataccacaataaagaatgggcggcgatgatggaacgcatcggcctgataccatcagacaccggccagccaggaggtaagcgcgtcggtgagtccatgagtcattacatcgaggacggcggcgcgtttgataccgcctgcaaggagctgcttaccacggcgtttaaactgagctggctggatcggttcccgccacacaaaccaacgccaccaacgccaaccggcgcagacggtaaagggtatgttgatgacgaaggttatgaggacgagggatacggcgacgatggcgagctggatgatgagatcacacaagccctttcgctggtaaacccgccgccagatacgccggtgaataaatcaaaccggacaaaatacacctgcccgaaatgccatacgaacgtgtggggaaagccgggcctgatcctgtactgtggcggcgaacactgcggaaaggcagaataccagccaacctaa

SEQ ID NO: 448452 - DNA, 369 bp, Serratia marcescens; identical to SEQ ID NO: 12613

SEQ ID NO: 448453 - DNA, 711 bp, Serratia marcescens
atgaaaattgcagtaatgaactacagtggcagtgttggcaaaactattatttcgtcatacctgctgtatcctcgcatggctggcgcaaaattctttgccatcgagacaatcaatatgtcggcggctgatttgggtgttgatgaagtaatgagtttgaccggggataattttggtcaactggttgaagaaatcgtatttgaagataacgccatcgtggatattggcgcgtcgaacgtagagcgttttctttctaccatgacaaaatacgagggtgcaattgatgaatttgataaatatcttattcctgttaccccggatgataaagcatggcaggaaagtattaagaccgctctcgcgttaagcgctgctggcgttccaaaatccaaaattgttcttctgcctaaccgcattaaagcaactccgcaggaagatattgcttcagtgtatgaatgggcaaaggattctaaaaaagcctctattcataaagatgccgccgtttttgaaagtgaaatttatgaatacctcgcgtatcacaaaatttcgtttgaagaactgctggctgaagatccagaaacatttaaagcgaaagctaaatcctgcactgatgccgacgaacgcgcggcggctgcgcggcgttatcgctggatgaaattagcgctgccggttaaacgtaatcttgatcgtacctttgaaatattaacggctgaataa

SEQ ID NO: 448454 - DNA, 435 bp, Serratia marcescens
atgaaaaaggcaaccgagttagaacctcgtaacctttcggcagcagtacgaactcgtttagatgagattgagggctggctggataaaggtgtatcgaggcaagaaattgctcaactgcttgatgctgaatatagcttttccgtaacaccgaaagcgctggaaatggcattgtaccgggccagattaaagcgtaaaaaaggtggattgcacaatccagaaagtacggtaaaaaatggattgcacaatccaaaaccgcaggaagaagcaaaaccggaagatactggattgcacaatccagaatcagaaaagttagttgaggatatgggcgggaacaaagaatttctgtccgataccgattttaaaaaaatcggggatgaggcaaaaaaagttgcgtcctcattcaaaggtagcgtaggtaataaaaaaggtttctaa

SEQ ID NO: 448455 - DNA, 348 bp, Serratia marcescens
atgccatctatcagtttaagagtgaccgaagcgcaaaaaatcgaccttgaataccgttcggagggcaacgtatcggagtacatcaagcaacagctttttggacaaaaagagagtgccagtgaagtgatcgcccggcttgataaactgctggagcgttcatcttcagagcagcaagccgccggacgagatcgatacatcgaggcaatgttgattgaggtgttattgatacttcgccaggtgagtaaagcagatgcgcagaaagttgccggtggtgaaattcgccggttagggctggagccgtggtcagcagaactggcccaggagagagaggaacagagtcatgaatga

SEQ ID NO: 448456 - DNA, 1578 bp, Serratia marcescens
atgaatgaagcggataagggcaaaatttgcctgggggcattgctttttaccccccttgtatcgtggtttatcgcagcgaaagcattgtatggatttacgccaaaagatgcgcgtgaacgtctggttttacttattcagcagacttttgatttatggcctttatggggtgctttattagtcggtgaaattattgccatcataggcttaattatcttttttaaatttaatcatcagatatttaaaggtgcgccatttaagaaaatatatcgtggtacgcggcttgtttctcagcgggctttagcctccataactaaagaaagagagccacaaataacaattgctgatattccaattcctacaaaagcggaaggcacacatatttcaatagccggagcgacaggtgttggtaaatcaacaatctttgctgaaatgatgaagtgttgtttaatgcgcggaaaaatgcagcgcattgcctccaaaaaagatcgcatgataatactcgatccagatggtgattttctttctcgtttttataaaaaaggcgataaaattttaaatgcctatgatgccagaacggaagggtgggtgtttttcaacgaaataaaaagtgattttgactttgagcggtttggtgtttctatcgtacctacagcaaaggactcacaaacagaggaatggaatggatacggtcgccttttatttaccgaggtttcccgtaaagtgtttaacacaagccgaaatccaacgatggaagaggtattctactggacaaacgaagtaccactggaagaacttgaagagtatgtcagaggtactaaagcacaggctttatttgctggtagcggtcgggccgttggtagcgctcgctttgtgcttagtaataaacttgccgctcacctgaaaatgccgacagggaatttctcaattcgtgaatggctggaagatccaaaaggtgggaatttatatatcacctggacagatgaaatgcgagaagcattgaagtctcttatttcatgttggacagacagcatattttctattgtgttaggaatgagcaagagcaattcccgtaaaatctggacgtttatagatgaactggaatcgcttgattacctgccgtcattacgtgatgcattaacaaaagggcgcaaaaaaggactaagagttgtcaccggctatcagtcgtattcgcaggttatcagcatctatggcagcgatgtagctgaaacccttttgtctaaccatcgtacatcggttgttatggccgccggtcgcctgggtgaaagaaccctggaatttgtctctaaatcattgggcgagattgagggcgaaagagagaaaacagggattagccgccgcttcggtcagatgggtacgaaaaatatcaatgatgatcacaagcgcgagcgggctgtaacgccaaccgaaatcgccacgctggatgatctgaccggctacatagcgtttccgggaaatctgccagtggcaaaatttgagactcatcacgttaactacactcgttctaaccctgtaccgggcgtggtcttacgtgaaagcaccgcatttgcaggaatgtaa

SEQ ID NO: 448457 - DNA, 2910 bp, Serratia marcescens
atgctgaatattacgacgattacacgccagcgagtcgataaagttgtcgattattatacagatggcgcagatgattattatgcaaaagacggtaacgcgatgcagtggcaaggcgctggcgcggaggaactgggcttaaccggcgaggtagaacagcaacggtttgcaaagttgctcgatggcaaagtaacggatgatatttccgtgatgcgtaaaacagcgaacagtgaaagcaaagagcggctgggttatgacctcacgttttccgcccccaaaggcgttacgcttcaggcgctggttagtggtgataagcgaatcatcgaagcccatgatagggccgtggcgaaagctattgaagaagcggaacggctggcgttaggccgctttaccgtgaataaaaaaacgcacgttgaaaacaccaataagctgattgttgcaaagttcagacatgaaacttctcgtgagctagatcctgaattgcatactcatgcttttgtaatgaacctcactaaaaccagcgatggtaaatggcgttcgctcacgaatgacggcattgtgaactcacttacgttattgggtaacgtttacaaatccgaactggcaagagatctggagctggccggttacaacctgcgttatgaccgcaacggcacatttgatttggcacatttcaccccggagcagaccgcacacttcagtcaacgcagccagcaaattgaggcagagttagcaaaagatggattaagccgtgaaacggccagccatgagcaaaaaaatgcggccgcgctgaaaacacggaaaagcaaaggcgaagtagatcgcgatgtgctttatgaaggctggaaaaatcgcgccaaagagcttcagattgattttgatagccgggaatggaaaggtgctgccaacgacgatatagcgcggaatacgcaaccagcggcgctggaaaagcctatcgagtaccaggctgacaaggtgatgacctttgccattcgttcacttaccgaacgtcaatcggtgattaccgagcgggagctgatggacgtggcgatgaagcatggctatggccgtttaaccctcgatgatattcgggctgcgagagaacgggccataacctccggcaacctcatcaaagaagaagcaacatacgcagcggccacgaccaataaaaaacagcagaacgtagcaatgacccgcgaacaatgggtaacggaactggtgaaagctggccgcaataaagatgaggcccgaaaactcgttgataagggcatcactaacgggcggctggtacagcaaaaaccgcgctttaccacacaattagcccaacaacgcgaacgcaacatactgaagatggagcgggaagggcgcgggaagatccagaccccatacactcgcgagtttagcgagggctggttagccagcagaacgcttaaacccgaacagttaaaagcggttatgggaattattcatacccccaaccagtttatttctgtacatgggtttgccggtactggcaaaagttatatgaccaaatcggcagcggattttctcaaagagcagggcgtacacgtcaccagtcttgccccctacggtagccaggttaaagcgcttcaggctgaagggctggaatctcgcacactccagtctttcctccgggcctcagataaaaaaattggccccggctcagtcgtctttattgacgaagcaggggtaatcccggcccgccagatggaggaaaccatgcgtgtgatccgcgatgcgggcgcacgagcggtattcctgggcgataccaaacagactaaagccgttgaagcgggtaaacctttcgagcagcttattaaagccggtatggaaacggcctacatgaaagatattcagcgacagaaagacccggaattgctgaaagccgcgttgaatgcagcggaagggaaaataaaggcatcgttgacccacgtaaccagcatcgtagaggaaaaaaatcatgatcagcgctaccgccgcattgtcggggattacgtggcaatgccgccgacagaccgggctaacgccctgatcatcaccggcacgaacgacagccggaaaaaaattaatgcgtacattcaggccgagctggggctaaaaggccagggtatcaattacccacttctgaaccgtcttgataccactcaggcccagcggcagcacagcaaatattacgaaaaaggagccgtgattatcccggaacgggattacagcaacgggctgaaacgcggggccgtttataccgttctcgataccggccccggcaataaacttacggtaagcgacggcagcggcgacacaatcgcattttcaccggcgcgattttccaaattatccgtgtactccgttgaaaaaacggagctggccgtgggcgaccaggtaaggatcacccgtaacgatgcacatctggatttagcgaatggcgaccgttttaaggtaaaaggcgtccagagtggtgaggtactgctggagaacgagaaagggcggctggtaaaaattgatgccaacaaacctatgtatttagggctggcttacgcttcgaccgttcatagcgctcaagggctaacctgcgacaaggtttttatcaatatggatacccgatcactcacaacggccaaagatgtttattacgtggctgtcacccgcgctaaacacgaagccgtcatttacaccgacgatgagaagaagctggataaagcggccagccgggaagggttcaaaaccgccgcgcttgagctggaacaactcaaacgctatgccaaagagcagcagcatgatgcccgcgaaaaaggccgagacaaaaccgagccgacgcaggaaaaagacaatgccaagcgaaaaggcaaaggtcatgataaaaataacgacgagagagcatttacctcgctctaa

SEQ ID NO: 448458 - DNA, 195 bp, Serratia marcescens
atgggtcaaggtatcaacacgttgtctttagagctggatgacaaagaagcgctggcgctggcgcagtttgttaagcggttgacgtggagtgatttacgggggtgcgctgttgatgatgatgaggcgtatgtcatcaaggatgccgtcgataaattacagagggcaatggccgaagaaggtttttccccgcgataa

SEQ ID NO: 448459 - DNA, 483 bp, Serratia marcescens
atgcttgatatgcgattaggaaacagcggcgatattcctttcatcatgaacctggtgcgcgacgggataacatctggcgcatttttctatgccgagggcaacggtcttgaaacagtgagatctgagctacaaagtgtcacccaacaatacagagataatatccctgttggggattatctctttgtctttgccgagaagttaacgcggcagccggtgggattttcgctgttaaccggccgcaatgattttgcgggccgggcatctcatcttgagatccgcatgttcgctgttgcggccgataagcagggtaaaggcattggcaagagtatgcttgcctcaatcatcgaagccacgcccggacaccggctggaagcctcctgtctccccccggccacaaaaatgatgagactgctggccggaagcgggtttaagctgattcatgaaacgcaaggcggtaagaaaacgtaccgctttacagactaa

SEQ ID NO: 448460 - DNA, 555 bp, Serratia marcescens
atgatccagcgtttaaaaaagcgcaactttctctttaaagcggcactggttgccgccgtactttacggggcttcggccccgtctctttttgcggcatcggcgcaagtaggtttctcgccggaaggaaccgcgcagcagctcgttatcaacgttatcggctcggcaaaagataacatcagaatgatggcctacagctttaccgcccccgatattatgaaagcgctgattgcagccaaacgccgcggtgtagacgtgaaaattgtcattgatgagaatggcaatacgggccgcgcgagtcgtgcggcaatgaatctggttacgaacgcgggtattccgctgcgggttaacagtaactacaaaatccagcatgacaaggtgatcatcgttgatggccgtcatgtggaaaccggtagttttaactacacggccagtgccgagaaatataactctgaaaacgcgattgtgatgtgggatgcgccagaactggccgggcagtacctgaagcactggcaatcgcgctggaatcagggccgggattttaccccgtcttattga

SEQ ID NO: 448461 - DNA, 1032 bp, Serratia marcescens
atgactgagttaaccagtaatattcaaaatattcgccaacgcccccgccgtgagcagggggtatggctgacgctcgaaccacttcagagctacctgagtgatcccgatgtgtgggagctgagaattaacaagtatcagcaggttgtttgtgaaacgtcgaagggccgtattttccacgacgatgagaaaattacggctgaatatatatcacgcttaaccgacacgctttgtggttataacggactaccgaaagagtccgttaataacgtgcttctgccggacggctcaagggggattatttgcttaccccctgccgtactggagggaactgtagccatcgcgtttcgtaagcatctgccagttgataagtctcttgaacaactccgcgatgagggccgtttcactggctggaaacgaaaggttcagggtgaagtagcccttcagccattcgagcaagaattgctggaatggctcgataaagacgacctcgtttcgttttttaaaattgcggtacgcaacaagctgaacatcgtcgtatcagggtctactggttcgggtaaatcaacatttacccgctcacttcttcgggaagtgccttataccgagcgcattgtagtttcagaggacgttcacgaaatagggtctgatctgcatcacgaaatggtttatatgctgtacggcgatcaggatggccgtctggccccggcggtcagcctgaaagcgtgtatgcgtctttctcccgaccgtatcatgatgacagagcttagggatgatgcagcatgggattacattaactcgctgaataccgggcatccgggcgggatcacatctacccacgccgacgatgcaaagtccactttcagccgtattgcgctgcttatcaagcaaaccggcgtcggccagacgctggactatgacgtgattatgaaaacgctgtacaccacaatagatgtcgtggtgtacatggaacaccgccagattgttgaggttctttatgatccagcgtttaaaaaagcgcaactttctctttaa

SEQ ID NO: 448462 - DNA, 1155 bp, Serratia marcescens
atgagaaaagacagagaggaaaacttagattacctcgatgaagaagataccggcatcgaggatgagcgtcagggcttcagcggttccccaaaaaaacgtattgccggtgcgcgggcctttgtcggtctgatggtgctgataggttcggcaatggtgggatggttcatctataaccagatgcacgttaagaaactggccgacgatcccaaaaaggataaagagcaggttatgaccagctccttaccgcgccagtcatttgatgatgcgccgccgaccatcgacaacacgccgaaaaatagcgtcgttcctccgttgcagacgacgcaggagtcgcagcagcaggttgcccggcaaacgttgaataaccagaaaaaggagttatccccggaagaaaaaattatgcgcgcccggctaggtgtgtccttcaacggtatcgatcctgagaaacaggctacgactgcgaaagagcaggatcgccggtcaggtcaggacagtacagaaaccagctcaaacagtcaggcactggcgagtcgaatgaaaccggcgcgtatggccgtcgcccaggcatctgtaatgccgcatccaaatctgaccattgcgcaggggacaatgattccttgcggcacaaatacggaactggacaccaccgttccggggcaggtgaaatgtactgttagccgtgatgtgtactctgctgatggcactgtaaaactgattgataaaggggctgtcgtaactggtgagcagaatagcggtatccagaacggtcagaatcgtgtgttcgttctctggtcacgtttgcgtaacccggatcagaccattgttaacctcgacagtagcggtactaatgctttaggcagtgcgggcgtacccggacaatataattcccacttttgggagcgtatgggcgatgcagtctttttctctgtgctgactgacggaatgaaagcaggtatcgcgtcgattaataacaacaactctgatgtgtcgtttaacacaacggaaaacagtaccgaccagcttgctactgaggcattacgggcgaagattaatatcccgccaacgctctacgctgcgcagggcgatgccgtctccatctacgtagcccgcgatctggatttcagcactgtatatgggttagaaatgaatgactga

SEQ ID NO: 448463 - DNA, 888 bp, Serratia marcescens
atgaaaaaacaattaatcgccggtttaattctggtcagcctcggcctctctggtcaggcgctggcgctggaagtgggaaaaggtagcccatacgactaccgtattaaatccgtggtgtataacccggttgacgtggtgcgtattgattccgttgccggtgttgccactcatatcgtggttgcgcctgatgaaagctatgtgacacacgcttttggtgacagcaatagctatgcgtttacccatgttgaaaacaacatgtttatcaaaccgaaaggggaagttcccagcgatactaaccttgttctggtcacgaacaaacgcacctataacattgtgctgcactatgtaggtgactacaccacgaaagacgcccagggtaatgttaaagccaactttatcaagacaccctggagcatgaaaaatgccactctccagcttacttatctctatccatttgaggatatgaaaaaggctaataaaacgctggaaagtaaccgcgtgaaaaaagcgttgaaagaccttcagaatgggccttacaacctgctttataaaatgtcagatgaagatgaatatcggactgtggccccggtaaacgtttgggataatttccgtttcacttactttaagttccctgcaaacgcagatttacccgttgtgttctatatcggtgatgatggtaaagaacacaccgttaaccagcatccagccggggaatataacaacattgttgtggctgaaacggtagcgaaagaatggcgtattcgttacggaaataaagtcgtgggtgttctgaatatgaattacaacccaaatcttggggcgatcagtaccggcactacatcaccagacgttaagcgcgtgaaaaagggtgaaggggataaatcatga

SEQ ID NO: 448464 - DNA, 717 bp, Serratia marcescens
atgttgaagaaaaacaaaaatcaagcgatatcgcgggaagatctaaataagtaccatgaggaaactcaagggcttgagcgcgatatggttaatgaaatccttaattcccgctctcgtgcctggaagattgccacggcctttttcgtctttgccgttgtgagcatggttactgcggtcggcgtcattatccgctttgcgcagccgttaccggcatacctcaccacgattaacaaagatacgggcgaagtatcgcaggtgaaaattacccgcgatgaggcgacttatggcgacgtgatagaccagtactggatttcacaatttgttattcaccgtgaatcctacgactacaacagcattcaggttgattatgacgccatgagcctgatggcttccggtgatgtagctgatgaatatctctccatgttcaaaggcccgaaccgtattgataagcggttgggcgacactgaaagaacgaccgttcatatcaactcggtgatcaccgaccgcgaacacggtgttgccaccgttcgctttaccacgcagcagcgcattcgccagcgtccgaaccctgagccgccgcgctactggattgccacgattgcgtatgagtacaaagcgttaccaatgaccgcgcagcagcgctatatcaacccgcttggcttccgtgtaacgagttaccgtaagaacgctgagaacgttggcgcagtgggaggctga

SEQ ID NO: 448465 - DNA, 171 bp, Serratia marcescens; identical to SEQ ID NO: 97900

SEQ ID NO: 448466 - DNA, 1044 bp, Serratia marcescens
atggccttttcatttacaacggatattttcaattacatggatacggtcacaaaggaatttgtggcctctaatctcggaattgttatatccaccatttcaccggtaattgggttggcgttgatttgcaaactcaccctggacgggctgtttacattagcccggccacacggtgagccgctctcatcgttgataaaaaaattcattgtgtggtcgatgataatcagctttgccagcgcgggcgggctgtatcaaacccaactggctgatgcggccatgaagatcccggatgagttttcctcggtactggttattaacggttcgtccggtggcactgaagatgcaatgggtaacaacatcgacaaggccatccatgacgggatgcaggttgcgcgtactgcgtttgataacgccgatatttatagcggttccgggctggcgtcattattcctggcttgcgcggtcattatttccacggtgctgatctgtggtatcggggccgggctggtactgatggcgaaattactgctggcaatcactgtgtgctttgggcctatcttcatcttctgcctgttgttcaagccgctgtatggcatgttcaacaaatggcttggctcgatggttaactatgggctggtaacaattctgctgtcgatgctgtttggcctgatgattaagttctatcaaaaggcgctcgatgccgtcaccgcttccggggctgacagtagcctgttagggccggtgttcgcgtgtctgctgataatgattgtctcttacctgatcctgatgcgcattcctgaaatagcctcccgttggggggatggtatctctgcgggtattcaggagctgatacctaacgccggtggcggtggccgtggcgctggcggtggtggcaatcagcctggtggtcaaaaaggcgctacaggtgccgggggcggtactggcgctaagactgcggctgctacggctgccggtggccccggcgcgggagcggctaccgctgcgggttcccaaatgcagggtttcgcaaagggttcacggcgctaa

SEQ ID NO: 448467 - DNA, 237 bp, Serratia marcescens
atgaaaaaactgattttacctttagctcttttcctgctggccggttgtgattctgaacatcctgtttcctggtacaaggaacacgatcaggagcgtaaagcgatggtggaaaaatgccgtgatgatgcggcgctcaaagtgaagccggattgtcagaacgcgctggaagcagagaaagatttgaaagtgtttggcaaaagtgatgatggcctctcaatgccaaaagtcacgccctga

SEQ ID NO: 448468 - DNA, 708 bp, Serratia marcescens
atgaaaaagacacttgcaagccttgttttagctctggctatttcgccggttgcagttaatgcgcaactggtagttaacgatcctgcaaatctggcgcaagcgcttcagcaggtcacattaatgacgcagcaaattgaacagctcaaatctcaattgctgaagcaggagcaaacgctggcttccttaaccggcagttctggtattggtaatttgctgaatggcgatattagtacgctgaaaggcaatttaccgtctgactggacgcaggtatacagcgacgccatgaacagcagttcaggcatcacttcatctgctcaatccatgctgaaggaatttcagtcgcagattgacggtatgaaccgttccgaagcgatgagtttcattaagcagaagttggcggagaaaggggcgtatgaccgtgtgatggcgcagaacgcttacaacaatgaaatggcggagctgaataacattcaggagctgaccaatcagatcgactcaaccacggacatgaaacaaatcgctgaccttcaggcgcgtatccagaccgcgcaaggtgctattcagggggagcaaacgaagctgcaactgatggcgatgctgcaaacctcgcaagacaagattttgcaggaacaaaaacaatacgcccaaaagcgctttgtcctcggcgctgacggtgaagatctttccatgcctaacgtaacggaataa

SEQ ID NO: 448469 - DNA, 2631 bp, Serratia marcescens
atggccgtagcggaaatgaaaaaaaggggggtgaaagatttcaaaaaagaaccttcctctttgaaatatattccttactcctaccatgtgacgccccatgttatcagtacggtaaatggggagtacctttctatatttaaaatccgtgggcgaacccatgactgtgcttctgatgccgagctaattaagtggcacgctgatttgaatcagcttttaaaagggattggtagtgagcatgtaaaattatggactcacttacaccaccgcgaaattaataattatcctgacacgcattacaacatgacgttcccacgcatggtgaatgaatattaccgtgatcagtttgatgataccccaatgatggtaaatgacctgtatctgacggttgtttataaccctgttggggatgccgctcaaaagatgctggcaaagtttgataagccatcggctagcgagctgcgcgaaatgcaggctgatgctattggtgcgctggaagatatttgtgagcaggtcatgaactccctgcgtccttatggcattgaccgtttaggctactacttccgtgacaaacgggggaacgtcattcctgaacagaaaaaagatgatgcagaagatgatgaggatattcttgatctgcgtgaagatttgctggctgatgtggaatatcaggacgttcaggaagataaagaagtctttagtggtactcaacacacctattctaaagcgctggagtggctctattacctcgtcaatggtgagtgggcgccagtgccggtttgtcgtggccgaatccgtgaatatttggctactacccgcccaacttcttcattctggggggatggtatcgagattcgcggtactgacgaacgccgctatacgtctgccgttgaaatccgggattacgattccgatactgagccgggtcagatcaatatcctgatggaagcaccgtttgaatttgtgttaacgcaaacgtattgctgtatgtcccagcaagcggcaagaacttacctcactaaccagcaaaaagcactgctggaaacaggcgatccatcctttacgcagataaaccagatgagtgacgccgttgatggcgttgtttcacgtacctttatcatgggctggcatcacctgacggtacacacctttggcaagactcttaaagaggcccgttcaaacgccggtgttgccagaaatatgctgaacaactgcgggctgattgccagccaggtagggttagcttcagaagcggcatattatgcaaaacttccggctaatcaacacctgtcgccacgaccttgcccgctgaatagctggaattttctttgcttctcccccttccataattttatgtccgggaaagcaaataataacccgtgggggccagcgctgacgctgttcaaaacggtggcaaatacgccgctgtatatgaacttgcatgtaacgccagaagatgaaatgtctttcggtaagcgaccgctggcgcatacgttaatgcttggccgttcgggggcaggtaaaactacgctgcttaacttcctgctgacgcaagcgatgaagtataacccgcgcatttttgcctttgaccgcgatcagggcatgatgccgatgattaaagcgttacacggtcactacacggttctgaaagagggcgttgcttccgggtgggcacctctacagatgcctggcaccaaagttaacattgcattttgtaagcgcctaatgcgcctgtgcgctgaaattaccaaaggcagcgtactcgatgctgatcaggttaatgaccttaaccgcgccgtggatgcattgatggatgagaactccctcattccgacagacttacgcaccgtggatatgttaattcagcagatgccgaatccatatcaaacagcgggcagtaaacaaacactggcgtcattgctggttccgtggactcgcggccatgaaaacggttggttgttcgataacgattcggattcactgaatcttggtgaatacgatatctacggctttgacctgacagatttcattgttgcagataatgagatcccccctgcaacacgtactccgctcctgatgtatctcaatttccgtgtgcgtcagtctattgatggccgtcgccgtgtaattcaggtattcgatgagtttcaccagtaccttgacgatccaattatgagtgtggaagtcaaacgtggccttaaaacagaccgtaagaaagatgcggtttacgtattctccacgcaagagccgaacgatgcgctggatagctccatcggtaaaaccatcatgcagcagtgcgtaacgaaaattcttctggagaacccggatgcggattatgaggactacgttactcgcctcaaattgacaccggcagagtttgacgcgctgctgtctattcctgagaactcccgtcagttcctggtgaaacaaggcagtcaaagcgcgatggcgcaattcaacctggccccgcgcgttaagacgccggagaacttcaggaagctggataagatccttagcatcctgtcaggggaaacccaaaacgccgaaacactggcgaaaattattgagcaaattggggatgataaccctgataaatggctcgaaccctactggaaatctgtactcgcagcgtga

SEQ ID NO: 448470 - DNA, 291 bp, Serratia marcescens; identical to SEQ ID NO: 143253

SEQ ID NO: 448471 - DNA, 318 bp, Serratia marcescens; identical to SEQ ID NO: 143252

SEQ ID NO: 448472 - DNA, 741 bp, Serratia marcescens
atgaagcaggttgttgcccttttcccactgttgattgctggccttttggatgccacacccgcaaatgcggaactgtctgcgccggttatggctctggcaaaacgttgtgcgccagaagtgcatcctttaactattgggtacctggttagccatgaatcgcgcaacaacccatacgcgataaacgtcaacgttcctaaaggaacaaaatcaccgttagccagacaaccgcgctccctggatgaagctgttaaaacgacaaaatggctaacggctcatggttataactttgacgtaggtttagggcaaatcaactctgcgaatttcccaaaattgaatgtttcagccgcagatttgtttaatggttgtaaaaatctcgaagctgctcaatacgttcttaattactgctaccagctcgcaacaaaagagtatgcgccggggcagtcagctttgagacacgctttatcttgttataatacgggttcactaaccgccggatttacaaacggttatgtatcaaaggtggttgctcaaattgggcaatcaaaacccgtaatccctgctctgaaagccgatgatggctccactgatgtggaaagtgttgatacagctatagatgctgtgccggtagatgctgctgatggtgaagaacaaccaaaagacgccggtatgactgatgcctttggtggctcggataaagacgcttttggtgcatctgatggtgacgctttccggcagaagtag

SEQ ID NO: 448473 - DNA, 438 bp, Serratia marcescens; identical to SEQ ID NO: 21467

SEQ ID NO: 448474 - DNA, 315 bp, Serratia marcescens; identical to SEQ ID NO: 76870

SEQ ID NO: 448475 - DNA, 726 bp, Serratia marcescens
atggcaggtttatcaccgccgctaacaacgcgcgttcggggcttcggccccgttttttatggtacaggtagcatggatatactttcccttttcccctctaacgtaatcgcattgtgggccgtgtcatttgcttttctggccgtcctgtattggtggaagatcaccgccagaaaacgcagacacaaacgcaagcaacaacaagcccggcgtgtactcgcaaaaattcagaccctaccggcgttcggctacaagatcgcttatctcaggaagatagaccctttcacctttgaggaactgttactggaggggtttaagtcgcatggcttcagaactatcagaaacaaacgctataccggtgacggaggcattgacggccaggtaataatcggaaaacatcgctatctcatccaggccaaacgctatcgcggccatattgctttacagcacgttcaggagttcgatacgttgcttaaacgacataactgtcgcggtttgttttgccataccggaaaaaccggcgcagcgtcaaaagctgttagcttcgccagtgagcggatggagattatcagcggccagcgcttgattgatttactcacgcccggcagctccttcaccatcgcaaccgcaccgcagacaatgatgaggcgtaccgcagcaacgcgaggaacgaacatcattgtcgaggaagcggataaaaaaacaaccgatagcatgagagttaattaa

SEQ ID NO: 448476 - DNA, 438 bp, Serratia marcescens
atggctattagcgagttatctctagggaagcagatacttgaaaaaataaacgatcatgatcgttttaattctaaattgcgtttaaaaatgaaaactttaaacgtggttgcgttcgttattctttttgcaataggagataagtttaacgaactggttatatgtgcgattgctttcgtggttttttttgtactaaccggtgtgtatttgaagtgcaagatggttattccatcgtcgttaatatttgattatttcgaacgtagtgctgaagacgaggggtttagaagtctttttatggggctgtttaacagcaaaaagtttcttaccgtccgggatgatcgcaagaaaattaatgattatctttatgagcaagataagaagtttgaagaattgaagaaaatagaaactatcactcatggtatgaatggtcgcggtgaataa

SEQ ID NO: 448477 - DNA, 258 bp, Serratia marcescens
atgctgaattttttgaaaaaaatttatagctacctggagtttttaggtgctcttgtttgggttggtattggtttgtattctatctggttggggtttagtaagttatttaaagataactcattctctattggtggcgttgaggttatatctttgcttgatacaactccgtttgcaattatgtttattttttgcggggtgctcatcattacacttatatgggttgggtatataagtaagagactaaaaaatgaagcgtga

SEQ ID NO: 448478 - DNA, 246 bp, Serratia marcescens
atgactcaagtaataattaaaaaatggggcaatagcccgtctgttcggcttccttctgcgattgtcaaagccgcttcgttgaacgttgatgatgtagtggagctgtcggtagaggatggcgcaattactatcgtgcccgttaaaacgaaggagtattcactggatgctctgatggccggtgttactaacgaaaatattcatgaggaaatctctttcggatctccagtgggtaaggaacttttataa

SEQ ID NO: 448479 - DNA, 588 bp, Serratia marcescens
atgaaaataggctacgccagaaaatcaaccaaagagcaagacacatcccttgagtatcagatcgaggcattacaaaaagctggctgcgaaaaatggtatgcagagcaggtatcgaggggcggtaataagcgcctgaaaacaggtacaccagagttggaaaactgtctgaaagcgcttcgcaccggtgacacactggtagtatgggcgctagaccgattaggtggcactctcttgcagctcttgcagctcatgaatgagttacgcagcaaaggcattcactttgagagcctcaaagagcgcatagacacacaaagcccaatgggtgaaatgtactattccctcatcgccattttttccaatttcgaggtagccagaaaccacgaaagaacaatggccgggcttgcggccgcaaagaagaaaggacgcattggcggcagaaaaccaaagctatccccacaggacattaaagaaattaacgcgcttgttaaatcgccagaaattacggtaaaagagatcgcggcacgttttaacgtttcacgcccaacgatttacagacatattacccccgacagcaatactactgattaa

SEQ ID NO: 448480 - DNA, 885 bp, Serratia marcescens
gtgacagataaaccagtaccagcgaagcaaataaaaacggtaaataccggcatcgctattaaagagaatcccccaaaaggggatgatatggcatttactcactcgatattgtgtcaggttggcctaccccgttctaaggtggatggccgcgagtttatgaggaaatcaggtgatgcctggctggtcgtccaagctggctggcttgatgaagggagcgggcctgtagaacaaccgatcccctatggttcaatgcctcgtttagcgctcgcatgggtatcctcttatgctctccgcaaaaagacccgcgaaataccgatcggtaagagtgcaaacgagtttctgcaattaatgggcttatcaggcggcggcagacaatacaagacgttgcgcgaacaaatgcacgcgctggccgcttgccgcttgcagctcggatttaaaggacgttctttcaacggtcagccggtagaacaattcgatgcctggcagaaagacgaccaaagcggccagctaagtttatggccgggcgtgatgacgctatcagaagggtattttaatgggctaattgatagcgccgttcctctcgataaccgcgctctgtacgcgctaaaaggttcggcattgtcgttagatgtttatacgtggctggcacatcgcttacaccgcatcgagggccgcccgattaaacttcactggatgaatttacgggaacagttcgcccaagagtacatgggtaaagaccctgacaaggatttcaaaaagaaatttcttccagctctgcgcgacgttctgaccgtatatccacaggcgaaggtagaaaaagttaccggggggatattactttacccttccccgcctcccatcccattcaaggaagcaaaaaaatag

SEQ ID NO: 448481 - DNA, 270 bp, Serratia marcescens
atgaaattaaccacgctgctgaaaaaacattttgatattgaggaatgtaccgatgtggatagcaccgtaaaccgcgaggtgtatgccatttgggtttatgaaaaaggcgaagattgcgagccgctattaattctcaaagatgcacaggattttatgggcgtggatggctggcttgtcgggaatatctattccacgttgcaacatggcttattgctacagcatgaagaactgaaagcgatgatccgaaacggcgagattaagagctgttaa

SEQ ID NO: 448482 - DNA, 216 bp, Serratia marcescens
atgtcagtaaaagatttctcccctaccctggaaattaaattccatcgtcgccgctggcgtatcatggtcgggcgttcaagcctggcctctttccgctccgagcaggacgctattgatgctctcaataagcgccgctcattttatgagtattgggccggttctgccggtgtccaggccgagaacacagagccggtgattgtccacgtaacatattga

SEQ ID NO: 448483 - DNA, 825 bp, Serratia marcescens
atgttatctagccgttttcgttctgcaaatatcctgcgttctgaccgccctcttaatgatgatcagatcatgcgttatgccccgtctatctttgccactgaagcgcatgaaagccgctcagaccgttacgcctacattgcgaccagcgaagtattaaatggtctgcgtgataacggttttcatccattcatggtttgccagactcgcgttcgcaacctggataaacgcgaacacaccaagcacatgatccgtctgcgccatgccgggcaaattaacggcaccgaagcgaaagaaatcatcctgcttaactctcatgatggcagcagcagctatcaaatgctggccggtgtattccgtttcgtctgccataacggtttagtctgcggtgataccgttgctgatattcgtatcccgcacaaaggcaacgttaccgagcgtgttattgagggcgcttttgaagtgctggatcagttcgataacgttgaaaatcatatggatgctatgaagtctgtcacactgaatgcgctggaaaagcgtatttttgctgacgcggcgttagcactgcgttatgacgagaaagacggccccgcaccaatcgccgcgagccagctccttgaggcgcgtcgtttcgaagatcgcaaagatgatttgtggacaacgtttaaccgtgtacaggaaaacatcatccgtggcggtttgagtgccagaactaagcagggcaaatcaacccgtacccgcgccgttaccggcatggataaggatacttctttaaaccgcgctttatggattctcagcgagcgcatgaatgaactcaaagccgcttaa

SEQ ID NO: 448484 - DNA, 537 bp, Serratia marcescens
atggcaaacgccccgcttgattgcggggcttttatcaacccgaaaaaggtgattatcatggcttcaagaggtgttaacaaagtaattctggtcggcaatttaggccaagatcctgaagtgcgttatatgccgaacggcggcgcggttgccaatattacgttagccacgtctgaaagctggcgtgacaagcaaaccggcgagatgaaagagcagactgaatggcatcgcgtggtattgttcggcaagctggccgaggtcgccggtgaatatctgcgtaaaggttcacaggtgtacatagaaggccagctcagaacacgtaaatggactgatcaagcgggcgtggagaagtacaccacagaggttgtggtcaacgtcggcggtactatgcagatgttaggcgggcgcccacaaaacgcttctcagcctggtaatcagccgcaagccggccagcagttcagcggtcagccacaggccaccggcacagcggcagcggcgggaaacgagccgcctccgtttgatgatgatataccgttttga

SEQ ID NO: 448485 - DNA, 297 bp, Serratia marcescens
atggcagtagaacgcatttcccctgaagaatggcagcgtatcgcaccggcattacgcacatgcagccaggtaacgatcgatatggcatacgccgtactggttgacggtcgcaaacaagtcgatgtggctaaagagttcgaccggtcaaagcaaacggtcaatgctgcgatcaggcgcgttactgcgatttttaacgaagtgatcccggaagatgagcagttagaatttgtgcaagtctggttgccgccagagctggcgaagcaggttaaagaaatggctaaaccatatactaagtga

SEQ ID NO: 448486 - DNA, 423 bp, Serratia marcescens
atgagcgcatacgtagtatctgataaagccatttctactatcgttaaaactctggtactgaccggcacacttcagcctgtcgaggctgtttcatttggtcagatgatgcttaatctgaatacccattctgttaatgttcgctatcaagaaagcagcccggcgcacgcttttgaatatagtgaaccggagctaaatattaacgacccaaaaacacaaattcaggtgattgtctgcattgatgagtatgaatatcagtcctgcgagtttgccgaatactatgaaacgatggtgcatacagtcctcaaagctataaaatcagcgttacatgaggcttatactgaaacattgcctaatcccgtccggtggaaagctaaaaaatcctatgaactgccgggctactcagaagctgaatggagtttatga

SEQ ID NO: 448487 - DNA, 507 bp, Serratia marcescens
atgtctattcatgatgccgttcgtcaggaaatgctcgctatctatagggaaagtgattaccgcatagcgataggtagcaagagagtagattatgccgattctgccgccagaaacctatttgcggaaggctgtagtaactttcagcgttataacctgcaaaatgagcattttattatgagtgggcaacactgttacgtaattccctggatgggggataaagttgtgaatacggttacagccttgctcctgcgctgtggttttaaagcaaattcatttgctggtgttatagaaatcgataattcaagtgtagcttccgttcagcacgtgctcaaagaaatgctgttatcaggcttaccatctgcattcgatcttgccacagatgttccagaaaagtacttggataaatatgacgagtatttaccagagtcccttcttgcgaaagggtttggggaaaaagcgtatgacattgaaggcacttgtgtttggttggagcggcatcttaagtaa

SEQ ID NO: 448488 - DNA, 423 bp, Serratia marcescens; identical to SEQ ID NO: 448486

SEQ ID NO: 448489 - DNA, 321 bp, Serratia marcescens
atgaaaaagttattcgcaatgatgatgtgcagcgcgctgatgctgggcgtggccggcgccaacgccgcggacggcatgagcaaagacgcgatgaaaaaggacggcatgagcaaagacgcgatgaaaaaggacggcatgagccagatgtcgcacgacggcatggcgaaagatgggatgaagaaagagtgcatgggcaaggactgcatgaagaaagacaagatggggaaagacgccatgaaaaaggatggcatggcgaaagacggtatggccaaagacggcatgaagaaagacgaaatgaaaaaggacgcgatggggcagtaa

SEQ ID NO: 448490 - DNA, 828 bp, Serratia marcescens
atgtttactatcacaaaacgcacgtcgtttctatggagctctcccttactgtgccttctatcgatcatgcctacgccggcttacagttcctcatggggtgcggtttcctcaacgttctatgaaggcgaaatgctcgggctgatctacgagtattcctggccggaccaagtcgacttcaccctcccatgtcagtttccttattgttacctcggcgtcggggctatggccgtcgggttcggcgccattgtgaacccatgggttgcgcaaggcctcgtcacttatcgcaacggggaaagcgccacaaccgttcgggcacgctgggtcagtaaatacggcgcgtccgggactgtacgggatcctcgctgggtcgcgaaagatctagagtcacaattggactgggataccttgtgcgtggggtttcaatactggccgtcaagcgcacagcatggcacgttacttcctgacagcacgtgtggacgtgtgcctcccccaacaaaacattgtgacgcacttcccgacatctcattcgactacggaacactgcctcatgcgtctgtgatcggggctacaatgcgccgaacggtacgactgtcctgcactggcgtgcaaagcgtgtcgctgcggttgatgtcgcccatccagttggcgccgggcttgtcatccgagatacaagcagacggggtggtgctctcgcccgccggctctatcttcgacgtttcacggacagggcgcgacctcgtgttcacctcaacacttgtaggaaccgtcgaggcttcttatgtgggagggttgtctgcgagctccgtattgattgtggaaatactctga

SEQ ID NO: 448491 - DNA, 843 bp, Serratia marcescens
gtgaaaaccgtagtaaatacttcagataacatcaacagcaccaaaaacaccaatagccctaatactcagcaattcctcatgatgccttatgaactcctcagcgttcacgaggtaaacggccagcgattcgacataaacatgaaagtggcttatcagtacattaaaggctttcaagataacggacagcaagcttatttctcccgcgccaagcttggcgaaatgttggatattaaagagctggcagtaaccagaatgatgaataaaatggttgattgcggcctcgttaatagaatagagcgttctggatataccaacctctacactgttaacccaatcgaacaagccgttaagaatgagaccactgataaatccgttgctgaggaagtaaaaaatgaatcaggttctgctgttggaaataaagcacaaagcgttaagccttcaaatagcccaacagcaagcacgcctgaagatctacaccacaataacactactgggattggctatagtgacagcgccgagcctgttaacgctgaccacatcggacaacagtgtgtacagcctgtacaaccttcacagcttcctcctgtaatcgttgaggaacagcctgaagcagaggaagaagaagaagagccagatttcaacgcatacgccgccatggcggcccctatagccctttctggatgggtgacaacccataacgctactgtagaactgaaagccgcctacgaggcgcacaggaacgctaatagcgagtcctacagcaagcctaacagctggccccacagcaacaattgcccccgcagttatgcaacagctgaacatgacagaatggaagctttttaa

SEQ ID NO: 448492 - DNA, 714 bp, Serratia marcescens
atgaatattaatgaacttttaactgaaaaccttgataacatcagttcgattgttacagcgatcgctgcaatattgaccgcagttgctacattttttctatggcgtgttactaaacttttagctgcggagacaaagcgtatggttgatgcttccgttcagccacatgttgtagtaacccttgaacctaatatgtgggcagcatttcatttcgatataaacatctctaacgttggtaatgcggctgcatatgacattgaaattaattttgatccaccacttatcaacgcaaagcatagaaagcaaagagcgattccattcaataaggttagcgtgcttaaaaatggacaatcattaattagcaatatatgcgagtacgaacaacttaaagataaggtatttagagttactgtaagctggacgaaaaaagtaggggattcctcacgacaggttcatgaatacaactatgacatgtcttcatttgatggagttagctatcttggagcaaggaatccacttactcagattgccgagcaaataaagaaaataagagaagattggcagtacatagccagtggcggaaaacgattaaagactgatgtatatacagaggatgatcgagagttaaaaagaaaacgggaccatgattattttgaggaggtcagagccaagaaggaagtagcgaaaggaacgcaggaagggggagaagaaagctag

SEQ ID NO: 448493 - DNA, 1011 bp, Serratia marcescens
gtgataaatcgggtaagaaacgcgggtgttctcggttttgctggcgtcgtcgaagtcgatgctgccgtcggccagcacggtgacgttttccagcagcgcatcgcgacggatcgcctgatagatttccggctccgcctgcggcgacagcttgatggttttggcgtagcagccgccttcgaagttgaacacgccgtcgtcgtcccaaccgtgctcgtcatcgccgatcagctggcgtttcgggtcggtagagagggtggttttgccggtgccggacaggccgaagaataccgccacgtcgccttgctcgccgacgttggccgagcagtgcatcgacgcgatgcccttcagcggcagcagatagttcatgatcgagaacaggcctttcttcatttcgccgccgtaccaggtgccgccgatcaactgcatgcgctcggtcagattgaaggcgacgaagttctccgagtgcagcccttgctgctgccagtccgggttggtgcatttagcgccgttcatcaccacgaagtccggttcaaagtccgccagctcggcgtcgctcgggcggatgaacatgtttttcacgaagtgcgcctgccaggccacctcggtgatgaagcgcactttcagacgcgtgtcggcgttggcgccgcagaacgcgtccaccacgaacagacgcttgccggagagctgattgcccaccagcgtcttcagatgctgccagacttccggcgagagcggctggttgtcgttcttgccggtgccgttgtccgaccaccagacggtatcgcgcgtggtgtcgtcgcgcacgatgtatttgtccttcggcgaacggccggtaaattcaccggtcgcgacgttgaccgcgcccagttgggtgagcgtgccgcgctccagcggcggcagatcggcgcgagtctcttcggcgaacagcaattcatagctggggttatagacgatgtcggcggcctgatggatgccgtagcgagcgagggtttgtggggtaacagcgcgtga

SEQ ID NO: 448494 - DNA, 918 bp, Serratia marcescens
atgagtgaatacgtgcaagcaattgtgaaatcagatactggtggttttagatttaccgatgtgcagcggccagtcagaaggacggaaagtgatattttaatcagagtatccaatatatcacttaatcggggagaattagactttccctgggaatcggataagcctgccggatgggatgcatttggtattgtgattgagaccagtaccgacggtcagggaccaaaaattggggagcgggtattaacatggagtttttcgggtgcctggagccaatatcgcgttgtcgatcgtgccaatgtcgctatcgtgccagagagtgtatcagcagaggttgcagcagcgttgccggtggcaggattaacggcgctgcgttctctgcgatcccttcatttgctgccgggccagtctctggccgttaccggcgcaacgggcggagttgggcatttgttggttcagttggcaatgcatgccggtattaaagtttcggcggtggcgcacagtcagcgtggattcgattggctgcaagccagcgacgttaaacccaacgaggtactattggctaaaaaatatccttttgagggaacctttgatgcactggtcgataccgtcggtggcgatttactggctcatctattagacaatgttgtccctaatggcacagttctcattctgggcgttgcctcgggacaggtggcgagcatagacaccacaattttggtatcacgaggaatcgatctgatttcttataaggattattccccggccggagaagatttaaacaccttgctcactctcgttgacgagaagatcattaaagtatacgcgaataatattggtagttgggataaagtcattaaacaggatttcatgcatcttctcgctccaggcaaagtcacgctcaacgtacctcaggactaa

SEQ ID NO: 448495 - DNA, 882 bp, Serratia marcescens
atggatttaaacgcgcttaaaatctttatcaaggtaggggaaacgcagagttttaccaaagctgcgcaggcattgggcctcacccaatcaggggtctcacgtgcaattaccagacttgagctcgaccttcgtgttaccttgcttaatcgcaatacccactctgtaagtctgactaccgatggcgtttttttatatgaatcctcaagaagcctgattcatgaaatggatgaggtagggcattcgattatcggcagaacggccttccctgaaggcgaactaaaaataacgacaccttctgcctatggccgattggtaattattcctatgctcaaagagattctggacagatatccggcattaacaattgacgcggttatgactgaccgattggttgatttggtggaagaaggctttgacgcggcgattagaattggcagcgtacaagactcacggcttatcgcaagaaccatcaagcatttacgttttgtcaccgttgcgtcaccggaatatttaaacagccacggaattcctaaagagccagcggaactggtacagcataactgtctggctgttaaagcacagaaaactgggcgtagcacaaagtggttttattatatagcgggagaacagcaggcgtttgatattaaaggtaatctggtcgtcgatactgcggatgtactgttagaggcagcactcagcgggatgggagttgttcaaataatggactttgctgtcgataaatatctggaaaacggtaaactggtcgagctactacaagaatactccgaggcgtcgattccgctttcattaatttatgcaaaatcgcgccatcgttcgcctaaaatcagtacattgctggcggcgttaggaataaatacttga

SEQ ID NO: 448496 - DNA, 801 bp, Serratia marcescens
atggtacgtttcacgttcgtttggcttatcctctttactttcgatgccatggcgtacagcatcgtgttgtccaacgtcaaaatcacatctgggcctgaacccgacgtgtacggttacgaatacgattggagattggacgccaattccggctcggagtcagctcggacatggtgcccggtctcactaacgtcgtgctttgttgggatacggcccctcaacaacgggataggctccaacacgggttacgtcgcgcgccactctgctatacctcccggcacctccgtagaaggggtctacctaaaatggaaagctgatggagggtggtccggacacgtaagcatgcccccagcccatcagaactggccttggggttccggaactccgcgctggtcatcgctctgtttcggctttgctggtcatgtcgataacggctctccgtggctactcgtacctggctcaacgtgctaccgcgggtcaccgccggaaaacacgtgccgtctcgaacttccgggctcgattgatatgggtgttgtcaacgtcggccataccgcgtcggggtcggggcatggaaatatctcctgcaaccgcgtcgtgtcggtacgtgctcgcctccttaaccgacccgtgctcgacggggtcgcagtccaaatctccttaaatggacactcactacatcagagtgagaccactgttgggactggggacaacctaaccctccggatatctgcgtctgttaactcgtctctcatgcatcccggcgtatactacacagactccataatctcggtcagttacgattaa

SEQ ID NO: 448497 - DNA, 522 bp, Serratia marcescens
atgctcctgacgggcatttttgtactgatattttccgggctgacaactgctcaggttcagggatttcatcagacgcccggcacggtaacggctcatcggaacgccattttgggtcagcatttcagccagagtgcgcgcgccagcagagccacggctctggttccatgcccggcgtatctcgcaggaaaacctgactcgcgccggattaacagtatcgcatcgtttctgccagtaccggtaactgctacggtgtactcccagagcggaacaaagtccgactaccatgtggctgtcgctcagcctggcaattaccgtgaaccgctcagtgagtcggacatcaagagtgcggtagccatcttagatcgtattctgttcctccaggcggcgaacctgcttttccagctcgcggatacgctgctgctctggggtaatgggggtggcagaacgcgtaatatcctggcgctctcgtctgatctggcggacccaagagtcaagcgtgggagaaccaatcaaccgatgtaa

SEQ ID NO: 448498 - DNA, 1263 bp, Serratia marcescens
atggctctaacagatatcaaagtcagaacagctaagccgacagataagcaatataagctgaccgatggcaacggtatgcatcttctcgtccatcccaatggttcaagatactggcgtttgcagtaccgctttggcggaaagcaaaagatgctggctttagggggttaccctgacgtatctcttgcagatgccagagcccgccgtgatgaagctcgtaagcttttggcaaacagcatcgatccgggagataaaaagaaaaatgataaggttgagctggaagaggcgcgtacttttgagcagctcgctattgagtggcatgccacaaataaaaagtggtcggaagaacatagccgacgtgtgctgaaaagcctggaagacaatctctttcctgccattggcaaacgtaatattgccgaactaaaaacgcgagatctgttagcccctattaaagctgtagaactttcggggaggctagaagtggcttcccggctacaacagcgaactactgcaattatgagatatgccgttcagagtggtttacttgattacaatcccgcacaggaaatggttggtgctgttgcttcaagtaacaggcagcatagacctgcattggagttgaaacgtacccctgaactgcttcaacgcattgaccgctatacaggcaggccactaactcgccttgctgttgagctaactctcttggtctttatccgctccagtgaactacgttttgcccgttggtctgagatcgattttgaaacatcgatgtggacgatcccagcagagcgagaagctattgaaggggtgaagcactcccagcgtggctcaaaaatgcgtacgcctcatttggtgccgttatctcgtcaggcgttagcaatccttaaacaggtacacaaacttagtggcgatcgcgcttttgttttcattggcgatcacgaccatcgcaaaccgatgagtgagaacacggtgaacaaggcgctgcgcgttatgggttatgacacgaaggtagaggtttgtggacatggtttcagaacaatggcctgtagttcattgattgagtctggattgtggtcgagggatgccgtggaacggcaaatgagccatatggaacgtaactcagtacgtgcagcttatattcataaggctgagcatcttgatgagcgcagactgatgctgcagtggtgggctgattttcttgatgcgaatcgggaacaggcagtgagtccatttgattttgcgaagtttttctctggtaagtcttag

SEQ ID NO: 448499 - DNA, 1926 bp, Serratia marcescens
atgaagcttgaaaccattcgcctatcgggtttccagtcctttggacaggaaccgaccgagttaaatctggaagagattacttatctcattggccctaacggatcgggtaagactgcagcacttcaggcactgtgtcggctttttgcttttaatcctgctttgcggcgtattcagcgttcggattttcacgttcctttcaacgaagagaatacacctggtgagcgcctgttatggatagaagctgacttttcctttccggaattagctgaagatgaagataacagtaccgttgctccccattttgggcatatgcggcttgatgaagttgatggtatcccacgtgtgcgctttcggcttacggcgaccatgggaccggatggggacattgaagaaaatctggtatatgtcctggatgttgatgcagacggtaatcctcaaaacacgccacaagttacacgagcagatcgtaaccatattcaggttcactatttgcctgccagacgcgatccggcggaccatataacttatggagcgaacgcattgcttggacgtttgttccgggcagtgcgctgggacaatgaacgcagtgcgattagggcgctaacagatcagattagcgatagcttggctactaatccttccgttaatgcatttagtgagagcctgaaagcgatctgggcttccctgcacaaaggttcatttttcaccgatcctaaaatcacgtttgcagcttccgagattgaagcattgctacggcatatgtcagtctcatttgctcctgaccatgagggttcgctggtggacttctctcggttgagcgatggccaaaagtcgatgctctacctttcccttgtattgtcgtctcaggcgataggtagcgcagtacttgccgggcgagatacttcttttgatcctgataaattgcgtccgccggtctttactttggttgctgttgaggagcctgagaatagcctttctcctcattacttagggcgcattgtcagcaccttgaataacatggcgaaaaatgcggatgcgcaagcgcttattgccacccacgcgccatcaatgctacggcgtgttgcccctgagtttattcgttacctacggcttactgaggagaggaatactcggattacccatatcaagttgccagctaaaactgatgatgctcataagtttatacgagaggctgttcaggcatttccagaagtctatttctcgcgcctggttgtgctgggtgagggggatagcgaagagatcgtgttgccacgcctgctacaggctaaaggtgcgcccgttgacgagtcggccataacgatagcgccattgggtggaaggcatgttaatcacttctggcgtttactttcagcgctgcaaattccttatttaacactgcttgatcttgatatcgctcgccatgcagcaggttgggggcgcatcaaatatgttaatgatcaattcgcaatatttgagccagacagagttcttcctgccaactgtccgattccaagatgggatgatagtggcacacctgtacgaacccatcatttttttaataatggcacccaggatacttttgctgaattggagaataggtcagtatttttttccttcccaatggatttggatttctccatgctcctggcatatcccgaagcctatagtgttattagggaggaaccagacgagtcaacaatcaaagctgtcctcggaaaaagccaccatgattcatctcaatacagccaagacgaattgaggttatttagtacttatcaccgtcgctttaaacttggcagcaaaccagcagcacacattgaagcgttagctcagctaacagatgcgcaattacttggaaatatgcctgcgtcattaagcaggttagccgatactgttattgcaagactcgcggagctgcctgaatga

SEQ ID NO: 448500 - DNA, 834 bp, Serratia marcescens
  misc_feature (813)..(822): n is a, c, g, or t
atgattgctgttgaagcctggctacccgctgatggtttgacgcttgaacccaatgcgttacgtgcggtaaaggagtgtgagcattgtcttgcgctcaccgcagggcctggagcaggtaaaacagaaatgcttgcccaacgagctgactttcttttgcgtactggtacatgccgttatccgaagcgaattctggcgatctccttcaaagttgatgccagtagaaacctgaaagaacgtatccagcggcgatgtggcccggatttggcttcgcgtttcgacagctatactttccatgcttttgccaaacgtattatcgatcgcttcaggccagtactggtaggtcaagatgcgttagatgcggaatacaccatcgttgaccgtaaatcaggggcttcccgcacccagatagaatttggcgatctggtcccactggcgattaaaatattgcaatgttccagaatggctcagaacgctattcggcagacctatagcgatgttttcctggatgaattccaggattgtacgaatttacagtatgatctggtcaagcttgccttccagggaactcgtcttcgtctcaccgcagtgggtgacaccaagcaaaaaattatgggttgggcaggcgcattggatggaatttttggaacctttgttagcgactttaatgctgagccgcttaacatgtatcgcaactttcgttcaaaaccaagacttttgcaggtacagaacgatattattcgtcaactcgatccagcatctgttatgccagatgagctgttagaaggtgacgaaggcgaagtttacacccaccannnnnnnnnnccattttactga

SEQ ID NO: 448501 - DNA, 900 bp, Serratia marcescens
  misc_feature (29)..(38): n is a, c, g, or t
gtgacgaaggcgaagtttacacccaccannnnnnnnnnccattttactgacagtcgggaagaagcggtttgtttagcgaattttatacatgattggatcgaaactgaacgaataccgccagctgaaatcgcgattcttgtctccaagcagttggatctctacgctgaccatcttatggctgagctggaaattcgcggtattccataccgtaacgaacagcaaatgcaggatattacggttgaaccggctgcacgcttaattgtcgattatttatcgtgtctttacggccagcgggaacccaaagcttggattcggttgatgaaccagctaattccctttgccgatgaagaaatccagtccagcgcgcgaaaagagcttgatcgtttaattaaaaatcagcgcaaagaagcagatattgcggagctgattgactcacgcttctctgattggcgggaatgtgttagcgccttcttagcacatatcagttccgaaacgttgatggcgctatcgcctgactacgaatcacaaacgcgcctacgagaagtaattcgtgatactaaagcacggattgaagagctgctccaaatagaaccagatttgcctaaggctctggagcggtttgtggatgatcaggccgttcgcattctgaccatccataaaagcaaaggactggaatttgactctgtcattatcatggcagttgaaaatgagactttctttggtaatcaggatgaaaatcgctgtgcgttttttgttggcgtttcgcgagcaaagaggcgattggttttgacgcatgctgatcggcgagagcggcctgctaactataccaaacgctgggatgttgttcgttctgttcaatttgagtaccttggctatgtcactccatttgtaaggcaataa

SEQ ID NO: 448502 - DNA, 1185 bp, Serratia marcescens
atgaaaaataaatctcttaagccaggttggcgttgggtaaagtttggtgatgtagttcgcctgcccaaaacaaaaagcaaagatcctttagccgatggttttgaacgctatgttggtttggaacatctggaaccgggggatttgcgtattcgcagttatggcaacgttgctgatggagtgacctttaccagcgtttttcagccaggacaggtattgttcggtaagcgccgtgcctatcagcgtaaggtagccgtagctgatttttcgggggtgtgttccggcgatatttatgtgctggaaactaaagatccacaagtattactgccggaattacttccttttatttgccagaccgaggcattctttgagcatgccgtcggaacatccgcagggtcgttgagtccgcgtactaattgggtaaatttggcggattttgagtttgtgttaccaccaatttcagaacaattatctgctattactgcgcttaaggcagcaatagatgtttgttattcccttgaagctacttatatagctgctggtcgaatggtgcaagcatttaaagattccctttccaaacgatttaactcaaatgatattaaatcttatctgttaaaagaacttctattaggttcgccagatagtggttgtagtgctccgcctaaagatgtctctacggggtattttgtgcttagtttatctgcactatctcgcgatggttacatatcagaagaatataaacccgttgagcctacaagtaagatgcttgctgcaaagctagaatttggtgatatgttaatctctcgttctaatacggttgaacgggttggatatgtaggcatttttagtgatgaacgtgatgatgtgtcctttcctgatacaatgatgcgcctcaggccaaatccttctctgattatttcagactttcttgaagccttattacaaacaacatcttcacgtgaatacctaatgcgaattgcggcgggcaccagtgcaagtatgaagaaaattaatcgtgctaatttgttacagatgcccttgaaagttccatctattcatctccagaatgaggcgcttaaagaactacggaagcttaaaggtactgtgacggccctgaaattgcggtgggacggcgctttgcaacttgcgagacaaattgcagcaaaaacaatagaaggagatgcatga

SEQ ID NO: 448503 - DNA, 1215 bp, Serratia marcescens
  misc_feature (1194)..(1203): n is a, c, g, or t
gtgttcactgaatctaatacagtcgaagcctatatgcgtgatattgtctctggctctgctaaaaccgctgcaacacatagcctcaactgtaacggaatcgggtggacctacgttgcaccggctgaagttccacgccaaacccaggaagttctggttgaaccttggctacgagacgcattgattcacctaaatcctgaaatcgccgcacaacccgacctcgctgatgaagtactctacaaactacgtgctattgtgctgtcggtgcgttctgacggtttaatccgtgctaacgaagagatgactgcctggatgcgcggtgagcgctctatgccgttcggccaaaataacgagcatgttccagtgcggcttatcgatcttgatgacctgtcacagaaccagtacaccgttacccaacaatttacctatcgcgcaggcgctactgagcgccgcgccgacttagtgttgctggtaaatggtttgccactggtactgattgaggccaaaacacctgttaaaaagtgcattagctgggttgatggtgcaatacaaatacatgacgattacgaaaaatttgtgccagagctgttcgtgtgtaatgtgttctcagtggctactgaaggtaaagtgtttcgttatggttccatcggcctgccggttaaggactggggcccttggcatttggatgatgtcgataatcagcaccattctctaaaatcgcttaaagtctctgctgaaagtatgttaagaccccaggtactgctggatatcttaagcaacttcaccgtgtttgctaccgacaaaaaaaagcgccgtatcaagattattagtcgttaccaacagtttgaagccgccaacaaaattgttgagagggtgctggcaggttatccaaagaaaggactaatttggcactttcagggatcgggaaaatcactactgatggtgtttgctgcgcaaaagctgcgtatgcattcccggctgaaaaacccaacagtattgattgtggtggatcgcatcgatcttgatagccagatcactggaacattcactggcgctgacattcccaatctggaaaaagctgatagccgggagaaactacagcagttgctggcgcaggatgtacgcaagattatcatcactaccatcttcaagtttggcgaggccaccgggtgcctgaatgatcgtagtaatattatnnnnnnnnnntgttcggtttga

SEQ ID NO: 448504 - DNA, 987 bp, Serratia marcescens
ttgacgggaacccctattaaccgggccgatcgcaataccttttatgccttcggcgcagaagaagatgacaaaggctatatgagtcgctacggctttgaggagtcgatccgcgatggggctacactgaagctgcatttcgaacctagattaatcgagctgcatatcgacaaaacggctctggatgctgcttacaaagaccttactggtggcctgtccgatctggataaagataatcttgcaaaaacagcggccaaaatggccgtattagtgaaaacgcctgaacgtattcgcaaggtgtgcgaagacattgttcaacactaccaaagtaaaattgagcccaatggattcaaaggccagattgtcacatttgaccgggaatcctgcctgctctataaagccgagttggacaagcttttgccatcagaagcgacagatatcgtgatgtctgttcaggcatcagataagaaagagcatcctgaatatgctccatacgatcgtacccgtgacgaagaagaaagattactggatcgcttccgcgacccagcagatccgcttaagctcatcattgtgaccgctaaacttttgactggttttgatgcgcctattctgcaagttatgtacctcgataaaccactgcgcgaccatacgttgctacaagctatctgccgagtaaaccgcacctattccgagcagaagactcatggccttattgttgactatctggggatttttgatgatgtagctgcagccttagatttcgatgatcaaagtgttaaacagctagtgagtaatattcaggagctgaaagagaagctacctgaagctatgcagaagtccgagacaattttgcttctgaatacagtgtcctttcccgtatatgggaaacgttatcacccgatgttgttctcggtctttttgagaaagattacaagtggttgtctcaggtttaccagtcagtccaaccttctagcggccatggaaaattaa

SEQ ID NO: 448505 - DNA, 969 bp, Serratia marcescens
atgagcacttacattactctgtcttcgattatcaccgctgctgaaaggattaaaaaatcggtcatccggacccccacggttttgtctccgggattgtcggatatgctgggaagaaaggtgtttctcaaactggagaatttgcagacgggcggctcttttaaagccaggggagtactgaacctgctttccgctttttccggtaatctgagagattaccgtttcgctgccgtcagtggcggtaactttggtatcgcagtggcagaagcggccaaagcgcttgatataaacgtgaccgtgattatgccagataacgccccggcctcatccattgaaaaaatacgccattccggcagcactgttattcttgaaaaagatgtcagctccgcgtttgaacgggcaaggacacttgcagagcagggatatcacataattgatgactgtggcgatacactggtcgcggaaggatacggaacccttgcactcgaactgatggaagattgcccttcattaaccgatgtatttgttgcggtgggtggcggtgcaatgctggcaggcatcgcgacggtactgaaatcccgtaacccggacatccggatatggggggtggaaacggagggagcaagttcgatgtaccaggcattgagggcaggaaaccccgtcaacatggatatcacttctgccatctcaacccttggcgtccctgtaattgatcgccttatgcttgaacacgcgcagcgctacattgaaaaggtcatcaccgtgtcggatagcgacgccatacagggcatgctttcatttggcgagcaagccaggcagtgggttgagccagcagccgggacgcttattcccgcagctctcgctgtcatccctgacatccccaaaaatgcggtcattggactcatcgtatgtgggggcaacattacgcaacgagagatgaatacgtgggcaaacaatcgagatcttcgttag

SEQ ID NO: 448506 - DNA, 1029 bp, Serratia marcescens
atggctcacatgatgaaacgctggcagttgtcgtctttcggcgcggaaaacctgcatctggcagacgtgcctttgccggaaccagggcataacgagttgctggttaaagtttctgcggtctcccttaactaccgggataaactggtgctggaggggaaactgttgcctgacctgccggaaatgcctttcacgcccgtttccgatatggcgggtattattgtcgcaacaggacccggcgtgacccgtttccgtagcggagaccgggtcaccggaaatttctggacgcagtggctggacggcgatgcgccggaggacatggtccgtcatggccgttcactgggtggtccgatacctggaatgctggctgaatatgtcatactccacgaagatgtggctgtcgcctctccggactcactgagtgatgaggaggtatccactctgccggttgcggccctgacggcctggttcgcactggtggaaacaggaaatctcagaaaggggcagcgggtgctggtccagggaaccggcggcgtggcgctggcaggactccagctggcgcgggctctgggcgcggaagtgaccgttctctcccggagtgaagaaaagctacagcgtgcaaaggcgcttggggcatcaggtttaatcaacaccagtctgacaccggaatggtcattgcgggctgctgaactaaccggggggcgtggatttgaccatattctggagcttataggtggggataatttgcgccagtctgcggatgcccttgcgccgggaggcaggattgctcagattggttttcttgaaggcagtgagatgattcttcctgccgtccccctgatgcttaaaagagcggttattcaggggattaccgtgggccaccgtcgagctctcgcagatttatgtcaggctgtaggccgctatcagattaaacccgtgattgataaaatatacaatttcgctgacgcgcaggccgccttcacgcatctggaagaaggaccattcgggaaaatcgtcatccgaatcggttag

SEQ ID NO: 448507 - DNA, 930 bp, Serratia marcescens
atgacattcatcctgcattctcagttactcagcatggctgcttttgtgcacactgtggagacaggcagcttcaccgctgccgcaatccggatgggcgtatcaaaatcggctaccggtaagcatgtcgcccgccttgaacagcggctcggtgttaaactgctgaaccgtaccacccgaagcatcagcctgaccgaagagggagaactgtattaccggagctgcctcagggttatggatgagcttgatgaaacagaatctcttctggcgtcccgccaaaaggtggtgtcaggtacgctgcgcatcagtcttcccgtctcatatggccggatttgtgtcatgcctgtccttgcaacgctgtgttctgaatacccggagcttaaactggatatcacgttcaccgatcgccgggtggacctcatcgaagaaaatattgatcttgctgtgcgacttggtgacacaggaaactctgccagtcttgccgggcgaaaaatcgccactcagcgttctgttatttgcgcttctcctgagtacattcatcgtcacggcctgcctggccgcgcagaagaactgctttcacatatctgccttggcttttcaagggagggcagagtattgccctggaaagtgctggatgaaaatggccgcatggtcctgcttgaacccactgtccgtcacattgtcagccacggggaagctctgcgggacgcggctatcggagggatggggattgccttcctgtcaacatggctggccggagacgaaatcgctaaagggcaactgaggattatacctgttaagacccccgagaatgatgccccggttacggcgctgtggcctgtttctagaaatctctcaccccggatccgggcggtggtggacagactgtacgctgcgttcaatgagagacagcccggacccggtagtgattaa

SEQ ID NO: 448508 - DNA, 648 bp, Serratia marcescens
atgctttccaccaccgtatttctggcggcggctatacagtgcgcccccagcattcacccgtcaacggcgcttgatgtggcgcgggtcgaatccggtttgaatccgtatgccatcgctgaaattctgcccagtggcaaaggcgtgatttcacattttcccacgagcagggatgaggccatcagcctcaccggacggctggcagcacagggccgacgctattcggtcgggctgatgcaaatcaccagcaccaatttccgtcattacggcgtgaccgccagtgaccttcttgacccctgtaccaacctgtccgtgtttgagcacatcctcaccgactgctatcaccgcggcagttccctcaagcgtgcgctcagttgctactactcaggaaatttcacgaccggccaacagccggaatctgcgtttaaccagaccagctacatccagcgcatcggctacgccgtgccgtcaacgcgggaagaccggcagcgacctctcaccgaaaagaccctgccggcaatccattaccccaccgccgtcatccgtggcgagcttaccgataacgccacgccagttctgacatccctgcgctaccccaatgccgtgatacgcggcgcgttacccattcccggcccccaggaggaacaatga

SEQ ID NO: 448509 - DNA, 705 bp, Serratia marcescens
atgtcagacagattcgcttttttgaagaataaaaatgtaaactcagactggttaactatcaaagaagcagttaaagcatcaaagaaaaacggcattagaaaaatacaagaaagtgatatctatcgatatgctctgcagggaaaaatcctcctttcgatatactttcagtctccaattaccttgaggaaaataaaatcctataaccataaattaaagctaaagcctaaagataataacttaccggacgacaaaattaaattggatgaaatcgatttttttagcgagagtaacttaactttcagcaccgaaggtaaatattttcacactgatcatggcgtcattgatacaagtctttttggatatgaatatttcctcatacaatgcctacttgctcataatctaaaaataccatcacctgtacttagagggaataataactatggcatcactgtttccttatcaggggaaacctttctagttcacaatagaatttcattacgcaatggaatctcattaaacagcataaatttaagctttaatgatgcctatttacctatttataacttaccgaaggatgcatgttttgttatcaggcaaactgagttaaataaactattcaacaggctggctggaaaaaaaatcaccctcggattcttccacacgcatatcatcccctctatcaagactattttggcttgcctgtag

SEQ ID NO: 448510 - DNA, 759 bp, Serratia marcescens
atgagtggtattttttcgcaaaagaaaattcttgtaaccggcgcaggcagtggacttggcagagaaatagccttggcattttcacgacttggcggaaccgttattcttgcaggtcgaaatacgcagaaactcgaagaaacggcacaagcgatctccgagactcttggcaaatcatgggttattcctttcgacgtaaataataatcaatcaatagataacctgtttgatgaaataaaaaataaagtcggcactcttgatattgccgttaataacgccggagtattttcttttggttttgtcgataaaacccccagtgaagactttaatcacgtattcactactaatgtcattggtttgtttgaaagtctgaagcgcgaacttcagtcgatgaaagaaaaccgggccgggactatcgttaatatttcatcaaatatgtctatcgggctgaatattccgggcacggcggcctacaccgcttcaaaggctgccgtcgatgctttgacccgagtctcggcaaaagaggctatcacgcacggcgtgcgggttttctcaataaaccctggcccattggccaccgaaatgacccaacttcccggcgaatcggcggcagaccgtgacaaaagatggcgcgatttgatccccattgggcgtattggcgatgttaaagagatcgctgaagccattatttggtcctgctcaggccagtctgactacttagtgggttcacgaatagttatcgatggtggccattctctttaa

SEQ ID NO: 448511 - DNA, 1173 bp, Serratia marcescens
atgataactcatgaagcaaattcatttagcaatatattagttaatctaagagatttacgcggcaaattgcgtaactccgctcgtgaaatagaagagcatcgcaggataccactcaatattattgaaaggctacgtggcattgggatatttggaatgtgtttcccgcaatcatggggcggtgccggactgacgtcgattgagcaaatccttgtgctggaagaactcgcccggggcgatactgctaccgcctggtgcgccatgatcggttgtgactcaggtatttattcaggtttcttggaagaaaaaagcgccaaagagatctttccacacgccaatctggccgtggcgggttggatacacccgcagggaaaagccgagatagttgatggcggctacatcgtcactggcaaatggcgttttgccagcggatcgcctcatggcgatgtcatctcggcaggttgcttcctctaccgtaacggcaatcttatactggatgataacggcaagcccctttggcgagtcatgctggcgcgtcctgccgactaccttttttccgatacctggttcaccaccggcctgcggggaagcggcagtcaggactactccacgcaagaattgttcattcccgaacagcacgcgttcaatttctcggcgccaaaacgtcaagggccactgcacaaaacgccggatgcaattttacgcaaaatggccggtatcccgctggggcttgcgagagcctgtctggactatatctacgacgtcgccgacgaccgcacagacagaatcaatgatgtgaaatggagaaactcaaagcgcgtacagacggcggtggctaacgcagagaatcagttatttatcaccagaaacgccgtgctcaccagcgtgagtacattatgggaggcgctcgaagccgatgccgctcatgacgatattactcattggcgcgtgcagtcagctttgagtcgaagaaatgcctttcaaaccgcacgaaccatcgtttcaagcttgtatgacctacagggtgggggttctatctacacccatgaaacaccttttgaccgcgcattacgtgatatcaacaccatttgccagcacgctgtcgcgcaggaaaaagtcctgcaggtgtgcggcgatattcttcttggtggcaaagtcgaagattactttatataa

SEQ ID NO: 448512 - DNA, 1455 bp, Serratia marcescens
  misc_feature (395)..(404): n is a, c, g, or t
atgagcgaaagttttatctcacttcttgaagagcatttagatcatagaaacgtagtcgcctatgcaaatacaccgaatgatgttggcgaatatatttccccctctgtttctggccgggtggatgtttccagtatcgaacaagtaattcgcattgttaagctggcagatcaatatgatggagaaacagcgctttatccctactcaactggatacaattgggggttaggttcaacaaaacctccatcagataacaccgtgcagttaaagctcaacggactaaataaaattcgcgagattaatatcgtagagggttacgctgtcattgagccaggtgtgacgcagggaacattatcgcgaaaattacttaacactaatcgttttattaatgtcacagnnnnnnnnnnagcctcatctgcagaaacgagttttttaggtaatgctcttgaccggggcgtcgggttgaggcaccaacgtacagaagatcttctcggcctagagattgttctcgccaacggaacattacaccgagtgggttggtggccggaacagggaaaacaaagtgcactatactcccatgggattggcccttcactggtacaatttttcacccaatcgaatctcggaattataaccggtgccgttgtacgactacttaatcgaccagaaaaatctcgcgtcgcctatatttccttttcccccgaaaacttagagtacgctatcaatactttccagcactggtcagcacaagggttaattcacggagtacttaagatttatgatgaaacctcaacactgacgtatggtgcaaataagggcgaatttctcgttcacctgcccatttctggagcagcctcagtggtttcggcactttccatcgcgctagaaaccgagtttgtaaaagctggtgagaaattcatctctttggtctggagcgacagctctacgaatccttatcaggatgatatcgtcgccaatttagtagccgctgcctatcaaggggatactaaatatcatgatatccttctggagaagacgctcggtactacaccgactgaaatagataccgaaggcaaaggctggatatttttcttgcctctgcttccttttagcggtcaggctattaaacaggcttatctacattttgacgatatcttcgagtctactggcgtgcgctgcggcgccacaattaatacactgagtgatcagattattgatctcgtcgtatccattcgttttgagcgcgaggaagaggaaataaaaaaagctcatcaggctctgaaacttcttcatgaaaaatttagtgcctcaggtttttatccttatcgtttggacgtcgaacatcctctcgccaatagtcgtaatgccagaacgcttcgtgaaggtgaaatcatcagaagtttgcaaaaaacgttagatccaaagggaattttcgcatcagggcgatatagttattaa

SEQ ID NO: 448513 - DNA, 246 bp, Serratia marcescens
atgtccctcactgagcacatgcagggcatcaaaatattgcgctggattgttctggaatgccacttccattcgctgattctgcatcagagggagtttgataccagcgagcttttctcctggtgggtcattacggttgaatgcgttgtacagagtaacaatgccgtctccgagattcgcaaccaattgctgaggcaaaccctctttataggcgttcaattgcaatacgaaccgggcataggctactga

SEQ ID NO: 448514 - DNA, 225 bp, Serratia marcescens
atgaaaagaaaggccctcgcggtaaccagaagccagcgtctgttcctcagaagtcagtttttcaagatccgccttacccgcttccagttgctggatggccccatcgagtgtgcggcgtttttctgccagttgagcggctttcacgcctgtaagatcgatgtatctggcatcaatctccgcagtaaaatttcggacaaaatcattgaatgcatccagcccgaataa

SEQ ID NO: 448515 - DNA, 279 bp, Serratia marcescens
atgaccgtgtctcacgtcgcgcgactgcacggtatcaatgctaatcagatcttcaagtggcgcaggcagtatgaagacggttcactgaccgccgtgacctcaggtggagaagtcgttcccgcttccgaacttgctgctgccaataagcaaatccgcgaacttcagcgtcttctgggcaaaaaaacgatggaagccgaaatactcaaagaggccgtggagttcggccggacaaaaaaatggattgcgcatgcgccctcgttgccagaggacgacgaataa

SEQ ID NO: 448516 - DNA, 879 bp, Serratia marcescens
atggattgcgcatgcgccctcgttgccagaggacgacgaataagcgacgtcagccgcagtactggagtgtcgcgtgcgcagctgagtctcagggtccaccgttcgccagactggcaggatcgcaggttgcatgccagttttgacgatactacggtgttatcccggatacataccctgatcgccgaactgcccacatatggttatcgccggatatgggcgctgttgcggcgaaagtcagagcgtgacgcgcttccagctgtaaacgcgaaacgcgtgtaccggataatgcgtactcatcacctgctgctggagcgcaaacctgctgatcctcagcgtaagcgtgcgcataaagggcgcgtgtcggtcacagagagcaaccggcgctggtgttcagatggcttcgagttccgttgcgacaatggtgaaaagctgcgggtaaccttcgcacaggactgctgcgatcgggagatcatcgactgggcagcgagcacaggtggctatgacaaagaaacggtgcaggacgtcatgctgggtgcggtagaaaaacgcttcggccagcatctgccgtcagaaccggtggaatggctgacagataacggttcagcctacagagcgcatgaaacgcgggcgttcgcccggatgctggggcttgagccctgcacgaccgcagttcgcagcccggaaagtaatggcatagcagaaagcttcgtgaagacgataaagcgggattacatcagtgtaatggcaaaaccggacagccaggcagcggtgatgaacctggcggtggcgttcagtcattacaacgaacatcacccgcacagcgcgctgggatatcgctcgccacgggaatatatacgcagaaagttatcacaatcgtaa

SEQ ID NO: 448517 - DNA, 516 bp, Serratia marcescens
atggcaagatggaatgaactgctttccatacttggcatcaatggcgaaattcaaaatccgtattggaacaaaactaaaggggagatggcttcgtcttgccaaaatccttctcttttaaaaagcctaatatcagattcactatcgtgctcatcaccggccaaggcccgttggttgggacatggcattgaacagtgtggctattgtttgccatgcctgatccgccgagcagcattaatggcagcatggggacctgatagtgatccaacggtgtatacagtggcagatcttcatgctcaccccttggacacgcgccaagcaactggagtacaggtcagatcatttcaatatgcaattgctcgtctgaaagataatccgcaactagctagtatcttgattcacaagcctggctcgcttgcggatgaagcaatgcatttagaccagctagctggtgtatatcagcgcggacttgctgaagttgcgcgacttatcgacggtgtttcgacaagaccagcttga

SEQ ID NO: 448518 - DNA, 876 bp, Serratia marcescens
atgggaacctcaacagcttatggaggacctggcggcgggactccacttattccatcatggttggataacgcccccccgacatccccgcaaggcaatggcccaggacaagacgaccagcagccaatagatcgtcctgaacccctgactccaccaaatcgcccaccaataccaggtacagctgatccgcaacgtttctcaaacgcgcgcaataacttcacacgatttgcagggtctggtggtacagatcgagcaagcctcgggcgggccatatcgaagtatgtttcaacgtcatcaggtggtgccaggcaggcagcacaacgtatgggagcttccagaggggcgggtgcacggctcctcggtttcctagcggaggtacaaacaaggggtgtcaacgaagcgctacgctcactgaatttagaatcgctagcaggccgtccaatcactgaaattttcattgggctggctgatttcatctgcccaggagcaggtactgttgatgagggcattgcccgtgaagcatacatcgagactatcgtagaacttgctaacgaaggtctcactgatttcaatacatttacaccagatcaaatgcaaaccgttttcgaactatatgctactcacgcgatcgaagcacgcatttgtaatgacattggaaccaaagcggtgacgatgccaataaatgcgcatacagcacatcttgttgagcagcaggtgcgagatttcatcaggggtggagtaagcgatgcactcgcacgcgctcaaattgggacaaatcatcttactccagagcaaattcaaggattcgtggatacgatctatgagtctgcatttagaattttacaggctcttggcgatgcagaggctaataaacaatga

SEQ ID NO: 448519 - DNA, 417 bp, Serratia marcescens
atgaaggggatctcaacctgctacctggactcccttgagatggttttatctgaacctaagataatgaagtcaccattagggcgttcgtttgatgcaattattgattttatcaaaaaggatgatcttttaaatctgattggaaatgatcgcgtaactcaaacggcgattaaaaaggcaccggtcattatccacaaagttaaaggacgtacggtatatgcagttgataaggatctggtacataactgcttgccgaaatctcagcgcaaaggcattctgatgcaattaacaaagcaaggggtattattatccgatgcgaataaggagtacagtactatccagattgtctataagcgtaagcaagttggtcgtcgctactgttttgtatgcagtaagttcgataagtttatgacagaatag

SEQ ID NO: 448520 - DNA, 720 bp, Serratia marcescens
atgctcggccagcagctcggccttctcgctggcgctcatggctttcaaatcggcataactcagcgtgtcgaacgggctgggctgcggcggctgactgaacgcctggagctgggcgcgcgtggcctcagcgccctgctgacagtagacatcgttccagtcaccttccgtgggcggcagcgccggagtgccgccggtgagttcggccgcctctgcggcacgggtctgtccggtgccgtttcggtcattatcggccgccagcagcagccgtgcgtccgggtagtggctgcgcagctgctgcgccacggccgcaaggttgttggcgctcagcgccacgcacaccgtctcaccggtcaggcggtgcacggtaaggccggtggcatagccttcggtgagccagataaccgcgttgtccgggccgcagagagtgtggcaggcggctttcacctgcccgcctgccagcatacgcttgtcaccggcggcgttaatcagctgtacgttaaccacttctcccccggcattgtacagcggcagcagcaggtcaccgggctggaaggttattccgccaacgcgcagcggctggccctgcaaggtcagggcgtccacctccggccagcctttggcgctcagataggcattgtcggtctgaggttgcgcggcagccaccagagcctgtgcctgtcgcgcggctttgcgctgggcctcggccttgtcttgtggtga

SEQ ID NO: 448521 - DNA, 639 bp, Serratia marcescens
atgtgtataagagacagggttaagggcagcattaaaactgaattcagctctattgtaaacagttcaatatggggggcatttattacaagcttctttattattgctgcaacattcgctacattcagttacttcgttccctattttgaaaacacagtcggtttcgatactccatatatcccagctattctttttgcttacggtgcattcacggtagttggtaacttcctggtgggtaggctagcagataaatctccgattaaagttgttttcaccggtagtgtcgtgctggtacttgcactttgtgggctttataccttctacgataataaaatattagtgctgatatctgtaatgattttaggacttactggtattaccctcactcctgccatgtcctcacgcgtgtttaaagcagcacctaatacttcattaattaacactatgcatacctccgttatttgtcttggagtagttattggttcatgggccggtggctatgcaatcgaccaaggttatggctaccgtgcaccaactctcatcggtatttttttagccggattagcgattgtcaccctactccctgttttgagaaacaaccgttacgatacgcctgctgttaatcctcagacaaatatctga

SEQ ID NO: 448522 - DNA, 660 bp, Serratia marcescens
atgataatccattacccggcgggaaaccccaaagctgcacgcattacgtttaatcaggcaaaggtcactaataatccgctgatatgtgatcctatagcatctgtcccatataattttcgcgcaaatttagaacaatgggatttgctttcaaaccgcccctcaataaaagctgctacagccaaaatccaactccctggcaatctactttctcatgccctattaccctctataggtacatttggtgtcttttatcggaaaggctcggtttttgattttgcctactttgtagcaaatggactcagcgccttgaaaaacaatgccacgcgttcgggaactctccagtgggggactccattaggccaagttcgaaaaataggtcactatcatgagatgacagctacttgttgcatgtatacctttggggaagcacttgaattaggcttaattgggtcacctctccaacaattactatatggttcatctgaatctgttgaaatgcgaaattggttaggtaatgtgctctcatcactccaggaaatgcatcctgactccgagttaccaaatgagttgctggagggattggaattgactagcgaagactactcttggacagatgattcgtcaaagccacgcgcggtagtgttggtcagaacaagataa

SEQ ID NO: 448523 - DNA, 801 bp, Serratia marcescens
atggataaatcaaaaagcttaccgaaattacatgtaagatataagagatttcagaaggatctaaaagacgtatgggaatcttttttaattatagagttttacactcctcgaattaaggatttaataaaaaacgatcggttgccgaccttaacaattgatacctttagaaatgaaaacactaaaactcttgataaagataacacctatggtgcattaagttcattggaacggcgtggtaattttagacggacattacttgaggctgttctaatatttgaagactacatgtctgacttgatcgaattggtgtatttagacttgccaaataaattaacatcagttcaagatgacagcaacaatactggttatcaaaaacttttaaaattaatgcttagctgttccaacaaagatgaaatggtagaaagattagttgaagagaaaattcgaggagtgttctatgggaatcctttggatgtatttgaaaaagataaagcaaaattggaatttggttccttctttaaggataattgcacggcagaacttaacaaactaaagaagataattgcagcaagaaatattattgcacataacaatggtaagattgataggaagtatttgcgcgaaaccgatgccagcgctaatttaggcagtataattaaattagatcgtgaatttattaaagacgctttacacatactttatttatttgcaactcaatctgctaaacttgtagtggaaaatatctatagcggcactccaaatggtgttctaggtagagcggtcaattctttaaacaaatga

SEQ ID NO: 448524 - DNA, 1311 bp, Serratia marcescens
atgatgaaaaaaataatgccaaaggatattgaacgcagcgccatcaggaaattgacgctgcatattgtgcccctcatgatattgttgtatttcctggcctttctcgaccgcaacaatatggcctacgccgccaaagcgctggaagataacctgggattgaccgcctcggctttcggcttcgcttccgggattttctttatcggctatttcctgtttgaaatacccagcaacgccggcaccattaaattcggcccgcgcatctggttcgccagaatattaatttcctggggcatcttcgcgaccctgctcggttttgtgcgcacgccgatggagctgtatatttgccgttttatgctgggcgtgtgcgaagccggtttctttccctcggtggtgtattacttcacggtgttcttcccggaaaagtaccgcactaaaattctcggcatgttcatcatcgtccagccgctgtccaacgcggtcggctcgccgatttccggctttattctcaatattcagcatgactggttcgggttcgccccctggcagctgctgttcatcctcgaagggctgccgccgatcgtcatcggcctgttgatcccattcctgatcaagaactcgcccaaggatgtcggctatctgaacgtggaggaaaaagcctggctgatgagcaacgccggccgctccaaatccggctctaaaatcacgctgggcgacttcctcaagggcattaaaaacaagaaatacctgctctacgcgctgctcaacttcggcatggtgtgcggcatttacggcttcggcacctggctgccgtcgatcatcagcgccatttccggcggcgatatcttccgcgtcagcctgctggcgctcattccctacggcctggccgcgctgctggtctatccgtggagtctgtgggccagcaaaaccaaaaaactcggcgtgttcgccggcctcagcatggtgatcgccgccatcggcctgatgggcgcggtgacattttttaaatacgacccgttcgtcgcgctgtcattcctgtgcatcgccgccatcggcatctataccgccgtgccgccgttcctatccatgcccgccaacatatccaccggcgcggccgcagcagccgggctggcggtggtgagctgcatcggcaatatcggcggtttcgtcgccccctatgcggtgggcgtgctgaacgatctgaccggcagcagcgcaccggggctgtttttcctggcttcgtgcctgctggccaccgggttgatctgcattttctactgcgccaaacagcgtgaaggcgtcatcaattcttaa

SEQ ID NO: 448525 - DNA, 525 bp, Serratia marcescens
atggcctctgaagggagtgctggagaacaaggtgggcgccgtgagttatacggattcagaaaaggaaatggcaatgcctatgacaaaatccttgctgctcgtaaccaatacggccaaggcagcgctgaagagtttgaggaagtatccaaagcaatgagcgcatcagcgaagtctgcaggtgcactgaacttttctgatccaggaaaacaaggggcaataacttcattggcacatatgcgtggctcatctggcgcacaagcgatcctgaactccatggagtccggacgaatagttaaggctgataccttaacgccggaggcaatagccaaaattgaaagtatgtcggcggaaagctttcaggataatttacttaaagctcgggtagaatacgatagagcaatatatggagataccatcacgacgcagggtggtaaacagtacaactggtgggcacgttatggtaatggccttcaaaagcggtatgcccgggaagcagaagaatttttaaaattatcaaacgagtga

SEQ ID NO: 448526 - DNA, 1506 bp, Serratia marcescens
atgaagagtttaactttggttgatacttttggtggaacggatgctgataatgatgacattttattgcaggctttcgaagatcatgaagcatacttggatgtaatgaaattcaaacgctttctggtcgttgggaaaaaaggtagtggtaaaactgctatctttaaaaagattatcacaactcgtgcagatgatactttttcgtatgggcatacgttttctgattacccgtggcattttcaccagcaacaagctaaggctgggatacctaatgacgataaattcactcacagctggaagtatttaatattaatttccttggccaagataatattaaatcaagataattctcttccctgtaatgatttttctcgtgaaaatatgaggaagctagaatcatttatagttgacgcatatggtagtcgagaccctgatttaactcaaatattcaacccacaaaaagaaataaaattaaaaccacattttgaattgaacttcaaagttctgaaatttggttcatccgctgagacaatatctgttgctgagttgcctacggtaattcaagaggttaatgcacagctaagtaaattggttttaaattcattaaatcctgagcataagtattttatagcatttgatcagcttgacttagggtttgataataaatctgatgactatattagtcgattgattggtttattacttgcctgtcgagatttaaacttggctgcaaagaatgctaatgctcagtttttagttgcagtttttttaagagatgatatatacaatattttgcgctttgaagacaagaataaaataacagaaaacttcatgtcgctaattgagtgggatacgccaagaactagtaagacattgaagtcgcttatggaaaaaaggtttacgattgttgctaataacagtggtgttactgatacaataggctggggagatatttttaacgagaccagagaaatgccgggacatcaaagtaaatatgatcatatcaaagatagaacctatttgcgtccgcgagatatgataaagtttgccaacagtgctttggcaaaattcaaagaacgtgtaaattcggcatctggtagcgggcttgatgataaagaaaaaatagataatatcgatgttcacaatgccaggtttgactatagtgagtactttttgcgtgagatagatgacgaagttcataagcacttttctgagtatgaaaaatatcttgatgttttaagaactatagggacttggcaatttgataagtcctcatttgaatcagttgttctgcaagtatatccgaaagggaataaaacgccttctgaagcactcgaagagttatatgatttctcttttatcggttattataaggctggtggtagtggttatggtggttcagaatatgtatttaaatatcgtgattcaagagcctcattttcccatgcatcgaatcgatttagaattcaccctgggttaatcgaggttttaggccttaaaaaggtttag

SEQ ID NO: 448527 - DNA, 426 bp, Serratia marcescens
gtggtcaccaccttcccggcggatgtggtgcaggatctgcaagactttatcctgtggcagccggatgcgctggaaaccggggttgaagctgtttatgtgatggtcagtgatccgctggactcggggcgttttacgcgtcagcaactggataaaaagtacaagcacgcgagtgactttggtgttgcggacaccagaaaaaacagagagactctgactcaatatcgcgatgcgctcgaggcccatttgaaggataaggatacggtagagaaagggacttatagaagagaaaaaggggctaaggtgtttttcaactcaagaacaaataatgtcgttgtgcttgataaaaatggggtgtttatatcaggatggcatttaacgccaggaaccccacagtataatggctatataaatacaggagtcttatga

SEQ ID NO: 448528 - DNA, 480 bp, Serratia marcescens
ttgcaggggcgatacgacctgtatgccaacctttatcatcatgaatttgtcggctctcaccattcgctggtgctgaatgtcgccaacggtggtgggcaaggctggtacgaattccgtaatgatggtaacgcctacaccaacggcgcctggcacagcagctccgatgcccgcatgaaaacggacatcacccaaattgccggtgcattggacaagctggccaatattggcggctacacctacctcaaacagggcgtgccggaggccggggtgatcgctcaggaagtggagagcgtattgccgcagtcggtgacccaaaccgaattgaaacttaatgacggcagcgtgctgaaagatgcgcggggcatcaatatcaacggcgtggtggcgttgctggttgaagcgcttaaggaagagcgagcggcccgagaaacgctggaatcgcggttggcagcgttggaaaaagcgattacgtgcgcctga

SEQ ID NO: 448529 - DNA, 1236 bp, Serratia marcescens
atgaataaacatatcgaaagtttgcaaggaacaatcccttttactaaacgcaagttttcaatttcacttaatgggaagtcattagtaataaccggaggaaatggctcaggtaaaactaggctgctaaccctaatccacaagcacatctcattattcatgaacaacccagagcatttatcagaaaagtaccaccttaacaacatcactttattaagagaaaagattaagcaatacccgaaagggacagacacacacaattacctgagatcagaaatagataggtttaaggttttccttgaggaaataaaatccgttaacattgagctatctgacaggaagaagaaaatattactatccaaaatgacaaagtctctgttacgtttttatcctgcagatagaaaatcctctattctagaacccaactcaacacttccattgaacacactgatacaacaagagtatgacaaatctttcgatagtaatgcaggagaacaatttgaaaattatcttgttagctataagacattacaaagtcatttaatagccattaaaaaagatattgctggtgcaactaaaattcaagagtggtttgataaaattgaatctgactttcaaaatttattcgaagataccgatctcagctttgagtttgaaatgaatgaacagagattttacttcaatcaacctgaaaaagagaaatatactcttcaatctctttcagcgggttactctgcagtgatgagtatttactcagatttaataatgaaagttcaatttcaagaaattcccccagaggatttaaggggcatcattttcatagatgaaattgatgcacatcttcatgtaacaatccaaaagaaaatactttcattcttaaaaaacagcttcccttcaattcaatttatagtaacaacacactctccttttgtaatcatgtctgtcgacgatgcaattctttatgatttatcaaagttagattatataaatgatgtatccctttactcttatgaatcggttttagaaggtgtttttgatgagctccccatatcgtcaatcttagaaaaaaacattaaaaaactatccgaactaataaacgataaagaatcatcaattaaagaaatagcaagattagtaaacagactcactcctataaagaacaaacttgacagtgaatcagggtatttcctatctcaaggagagcttgagataaaaaaaagagggctgaaaaatgtttaa

SEQ ID NO: 448530 - DNA, 654 bp, Serratia marcescens
atgtttaaagttactagaacatttccagcacctgagtcgctggccaataaaaaagactataaaggctccgatgtgttaaatatgctcaaagagtgtttccatgagaaatgttatctttgcgaaacaaaagaaccacatgatattaatgttgaacatttcatacctcatggcgaagacgaagaactgaaatttaaatggaataatttatatctagtttgcagccgttgcaacaacattaaactcgcaagcaaaaaggaattactagattgttgcaatgaagatattgacgtgagtactttaatatcaatattaccgccgacaacaccttatgcaaaaaaaatccctatcacagctttgaatgacgatcaaaaagttgttaataccactgatttactcgaaagaatatataatagcgaacactcaataaacaaagaggtaacaggtagttttttacgaagaaaaatctttgatgaaatgagaaaaattagtgaccacatgaataaatatttggagacggatgcactccaagaagaaaaagatattgccttgcgaaagattaagaaacttactgaagctgatgctccatattctgccgtagctaagcatcaagttctaaatgatacactattctcaaagttaatatttgaagaataa

SEQ ID NO: 448531 - DNA, 141 bp, Serratia marcescens
atggcaaaacaggattggggagccattcaaaagctgttcctcgccgaatacgtcaaaaccaaaatctccccgaaagaatggtgtgaggctaacggctacaactacgccacagcacgccggcacataaagatcccttcgtaa

SEQ ID NO: 448532 - DNA, 531 bp, Serratia marcescens
atgaacataaaacattttcacgacgcattcagggatcaagaaaccaacctgcagatgatcgaagcactccgctcaccggacgaggttggttctgttcttagaatgcacttatatttagagcacgtgatagaggcgtgggtagctgcagttaccgataaccctaaaatttttgctagtaaatcaggttctttattcagtttcagtgcaaaattagaaattgcaaaaaactttgatcttccaagcgatctttactcggcaattaaaatgattaataaaacaaggaatgatttctctcataaaataaacaaaaaaattggtgacattgaaataagaaacatagaggacacgttaaaaaaatcgaaatatcacaaagatataccgtcattaaccaccatgagctttactcttgacgggcacaagcaaagctataaagaatgtgacaataaattcaagttttgtactatttgtacttttatcatagtaagtctgaaccatcacacacttacaagagctggcatatctacccagtag

SEQ ID NO: 448533 - DNA, 888 bp, Serratia marcescens
atgactaaaaagaattataaggttgagtttttccaattatcgttaacgccaaatagagaaatcgatagtttcgaaacactctttgacctcttagaaaatgatgatgatactcaaaccgccctgaatcaaggtggatatacgagggaagtctggggattaagaaacaaaagaaatcctcgtgcaatttatggtcagttcaggaaattcagaactacagacataccagagataggaaaagttggggggcaatctcaagagatagagttagatgataacgaaggattgatagaaagaaacttttttgcctactatgtcgaaaatgacatcgttgcttggcacaaaaacagccactcaagcagtattaatcagttcgcaggatttcttagcgccattaccgactgcaaaatatcggctgccccaatattacaagctgatgcaatcgggcggttgatgagtggagatgtgacattgaagaaaattgagttcacacttcctaggccaaccaatccagatttatacccggcagataactacggtcgtggcatgatcgatcttatgaatggggttgatgctgacagtttaaaggtaacaatgggtgtagacctgcgtcgagcagatactgaagggaaaatgagcaatcgattaaaagatacacttcgagccttggttcagtctggagcgacgacagcaagggcttatgtttttgatgaaggtattgaacatcctatagaccttatagctgatcgcgtattctccatacagaaaattgaaactgatgctcatttcccgcccgccataaccatgtataatctgctagatacggcgaaggctgaatgccaggagggaatagatgactactttggtgagatggggcgcgctctcgattag

SEQ ID NO: 448534 - DNA, 495 bp, Serratia marcescens
atgccgccgtggttctgtctggcgatggatctcgctctggtctccggccaacgccgcgaggatctgacacaaatgcgctttagccatatcgttgacggccgcctgcaagtggaacaaggcaaaacgggggctttgctctccctccctcttgatcttgaactgaaatgcatggatctgcggcttggcaccgttatcaaccgatgccgattggtcagcacgacagacttcatgatcagcgccggcatcaggaaaaatagcccagatggttcgatccatcccgacgggctaacgaagaaatttgtcgccgcgcggaaagcatcaggtttggaatttcaggaaagcccgccgacgttccacgagatccgaagcctgtccggccgcctgtacgaaaagcagaacgacaaggcatttgctcaaaagctgctggggcatacaacggaaatgatgacgctgaaatatctcaaaacgagggggaaagagtatgtgatgctgtaa

SEQ ID NO: 448535 - DNA, 1509 bp, Serratia marcescens
atgaatgagttaaattcaataaatatcaataagttacttctagatgttgataatccaagattccctactcctgcagacaaccagcgtgacgctatagcaaaaatgttggagctgcaatatgaccggatatatagacttgccaaagacatcgcattacgtggcctagatccttctgagaatgtgctggtctatagtagtgaggatgaagacggtttctatgttgttgctgaagggaatagacgtgtaacagcattgaaattgttgttgtctccgagcttggcaccaaatgaaagagctagaaaagcatttgaaaaaataaagttaactcaaaaggaagatattaaggtaattaacaattgtgttatttttgatgatgattcttatcagcattgggtaaaccttaagcatacagggcaaaataatggagttggtcgagttgaatggactgccccagaaaaagctcgtcatttagcacgtcttggtaagcaatcttttggtaaccagattttcacatttatagagtctaacccagagcattatccggaaataattgagaaaaagagttctcttaagataactaacataactcgtatttttggcgatgtaactgtaaggaatttctttaatctagataatataaatgggatgctttattgcttccaaccatataacagattcattgagcaattaaacaagatattgatccttatgattgaaaaagaggacaatggtcgctcagcttttactgtgaataggattcggggtaaggaagaacggttgatgttgatgcatgagcagaacattactccgtccgatgttttatttgaaaagccgtggatgcttattgacgaaagtgctaaagttaacaatcaagaagttaaaggcacagatgcggacgctgataaagaaaataatagtggtaatgagaaagaacgtgatgagaattctgattcaaaagtgaatgatgaacctgagtcggataaccactcacaccataatgaaaaagaatcagatggcaataccgagaaagaaaaagattcagagggtgatgataagacgacaagaccacctaaacgtgatagaaataatttaatcccctcatatgttaagttaaattttaaaaagcataagaaatgctctcgtattttttcggagctaaaatcacatttgacttatgatactacccctaatgctatttctatattacttcgcgttttcattgatctttctgttacttcttttatcgaagataataaaattgaacacaaggattcgagtcggaaccccggtttacatgataaggtgattctttgtgctcactatttaagagataagaaaaaaataactggctctcaaagtacagcagtgattgcgttttctagccaattaacaaaagctaatggttcgttgcaccagtatgtgcataacccacatatgatatcatctaaagaggctattaatgatgagtgggatgcttttgaaacacttttgatgaaagtttggagttaa

SEQ ID NO: 448536 - DNA, 855 bp, Serratia marcescens
atgaagttttacacgccattaagataccccggtggtaaaggtaagctatcttactttatcaaggatgttttagagattaacggtctgaacgatggcgtgtatgttgaaccttatgccggtggtgcaggaattgcgcttgagcttctgcttcaagaatatgtaagaaagatttatataaatgatatagattatgctatatattgcttttggcactctgtaattaatgactctgaaaatctatgtcgtttaatttttgatgcgaaagtagatattgacgcttggatgaagcataaactggttcttgcaaattcgagtgaatatagtccggtggaagtcggactttcggcattctttttaaatcggacgaatcgttctgggattttgaaggcaggcgtgattggtggaaagtctcagggtggtaaatggcggatggatgtccgctttaataaattggacttggttggaagaattcaagccatcgcagaatatggctcaagaataaatatatttaatctggatacattggaatttttagatgaaatctcgttcttggatgaacggaagacattattatatcttgatcctccgtactatatgaaaggccaagggttgtatcgtaatttttataatcatgatgatcatgtgatggttatggagaaacttagagaatccaaatttccatattggttagtctcttatgataacgcacttgaaattaaagatatttataaagatttcagtaagatagagtattccctgcaatataccgctcagcaaaaaaaagtaggcgaggaggttatgatattctctcctcgcattcttgttcctgactccttaaaaggggttgcagcataa

SEQ ID NO: 448537 - DNA, 2298 bp, Serratia marcescens
atgacactctatatccgtctcgaaaaacttcgtttcttggtaaccgaaatgcggctagcgttacgtttggcacagtttgcgccaacagacgccgacgcacgcatgattgcccgacacattctaatccgcgcggtcgatttcatctcacattcccgccagctacgtaagccgttaaagcaagcagggttcaatacagttgctttccacgatcgcaaggaatgctacgctgctgaattcaaagagtccttccagaaggtccgagaccggctgagcgcccatgttcaagatattaaactaggagaggtgatagaactttggaatggcgtcgatgcctcgaactcggagttttttgtagaggacgcaaccgagatttactgctcgctacaatctttgagcattaccgattttcctacgctgacagacttccctgagcttggtgatccggcattcgaggttgccttacaagcctatcgcgcctcaggctgcaaggtgcaaaccgtagagatgggagccgatcctctggcgatgacacgacctaattctacagcccttatcaatactacgccgatccatgctcgtgcgggacatcttgctctcatccaacgttggatggtagcccaggccaagttacttcagagattcggagcgtttccgaatgttgtgcgcctcttgaaggggcggatgattaccgatctggtcagcgcttgcgattgtcttattacacgcgacgttagctttgcggctccgcaacgaatggatggtctcgacgctctccttgcaaaaaaagtttcgaaaaatgccatcgagcacttcaaaacgatcttccgggtggaagaagaaattgcaccgtatcgagagatcagaaacaaagttagcagtcaccttgacggaaacgttaccgtcacgctcgcaaatctcctaaagcgtcttgacgatattgatttcgaagctggactggaaatatacgacaagctgagacaagtctttgaaaaggtctgtcgtgacgtattgttcttgcgttcttatttagccgatggacaaattatcaacggtgtactcgggtctggaaaagacaccaacaccgttccatttagtgacagtgagcaacctggaagggttgttcctcaaccagagcgaatggatgattccgacgagtcgtattctgccaagttggaagaatggttgaccggtgagtcaggtgcacgtgagcgtgctcgctcggctttctggcaagccttcctttattcccctgtcgttgaagaatatcagttagtcgagtcgcttcctggaggcgggatgcggtacgagatgcggcaattgcgccaagctcattgcttcattttggggaaactcgaatctgagacagagtcgagtcgaatacgcggcattttggaactgactcatcagtgctccaatggagctccggacgcgctgaccgagattctgatgcgtttcgctcgcaatccgagagcgagtccttatatgtcagctattgcgctctgtcttggtgatcttgcccattggagcaatcttccggtgcgtgttcatctgatggtaggaatgagtgtggcgtcatcgcttgccgtgtatacgaggatggccttgctgcggattttcgttcgctcggaggggatagctaggattaatcgaaaactgccaacggaagccttttccgacgtacttgggagcctaatttttgggcttgaaccaagggacaagctaataacgaaaattttcttggcaagtcagttttgcgatcagcagatagcaagtgtcatgaagccctttgaaacggactatgtcgatctgcaaactgacattgttgcgctagtccgcagcctgactccagaagaagagaccgcacgcatctccgagatggtgcgtcgcctagtcgatactcatgattatgttggtatttgcctctatctgtacgatgaactgaagaacggcgacttgaataccctagctagagacttggtcatgatgacctgcgatgggatcgttcaggttgcttatcatgatcaatcacgtaggcatctgtgtggttgcttcttgcgtctcgagcgctacaaggaggctcttagcctggccgatagccttgctcgttcaaatcctgacaatcccaatttccaaatacttctggcacaagtgatgacctacttgccagagtgccaagatgcagctaggagtctgtccggtgacatcaagcgccgatacagactgaacgatattcaacttgcagcgatcgaagctgtcagctcagacagcaacggtaacgcggaaaatgcaacccaatag

SEQ ID NO: 448538 - DNA, 582 bp, Serratia marcescens
atgaaagcgccagtctatattggcttgttggatagcgacctgtttcattctgaggggttgaaattattcttaattgagtatttcaaagaaaaaaataagtccgcagtgtttgtcaataaggacaggctagagatcgctgatgttatattttatgagtcgagtaactacatggcctactttattggtaaggctttacggtcatcaaccaagaataccattcttttttcactgggtgagggaaaaaacagccttgcgacatggcgcttggcacgcctccagcaggcattgttaaaaaaagaaagtttacaacagctgcgtttctacctggataccttatggcgtgagcgagagaattttggttatcagcgtcgggttaactcgcctgaagaagatttgacctaccgtcagcaacaaatcatgcgcctgttggccaaaggtctcacgcccgcggatatttcagtgcgtctaaatatcagcgttaaaaccgtcagttcccaccgtggtgccgtgatgaaaaagttcggttttaaccgcaaagttgaactctataactggctgattttgcgtggcaatgagctgtaa

SEQ ID NO: 448539 - DNA, 813 bp, Serratia marcescens
atgaaagttttctcccttttttttgtttctgctttttattctttggcggcattttctgctccctatgaaataaaggttgtgacgacgcctgggtacgctgatatggtgagtgtagaggcatgggatattaatgatacaagtagtaaccccatgaatgtttggtccggcacgataaatccgggggttaaagatgatgatatttactttatatataaatctgaaggtgctggtcaaagcggtctggatattaaagcgtttactgttccaggggccagagacgcaaaaaccatgggggagctaggtaagttgtttattaaggccgggtttatcgggaagagatttgatggcaaaagaaattcgggtgtatctggaaaatcttgctggcgtctggggcatcttaatagcggttgggggtctggaagagcatacccctttgatattacttgcacttatggagagtatccgccagccgtatgccggatcgaccagcctgtcttggagataaatcatggcacattgaccaccagggaggttaacggcaactcggcctatgctgatttttatgttacgtgctcttccgcgatgtctgtttatgttatttcacctacacaaataaactcggttgttttatctcaggccagtggattacgcagtgatatcactatcaatgataggaagttgggggatggcgtcaggatttccgcgtcgacatcaccgacccggttgaggattacctcaacattaaacggatttacctcccaacttgagggggaattctctgggagtttcactattattattgcaccagtgtaa

SEQ ID NO: 448540 - DNA, 534 bp, Serratia marcescens
atgaaaaagattattggcacatacttgctggccacggttttagtgttgaacgctggcgcggccttggcggcggcgaataacctgcgcctgcatggcgcgctggtggcggagccgtgcgtgatcgcgccgggcgatgaggaaatcgcactggatttcggcaccatcatcgacaaatacctgtacctcaatacccgcacgctggggcagacgtttgaaattcacctgacggaatgcgatgtcagcctggggaaaacggtggcgataacgttgctgggaacggaaagtctggcgctgcccggcctgctggcgattaacgccgacagccaggcgaaggggattgctatcgggctggagacgccggaagggaaagcgctgccgatgaataaaaccagcgataaatacagtttgcgggccggcggcaatagcgtcgcgttgcaggcctatgtgcgcggcgaaccgcaggcgatcgagagaaaaacgattgggcgcggggcgtttggtgcggtggcgacgtttagtttggcgtatgaataa

SEQ ID NO: 448541 - DNA, 492 bp, Serratia marcescens
atgaataaaacgatgcgagccctgttgttgacaggcggccttatagggccgctgaataccgcgctagcggcggagaatatgactttccgcggcacactgcttgcgccgccgccgtgccgcattaatgacggcaaccaggttgatgtggacttcggtcagcgcgtcggcattaacaaggtggacggggttaactaccgccaggtgctgaactaccaaattgcctgcgacagagcgaccaacggcaattgggcgctaaccctaagtctgaagggcggcgtcagcggcttcgataaacaggcgttggcgaccaacaaaagcgatttgggcatccgcatataccgggacgatgagcctttcacgccgggcagcacgttgaacatcaccttggataacccaccgcagctggaggcggtgccggtacaaaaacaaggagtcacgctgagcgagggggcattcgaggcctgggcgacgttgcaggccgattatcagtag

SEQ ID NO: 448542 - DNA, 504 bp, Serratia marcescens
atggatgaaacgataacgagagtaaggaaccgacagcgaatcggctgcctgagcgcattgttgattaccgtgccgctgatgctagaggcggcgaccacggtgaccgtaagagttacggtggtggcgccgccgccctgcgtgattaacggcgaccggccgatcgaggtgaattttggcgaagtcatgaccactcgggtagacggcaaaaattatcggacggcggtgggttacaccctgtcctgcagcggccaaagtaaaaatgccatgaagttacaggtgcagggcaccggtgcggcctttgactcgacggcattgaaaaccaataaaacagcgctgggcatccaattacagcaaggcagcagcaagctggcgctcaatagctggctgaatttcacctacccgaatgcaccggaactatgggcggtgccgattaaacagagcggtactacgctcagcggcggtgagtttaccgcgggcgccacgctgaaggtggcttaccagtaa

SEQ ID NO: 448543 - DNA, 651 bp, Serratia marcescens
atggcaaaggagctgatggcggaacgcgcttactggataagcgagctgcgatattacgccgttctggcggcgttggccttgatggcgccattgagcctgaccgcgctgctgtggctgttgccaccggcgcaggcggcggataactggcaggtagagggtgccaacggcgtgctgtatgtgcagggcgcgctgaccgagagcgcctgtcggctggagatggacagcatgcgccaggacatcgcgttgggtgaagtcggcaccgggcgattgaagcagacaggcgatcgcggcacgccggtgcgctttgaactgcggctgacggattgcctgcgcagcccggcgggcagccgtgacctgcgcaccggcggggtggtctgggccaatgaccagccggcggtgacggtgagtttccgggcgccgcgtgatgcgaataacccgcagctggtgcaggcgcgcggcgtatccggcctggggctgcggctaaaggatgcccacgggcgcgatgtacggctgggcgaaagaggtgcgccgctgctgttaacgccggggcggaacagcctgagctacaccatcacgccggaacgcacggcggccggtttgctggcgggcagctaccaggcggtgatggacttttatctgagctatgactga

SEQ ID NO: 448544 - DNA, 540 bp, Serratia marcescens
atggttaaaaagctgctgccatatctcagcggggttgttaatgctgagtatggctcctgtaaacctcgtctatggctacgcttgtttaatggagttgaccacgtattagcttctaccgacgatggcaatttaccattggatccccttccccctgtcaacgtattttgccgggtcgatggtttaagtaacagtgagattgattttggcgttgtcaaccaggaatctaaaaccgccagcattacggcatcgttggtttgcgatggtgattacacctcacaagcgacggcgcgcttaatatttaccgatgccaatcgcagcggcggcaataccatcgtggtgagcaatccacaaaataaacagcagctcaaagtgaaactgtccgttgatgcaccgggcgccagcaacaaacgagatgtgaccgtcaaggtcggttataagggcagcgttgagctgtttgcctctctcgatgagtcggaactgaaaaaagaaacctcgggcgactttaccggcagtgcagtgattatttttaatgttatctaa

SEQ ID NO: 448545 - DNA, 540 bp, Serratia marcescens
atgtggattaaaatcaggctatttccgctggcggcttgcctatttatcttcactgctttcgcacaggcaggcagcgctattcaaggctggggcagggtaaatatgcaaggcgctattatcgacaccgcctgcgccattgccgtcgagagccgctatcagaccgtggatatggatatcgtgccgatagcggacattattcgcgacgggcaaagccaaataaaaactttcgccatcgagctggttaattgcacgctggaacgcgccaataataaattgccagactggaaacagtttcaggtgacctttgacggcgatgccgaggaggggttatttggcgtgcgcggcgaggcgtcgggcattgcgctgcaaatcaccgatgccgccggcaatatcgccacgccgggccaccctctgccgcgcggtgacattattcccggcgatatgcggctgaattacgccctgaaattagtcgccaataatcatgcgccgaaggccggcgattatttcacggccgtccgtttcaagctggattatttctga

SEQ ID NO: 448546 - DNA, 552 bp, Serratia marcescens
atgaaactgaacaacatcatgatggcggcagcgcttgcctttggtctgtcttctactgcgtttgcggccgaccagggtcacggtaaagtgactttcaccggcgctattatcgatgccccgtgctctattaaccctgagtctatcgatcagaccgttgagctgggccagatctccaaagtggcgctgctgaacggcggtaaatctacgccgcgcaacttcgctatcgatctggaaaattgcacctttgaaaatgatgcggtcactggtaaccctctgaaaaacaaggttacactgacctttaccggcatggaatccaaagccaataacggcctgctgggtattaccggtaccgcgcagggcgccagcgtagccattaccgacggttccggccaggtgatcaagctgggcaaggcaaccaaggcgcaggagctgcaaaatggctctaactccctgaatttcgcggcctacctgcagggtgatgtggcttctggtgcagtactgactgaaggtgagttccagtcagtggccgactttaccctggcgtataactaa

SEQ ID NO: 448547 - DNA, 489 bp, Serratia marcescens
atgttttcaaaaaataaaaaaacaataaaaggggtgtttgcatcactgatgattcttggcgttgtctttatattttttggtatctacctgcagttttttgctccggtcatgccggaatgcaatgcggtgatccgcaccgattatcatgatgaaaaacattcgttatccagagtgttgtttgtcagtattgtcaatataaatgcaagggagagcgcatttattatcaacggcagcgtgacctataataatgaacgttttaccatagcgcgcaccattaccatgacttataccgcgaatgaagggcgcttcttgatgcgcccgacaaacatcgttcgacgctctaatgacgatagtcacaataataaagaagtcgacaagctgttcccggtggtggggaaggacatcttgtttacggtcgagaagatcaatgatcagcaatacatctttgccgacaatcgttcccccaattttatttgcaacaagcgttga

SEQ ID NO: 448548 - DNA, 651 bp, Serratia marcescens
atgacaggcaaggttatccctttcaatccattagataagcaaaatctaggcgcaagcgtagccgaggcattactcagcaaaaacgttcattctcttaaagaattaacgacatttgagggagcaggcatctacgcaatctactacacaggcgaccatcctgcttatgagatgttaaccaacctaaatagcgataataaatttttattaccgatttatgttggaaaggcagtaccaccaggagctcggatggggctgacaaaccctgacaaagttggcaacgtgctttttaaaagattaagagagcacacagaaaccctagtcgctgcatcaaatttaagcattgatgattttttctgtagattcctcgttgttgacgatatctggataccacttggtgaatcactagtaatttctaggtacaaaccaatctggaattcattgattgacggatttggaaatcaccacccaggaaaaaatcgtatgacaggattgcgtccaagatgggatcaattgcatccaggtagagactggggtaaccaactaactccacgttcagaaacagaggatgagttagtcagagatgcacagcaataccttcagaatctgcctctatgtttagctaaaactttcatcgaagccgacggtgcttaa

SEQ ID NO: 448549 - DNA, 1212 bp, Serratia marcescens
atgaaatcagtagagctttttgctggtgctggcggactcgcgatgggttgtaaaatcgcgggtttcgagcatcttgcagtaatcgaatgggacaaatgggcctgcgataccgttcgtgaaaatcaaaaaaatggatatccacttcttgtcgactggaatcttaccgaaggtgatgtccgcaatttcgattggtcaacaatcccccaggggatagacctgttagccggtgggccgccatgtcagccattttcaatcggcggcaagcataaggccaatgctgatactcgggatatgtttccggctaccgcagaagcgatccgtaggattcgacctaaagcatttatcgttgaaaatgttaaggggctcacacgagcaacgttttcaacgtatttccaatatattcaacttcagctagagttccccgatgtgtcagcacgtaacggtgaagattggagtgagcatctcaaacgattacaagaagaaaaaataagcggaaaaacaaaaggaaacggtataacttacaatgtgctagccacattaataaatgcggccgactatggcattccgcaaaaacgcgagcgcgtttttatcgtcggcttccgtgatgacctacaaattgaatggtctttccctaagccaacacatagttacgatgccctgctttatgatcaatgggtcacgggaaaatattgggaacgacacaaccttaaaatgcccgcaattcctgaaaaattagtaactcgtgtggcaaaaattcgtaaaatgcccccagatacattaccttggaaaacagtccgagatgcaatcgctggtttacctgagcctgagagtaaagctgctagtaaaataaaaaatcacacttaccagcctggtgcaaaagtatacccaggacatacaggtagcccattagacctacctgcaaagactttgaaagcaggcgatcacggtgtgccaggtggtgaaaacatgttagtcagagaagatggttcagtacgctattttaccattagagaaagtgctcgaatccaaacattccctgatggtttccgttttcatggaagttggacagaaactatgcgccaattgggtaacgcagtaccggtgcatctggcgtattgcgtggctagtagtgttgccgagaaacttttagcctccgaaatcgaaaatatcatgctacaaaatattaaaaaagaacaaaaggcgtccgcatga

SEQ ID NO: 448550 - DNA, 765 bp, Serratia marcescens
atggctgctgcaaaactttggactagggaagaattactgatcgctttcactctgtatagtcagattccgttcggcaagcttcactcaaaaaatcccgaaataatacactatgcaaaattgatcggacgcacgccctcggcactcgcgatgaaactggttaatctcgcaagcttggatccgtacatcatcgaatctggccgaagtggtttgaaaggagcttccaatgccgatcgcgagctgtggaaagaaatgagtcaagatatggatttattcaatcagcaatgccaaacggcaatggaacgcctggaaaaaccaacaacaactgagtttagtgaagagccaaaagatttcagtggcagagataagttctctacagtcaaaacacgtgtagaccaaaacctgttccgcaaaaatgtgttggaagcttacgaatatcgctgctgcatcactggtctagaagaaccgtcattgctagtcgctagccatatactaccttggagccactcgaccgaacaacgccttaaccctagtaacggattgtgcctgtccagcctacatgataaggcttttgaccgtgggctcattacgttcaacgaagattttgaggtggttttatcaccacagcttaagaagttgaaaagcggtgtttatatggataattttgagaaatatgaagggacgaagttacgttctccgctcagctatccaccagaccgtaattatattgcttatcatcgagatcacattttcataacaaatcaataa

SEQ ID NO: 448551 - DNA, 318 bp, Serratia marcescens
atgaaagggcggcgacaggttgaatcggtgcaggcgttagccttgatattgcatggtgtgcgggtgggcgtgctggcgcactacagcggcggcagaaacatcctgacgtttgatccgcactacctcgctttgccggagcctgttcgtcccctgtttacgctaaggcagaaggcgcacgcgggatatcttgagcaagttttacagtcatcgcagcgccttccgcccgtcttatccaatttattgcccgaaggcgcactgcgcagttggttggcccagtcgttgaaaacccatgtgaatgaggagtttcctttaatttaa

SEQ ID NO: 448552 - DNA, 1470 bp, Serratia marcescens
  misc_feature (1447)..(1456): n is a, c, g, or t
atggctgagataaaatacgaaaaacagattgccagcatttattatgcaatcactcggaaaagcccacctgaaaaagatttaaaatcacttagtgaaaatttacagaaaaatggacctgcgggtttagaggatttaatcacaaggctaatgaagacgcctgaagcaaaagaaatatatggtggatatcataataactttgagatcatgtttttcttttttaacaccattcacggtagaaccatgggagaaatagagtttaagctctggtcaaacgagtcatatatcaaccctaatctcaataataatctcttcaaaattactaaggaacttgtaactaatacggcaccatggcctcaattgaacgacgactggagtataaataatagttatgaatataattacccggtacaacgtcagatagatagggagcattttgtagacaacggaaatcaggctctttatcctggctctccctccccatcatcaacgaatgaaactgatagcacagctgatattcaaggcgtttttcatatcttaggggcaggaatcacccgtgatgtgattgagtattgggctccattaatcaataaccatgaaagaacattacttcaagccacagaaaaatttattaatgatcgtccatatctaagtaaagtaactaataagacatttatacaaaagttattcgagaatggttatgagcgttcagcatctgataatgaattgaacttttatgtcaatctattatcaacgggaatatctcgtggagagattgcaataaaattaatgaatacattaaaagaaagtaacaatgaacaagatcacgttgcaagggaacatttaaaaggcgcttcatatgtttataaagcaggagaactgcctcctttagagtatcaggagtttatcgccgaactttatttagctggcgcgggaagaaatctaaactctgaagcactatttggctggagccaaaaaatggcctcaggtaccagctacgacaaaatggtagatattttactcaatacttctgagttcactcgcatatcaacatatttagaaattaccgcatacgcgcaaaaagtgtataattttgtttatgggcatgatgcagatagcgccacaatacagcaacttgttaccctatccgataaaggtgagataattaaaagtgtaataaacagcgcactaaatacaaccgcgggcacaacaaatgaatttcatgagaagttccaattcatatttagagttgcagacagcctgaattataaaacctatgcaacattgacaaacaattcagataactatctttctagtagtgttaattctgggttgctacataatatcagtaaaatagaaatgtcaaaattagaaaaaatagatatcaatcttgcaacaaaaagcaatattaaccttaatcaggcagcaaacattaaacaaataagcattnnnnnnnnnnaaaccaacctgtga

SEQ ID NO: 448553 - DNA, 180 bp, Serratia marcescens
atgagaaacgatgagaaattagcgatccagagagctcgtgattctgcgatgctgtctgctaagagaggcatcagtttccaagaagttactatcacgaaagaacatgcaatgcatgtatctaggattttttacgagtctcgtaacgataaggagaattatgagttcgtctgtgcctcctga

SEQ ID NO: 448554 - DNA, 777 bp, Serratia marcescens
atgagtaattctgaaaaattttgggacattggacctcattccccgttgcctgttgaaaaaacatttcattcgtttgtccgaaagtatggggggagggttgtttctgaaatattacctggaaacccatcatttgaaaatgccgattattcattcaaaaataataatataatcggggagttaaaagaaatcgagactgaattccttaaccaagaaagtgcaaaaataaaattttccgaaatgatggggagattattaaatgaacgcccaaattggaaaccttctcttatgggagggaaagatgactatccagattggtttaagattgaatttataagactggctcggccggggattaccagaattttaaagaaagcaaataagcaaattaaagaaacaaaaaaacattttcatgtccctaatgcaaacggggtattgttttttgtcaatgatggttttactggtatttcaccttttttagttcaagccttagcttgtgatgcattaactcattcctattcctcaatagattgttttttatacatgaccatcaatcgctatgtagaactcgatggttcaaatgaacctcaattaatttgggcaccaagctacagtgatcgagctgatgattcttttgtcgattttatagataatctgggacgtaattggtttgatttcttggaggaaaaaataggaggctttacgtctcgacacgaagaaagtgacagaagtatcctattaaattcaaaagcaataatcatcccacctcaccaaaactga

SEQ ID NO: 448555 - DNA, 693 bp, Serratia marcescens
atgtcagaactcggaagggaaccatctgttacaactcgcttcacaaatcagctcaaacgagcatgcgaagaaaatgaattaacagatataagttttgaattggcagggcaggataacagagccaatgcggatgcaatattcagtgttttagataactttctattaattgaatttaaatcttacgaaaaaggaattaagagtgagaaagataaagatagagtttataacctatgtcacaagcttttagaaaatgaaaaaatgaccaactctcatagaaattgtcattttattatgtggggcgtaagcgaggagaaaagattacaaacaaggtacactatttatcaagatagtgtttgtagaaagagcattcttgtagaatcgaatttattagatgaacctaaaaaaccaacggtttttgcgggggaagaccttgccactgaaatctctaaatcagcagtgggactgggtcttgatgaatttcttatttatttgaaatggctattcagttcagaaagaacttcagaagaaaaatacgacgggaatatatcattaattgcaacatcatcatcaagttatattgatgggttagagtttgattcttttaatgactttgagtcttgggcaaagccgacagtaatgtgcttgctctctgaaaatcgcagccgtaagaataaaaacagacctagactttaa

SEQ ID NO: 448556 - DNA, 1542 bp, Serratia marcescens
atgtcgccccgcttccggccctgggttatctcgctgtttatcctgttggcctggggcagcggctggctgatgctgtggacgctcggtttctacctgacccacaacggcaatcaggcggcgctgtttctgcctcacggcgtctatctcgcgctgctgatcctgctggcgcgccgctattggcccgccctgataataccgccggtgctgctgctgttctggctgcacggcgaacgcctgctgagcggctacagcctgctggccgcgccgttcatcaccctgctcccggccgcgctcgcacagcgattctggcgccgttttccactctactggcagcggctgacgctgctgctggccgcagtgaccgccgcctcgctgctcaataccgccctgcttgcgcctttcgcgcacagcccggcgatgctgctcggcctggcgtcatttaccggcggcgtcttgctgaccccgttcgtctacctgatttttgaatttctgcgccagcagcaccgttaccatctgctggggctggacaccagcaacccgccgctgcgcgcgtccttaatcatctggtgcagcctgtttttcgttatcggcatcggcacccagatggtgctgtcgccggaaatcgaacgcctgctgctgatcgtggtgtttttgccgaacgtggtgatggcgtggaaattcggctggcagggcggcgtgctgtccggcctgctcggcagcatgatgatcaccctcgcgcggcaggtcggcgtggggttcggcaatctggtcgagctggaaatctttctggcgacgcaggcgctgctcggcatcggtctgggcatcgccatcagccgtcagcagcacctggcgcaaaacctgcaccactatcgccgacggctggaagaagagctggcggcgcggcgggcgttgaccgaaaaactgatccacaccgaagaagacacgcgaaagaacctggcgcgcgagctgcacgatgaaatcggccagaacatcaccgcgattcaaattcagtcgcagctggtcaagcgggcgcgcgatccggcgcaaacccaggccgccgcgaaccagatagccgatctcgcccggcgcatacatcactccacgcgccagctgctgcgccagctgcgcccgcccgcgctggacgagctggcgttcaaagacgcgcttcaccacctgctgaatgaattcgccttcagcgaacggggcatccgttgccgtttcgactaccggctcatcgacacgcccgccggcgagacggtgcgcttcaccctctaccggctgctgcaagagctgctcaacaacgtgtgcaaacacgccgaagccagcgaagtcgccatcgttttgtatcaacagggggcacttttgcacctcgaggtgcgggacaacggcatcggcatccgggcggacaaggcacccggcctcggcattcagggaatgcgcgaacgggtcagcgcgctcggcggcgaactgacgctggacacgcagcgcggcacgcgggtaattgttaacctgcccacaaatttgcaacaaaccgccgactaa

SEQ ID NO: 448557 - DNA, 1377 bp, Serratia marcescens
atgcacgaaaggcaagagaagaatgcaatgttcatttcgttcgatgccgtctcggtctcggggatcacggtggaagcaatgaagattgccaaacgactgcaagcctgtggatttcgctcttatcttgatctgggatacgacatcaagattgataagggaaactttaataaaccctatcagcatgagcatgacatctaccgcgatgtctttacgctggtccgcctggacgacatcacgtcgattccagattaccaccccgcctttctcgactacgcacacgcggcgttgatcggccagaaaacgcccattgacgagcaagaaaaagccgctttgttgcataccatcgcgttgacggcgcggcagctggcggatcgcctcgtcgcccaatgggaagcgctcgcagtcagccatgtggtagtggaaaacggcacgctgccggaaaacatcatctataccaaagcgctgtatctggcgatcgaagattatggccgacgttatcgactgacgcgtttcgtcatctggcgcgatcatgacctgatgtggaacagcgaaaaaaaggtgctcaaatacggcccgccaccttattctcacgccatcaaacctatcccttcaaaatacattacctatgtcacgctcaatcacgatctgaagcaaaagctggaggcctggtgcaatcatgatgtccatgtcgaggtaaagaaaaatacctatgacttctcggacagtcacgaaagaacgaatgtcagaaagcagatgaatattcgcgataatgatcttctcattgccagaaccacccgcatcatccctcagaaaagattggaccgcgatattatgctgatcagccggcttaatgatttatttatccgcgaccacaacactcgacgcgcctatttggcgatcgccggcaatgaatatgaaaacccgtcatgttatctgcaactcgccaaattggcgcaggaactgaatgttctcccctatgtcaaattcgtcggcatgcttccccatgtcgatatgcgctcggaaaacgacgcgttttgcatagaggacctctatcactcttgcgacctggtctcttttctcacctcgtatgattatgatagctatggcaatcctatcggtgaagcgatcagttgccgccgttgctatatcaccactcgctacgaatattatcacgaagtctacggccggcatgggtttgaagcgcccgtcatgccgatctccgagttacaggatgggccgccgaacgacgaattcatccaggaagtctaccggttcattaataacaaggagcagatgaagcgcgtggcggaaaagaattacgcgctgggcaagcgaattttatccaacaacgtcatggagttcttaaatatcagctaa

SEQ ID NO: 448558 - DNA, 294 bp, Serratia marcescens
atgacgacgatccggtcgccgccttttattcccgcgtcacgccgggccacctcgatttctcccgcatgcagcgcggcggattctgcggcgggctgttcgcggtatttggacggcgccaaggggctttaccccgatatcctcgtgctgctggaaaatcgtctgcgccccggcgcgctgatcgtcgccgacaacgccgattacagcccggaatatctggcgcgcgtgcgttctccggcgtcgggttatctctccacgccgttcgcggatgacgtcgagctgtcgatacgcctttaa

SEQ ID NO: 448559 - DNA, 1503 bp, Serratia marcescens
atgaatagtactaagtttattaataaaggtaagggttcaaacgactctgaaaagtatttggcacatttatgtgaaaaaacttttctaagtttatggagctatcctaatgtttatacagatgaagggaagaagagcgagttaggtgatggcaaagaactttgtgaccttctagttgtttttggtaatcatgtaattatattctcagataaagatatttcttttaaggatactggtgatattaatgttgattggggtcggtgggtaaagaaagccgtcataaaatctgcagtacagttatatggtgctgagtcatcgctgaaagaaagacctgaaagaatttttttagatgctaagtgccatgttccttttcctatgaaaatacccgagggggaaaatttaaaaatacatagagttgcggtggcaaaaaatgcatctaaaaggtttgtggaatactcgggtggttctggaagtctaattatatgccctagtatatcgggcaatgagcatctaaagaatccatttatggttgggatgccagttgctggaaaaccatttgttcatgtttttgatgatgtagctcttgatgtaatcctctcggaactagacacaatttctgacctaatagactacctagataaaaaagagcaattcataaactctggggggttgttaacagcggcaggggaggaagatctacttgcatggtactatttcagtagtaaagacaataaggacccaggattttatatagaggaaggtgtttcagcaacaattatggagggggcatataaatcacttgttagtctacctcagtatagaagagggaaggagttaaatagagtttcttacttctgggattcttgtattgagaacttttcgcatcatgttatctccgggtcacttatatatgatgaaaaacattcaatagatgatattacgcttggtctaaggattatggcatctgaaaggcgggtgtcccgaagaataatttcagaaagtgtgcttcaaaaagttaccatgacccctaaagataggcgagctgttagagtattaatatcgccaactaatagaactattggatatgtttggctggttgagccgattcctaaacttgcatcgtcttacgatgactataggaaatacaggcaggaattgctttatatatactgtacttcagcaaagttactttatccagatatgaagtatatagtcggaatagtcactgagccacaagggggaggtggtggtgaggatatggtttatatagatactactgattggtctgatgctgattacaagcgagcggaaagagacagagatgagtttaaaatattatccccagataatgtgaaaatatttgaagggagagattatcaatttcctgtgcttcctggagattatccggaaaagataccttctaaaaaattggaaattgaaaaccggaagaaaaaaataaaaaaagcacaacgattagcaagacggaaaacgagatcgcgaaaatga

SEQ ID NO: 448560 - DNA, 822 bp, Serratia marcescens
atgaccctcggcatgttcgtggcgttcggcgcctttcgggggcagttctccgaccgtatcgggtcgctgacggagtttttgctgcaactgcgcatgatgagcctgcataacgagcgcattgccgatatcgctctgcatccgcgggaggcgcgtaaacccgatcacccttacacggcgggcctgcaacctttgggattgacgacccatgccctgagctatcgttacgacagccagtcaccggctatctttgatggcctggacatcagcgttgcgccgggcgaaagcgtggccatcgtgggcccgtccggggcaggcaagaccacgctgatgaaggtgctgtgcggactgtttaccccggattcagggcgggttgaggtgaacggcgtcgatatccgccagctcggcatcaacaactaccacaaaatgattgcctgtgtgatgcaggacgacaaactgttctccggctcgatccgggaaaatatttgcgggtttgcggacgaggtggacgatgcctggatgcaaacctgtgcccgtgccagctatctgcatgacgtgattttacgcatgcctatgggatatgaaacactgattggcgagttgggggaaggattgtccggcgggcaaaaacaacggctattcatagcccgggcaatctacaaaaaaccggctattttgtttctggatgaggccaccagcgcgctggataaggagagcgaagctgtggtgaatcaggccatcaagagactcaatatcactaagctgatcattgcccaccgtgaaacgaccattgcgtcggcagatcgggttatacatttgggataa

SEQ ID NO: 448561 - DNA, 870 bp, Serratia marcescens
ttgctgcaggagcagcgcgacgacggcagccgccgcagctggagctacgatccggccagcccgtggagcccgctggcggcgctggagcaggcgggcgacagccgctcggcggatatttactggtatcacaccgatctgaacagcgcgccgctggaagtgaccgacgcggcgggcaacctgtgctggtccgggcaatacgacaccttcggcaagctgcagggccagacggtggccggcgcggcgaagcgccagggcgcgcaatatcagcagccactgcgctacgccgggcaatatcaggacgacgaaagcggcctgcactacaacctattccgctactacgaacccgaggtggggcgtttcaccacgcaggatccgatagggctgcgcggcgggttgaacctttatagatatgctccaaatcctttgggatggatagatcctctaggacttagtggcttaaatagccttcagcaacaaattgatgagattctattggaacatcctcctgctatacagaagatagatccaaacgcaaccgttggatatagaggtagtgctgcaagtggaataagtaagtcccatgatcctgcgattgctagacctattaacatgaatgatttcgatgttgatggatttattaagtcggattacttagctagttcacctgagtttaggaacagacgccgggacgcatctaagcttggggggatgaaatcaatagaggagtctatcgattcgaagttaaggcagaaattcccagggttaagaaatgaaccatttgggtttagggtgttctacacccatgagttagatgatctggctagaaaaggcgacgtccaaagaaggttagggcgttccggatgttcatga

SEQ ID NO: 448562 - DNA, 810 bp, Serratia marcescens
atgtgtaatttgacccgttttttcgtctccacgccactagcactttacctactatggatccatcctgtccaatgcgctggtatcgtgtacgtggatgcggtataccaccccggtgccgagcgaaacgtggagttcaacaactattcatgggatggcacgtttatgactgcacaacctggaaccgagtacgagaaatactttgagaatgtagatgtctccgggcgtagtgatgtgctcagtatagcatactataaggagcatgatgaatactggctcaatgaccaaactgccagcgcacgtgtgtggatggcgcttgccccaggacacaacacgcccagactcatcgattttcctgagggcaagccgccgatggagttcgaaatgaccctgcgcgggtggtcggcacccccgaaaggcgggaactatcgcgtgttagtgcacgtacgaaaatggtctgggctgtccgttcctaaacggtgcagcgtgagttccactgcgatcgacctcggggaggcggctaacgacgccgtcgtatcatctactggccctctctctatcaagtgcaatgacaccgtggattaccgtttgaccgtacgagccgcggagggtggagatctcataacctattcgtccggcgggaagattcgcatgagtatcgatggatcggttgggccgagtccgaacgtcacaacaggccgcgctgaaaagaatatacccataccgattaacgtccgtgcgacgacggtgcctggcaccgccctccccggtaaatataccgcgtccgcagtggcaacagtcgaaatcttatga

SEQ ID NO: 448563 - DNA, 477 bp, Serratia marcescens
atggcgcgctatggctgcatttttctgttaatggccgtcagtggccctgcgacggcggcggacaatatgcggttctccggtgttctcatcgagccaccgccgtgcaccatcaacgacggcggcaaagtggatgtcgatttcggcaaccgcgtgggggtcagcaaagtggacggcgttaactatcagcagccggtgaactaccggataagctgcaccccgggggccggggcctggaacatgacgctgaccgtggtgggtaccccggcggattacgacgaggcggctataaagagcgacatggacgatctggcggtgcgcctgctgcaaaacggcaagcggtttcccctcaataagccgattcccatcaagcttaatgcagcaccaacgctggaagcggtgccggtgaaacggccgggggccacgctgcaggaaggggcgtttgaagcaacggcgacgctgctggcggtgtaccaatga

SEQ ID NO: 448564 - DNA, 555 bp, Serratia marcescens
atgtctcagtattttatctatccggtagatgcctctgagtggggtataaaactcaccgccgtcttcgacgctgtaatgcacgtactgctgcatcacatcgaacagcaccaggtcggccacctgccatttcagctgattgatgacctggtacttacgaatgtgccggtaatagccgcgaatgtccgttcggtagacaaaggcatattctccgctggcaagagcttcccgtacttccgccaccgacgccgcgctaccgccatgcccgcgcaaatgcaggcaacgtgccggttttggcagcagcgcggcccacttcaatatcagcgcatccggcgcacaccactgtacccaacagcggccaccacgccgcaatacctgcatcggtgccaggcggtaacgcccgcgttgcagttgtcgccaaaggcgttcaccctgctgcgcccagtgaaagcgcagatgccagatatccgcattgggcggcgcatggcgacgacgttggcacagccagcgatacgcggcctgccatgcctcagtgcggttattcatactccaggctaa

SEQ ID NO: 448565 - DNA, 471 bp, Serratia marcescens
atgaaaaaatctcttttagcgctactcaacgctgtatttttcttgttgtttttttcattcagcatgcatgcggaagagccgttcaaatgcacatcgcattacaaaacctatattgaaaaagaccatgatttcacactgttcgatggacggcttaccctattcttgaaaaatgaacacgaaggattttttgggctagtaggtaaagtaaaaaccaatgaaaatagctatctactttccagaaccgcctatttcacattggacccccaagagatcaaccaggtcaaacaagctaatattgtcaaagtggccaagcatcctagcgacatcactcccgaaaacatttggttggcagacattttgccgcaacttccgggtatcgatttccaaatcgaaatttggcgattgaaagacaatttgatgctggtgaaatccctgaacaccgggtatctcatctgcgctgcagagcgctaa

SEQ ID NO: 448566 - DNA, 804 bp, Serratia marcescens
atgaaatacataatcaacaaaactgttgttttcgattcaaatgaactgacattgtgcctgtatgaaaatacgcagatcgtggctaggctaaccaagcctgctactcgtttattactggcattaatacaaaacaatggagtcagtgttacccgggagacattattggacaatgtatggcttaactatggctttacagcatccaatgcaggattaaataattacatcagtgagttgcgcaaagcattcacgtcgttaggttgtcatcatgagctgatcatcaccatccctaaactgggcttcagatttgaagctgagattgatattctggattcggcagtcatttcatctaaatcagtagcagagattaaggcatcatcgataactgaaggtgctgccaaggaaatagctgaggaaaagccggatgatcacgaaaccgcatcattttcacaccgaaaactgtatttctttttagcagtaatcattttttttactctatacatcttttttttcaaaaacagcggcaatgataactacacctatcatagaatagcaaaaattgataactgtaacgtttactccttaggcaaattatatcagaaaaatgatgttctctctaaaatcagcgcagtgttaaagagagaagatatagactgcaaaagccttctgagtgatgttttctaccttgaggataggattgggaaacataccgtccgtgccgatctcatttccgtttgtagcaagccagatgataaacgttacgatgcttgcttcaatatcaaaagccagagagacacatcaaaatga

SEQ ID NO: 448567 - DNA, 525 bp, Serratia marcescens
atgaaactgaacaaaatcatgctggcagcggtaatgactctgggcactatttctatggctaacgcagctaaccaaggtggcggttctgttacctttaaaggttcgatcattgatgcaccgtgttcaatcgaaccaggcagtctggatcaaaccgtgaaactgggtgatattgcttctgctcagttgaaaaatggcggcaagtctaccccacaggatatcctgatcaaactggtcggttgtgatttgcaaacggctaaaaacgtgaccaccaccttcagtggtactgagtctgacgctgcgcctggcctgctggcgatgaaaggttctgcacgcggtgccagcatcgctatcaatgatgttgacggtaaactgctgccgctgaccaaggccagcaaaccgcaaaaaattgaagacggtcaggtgaccctgcgcttcagcgctcacctgcagggcgacggcgcatctgctgccattaccccgggtgaattcaactctgttgctgactttaccctggcgtaccaataa

SEQ ID NO: 448568 - DNA, 546 bp, Serratia marcescens
atgtattcacagcgtggcaaaaggatattgcaccgtgcggtgttaattaatctgttgctgtgttcttctttggcgcaatcctccaatcaggggcgtggcgaagtgaccgtaaacggccggattatcgcctcggcctgcgccattgataccgaaagcctcgatcaaactattacgatggcaacagtgcccgtcagcaaaattattcgtgacggccagggtgaattgcacgagtttaccattaagttggtgaactgtgcgttggagaaatttaaccctgcgctggatgattggcgatatttttccgtgacctttgatggcaaagcggatgccgatctttttggcattgacggtgacgccaaaggtattgccttacaaataaccgataggctggggaatgtcgctgcgcccggtgttcctatgagtgaaaatgaaattcaatccgggacgttggagtttaattacgggttgaggttgattggcaataatcaggtgctgaaggccgggagctattactccacggtgcgctttaaaatggattactactaa

SEQ ID NO: 448569 - DNA, 1050 bp, Serratia marcescens
atgtacaccatcacctttaaccagcagttccgggacctggggttgagtgcctatctcaactacaaccaccagacctactgggaccggccggcgaacgaccgttacaacctgacgctgtcgcgttatttcgacctggggcgtttccggaacatcagcctgtcgctgaccggttaccgcaacaagtacaacggcaccaacgacgacggcatgtacctgtcactgtcgctgccgtggggccgcagcggctcgctgagctacagcggcagctacaaccgcaacgataccacccagcaggtggggtactacgaccggctgaatgagcgcgatacctaccaggtgagtgccggcagcgcgcgcagcggcgccaccgccagcggctactacagccacagcggtgacatcagccagatgaacgccagcgccagctaccaggccggccagtacagttcgttcgggttatcgctgcaggggggggcgaccgccaccctgaaaggcgctgccctgcaccgcagcagcatcagtggcggcacccgcatgttgctggataccgacggcgtgccgggcattcctgtgcgcggctacagcacgccgaccctgagcaatgcctttggcaaggcggtggtggtggatgtgggcagttactaccgcaaccagttcagcatcgacctgaacacgctgccggagaatgccgaggtcagccagagcgtggcgcaggccacgctgaccgaaggcgccatcggttaccgccgcttcgaggtgattgccggcgagaaggcgatggcggtgatacgcctggcggacggcagttcgccgccgtttggcgccacggtgcgcaacggcaagggacaagaggtgggcatcgtcaacgacaacggcgaggtgtacctgagcggcatcaatgccggtgaagggatgcgcgtgagctggggcggcgccgagcagtgcggcattaccctgccgcaggcgctgtcgccgggccagttggccaatctgttactgccttgcggcccggtggccgacggcaaggcgttaaacacgagtgaagagtag

SEQ ID NO: 448570 - DNA, 918 bp, Serratia marcescens
atggtcggccaggttctccccggcacgcggcggggtgtagtccacgctgttgacggtgcgcagccagtgttcctggcggtgggcgctgaaccgcccgctgacggcatcgaataccccgttacgaaagcctatcaaccggcgggccgggtcgcccatctgcggcaccatcagcttgagggtgtccaggatgctgttgataccggcggcggagaacggcgcgcgtaccttctggaacagcgcggcaatctcccggctcagttgccggtgtggcagcacctgccaggcgccacgcgtatagcggcagagctcctctcccaccggcggcaccgccagggtgttgccgtagtgctcggcaagcagttcggccttctcactggcgctcatggctttcaggtcggcatcgctcagcgtgtcaaacgggctgggctgcggcggttggctgagcgcctggagctgcgcgcgcgtggcctcggccccttcccggccataaacgtcgttccagtcgccttccgtgggtggcagtgccgggataccgccggtgagtgtggccgcctcggcggctcgggtctgcccggtgccgctgcggtcattatcggccgccagcagcagccgcgcatccggatagtggctgcgcagctgctgcgccaccgccgccagattgttggcgctcagtgccacgcacaccgtttcgccggtcaggcggtgcacggtaaggccggtggcatagccttcagtgagccagataaccgcgttgtccgggccgctcagggtgtggcaggcggctttcacctgcccgcctgccagcatgcgtttgtctccgctggcgttaatcaactgcacgttgaccacctcgcctccggcattgtgcagcggcagcaacaggtcgtcgggctggaaggtgataccgccgacgcgtag

SEQ ID NO: 448571 - DNA, 261 bp, Serratia marcescens
gtgcagatcgtatctgcgtcgctgcctgcccaggcggcaattgccctggatcgcacccgcgtggtgtttgacggttctctgaactcggtgagcctgagcgtcagcaaccagaacaagcagctgccgtatctggcgaagggctggattgaagacgagcagggtaacaatatccagagcccgctgacggtgctgccggcggagatgttgatgaatatattgttgctgccttgtcatcaattaggcaaaacaaaggatacataa

SEQ ID NO: 448572 - DNA, 138 bp, Serratia marcescens
atgcgattaagcagttttttatcgctgctgtccggcagcgggagcagcgcctcggtgcccacgcggctggcggaatccatgaccagaatggagcgcaggggctgcgcgctggcgctgttctcgaaccactcggcgtag

SEQ ID NO: 448573 - DNA, 291 bp, Serratia marcescens
ttggtttgcgatggtgattacacctcacaagcgacggcgcgcttaatatttaccgatgccaatcgcagcggcggcgacaccatcgtgttgaccaatccgcaaaataaacagcagctcaaagtgaaactgtccgttgatgcaccgggcgccagcaacaaacgagatgtgatcgtcaaggtcggttataagggcagcgttgaactgtttgcctctctcgatgagtcggaactgaaaaaagaaacctcgggcgactttaccggcagtgcagtgattatttttaatgttatctaa

SEQ ID NO: 448574 - DNA, 171 bp, Serratia marcescens
atgttaagacatcaatgggtggcgcaaaaaacgcacgacttggtattgcactatgttgttcatgccggagtggtgtattcaccggacgtgtttatacaagaagtgcgcgaaatggagggggtatttagccgtattttactcgcggaacaggagggtaaacttaagtcttag

SEQ ID NO: 448575 - DNA, 150 bp, Serratia marcescens
atggataatctgagtaagtcggtggcgtacattgcagattgtggaacgattgtcagcctgctggcacataacattgacgataaattattggctcagaaaatctggaatgcctgccgcgccgcaatgctagatgtaccagggagtatttaa

SEQ ID NO: 448576 - DNA, 177 bp, Serratia marcescens
atgactatagccaaagcgccggggtacgccatgcccccacttaacttttcacctcgcctggtacggggcgtcaatttgacgacagagcgcgatatgtggcagagcgaaaagcattatcgctttcgttcgggaaaatactacggccgggtccggtatgtggagttgaatcatggataa

SEQ ID NO: 448577 - DNA, 567 bp, Serratia marcescens
atgccagcaaatgaacggaatctgtatcccaacataaaacgagtagtttggagtgattgggccgaagggaaggttcggcagcagcgctggcacccgatgcgagtggcaatgctgtttcgcctcggccctgtcatgccaacgcccaccatcgcaaaaatgttcggagtttcaccgcgggtcgttaggagtaaggctgaaagccttgggatcaggctgtaccgatgctttcggaactacgccgattgggaaataaagttcatgaaagataatcggcaaaagctaacgcagaatgaaatcgcacggcatttgggcaggacagaagaagctgtttgcacagcaatgcgcaagcgcgggtttggcccaggaaagccgcgcggcgaacgccaccctcatcataaacacagcgactatgacgttgagctatgccgtaagttgtcagacgaaggtctgaacgcgactgaaatcgccgaaaagatggatgttgatctcagcaccgtttttcggtggattaacttcctcagccgcaccaacatagaacttgaagactacgggagagcgagagcatga

SEQ ID NO: 448578 - DNA, 846 bp, Serratia marcescens
atggcaaactcaatcaacaaactcattgacgacaaaatcattaagcgcgggaagaacggtttgcttatccgtcttgatgatattcacattcaggagggcttcaacaagcgcatcgaaagcgaacattcccgagctgcggatgatgaattgttcaaccatcttgctcagggcaaacctattccaccattagaagtctggccccgcgacgaaggcggcgtttccattgtcgaaggacatcgacggcacagggcgttcctgcgctgccgtgatgctggcaagcccgtagaatggatacctatcatccccttcaccggcaacgatgtcgaacgcgttgcacgcatcatgaacagcaatagtcagttgcctcttacgccttatgaacagtcgttggtggtaaaagagctggccggtttcaatctctctccaaatgaaatagcggcgctggtcggcaagagccggccgaccgttgataagctgctggcattcagtcaggccaatcacgatgtacagactttggtcaaagagggttcagtagctgtcgatgccgctgtcgaccgagttaaagaacatggtgaagccgccggcaaagtgttggcaggtgatgtcgaaaaagctaaggctgccggcaagaaaaaagtcaccaaatcctttatcacgccaaaattcagcgccacccgcgcccgccggctctgtgagctgctctacgatgctgcgccaatggttcgtgaagagggggatgttctgttgctccttccaggtaccaaagaagaaattaataccatcctcaacgagtaccggcaacagcatccgcaagtattcgatgaagaagagcgcggagataaataa

SEQ ID NO: 448579 - DNA, 1239 bp, Serratia marcescens
atggcaacactaccaaccggcgtcgaaatcagaggaaaaaaacttgttgtctggtttatgtatcgcggtcagcgttgccgggaatctcttaaaggctgggagataaccccggccaatataaagcgtgccgctaatttcagggcgttgattctgagcgagatccatctcggggagttcaattacgccacccggttcccaacatcaaaacgcgccggcggcacagcgccacttcgccaggtgaaaaccttcggcgaactggtggattgttggctagaaaatcgcgaacctgaactcgcaaaaaacaccatgcgaaaaactcgatcgcagatgaacacccttaaatttatcgtcggccctgatcgagacatctcagccataaaccataacgacattctcggatttcggaataccttgctgcatggacgcacattctaccaggaagacctgcgcagcaataaagacgggcggacggtgcgcacagtcaacgattatatagggatgctctgctctttgttgcgcttcgcataccgcgcagggtttataaacactaaaccctacgaagacgtgaagaaattgaagcgtggcaacaccaagccggatccgttgttgcgtgacgagtacgaccagtttatcaacgcgctggaggggcagcaccgtttcatgtggacaatcgccatttttaccgggctgcgccacggcgagcttgccgccctcgcatgggaggatatcgacctggacaaaggtgaattacgtgtgagcagaaatttaacatccctgggtgaattcgggccaccaaaaacgcaggcaggttttcgcacggtaacgctactcgcaccggcggtggaggcactacgcgcgcagcggctgcttaccggcctgcatcgaccaaccgagatcacgtatcatcaccgcgaatacggtagcaccgaacgccaacgcctgcgctttgtgtttgtcccgcgcccatccaaaggcgagcagcggccgcactatggcctgtcgtcgatcggcgctcgctggaatgccgctgtgaagcgcgcaggtattcgaccacgtaatccgtaccagacgcgccacacgttcgcctgctggcttttgacggccggagcgaacccgtcatttatcgcggcgcagatgggacacgaaaacgcgcagatggtttacgagatctacggaaaatggattgaacagatgaacggcgatcaggtggcaatgctcaatgacaggctggctatttaa

SEQ ID NO: 448580 - DNA, 576 bp, Serratia marcescens
atggggatcaatatagcgcatacatcgcttgctaactatgcgttccagatcgcatcccgcggaaattttggtctgcattacagaacgaatgaaaatggtactgtagcgccgtgggccagggtttgggacacccgcaatacaaccgttgacgccaacggcttcattaaaaaagcctctccgatcgtgaagctcttccgtgatggctcctgcgaactcaacgacgaaagcaagggcgtgactactgagcgcgtgagtgaaggcgtttaccgggtttccggcacgctcgggtttaatgcagatgcgcagtggggcggttctgatggtggtatcgaagtaccgctcgaccgcaacaagcagccgctgatctgggtggattacgaggtagagccgaccggcgatctgctgattaaaacctatcaccgcacgcacccggcggcgccggctttcgcccgcaatgacattctgggctatgacgaggggatgccgatcgatatccctgaggggcgttgggtggatctgcgcgttgagatgccggcggtcgatgaacaaggaacggaagaaggcaccactgcataa

SEQ ID NO: 448581 - DNA, 132 bp, Serratia marcescens
atgatgtatgaaacgaatgatgggaagtatgtgatttggtatggcacaacaatattttcatcgatggatatacacttcaaagagatggcgccattatcgaatgatggcgccgaaaaaaacacctatcaatga

SEQ ID NO: 448582 - DNA, 657 bp, Serratia marcescens
atgtatccaggttggcccattaacgatccagttgatattaatgaccctttagtccagaaatttgcaaatcaaatccgcaagcactcgaccctcatagaagccagtaaaataacagaacctttgccaataggtaattgctattggaatgttgatgagactgttaagagacttggcggaaaaatggttacaggatggttaattaataagtggactaattctcaccttgttggaatgcaccatgccatttatgttgatcctaatggaacaatgttagatataacgcagtctcccccatgcgaaactatcactaacacctcaatatttctcatagacaatagccataatatcgacacagacaaagtgccggccattgggtctttattttacgtattaaatgaaaacccattcacaaccaactacatagaatcttacaaaaacctaaaccaaaaagaaaaaaacctcagcaaggtaatgtattcagttggcataaggtgcgaaagcaataaagcaattgctaacggtacccttccaacaggaattccgctcaccgttgaacaaaaaaacttaatagagaatgccatcaaattaatagaggaggctaagatacgtttaggaacatcaattgaagaattaaaaaaacacaccggacattcttaa

SEQ ID NO: 448583 - DNA, 429 bp, Serratia marcescens
atgaaaatcgaccagcagtacctcaaaaatttactgattgcgtttgaagattccgatgggcctgacactatgcttagtgaattgacgacggccggttttgatcgtaatgattcaaattttattttccatatacgcctgctttacgacaacggattaatattgcgtgttgatggtaaagctggattcgggcacgaaatgtccagaggtttaggcgaagctgtcagctattcctggatcgacactcctctaaggttaactgctcgtggccacgacttcattgctgatcttagacagcaagaggtttggcagacaattaagacgaacttcaaagatgaggggataagcaccctgatgggactatcaaaatctcttgctatgggatatgccaagaaaaaagttaaagatctcactggtatggatatcgattaa

SEQ ID NO: 448584 - DNA, 753 bp, Serratia marcescens; identical to SEQ ID NO: 339019

SEQ ID NO: 448585 - DNA, 213 bp, Serratia marcescens; identical to SEQ ID NO: 292136

SEQ ID NO: 448586 - DNA, 1659 bp, Serratia marcescens
atggctgagatcacctcccagcagatggctggcaagctgctcgcggccgggttcgagcgcagcggcccgtcagcctcgaccttgagcgacccgatcgccgacacccccatggtcgtgaccctagatcagttgcgcccctacgaccacgatcccaggaaaaaacgcaacccggcctacgaggaaatcaaggcgtccatccgcgagcgcggtctggacgcagcgccggccatcactcgccgaccaggtgagtcccactacatcatccgcaacggtggaaatactcggctggcgatcctgcgcgaactatggtcagagaccaaggacgagcggtttttccgtgtatcgtgcctgttccggccgtggcccagccgcggcgaagtcgtcatgttgaccggccacttggccgagaacgaattgcgcgggggcctcacgttcatcgagcgcgccctcggcgtcgagaaggcgcgcgagttctacgagcaagaaagcggcaccaccttgagccagtccgagctggcccgccgcctcgccgccgatggcttcccggtacaacagtcgcacatcagccgcatgaacgacgcggtgcagtatctcctgcccgcgatccccaccgtgctctatggcggtctcggtcgccatcaggtcgaacgcctgtcggtcatgcgcaaagcctgcatgctcgcgtgggagcgctacgccaagggtcgcccactggttcaggacttcgacgaatttttccaggaagtgctgtcgcaattcgacgtccaggccgacgagttctccgcgcagcgtgtacaggacgagctgatcggccagatggccgagatgctgggtgtcgattacgacgtgctcgccctggacatgaccgaatccgagagccggcagcgcgccttggtcagcgacccaacgccgccatcgacgccgcctgcgttgccggagccgggaaccatcgcgcgcccacctgccaacactgcgccacccatcgcaggggctgcatccgcagcgccgcctgcaggccgacctgcggcaacgccttcgacgcgcgagagcgacacggatgccagccaggcaagtccggccaaccctgcggtgggtggcgatctgcttcgggagcacatcgtctcgccggcaccgacgaccgaacggctccagtccattcagcgcatggtcgccgaccagttgggtgatgcgctgccgctcgacttctcggcgagtgtcttgcagtccatccctgtgcaggctggcgggctctatccgatctccgatgtctggtacatcgatcccggcgtggacacagccgagcgcctgcgcatccacatcgcacagttcgcccgcgaaatcgcgggcgaggcagacctggacgagtgcattgatgaccgtgcagagggtatcggtttcgtctgccgggcccgcacccaaagctcggcaccgctgggccgtgccgtcctcgcgctgttagcgtgcctggccggtcagcggcccgccgacgtcggcctgcacgacgggcaaatcgtcatcgaactgccggcgctgctgcacggccagggtgatgcggcccagcgattgagcgatacctcgctggtcaagctgttccggctgctgcggctggcccggcgcctgctcgaccttgaagccggcgctgaaggcgttggaatgtga

SEQ ID NO: 448587 - DNA, 1233 bp, Serratia marcescens
atggccgtggacgacaccgcaccacgccgtggccccgtcgcactcgcggatctgttcgatgctgccctgaaagacctcgcgcccaagcccagccccagtgcgccagcacccgtgcctacgccgacgcccgccacgtcaggcgatgccttcctcttcagcggcaaccggcacgagaccgtgccgcggcggctgttcctcgaccgtcgcctgacgccgctggagcgcaacgcctggcaggtgttccggctgatgctcaacgacgacggcatgacagccttcccgacgtatgagcagcttcgaccctggctggcgtcgatgccctgcgccgggcaggcctcgcatgaaaccgtggcccgagcgttgacgctgttgcgcctcacccgatggttgagcctggtacggcgacggcgtgaccccaagaccggccgcatcctcggcaacctctacgttctgcacgatgaaccactgacgcccttcgaggccatgcagctcgacgccgactacctggcactggtcagccagtccctcggccattcggccaaggctgtccagatggtcggtctgaacaccctcaaggagatcgcggaagatccgatgctctccggacgcacactgccgtcgcggctacaggtcctggccgaacgcctcgccagccaaggcatcacggccgccgaaagttatccacaggaggatgccgcccacgattccgaagaaggagcatcgagccttcttcggaatgcggacgacccgtcttcggaatccgaagcaggggcgaaacccgcgccagacgcctctcttcggaatccgaagcaggcccgtacagtacgtagtagtcgtattaatgaagtacgtactaccgcgcaggcgcgcgcgctgggcgatctgcaatggcccaagcgcttcacggaactgaaggcagagcagcagacaggtgccagggtggcattgcagcaggtcgatgccgcgctgagacaggccgtgctggacgactgggccgcacgatgcagcagtcatggcatccgcaatcctgcggggtatctgttcggcatcatccagcgcgccatccatggcgagttcaatgcctgggccaagaaagacgcgccatcggcacccgtcccgccaaacgagcggccaccagcagcaccgccacctcagccgcagggtaagccagtgccgccggaagtcgccaagcagcacatcgagcggctacgcaatctgctcgccagcaagtga

SEQ ID NO: 448588 - DNA, 1608 bp, Serratia marcescens; identical to SEQ ID NO: 339013

SEQ ID NO: 448589 - DNA, 558 bp, Serratia marcescens; identical to SEQ ID NO: 339012

SEQ ID NO: 448590 - DNA, 687 bp, Serratia marcescens; identical to SEQ ID NO: 339009

SEQ ID NO: 448591 - DNA, 738 bp, Serratia marcescens; identical to SEQ ID NO: 339008

SEQ ID NO: 448592 - DNA, 354 bp, Serratia marcescens; identical to SEQ ID NO: 339005

SEQ ID NO: 448593 - DNA, 918 bp, Serratia marcescens; identical to SEQ ID NO: 339004

SEQ ID NO: 448594 - DNA, 690 bp, Serratia marcescens; identical to SEQ ID NO: 339003

SEQ ID NO: 448595 - DNA, 324 bp, Serratia marcescens; identical to SEQ ID NO: 339002

SEQ ID NO: 448596 - DNA, 306 bp, Serratia marcescens; identical to SEQ ID NO: 342373

SEQ ID NO: 448597 - DNA, 870 bp, Serratia marcescens; identical to SEQ ID NO: 338998

SEQ ID NO: 448598 - DNA, 600 bp, Serratia marcescens; identical to SEQ ID NO: 338997

SEQ ID NO: 448599 - DNA, 642 bp, Serratia marcescens; identical to SEQ ID NO: 338996

SEQ ID NO: 448600 - DNA, 765 bp, Serratia marcescens; identical to SEQ ID NO: 338983

SEQ ID NO: 448601 - DNA, 447 bp, Serratia marcescens; identical to SEQ ID NO: 338981

SEQ ID NO: 448602 - DNA, 357 bp, Serratia marcescens; identical to SEQ ID NO: 338979

SEQ ID NO: 448603 - DNA, 366 bp, Serratia marcescens; identical to SEQ ID NO: 338978

SEQ ID NO: 448604 - DNA, 984 bp, Serratia marcescens
atgatgaaacaaatgaccttcgccgatgccgagtacgccggtaagcgcaagcagacccgcaaggagctgttcctgatagagatggatcgggtcgtaccctgggagggtttgattgctctgatcaaacctcattacccaaagggcgaagggggccgtccagcctatccgctgatggcgatgctgcggattcatctaatgcagaactggttcggttacagcgatccggcgatggaagaggcgctgtacgagacgacgatcctgcgccagttttccggtctgagcctggagcgaatcccggatgaaaccaccatcctcaacttccgtcgcctgctggaaaagcatgagttggccaccggtattctcggcgtgatcaatggctatttgggcgaccgtggcttgtcactgcgacaaggcaccatcgtcgatgccactctgattcatgcgcccagttcgaccaagaacaaggacggcaaacgcgacccggaaatgcatcagaccaagaagggcaaccagtattacttcggtgccaaagctcacattggtgtcgacgatgagtccgggcttgtgcacagcgtggtggtcactgcggccaacgtcgcggacgtaacccaagtcgacaaactgctgcacggtggtgagaacgtggtctgcgctgatgcgggctataccggtgtagagaagcgtgaagagcatgaggggcgccaagtcatctggcagattgcagcccggcgcagcacttacaaaaagcacggtaaccgcagcgcgttatacaaagcgatacgtaagatcgaaagagccaaggcccaggttcgctccaaggttgagcatccatttcgggtgatcaagcgccagtttggttatacgaaagtgcgcttccgaggcttggtgaaaaacactgctcagatggtgacgctgttcgccctgtcgaacatttggatggcgcgtcgacatttgctctccaatgcaggagaggtgcgtccgtga

SEQ ID NO: 448605 - DNA, 1266 bp, Serratia marcescens
atgagcaaggatacggaaaaagcagtcgtcggtctatcgggagtcgggcttggcctggacgaattggttcgccagggagcgcggcaggtgattcagcaagcgatcgaagcggagttggcagagctgatggagcggttcgcgaacgtcaagaccttgcacgggcaacgcgccgtggtgcgcaacggctatttgccagagcgcgaggtgttgacggccgccgggccgattgcggtgaaagtgccgaaggtgcgcgatcgatcggggtcgggcgtgaagttcaattcgacgatcgtgccgccgtacgtgaggaagtcgcctcgcgtgagcgcagcgctgccctggctgtatctgaagggcatctcgacgggcgacatgggcgaagcgttgagcgtgctgctgggcgatgacgccaagggcttgtcggccaacgtggtgagccggctgaaggcgcaatgggccgacgagcatgtggcttggagccggcgtgacatgtctgagtcgcactacgtctattggtgggtcgacggcattcacacggggctgcgcagcgagaactccgatgggcaatgcttgctggtcatcatcggcgtgaaaccggacggaagcaaagaacgtgtggcgatcggcgatgggtatcgcgagacgaaagcgtcctggctagagctgctgctcgacctgaaaaagcgcggtctgaaggcaggtccacggctggcagtcggcgacggcgcaatgggcttctgggcggcgctggaagaggtgtttccggcgacgcgtggccagcgctgttggtttcacaagatgggcaacgtactgaacgcgctgcccaagtcgcaacaggcacgcgcgaaggccgatatgcaatcgatctggatggcggcgacccgcgccgacgcgcacgccgcgttcgatcgtttcgtgtcgatctatgcggccaaatatccgaaggcgagcgagacgttgaagaaggaccgagacagcttgctcgccttttacgaattccctgccgagcactggcagcatctgcgcacgaccaacgcgattgaatcgacgttcgcgacggtgcgccaccgcacgacacgtacgcgtaactgcgtgtcgcgaccgaccttcctcggactggcattcaagctgatcgaggaagccgagaaaacctggcgccgtatcaatggcccggaaaagatcaagctgttgctcgagggcgttgccttcaaggacggcgaaccggtgcaagacgatcgaccggttcagcagaaactcgccgcttga

SEQ ID NO: 448606 - DNA, 135 bp, Serratia marcescens
atgcagcaggtactcctgtcccccgagttgcccctggacctagtggccttcgatgggttgctcagcgagttaacgtcaatagtggtgtacgaacaatttgatggcggtcgatttcaagcggcgagtttctgctga

SEQ ID NO: 448607 - DNA, 1272 bp, Serratia marcescens
atgggtggaaagcaaaccgatccagtgatgccgcgtggcgttgccgtgcacggaaaatctttgcgcctgactttttcatacaaagggcagcgatgccgggaatcactgggactccccccgacaaagaccaatgtcaaatttgccgccggcaagctggcggcgatccggcacgagataaagaccggcacgtttaactatgccgcacatttcccaaattcggaacgggccaaggaacaggccaacaagttaaaaggcattggcgcgcgcattggcgatctatgcaaggagtaccagaaaatgaaatacacagatttagcaacctccagccagcgccgttacagcgtggcattcgatcaatgcctggcgatcattggcgtcgacagactgatggattccctcttccctgaggacttcatgaatttgcgggctgaactcttggccacccgagcagccagcacggccaatcactacatgaatgtgtttcgtggttttgtgcaatttctcgagaaaaacaaatacaccaaacacaatttattggcggaactcgcccccgcgcaggacagcggcacggagccggatccatttgatttagacgaatttcagcgagcggttgctgcctgtaataatgaaatccatcggaacatcatcacgttgtcaatctataccggcattcggccaggcgagttagctgcgcttgcatgggaagatattgatcttatcaaaggcaaggctaccatttcccgcgccctgtctgatgacgagctaaaactgccaaaaacgaataaaacgcgggtgatcctgctttcgccgccggcgatcgctgctctgcagaaccagcggcaatacaccgcaatgatgccagcgcaggcattcacgatgaggcagcgcggcaagaagccccagcagctgatgctgcgccctgtatttctgcctgaaacaacagcgaaaaactcaggtttcggccagctttttttagccaccagctttaatgatatgtggcaggcattactacggcgcgcgggcgtacgctacagaacgttctaccaattgcgccacacgtacgcttgctggaacctcacagctcatggcaatgtggcattcatcgcaaaacagatggggcatgcagattacacgatgctcgtgaaaatttacggccgctggatggacaacgagagcgaggcggaaaacgcacggatttgggaagcactttcagagaaaggacacgacgataacgccccaaaaacgccccaagtattacagggtgccaaataa

SEQ ID NO: 448608 - DNA, 3237 bp, Serratia marcescens
atgcaaaatgttgcagcctatctttacagggcaaaacagaaatctgggaaaaaccatctttttacgtactttgaggcgaagtctgacgatcacgcggagacaaagcgtgattttctcttcatggaagctggccattcaaaagccgactacttcgcgccggtacgcatcgattttccagtcgtggacgaactgcccgccgagggcgaattcagcgaaacattctggcttacctgggcgctggaaagcgacgccagcaaaacctgtgtgccgcgcgacacgctcgatccgtccgtggcattcccgaaactgtatccctacatgacaaaacctgcaggtggtgcaggcgcagcagaaaacagcaggaccactgaaaaaacgcaggtggtgcaggagcagcagaaaacagcaggtgaatacttcgcatcgagcctcgacaagcacaccgtgatcgccgcggcgtggctttacggcaataactgcctgaagctgaacgacgagcaattggccgcggcaaaagctctggtgatggacgatgcgcagcgctacccgcaaaacgtcattctggcactgaccagccttaaacagttcgcacacacctacccggaaatgccgatcactgcgatctcgggcatgaaagccatctggccaccgttcggcaaggtgccggagctgggcaaactgtgccaattcgccaccgaatacctcgacgctacggtagaacagcgcgtgggcgttatcacgaaatggcaaacctcagcggccggcggcgccaagcctaccgaaaccgcgcctgaggagccattgcgcaccgcatccggtgcgatcctcacaaacggcgccgagccagcagccggcacgccgatcgactccctgcagatgctggaaaccgtgatcggctgcgcgctgtatccgtctgatttcgatatttccaaccccccgggcgccatcatccgcgctgtgaacgaaatgaaaaagcgcaacgacgaggcgctcaaagcatggaatgagcagctcagcgccacgcctggcgttttgcagttctcccgacaggcgattgttgcgctggtccgcggtgccgaagaaaacctgcacgttacccccggcgcgctgcgcagttacatcaacgccaatctgatcgaggtcgacgctaaaccggcgcaacaaaacacagagaccgtgcaacaaactggcgccgaagcgcaacaagcggcctcaaatgcgggtgaaaaagatgaagtggtcgcagagttcgagacagaacgctgcgcatggctgcgggcggaaatacgtgcggcgctggccggaacgactggtgttatggatgaaagcgacgttgaagaattgaccgcagccgtcggcgaaggcatatcacacagctacatcgcgcggctgctggccaaagagattgaaacgtgcgatccattcaaccagctggttgccgatgatgttcatcacctcacctgcgacgttctggaaaattggcaggataaaaaggatccgcgcgttgcttatatcgattctcgcgtggagttctatctgcaggaagcgcgccgagaatcagagagaaaatatcaggaaatggtcgcagccaccgacgcaagcgccagcggcgcgaagcagcaggaaaatccagcgcccgagcgggttgacgcctcaaatgaaggcgtaaaaacggaagtcgcgcagcagcaacccggcgaacttcgcagcatgggtgacggtcgatttgacgtttccgagttgtttgacgcgtcaccgctggccaaggtaggcaccacgaccggcgacgatgttcgcgagttcctggattcgtcaacggaaacggccggagtgtcaggcgaaacggcggaattgtcaggtgagaatgtcgataccgcggcgccattcgaagtacagaacgaggctgccgcggcagtcgtcgacgcaccgcgccgggaagaaccggcagccccggcatacttcgagcctgggcgctatctggatattccgaacgaggtctaccacagcgccaacggcatcagtagcacgatggtaaaagacgcccgtgtcagcctgatgtatttcgaagcacgccacgtgtccaaaaccatcaagaaggagcgttcgccggttctggatatgggaaacctggtgcatgcgctggcgctgcagcccgatgacctggaaaaagaattcagtgttgagcctgaaattcccgaaggcgcattcaccaccacagctacgatccgcgcatttatcgacgaatacaacgccgggctatctccgctattaagtgccgacgatatcaaggtattgctggaggcgcataacgccaccctgccacagcaaattcctatgggtgatgacgttgcccaaaccggtgaaaactacatggccctgcctgctgaatttcagcatgtagaagatggccagaaagttactgcagcaaaaatgaaggcatgcatcaaagaatacaatgccacgttgcccgcacagatgaaaaccagcggcagccgtgatgcgctactggagcaactggctttgattaaccccgatcttgtcgctcaagaagcccagaagccgcaaccgcttaaagtttccggcacaaaagcggatctgatccaggccgtgaaaatcgtaaaacctgatgctgtattcgcagacgaacttctggatgcatggcgtgataacccagaaggaaaagtgctagtcacacgtcagcaactcagcacagcccttgccattcaaaaggcactgttaaaccacccgaccgccgggaaacttctaacgcacaggaatcgtgccgttgaagtgagttatttcgggttcgacgacgagaccgggctggaagttcgcgttcgtcccgatctggaaatcgacctcgaaggcgtgcgtatcggtgctgatctcaagaccattagcatgtggaacgtgaaacaggatggcctgcgcgctcggctgcaccgggagataatcgatcgggattaccacctgagtgctgcgatgtacagcgagatcgctgcgctcgatcagttcttctggattttcgttaacaaggatgagaactaccactggatcgcgattatcgaggcatcaagcgaactgcttgaactgggattgatggagtaccgcaaagctatgcgcgctatttctaagggtttcgataccggcgtgtggccagcgccgatcactgaagattacgccgaagaactcaacgattttgatctgcgccgcctcgaagcactgcgcgtagcctaa

SEQ ID NO: 448609 - DNA, 306 bp, Serratia marcescens
atgattaagaccgtagaaatcaaaatgaatcttttgcacaaaaacatcgttgaagtattaagcgagagtgaaactattggctttatcgttaataccgataacaaagaaaaaccgcactccctcgttactcctagcgggagtgatgctggtgattttgattgcccgaaatgtgccattgatgctgcggtgcgtacgcattttaacgtaggcagtgagtacgccacagagttcagcatcaaggggcgaccatccccgaaaaagctgctcctgctggcgttgctagccatgctcgcaagcgatgattga

SEQ ID NO: 448610 - DNA, 306 bp, Serratia marcescens
atgagtatgggaatatcattcctggaactaaaccaggaagaaagctatctagtggcttttaatttagttgcgccatctggagaaaccgttgtgacttctactggcatcgacggccttcctccgagagaaattcatccagaatggaaaacctcatttttatcagcaaacttttacttcgaagtaaaagaatacggcacctatacatttacatgccagttaataaatctactctatgactatggcaaccccattgataaaaaagagattttattcaacataatcgatgaggggacagtcaatgagtaa

SEQ ID NO: 448611 - DNA, 390 bp, Serratia marcescens
atgaaagataaaaaaactgctgattcaaccttgtttgagcgcttaaccgaattaacgaaacgtggtttctccaagtcggagatggccaggattgctgacgtcacaccccagtcagttaacggttggttcaaaaagggtgtcatcagtaaaaaatcagcaatggccatttcagaagccacaggtgtttccgtagcctggctattgggggaagatgttgaagaatcaaccggtcttgaccctgacgaaatgaaaatgctgaaactttttcgtcagttgcctgaggccgaacgggaaagaatgatcgacctcttccaactgcgcctgaaagagatcgatgattacgttgagaagtacctgcgcgggcggtataagccggttggtgacgaatga

SEQ ID NO: 448612 - DNA, 399 bp, Serratia marcescens
atgttcggcagtgttaaagaagtggcagcggaattattccgtgagtacggcagcgaagaaccgatcaccgtgctgatatgggacactcagtcagtgcggtatgccctggagaagcacaatcccacccctcaggatgtattggcgatactggaaaccatgggctgtacagacattgacgaatatcagcgccgtggcatagggcatgaatttgtggctgaagtcatgcggggggtagtggaagcccgaaccgcaacagatagcgtaacggtcaacaagcttgaattacagcggttgttacattttgccgccaaccggcttgatagcgaccgcgccgaggaaatgacggaggatgagcgggaggccatgcacaccatcgacggcttgcttaatcagctctga

SEQ ID NO: 448613 - DNA, 426 bp, Serratia marcescens
atgcaacacgctcattccatcacgctgcaggtatgcgaatccgatcgtctgtcattcctgccggatatgttcggcgatgattttctctcggccgaaatgcaggtgtattcgctcgccgatcgctatctgccgcagtacagcggcggtttctggcacttcatccgtttaccggagggcggcggctatatggcccccgatagcgatcgcgtacacctgatcaacgccgacaactggtttgacaaaaccgtcagcggcgacgctgccggcattgtactgactgcattggccatcaaccgccgatgctgggtgcatcacgatcggggcaatgccggtctggtgcaactgctgatgcagcgggaagagcaactttggaactacatcgagacgcacccggagcgcggcgacatcactcgcgcgctggattga

SEQ ID NO: 448614 - DNA, 222 bp, Serratia marcescens
atgaattacaccggaaatgaagaactgcgcgccgcgattgcggcactgtccaacgacatgtgtgatctgcacctgcggctgcggggactggtgagtacgtattactggaacagtgacgtgctggcagagcgccttgccggccatatcctgcgggacgcgcacgatcgttacgtcgaaatttacaagacgatcaacgagctggaacaccatttcaaggattga

SEQ ID NO: 448615 - DNA, 645 bp, Serratia marcescens
atgtcccgatatgtcctgggtgattccgtgcaggtgatggccggctttccgtcaaacagcatcgattttgtgctgaccgatcccccttacctggtcggttttaccgaccgcagcggccgcagtatcgccaacgacaaaaacgatgaatgggtgcgcccggcgttccgtgaaatgttccgggtgctcaagcccgacagtctggcggtaagtttctatggctggaaccgggttgatacctttatggctgcctggaagcaggccgggttccgcgttgtcgggcacctggtgtttacaaaagcttatgcctcaaaatcggcctttgtcggctatcagcatgaatgtgcgtatatcttagcgaaagggcgcccggcattgccggcacaaccgcgctctgacgttcagccatgggagtacaccggtaatcgccatcatcctacggaaaaaccggtctcagtccttcagccactgattgaatcgttcacgcagcccggcgcgatagtgctggacccctttgccggttccggttcgacctgcgtcgccgcagcccaggccggccgccgctatatcggtatcgagcttttgacgcagtaccacgctatcggtcagcagcgcttgcagcgtctgcgcaccctgaacgcggcgtaa

SEQ ID NO: 448616 - DNA, 1011 bp, Serratia marcescens
atggccaccatgaaagacgttgcgcgccgcgcgggggtatccgcggccaccgtcagcagagtgatcaacaacaccgcctttgttgaacccgtaacccgcgaacgggtggagaaagctatgcgggagtttaactatcaccggaatgcagcggcactggcgctggcaaagcgaagcggcaatatgctggggttactcaccggtaacctcgatgatccgtttttctcgcgcctggcgcggggcgtcgaagatgtcacgcgaaaagaaggcgtcaggttgatggtctgcagcggggggcatcaggccgagctggaaaaaagcggcctcgacttcctgataaaccagggatgtgaggctatcgttgcgcacgtcacccgaatgaatgaagcggacatattgagatacgcggcccacacgccggccctggttgtggtcaatcgctatttacccgctatcgccaatcgttgcatatggctggataatgtcagcgccgcgcaagccgcaaccacgatactgatcaacaatggtcacagaaagatcgcctgcatcacagccgatctgccgatcgacgataaaaaacatcgtctcgaggggtaccgtatggccatggccggcgccggcatccaagtccccagcacctggatcatcagcgtgcccttcaatgaagaaggcggcgaacgtgcagctgagaagttattggccagcgggcaacattttactgcagtggccacattcaacgatgtgatagccgccggcatgatccgcaccttccatcagaaacagataagaatgccggatgacatatcgattataggttttgatgacatcgccctggccaagtatcttcatccttcgttgactacggtgcattaccccgtggaaaaaatggcaaggcgggccgccaggctcgcccttcagctcaacacaggcatgaatacagcgccacagaacaaccgctataccgcagagatcatcctcagagattccattgcaccatcgcaaacaatgacctga

SEQ ID NO: 448617 - DNA, 1440 bp, Serratia marcescens
atggatgacaaaaaaacgctgagcctgggtttagcgctgctgcccattgtggccatgttgttgttgcttattatcggctatgggcagtttggtctgcgaatagagcccctgctattggtttctgccggcattgcggccgcactggcctggtggcaaggttaccgctgggacgacattatcgatgcgatcgtctccaagctggcgaaggcgatgccggtgatcatgatactgatctgcgtgggcggcctgattggcacctggatgatcagcggaaccattccgtacatggtgtactggggcttaaagctgatcagtccgcaatatatcctgatcgcggctttcttcatcaccagtgtgatatccgtatgtaccggtacctcctggggcgcggcgggtaccgtcggtgtcgccctgatgggcgttgccgcaggactggacgttcccctggccgctgccgccggcgcggttgtctcgggcgcctattttggcgacaagatttccccgctgtccgactcgactaactttgcgtccatcgttgcggacaccgacctctatagccatattcaacacctgatgtacaccacgctgcccagcttcgtgttggcggccatcgtctatctgatcgccggacataccggcgccgtttgcgacgtggccacgcccgagaaagtgaccgcgatagtcaacgctcttgaaggtctgtatcacttcaacccgctcttgctcctgccccctgccctcgtcttgtggggtgcagtgaccaaacgccctgtgatccccatcatgctggcagcatgtgcactggccattgccattggcgtcgccctccagggcttcagcctgcagcaaggcttaaacgcgctaatggacgggttcaacctctccatgttttctacccagggatttaacgtagtcgggatcgttgacgatgttccgcgcttgcttaaccgcggcggtatgttctcgatgatgagcactattctgctggtcttctgcgcgttttcgttcgccggcgcattaacgttgaccggcgccctgacgatcatcatcaaccgtctgctgaaggtggtacatacgacgggccaattgattgccgccaccgtcgcgaccactatcctcgtaaccggcgccaccagtgacgggaaacttgccctgcttataccggctgagctattcaaaggcgcgtatcgccgcatgggactggataataagaacctgtcacgaactgttgaagatgccggcaccgtcatcgaaccgctgatcccatggacggcggcgggtatttatatggcgacaaccctgggggtcagcacgctggatttactgccatgggcagtccaatgctacgccgccgttgtgtttgcactgatttatggctttaccggcttcggcattgccaggacacagcctcaaaatgacctgcagcagaaggatgcctga

SEQ ID NO: 448618 - DNA, 2211 bp, Serratia marcescens
atggcgcaactcaggatccggggcgtaagaagctacgcgcccgacagggatatctgctttgatctcagcagcaaagtgacgctcatctatggccagaacggctcaggaaaatccacgatatcgggctatttttatgacagtcaggccgataaataccggcactgcgcatttgagagtccacacatcagccactttcaggtatttaatcaggaatatattgacagtaaattcgcccgttcggactatcagcccgggatattcacgcttagcgaggccaatcaggaaagccaggataaaataaacagtaataataaagaaagagcaaaactgattgttcgcatagataagatcaaggaagaggttgcacataaagaagggatgaaagaaacggtcatcgacggttgtgccagggatatatttaacaggacagtcaatgacagaaaaattctcagtgccttccttgatggcgctaaaattaagagatcattctacgaacgtatggtggcaacacctctttcagaggttcgtaccacaaccgaggaactggcggataaatggcggacattaagccaaagcgaaggaaagctcgtcgccgaaattcatcttcccacgatcagccccttaacggaagacgctaaaaagctgatgcaggaaccggttatgcctgcaaccagcacgcaattctctgccctcattcagaaaatcggtaatgcagactgggtgagccagggacagcattatatacatgacgatatttgcccgttctgccagcaatcctttgatgtcacggctttttcgcacgagctcactcagatgttcgatgagtcatatcaaacctctcttgagacgctgagccatgcagcagaacggctggctcagaactgtgatagcctggccgaatttgaatcccgcgttgcgacccattctttcgttgatgagggaagtcaggttttatctctggtgaaagcggtaaataaaggctttcagatcttgttacaacaactccttaataaaattaaggaaccgtctctgaaggtacaacctgagaaccttgaagaacccctgttattactccagaatgaagtgagcgcgttcaatattcgggtacgggaaaataaccgactggctgaaaacttcacccaggaaaagcagtccctatacgctgatgtcatggcgcacctcagagggatttgcgaagagttctttatcgaacgtgacaggcagcttagcgagcttcagaaggaaattgacagcaagttgcacgacggcgggatcctagaagcaaacaaggtgcagctggataacgagacgaatgcgctgaccggacaactctccgacatacaacccaccattgacagtatcaacgcgaatctcaggctgctggggatcaccggctttgaaatcatctgccatgatgctgaattgaaactctaccgtctgcgcaggggaagcgagccagagaaggcggaagtattcaaatccctcagtgagggcgagaaaaccatggtttctttcctttacttcatagaatcatgctccggcagtctcacccccgaaaccattcatccggagaataaacttattgtcattgacgatccgatttccagcctgtcacacaactatatctatgaagtcgcagcactcattaaacggaaaataattaagtcaggcgcagcgagacatgtggtgatactgactcacaatatgtttttcttccaggaagtgttgttaaacagcggtcgcctgcaggataacagagaggcaccggtgaactggtctctgcttcgaatcattaagtctgactacagctcctgcgagaagctgtccatgcacgagatgctcaatgaatatcaggcgttatggcagaccctaaaagacgtcagggatggaaaaaaccagcccatcgtactttttaatacgatgaggaatattcttgaatattatttcagttttgcctgcaagactgaaaaacttaaagaagccctggagtctctggcaagcgaacacagtgatgccggagaatatgattcattttatcgggctatcaaccggcattctcactcggacggcagaaatatctttgctacaggcgtcatcgataaggaacgttatctgagaatgttcagaaaggtgtttattcagacaaatgacgatgatcactacttggccatgatgggagagtcagcagggctgccggaaactgtggaataa

SEQ ID NO: 448619 - DNA, 1026 bp, Serratia marcescens
atgattattagatttattgagtttatcaagatattggaacgtatcattgattttataattaaaaaaggatatcagctaacaccatcttttctgcgtgacaaacttaatttgattcgacttgaaaagccaaaggtatatcgccctactgcggatataagtactatccttcaatgggagaggatgtttgaccgctacaatcttgatggtatagaagatgagctaagaaatattttggccaatctagttataacggaagaacatcatgagcaaaattttgatttctccagaattcaatccctttctgcttcaaaaagcttcggctgtggtcatgattattcaatcaatgggagttggttcaaggatattgcctcttggggggagggtatgtacccaggaagaaaactttcggctttagatgaagctgactggtcagataacataagacatattgaacatgaaggttttcataagggaagtaatattcatgtatactattacacttggtttgatagatatttagcatcgaactccggcggttcacatcatgcagcgttggttgcgtatcagatcaagaatcaagggatggtatataagagagatgcaaatataacaacttaccgaataaatgagcctcttattaaaaagctagacccttacttttgttttattactggtagcgaagctattactccatgttttggtgatttctacctgtccttggattggattttaacgtcttttgcggtgaaaaaaatttatacatttgatatgaatgcgacggaaaataactgtactttatttatagtgccaaagcgtgatttgataatatcccctagtatatttgaaagctggttgaactctcgcgcaaaaactaatgaaattattcgttttgaagatatattaatggagcacgccagattttgtactacaccttatacccatgagttgcgttcgattcatctgggcgatccaacaagacgtaacgatatcgagataagaaagcatgggttgaaagggcatccataa

SEQ ID NO: 448620 - DNA, 348 bp, Serratia marcescens
atggcaacgaaaatcacagtaaacggcaagacgatggtcgtcgatggtaatcatatccgtgtcagtggtaaccaggtgattgcagatggccaaacggtgtcgctgggtgatggaaaggtcgtggcggtcgccattacgatcgttggtgatgttcaggttcttgattccgaagaggctgatgtgacggtgcaggggaatgttggctccgttcacagcactaacggcaatgtcagggcgggtaatgtgaccggcaacatcgagacgcgaaatggcaacgtcacctgtgggcatgtccagggcgatgtcagctcgagaaacgggaatgtgttatacgggggcgcaaaataa

SEQ ID NO: 448621 - DNA, 1059 bp, Serratia marcescens
atgcgtgcaaaatcaggctatgcgcctttctccgtatacatccgcggtgatctgttagtcgttcaacgtactggggagagcggtagtgtccgtactttatgtactgtcgacctgcgccgccagccgacttttttcctgtctgacgccggggtgatgtgttgcgacaaattgggaaatgtcttcacagttgagtccagcgctaatggtagtaacgatcagttgcttgcggcgttgtccggggcacaactgcaccgggcagaaaaatggggctcccgatggggtacccggttgacgatggctggtgtgttgctgtttatcggactgatgctgggtatttctctcgtgcactccagcaaggtgggaccgttggaactggagcctgggcccgaggttagcctggctcccgctccacaggttgtgccaccgacgcttccgcctcatgcgactaaagctgaacgccctgaagtgcctgttcctgtccagcaaacgcaggctcccgcgccagaagatggctgggcgctgcctgcgtccgtccggtcaaccctgccgcagaagttgcaaagtgctgccgaccgccaattgttcaccgtgaactattcctctggccacgatcgcactttgtatgtatttgccgatcccaactgcccgaattgccggcatctggagccggctttagtggcggcggctcaaatggctaacgtggtcgtcttcccggtggctgtgattgggcgagaaaaatccattgccgccattaccccggtgttgtgcttgccgccggcgcagcggccggcggcctggcaggctctatttactgttggtaccgatggacttcagctgggtaaagcggctgcggtcgataagaaagccgacagcgcctgtgatgtggccgaaaaagcgctgggcgtcaacgaggtggcttatcaggcctatcgcattccgggcaccccctgggtgattgctgatgatggccgctatgtccctcaggctgttctgcgtgatcctgcccaactgagccagttcctgaacgagaaggagacggcggatgcaacaacccactga

SEQ ID NO: 448622 - DNA, 639 bp, Serratia marcescens
atggtgcagcgactgaaaactacacgcgaaggatgggcttgggtttttaaaatcctttatatggtattagctttaccctgccttctatttttagctttggcgtcactgctgacgttaagcgatgttctaaaaagcggtgatctttaccagctatttttctacggtttgatctgggccgcgatactcatccctgtcgctattttcactaagcaggtcataagtaaacgtcgtattctaaaagtcatcacgaacgatgttaaagaccctgagtattttatgcctgaacagggctatgagatgtaccatgaaggtgatggtaagtacctgggcattgatatcaaacgtggcaccatcctttatgtgcatcgtatccgcaaaggtgaagtcgacgtggttgggttggatatgaaagactggaccaatcgggaagtggaaggaaaaatgttccgcctttacaccaagcttccggaattgccccgtattgaaattgcaaccccttgggcccaacgctggtttgatacgctgggttctatggagttcaagcaatatcagccggcgatgccgttctctgagtatgttgatattcaccgtgagcagctggagcgtgaaaaccatatcgcgatcccccgcctggcctga

SEQ ID NO: 448623 - DNA, 2145 bp, Serratia marcescens
atgaaatttctcaaaaggctgtggccagcaggcttgctgctgctcttttcctggccggcgttcgccgatggcgtgaattatcagaccatcgctgatgctgcacagaaaaccaatgacttatcgcgccaggcgctggtcatgatctttggggatgtagtgctacatccctttaaccccgggcaacaaacgttgattggctctctgtttgccattatcaacggtgtactttgtgccatagccctgttttggtttttgaccgtgacgatgaaaaccgtcgtcaaagctggccatgaggggcgtgtttttaatggtgcccgctcgatgttgtatccgatcatgacttttgcgggatttatcactttggtgcctaccggttcagggtggtcgatttcgcagttggtgatgctgtgggctgcgtcggtgatgggtgtcgggagcgccaatctgctaaccgataaagcggcggatatgatggccagcggatattccatggttacgcagccgactgcgccggcgacacgttcagctgcacgggccatttttgaaatgaacctgtgcaaatatgccatcaaccgcgaactgcaggcgctttatgcgtcaggggaagcgaatacgccgctgatgagcacgaaaggaggcaacggtgagtatgtgaccggtaatggcagcgccatttgtgggtcggcgaaaacacctaactctgcccgtagcggcgtctggaatgtgttatttgatagcaaggtcgataccgacaatgtggtggcgtcacaaaagcaggcgctggacaggatgcaggcgtcgctggatcgggcggcaatggacttcgtcgatacctatttgagtaagcgtgatcaagacagtggcagttttcaggatgtggaaactgatatccagaatgcggcggctgactatgaagatacggtcaataaagcgctgaaccaaatcaactataaggattcactgcagagccagctggtcaatcagatcaagagttatggctgggttgctctgggggcctggtatcacaccttcgcgacagctaacagtaaaaccaatgatgtggccaacgccacgccaatcaccagtggcatgagtggtgtgggcgagcacggtacaggggacttgtacaatcaggtgtttacggcctatcgcgcgcaggtgcagaacagtacctatacaccacccttgggaacacaaacggagagtgagattagtgcagccggtgcagctcaagatccgaactcagtattcgttggaattttaaaaagcccaatccaaaaactcacaacccttatagctacaaaaaacttgggtactgacgccgatttcaacggtcaagtaaacccattaattaaaatgcaggagatcggtgattataccttaggcactactgaaaccctgatggctgcttatgccggtacttgggcgattgcatcagcggccagtaactcacctgtagggtgggcaagtaaaatttttgcggttgatgccggcgcagtggttaaggatgttatgggtgcgatggcgccaatgttctatttctttatgtttgcgcttttggctattggattctcattagccgtattcttaccggcagtaccttttattttctggatgactggcttctttaactgggttgtcagtgtgttgattgggtgtggagccggaccaatgtggtcagcgacgcatttgggcgccgaggaggataagggaagtcgtagtgcctatggctatatatttttaatcgacatgatgttacggccttctcttatggtgctggggttctttttcgcttcagtgtcagcaatagccggtggcacggtgctcaatctgttgtttgcttcagcactggctaatgccaatgcggactcgattatgggattggttaaaatggttggttggttgatgatatatgcacgcatttcaacctttggagttacacggctattcagtttagaggcatctctaccggattatgtgatctcattccttggtggtcgtgaagggaataatgttatgggcggattggtcgataatatgaaaaatatgttcggggcggccgggactggatctcaacgaattcctggtgtccgtaatatgccgaataggaccggaaaaggtaatggggctgatggaattcagtag

SEQ ID NO: 448624 - DNA, 561 bp, Serratia marcescens
atgcaaactgagcatggtaagcagaagcctgccgcctcttcgtggcggcgtgtaggaaaagtggggggggcattggttaaccccctctctgatcttggggtgatttaccgcagcggcgtccggccgatattgaataatctggcgagagcacgggcgatgattcgtgctcgtcagcaggttaaacgtgaaccattgacctgggcgcaagcggtggcggctgctggggttccgattgagcagcttcgcaccaactatgtccgtatccgggcattttggtggttcctgatgctggtttgcggcgggctttctttgattttgtcgctgatgcttttggcgagcttcaccactttgcccggcgccatcttgctgagagcgacgatcgcggcattgatcttggtgctgttaggggcggcgggctacgtcaaggcgctgatcgcaacgtatcgtctgtggcaactcactacccggcgtgtcagcgcagaggaaaagggcacgttcgaggattttcggtcggaaaaccgctgttgccggcaaacgatgtcattgggatgttggcgctga

SEQ ID NO: 448625 - DNA, 1209 bp, Serratia marcescens
atgaaatactcagcgacagtggtcgcgctggcggtcagtctcggactgagccagcccgcggccgcgtataccgtttatgtgtccggcagtgcgccgattgaaatgcaggtgatgccggcaatgggcactatcaatgccacgctggcggagatcctcacaacggaaacccagataggtaccgctatcgtacaggccagtgacaagcaagtctcggcggtgactgaagcggcacgcgcgcagcgagaggccgatatctttggccgtcagacagagcgcctggagcgcgctcgtgacagctttacggtaacggacagtatctgcagcgagtcggcttccggtatggctacgcaggtcagcaagcagacacgctccagcgcatcaaggctgtccggcggcggcggggttagcagcgccatggttcgcaagagtgtggcatctcttcctgtagctccccgtcaaggtggttatcgcagtgcggctgtgcatgcggcgtactgtacggcagaagaagcggcaacctacgggggaacggatctttgcccacaggtctccccgttgcccggcggcgatattgagttgcgttccctgatggatggtgcgggcgctgtcggtaaagcacctgatctgaccttcaatcaggaacaagtcgatgcggcgatggcttacatgaaaaactcgtcccgtcatgatgccggacgcacgccggggaagggggatattcaatcggccaccggccgtgagtatcaggggttgctgacgcaatataagtcaatacagagtgcggcctcgcagccccagctggacttaattgcagccagccagcctaaccccgctacccgtgaggcattgggggagtcgttacaaagcccgtcggccagccagtatttttcggcgacggcgagtccggaggcacagaagtccggggtgatgagcgaacgggaatatgaggcgttcgaggttggccggcgatacgccaataccgcttatgaaactgacttgcaggcaatgagtggcgataacctgacgcgggagctggtacgtgtccagagcctgggcaactggctacagctgggcattaaaaacgagttgcgaaaagcgaacgtgattgcgggacagcagctggccatggcggccaaagcgcaatatgcgccgcagctgcagcagttgtctaatcagatgagcgcaggagtaaccgcgaatgcaaactga

SEQ ID NO: 448626 - DNA, 3063 bp, Serratia marcescens
atgctgagcccgatccgctggattgaagagataattactgcaacatcccgctttgccgtgtcgcgggatttgcctgactactgtgatttgcagacggtgatccgcctgacagatgacgaccgtatacgccatcctgagttggaggccccctatatcttggtgactgatgacggtgactattgttcggccttctccgtcgccggcagtttttgcgacactgatgaaactgccccctctgatgccccgttttcctggatggggcgcatcaaacgcatgaccgaatcgctgaatgcggtatatcgccggcatggtcataaattcagcctggtttacgaggatgatccctcgcgcggggaagaagaggtcagacgcctgatggcacctcaataccgctccattcggcgtaccggtattgcactgaaggaaattctcgatgagcgggtggccaaaataagcccctgggtgtcacgagaacgctgctatctggtgtgttataccgggcgcaaggcgttgtcagcccacgaactgatggacgaaaacaaacgcctcaaggcacttatccagcaaagcccggatgcgcgttttggccaaaatccggtgttggcggagatggtggggcaaaaaatcaggcatgacgcctttctcagcggtatagaaacggcgctgaaggacaacggggaaggtgtactgctgagccgcctggacgcgcactcagttggtcatgccttacgcgaacaagttgatcgcgccggcacctccgaacactggcggccgttgttgccggacgatcctatcatgccgcatggcgtacgtgatggtgaagaccatacgccattcctggcgccttggctgaacttccagctgatgaatcaggatgttcacccgcagggcaatatgttgcgcattaatggcgtgtggcatggcaccttgtctgtcgttcttgggccgcaaacccctcagtcgtttgcacatcttaaagcgttggtaccgcgcgcggtgccctggcgggttcgcatggatgtgatgcctggcgggatggctgcgctgggcgtcaaaaaagggacgctcgactttatggcgttcgtaccgacattgcgaccgatttggaagtccattgcagcactcacccaggttgatagaaatgaaccggtctgcgtgatgacgataacggcggccacctggggggacagcccgcaggcggtgacccgtaatctgacgctactgacacaggctttccagtcctggggcgtatgcgaggtgacacaaaccttcggcgatcccgttcgtgcctgggtttccactttggtggcatccagcaaaggcagtggtcctaatccactgtatccgccgctatccgaagcgctgaatctggccccactgacgcgcccggcctctgcctgggaagacgatggcaacgcactgttccctacgctggatggcaaactctaccctgtggggttggccaccagtaagcagaacaagttgaccagcctggtatcgggttcaccaggtacgggtaaatcggtattacttaatgccctgggtaatattcaaatcaccagtgcccagcaaaatctgccgttttttgccggcgtagataaggggttctcgatgcaggggcagattgctttgctgcgggacagtttaccccctgagcggaaagatgaagtgatcggcatagtgttgcaaaacgataaggcgcattgccggaacctgtttgatatccagttgggggcacggtacccgatccctcctgagcgcaactggatactcagcatgctgaccgccatgtgtatcgatccagagaccggaataccgccgaacgcacgggatacacgccaaattctcaatcgtgctatcagtaaagcctattctatcaatgctgaaaccagcggtgctcagctctatagtcgcggactgccggggctggcgtgtgttgaccaggctttggataagctagggctgttcgagcggttcgatgcagactggtgggagaaagcggtgtggtatgaggttcgcgacctgttgttcgaaggcgggtacgttcgggaggcccagctggcgcagtttcaggccgtgcctgaattgtcggatatgacccggatcttgaacctcgatgagattaaaagtgcttatggcgagatccagcgtgacggtagccaggaaaaattgctggattatctgttccgttgcatgaacgacgcggtcggtgacttcaagatgctggctgggcgcacacaatttgtaattaacccccgcacccgggttattgccattgatctcaacaacgtcatgggcgacgacagtaaagaggggcacctcaaaacggggatcatgttcttgtttgccgggcaggtggcgggcggtgacttcgttttgcctcagtaccgagacgcgttactggccgcggtcgataagcgttatcacgcattacatatcgagcgattggaacagttggatcaggaggtgaagacaaagggatatgacgaactgcataacgccaagaaagtgccttttatcttcccgatgctggaaacccaggaccgtgaacaacgtaagttcggggttcgcaccgtgttgtcctctcagtatatgcgcgacttccctgacgccatcctccgctcggctaactcactgtttatgatggaagtcgatccggatgatgaagcgctgctggtcgaccgcttcaaggtacctaaggttaccctgcgtaatttccagcgctgcggcacaggcccagcgcccgacgggagtggcgtgccgttcctgggcatctttcgtatcaagggcggtggcacgctcgccagaatattgaaaaacgcactcgggccccttgaactgtgggcgctgaactcttcaccgatagacagtccactccgccgcctgttgtacgagcaggttggtgggtcaacggcgcgcgccattctggccgaagcttttccgcagggtactgcggagaagttgatcgaactgcgaagaaagcaggccggcgatgtcgatgccggcaatgttacgcgtcaacttgcctcagagcttattgccaaacgcggctatcacatctaa

SEQ ID NO: 448627 - DNA, 615 bp, Serratia marcescens
atgactaacgctcagttaatgccggccccattggcgctggatatcagcggcgatccccaaacaccgttgccgctgcagatggaaggttcacgttgtcaatgttgcggcctgcatattcgcaggctgtggcagggggcccgagcagggtttgatgagccccatgcggtatgcaccttgtgttatctcaccggacatcttgacagccccaccgcagcgcatgcccggctggtctggcttccaggcacgtctctgacgaatgcccttcatctgcagcgtcagattttgctggcgatgattgcaggcaatcgcgcgcagcaacgtgaaggaaaacgtttgtggcgctggatggtgctccatgcgcgcgaagtggaaggggcatggggaacggcgcgcgtcggcgagtttgctgccgccatgttgcgattgcccccgggcaagcgggcacgcttgcaacaacgcctcattggctgcgtacccgtgttcccacctgatgtgttcgatgatctgtcgctgttattgccagaaggtaaaacagcgacgcaggccttaacgagctggtgtttgcctacttaccgccggagtgatttgtatgctgagcccgatccgctggattga

SEQ ID NO: 448628 - DNA, 387 bp, Serratia marcescens
atgcctaatgacatgatgctgaacctttccgtgcgcgtttatttcctgaaaacatggttacgtcagcgacttagtgcgtttttatccgcggctgctgcagctcttcctgtcgctgcatttgccgatggtgatattgctgatatggcaaatcgggctgctgaaggtgcgaagtctggcatcaagtcgtcgctgaccatcgcgcagttcgctggcgtcttctttgttatcggtggactcatagctgccaaaaacaagaaagataacccgcaagttaagacctggcacatcttagcgtccatcctgtttggcgtttgcctcatcgtggtgccggaaattatcaaacgggcgcaaacacaggtggggttgacgccggtcaacgtcggttaa

SEQ ID NO: 448629 - DNA, 543 bp, Serratia marcescens
atgcctaacggaagtgatgctatccagctgctggttaatcttgcccacaacgtgcaggggtcgtttacccgtttggggtttacgctggccatgctgtttgccgtggtgggcgcgataacttttctggcccaccacgccagtgcttcacgcaagtcgccggggcaggccgccggtggagggaaggttatcgcctggttgctactgtgcggcgggctggcggggttagatcaaatgatcggggctgccgccagacaggtggggtggcagggggcgaccttcgacgccatcagctatgtggatgtcggtacctttggcgtggcggccgatgccgcgaacgccatgctgacgctgatccgcgtatttggcgtttatatcgcgctgcaggggatgttgacctggcgccgctcacttaaagatgggcatacggggttatcggccagccaggacgtttccaccggaagcctgaaattcacgctgggtatcatgatggtctgcagtccttatctgcttgatgccctgcaaaaatcccttggcatgctgtaa

SEQ ID NO: 448630 - DNA, 720 bp, Serratia marcescens
atgagtgaattttcgactgccccgacagtaaccaccccgtctgaatctccgccaacacatcctatgcccgccaagcctggcttaatgcaacgcaagttgctgtttggtctcacattgccctggctggctggggccgttcttacactgggactgtcggcagtttatctgtttgccccagatttgaatggcggtgacagcggttcggcagcaacaccggacgcatttagtgaatctgagtatgtgcaatctccggcgccagtgacgttggcacccgttacctctgccgggggcgcggatgcggttcaactgcaaaacgacgtcgctaccatggtcggtggtgtccgttcttttgctgaaaccaaccgcacggcgatttcccgtttgtcggatacggttaaaacgcagagtaccgcgctggccgcgatgaaacagcaaatggcagacctgcaggcgcagaacaaccaactgcttgtccggttgtccgtgcttgaagcaaagcccgtagccgtggtgtcgcaggttaacgaccgtgcggttccccgggcccgttctgcgcttgccggcatgcggcttgatgcggtgcaaaatggcatggcgtgggtgtactggcagggtaaaacctgggcggtcaaagcaggcgatcggctggggcgagtgacgatcaccgacatagatgcgcaggcgcgtgaagtcagcaccagcgcaggcgtactgaagtga

SEQ ID NO: 448631 - DNA, 1347 bp, Serratia marcescens
atggcgagtgaaaatgatgcaggaagggataaaaaactgacattgactctggtggcctctgccgtggtggcgttggtgggggggacttattttctctggagctggctggcgactcctccgccggcgccatcccaggttgatatcaatcgcgtcggggcgtcggtacacaataaaggggctgagacaccggcgtatcgagagctactgcgccagtataaccaggaaggcgtgacggccgcgcagcaacgcaacagcagctttatcgcgtctatcccgctggagcaggagccggtgacgctgccttcacaggctgcaaatgcgcgaaaaccatcggtagccccctctgtccggcagggacgcagcgactcacgtcaggccgatactgacaggcaacggcaggacgagcggcgtcagaaagcgctggatgcgttactggcacagatgacgccgcaagcggattcgacaacaccacccgccggtatacaactggctcaggcacttggcggtggggagggtaatgcacccggaggacgcggtgatgatgttttgggctttggcagctggagtgccagtttgccaggcaacgtatcggtgcaaacggcttcgctgaatgccggtcagggaggttcaccggtcacgccttctgtggtcatccctccctactggcgcggaccgggggtgattgatattggtgtggattcggataacagcacgacgccggtcttggggaagtttgtatcggggccttatgccggcgcggtactgaaagcccccaccggcgcgaagttggcgggagatggtgtcgtgatccacttcaccgaaatggcctttgggggcgtcaattatcaggttgacgcgtatgcgttgaatgatgagagcctggtgccgagcgtcgcctcccacgtcaataaccattacttctcgcgcattgtattgccggcggtgatgaaggggatcggcggtatcggcgagatgtatgcgcaagccaatacgcaggtggtaacgaacggcttcaatgcggtgacgacgcggccgggtaccccggatggtaaagccgtcgccggtgttattgccggcggcgccgccagccaagcggcaaacgtgctgagcagtgatgcggcacggttaccgccgaaacaggtccttgtcgataagcaacaggtggtcgcgatccagttcatgcgcggggtttactcaaccgatgcggtcaacgcggggacagcggcggcgcccatggtcacatcaccggtggtgacaccgacggaaagcatgccgcggacagagagtgactggcggtcacaaacacaggcacgaatcgaagcacagcgcaggctgcaacagcaataa

SEQ ID NO: 448632 - DNA, 990 bp, Serratia marcescens
atgaaaaatacccttatgtgcactttgctggcgctgatgacggcgccggcctgggcagaggcacccgctgcctctgcgccgtcgggttggtcacaaagtcaggcgcccacggctgcggtgccggcggcaccggcagcgaggccgatatctgaaccaccattaccgaatggcgccggattatctggtaacgatccactgcccccgccttcaccgttgtatgcccaggctgaggaggccgtatctccactgacgccggatgagatccggcagttgcgggcgcgtcagtccgaggtgaaccgggcgatgacatcacctcccgtggcggtggtaccacgcatcagcgcgctgaccgtcgacctggcgccgggggccagtttgcccctggtgcgaacggcaatgaactaccccagttcgctgacgtttatcgacagcaccggtgctccctggaaattgggtgcagcgccgatcagcggtaatccggccttccagatttactgggtgcctgacagcccggtaatggtggtctatgccaagcaaccttttgtcagcggcaatatcaccgtttatctgagtgggctgtccgtgcccatcgtgctgaacgtcaccagcggcgaaccggatacggatgccaaaacctggacagtagacagccggctcgatatgcgtgttccacggcgcggcccagctgccaaagcgacagcgatcccggaaagtcgcattggcctgcatgacagtacgctgcagaccttccttgacggcataccgcctaaagaggcgcggcggctcaaagtgacggggggcgtaccggacacgacggtatggcaactgggggatgatttgtacatccgatcgcgcgccgatattcgtgatgagtttgaagcgacgctttcctctgccgatggcactcacctgtggaagttgccggtaacgccttatgtgacgttttccgttatgggaaaaaccaccgcgctgaacattactctggagtaa

SEQ ID NO: 448633 - DNA, 708 bp, Serratia marcescens
atgcaaacgcaagaacagagttctgccgaggcggcactggcgccgaacatggcacccccggcctcagacgatgagacgcgtgcctttgcacacgccctgtccatgcagcgccagcgtgagctgggcgcggcttttgctcatcgctgcctgaacgtcgtggtgtggttgtgcgtggcattggtgctgtcactttccctcaacgggtatctggggtggcaggttgcacaccccccggtcaaatactttgcaactgagcaaggacggctgacgcctgccaaaccgacaaacattccggcgtttagctcggaggatgtcgctgcatttggcgccgatactttacgtcaaggctttacgcttgattttgttcactatcgcgcacagatgacgcgcgtggagccgcgttttaacgaccaggggtttgagggctataacagggccctgacatcgtcaaacatccttgccgcagtgaaaaatcagcggatgaacctgtcggttgatgtggcgcctggcgtcatacgcagcaaagggttacttggcgatcgttttacctgggaattccagtacccggttaccctcaagcttgatggccagcaaaccagcacgccggcccaacgttttatcttcactctgcgcatccagcgcgccgatgttcaggaaaagccggcgggacttgaagtcactcaaatgatttcgacaaacgccaactga

SEQ ID NO: 448634 - DNA, 354 bp, Serratia marcescens
atgtttaaaaaaagcgtgtgcgccgcactgcttgcggcgttgtgctgtctgccggctaccagttttgcctccacctgccgtgcgggggctgcggctgaagccggcagcaaagccggttatgagcaggctcgacgggccgccgaagcctgggcgtcgcgagaacagaatgcctctgaccagttacaggattgtttgtcgcggatacgtacaaccactatccaactgcccacgttccccagccttgccgacatcatgaaccaggtgtccgagaaggtctgtcaggcggccgttgacaagatcaacgactacatccccggcaccattgacccgtggcaagagttcacgggacgttaa

SEQ ID NO: 448635 - DNA, 3312 bp, Serratia marcescens
atgggagaaaaaaccaaaaatcgtctttggttggcggtgcgtcacgaagaacgcgagaaggctcgcaaagccgcagggctacttgatgatggccgttcggcgctggcctgggataaagatgcggttctgtggtatgcgcgaccggggtgtgatatcgagcgcgtgaaggcttggttacccgacaagaccatcagcactggcggcggtgatgcccaggcagaatttcacgatgcccttacgcaggcggggttaatcgtgaaagggttgccggtgatggatgggaaacggcatcgcgtcgctacactggaggataagaaggggcaaaaaagtggtgtttatcgcgggttccttgatcggcgccccggcggttggttcatcaactatcaccgggctgagacggaaaagtctgtcacgaattggaaagccagtggaacagaagccgatcccgttgcccggctccacattcgagcagctgctcgccaggcgcacgatgaagctgaacgggcgcgagaggccaattaccgccgacagacggcgaaagcgcaggcgctatacgacaagcttccgggcgcagaccctgcccatccttatctggtgcgaaaggggatatccccgacgccggagctgcgacaaactcaaaacggtgccctggtggtgccgttttttaatgctgagggtgaatttcgcaccttgcagtacatcacgcctgacggcgataagcggctttacagcgatgcgccaaagcaggggaatttcttggtggtgggcggcccgctaacgcctgacgcccctgtgttgtatgccgaggggtatgccacggccagaagcctgaatcttgctactggccagccggtcgtaatgaccattgatgccggcaacatggccgcaattgccaacgtactgcacgcgcgttatcccgataccccacatatcttccttgccgatttggatcatgcaaagaaggtgaacaaaggggtgatgatggctactcaggctgcgtcatcagtgacttacggtgctgcaattgtgcctgattttactgatgcagaaaaaaaactggggctgaccgatttcaatgaccttcaccagtcgcgagggctggatgggctacgtttgctcgtgaccgccaacattgcccgtgcactggatattatccaagaggaaagagaaaaaatgaaccatccatccgatggcgctccgctgcccattccggaagaaccaccgtttgcaccggttgaggcagcgccgccgatgccgacagagccgccctctattcatgccgatgtcgggcctgttgagccgattgtggatcaccttcccgtagtcgatgaaacgccgatcgatattaacgattatgcgtcctgggccgcgcaagccgagacatcgggcgtaccgttacctgatatgggcgccgaacctgaagaaggccctgtggtttctgatgtagtcgatcgttccggcgacacgcctatttctctggcaggacggcttaatcctgaaggaagtgcacaacctgcaccggttgatgctgcagaacacattgcaccgattcctgaggctgctgaaccaacacgggagataccatccgatacggtcagtgacctggaggatgtgccgcctcgccaacacagtgaacctcagctagaaaataccataccggcgtcacaatgggcccatcattcggagtccgaacaggctcagaaatcatcaacagtcgatgcaatctgggtgggcccaccacgtccgagcagcaaggcggctgatcctgatgtggcgttgatagacaaggatgcgttacttcagcggctgtcatgggaaaagcagggggacaatgcggttctctacaaattggataacgaacccgcgttcatcgatcggggctcccgattggatatggcggagggggccagccaaagcgatgagaaggtactggcggcgttgttgaccgcggcacagtattaccgtggccgtattgaattgaccggcagtgacgcttttcaggaaaaagcgatcgccctgattgcccggcatgaaatcaatgtgacgatgaaggtccctgcccagcaggccatgttggaagattcgcggaaaaagttggctacgccagtgccagttagtgacgctgtcaccggtgatgccgtgccaatgccggaaaattcccccgcatcgcaaccggctacatcgccggtgcaccattccggccctgcagctgccacaccgcccgccgcaccgcaagaagctgagccagttgttgagacgcggaatcatccagcagccaggcagcaagagaatgctgcccagcctgacaacggtattcctgccgctattcaccaaagctacaaagccgcggcggcgggtgtcaccggcaaagtcctcaaatgtggtaccgcccctttccgttttgaacccggagaatcacaaagctcgttcattacgctgcggacacgggagggaaaacaaacattttggggtaaggagttggcggggctaatacgtgaaacccgtatccagcccggtcgtatggccacgcttacctggttggggaaagaagccgtaaccgtgcaggttccgcagaaagacgatcagggggtggttacccactttgagtcaaaaacagcgcatcgcaatcagtggtctttgacccctaccgggggtgatacggtacgtaccggtcaggatgatggggtcaagttggcggcatttgatgcggcaagatttgccaaaatccagtcgggcatcatcaaccagctgcgtcttgatatgccaccgccggcagcgcctcaggaaggggtgtactggctgcggccagatgggcagggcagtcaaacacccggtgatgtgctatctgcaccgcggccatccatggataagggggcgggagagccggttgccagcagctggacgcaggatggtcatcttgatctatacctggtgcgcagcgatggcccatatctgcagggggtggttcgccatcagggagaatatcagcatgtgctggtgacgttacctggccgagaggatgcgcctcccatggtgttcaacacgatcacccctgagggggcgagacctgtaggctgtgggaatgggatcaaccgcagcagtggccagcccgtacctcgcgagaacatcgccttcaagctggaaggcgatagccaggttcgaattggcaaactggatgctcctgccagtttaccgcccgcgcttcattcccgactgggttttgacgaacgttggcgcgatgagaacgcttccccaaaggccgcgccggcggcagcgccaaaggcgcagccgggcgaccctcgcccgatataa

SEQ ID NO: 448636 - DNA, 288 bp, Serratia marcescens
atgcatgatgagcaggaacctttgccaccgggctattggcgcaatgcttctcgcaaactcaatgtttacggtgttccggccccgttatttttgctttacctgttctggttccgcttccctacctgggacacgatttatgtgatcagcggcatcatcatttttttccgcattctgtcggcctttggttggacattgacggtacttattgcgcggttggtttatctgctgcgtggaaaactgctgtcgggtcgaccgtggtggtaccgccgttttactgaaggtgagtga

SEQ ID NO: 448637 - DNA, 1176 bp, Serratia marcescens
atgactgaatcgactgagtttattccctataacttcgagaccggcctagatggcaatgcacttaaaactttttttgtctggtgtgctaagcagagtgtcagtgatatccatattcagggcggcaatcacctggttgtcagccaccacggtcgattgagacgagccagtacctttgtgctggctgacgataccctgtccaaactgattgacgagatctttgaaccggaggtgcgggcaacggctgggggcggctatccagtcgacagagcgctgcagctcgatggcgacatgtaccagcgctatggtctggatcgtggtgaacggttgcgctttcgctgcaattttgtgcagtctacggctgggcggttggatacgactattgcattgaccatgcgggtcatcccgaccgctatccccgaactggattcgttgggcatcgaggatgacctgcgcagtgttgttctgcctcataagggattggccttcattggcggtgaaaccggctctgggaaaagtacctttctggcatcggtctatcggcactgtatcgatcacgatcctgaccggaaagtgacgacgacggaagatccgatagagtttgttctgggtaagagcggtgatattttgccggcgactcagctgcagatccgtcgtgatgttcctaattttgctgagggtatccgcgctgacctgcggcgcgcaccctcggtgattggcgtcggggagatgcgtgatcgagaaactgtggaagcagggattcaggctggccagctaggccatttatgcctatcgacactgcatattcactcccccggagaggccattcctcgctgtttgaacctattccaggcggagatccgtgaggcaatcgcgcatgacatgctcggtgtgctgcaatacatcgtggtgcagaagttgctaaggacaactgatggcaaacggcaagctgtgcgcgaatacattatttttgatgatcctttgcgagaaaggctatcggtaatgccatacgtcaaatggggccaacacattgacggcattattcggtcagagaaacgacgcattgccgatcatgcttggcagctgtatttacaagggcggatcgcacgcagcgagttggccgtcgcccttacgagccatcagttgcgtgaactggagcgaggtcattcacatgcatga

SEQ ID NO: 448638 - DNA, 813 bp, Serratia marcescens
atgaaaaagtccattctgacgctacttttcgtcaatggcgtactgtgcggccaggcagcagctgcacaatccccttcagagtctgcaccgccggatatgagcagttaccttagcccttcacaaccatcatcgtcggatatttcggaaacccgtcgccaactgctcgaagaagctgggcgtacattggggtttcgaggtggaaaagcgcagcgttcctgggaattacgccaaacccttgatgctgtgtccaaaaatttggatgccttatatgacttccgaaccttgatcagtcgtcaaggatggctaccaccggtgatcagtgaagcgcaggatgtggcccatatcacacctaatcagataagaaccgctacgcatgtttatgaaattctcacaccggagcgttttgtcagtaacccgccatcctggcggagttggcttaacgccggcttgtccacttcggctgttgatgggcctgaagcggcagtgattccggccaacggcgcccagaaagcgctgtggcaggcggcggtacgaaagggatgggaagaagggcgagagagtgctgaccatacattggaagccaatttcaatcgccttacccgagattaccgcggcatgttggtttactcacgcttgttgcaacaggggtatatcacctctccggtggtgactgaccagcaacaaaccgtcagtggcgatcgcagcaagttgaccacgggtgatcgagttcgtcgtcttaaggagcacgctggatttgtgcctgataagacgaaatggaagccggtcatacacagagagggagaaaatgactga

SEQ ID NO: 448639 - DNA, 1077 bp, Serratia marcescens
atgaaacaagataaactggctagcgtccaagcgctgagaggactggcagcgcttgctgtcatgttatttcactttcgttggaatataaacctttcctatcctaatctgggtgatcagttattcggatggggggctgttggtgttgatgtattcttcataataagcggatttgtcatcacgctttcagcgaagaaactaacaccaggactatcagcggcaggggtgtttttgaaacatcgcgcaaggagaatacttccggcctattttattattctgctaattaccttccttttatctggagccatgagcacgttccattatccagataaagtgagtaatttaataagtgcaatcacgttctccccaatcgatgccaatcatgcccccttctatgtggatgatagtggtttctatggtattaggtggacactgaattacgaagtgttgttctacttagttatggcagtttgtctgatatcaaaataccgatggccattgttgtttggtatgttttcgttaagtctggttgttttccctatgttggctggacattcaccgaccttggatgttagtggttatcaattcgattcagcttacttaaatctcatgacgaaccccatcatatggatgtttttggtgggcgttgcttttggtcttgtttatccctatacaaaaaagctaaatggccagttgcgcatgtcaatattaattatgtcgataatcgttataggctactgcattctatttgtcccgtcatgggggcatgggatgacgatgtcaggatggtatttgtcaattttgtttattgcagtggtattaaatgatgagcttgtaacgaaatgtattcctgccttctttattaccttgggagagatatcattctctctctatctcatccacacgctaatgaatggtgggataggtaaacggtttgaagacattggtgtggctgatggtatgccaaggtttgctttgtcatgtgttgtatctatcgtattggcatacttgtcatatagatttattgaaaggccagtgagtcggagaaagaaagaaacagtaaagcatgaggctgtgtag

SEQ ID NO: 448640 - DNA, 1353 bp, Serratia marcescens
atgactgctgaaaatgccactcctcgtattaaccgggggggcgcgttggtttctatggccatcgttctggcgatcgtattgattgccgcccctatcgggcttgaaagatattccaattacatagaagaacagagctgggtcgtgaccgcgacgcacctgagcacagtaagcgggggggcccgtcgatatgtgaaagataactacgacacgttgctgaatcaggtcaaagggggaggcaacgtcacggtaaccggccagaccctgcgcgataaagggtatttgccggcggggttttcccttaccaacaataacggccaaacctatattcttgccgtgacacgcaatccttcgcaaaccgacaagctggtcgcctttgttctgaccgccggcggtcaaaatattacgttcaagggccaacgctatatcgctcagaacacgtctggtttgggggggtatatcgaacccgtcaatatcgccaacggtgccggcggcggctggcaggtcaacctgtcgagtatggggcttagtggacagagtggacacctggccgcttacctgacgtccgacgtattggcaggtggggctgaagagagtgatcgcttgtatcgcttccaggttaacggtcgtcccgatcttaataagatgcatactgcgattgatatgggggggaacaacctgaatgccgctaatgatatcaacgcacaaacaggtaattatcagcagaatgtaaatgctcaaaacgttgtatcacgggatggtgtggttgcgggaggtggaattgccgctgcaggggatgttcgtagtaattacggctggttggtaacaaaacatggtaagggttggctcaacgaagaccacggcggcggattttacatggatgacaacgactggattcgttcggttaataacaaaggtatttataccggcggtcaactgaaaggtgggagcgttcgtgcagacggccgggcatctgtcggtgaatatctgcagcttgatggcacggcaaatgctggttggggatgcggcccaaatggacttgtaggtaggacaccggaaggcgtactgctctcttgccaaaatggcatatggaagtccttgggggcgttagatacatttaatgtgacgagcgatgagcaatgccaaaacctgaaagaagctagagcctattgccctgcgggaacaaaattagtctctggaggatatcgactgtctcgttggacatctaatgattcagcacataactcccctgatgctgcttatcctgacgtcttttcaaatagctggattgtagttacgcctaataatgaatggcgtacaacatgttttcagtctattgcaatttgtacgaaatga

SEQ ID NO: 448641 - DNA, 426 bp, Serratia marcescens
atgttttactggattttatctgtattcctggggttcctggtatgggtcaacatttctccccatgaccaggctgggactcagctgcaggatagcacgctgagtcagcgcgctattcaaaccatccgttacatcaatgacatcaatgactggcgctataacaaccctgcacaaaaagacggtgtgatccccgacagcgctttcggctggtcatccgttggagggttgcgcaatgttttgcaggcagatcgtgtgtatgtctatcagccagatcaacctgggttgatggcggcattgttggcgcagagccgatattccgcgctggttggcaaagtcgtcggaagacgcctcatcgacagtgttggcaatgacatgcaggtcaatgtgccggcgagcattactgacggcagcctggtgtacctcaactaa

SEQ ID NO: 448642 - DNA, 1041 bp, Serratia marcescens
ttgaaaatatttctccccgttgccctggcgccggtggtgttgagtggatgtgctattagcccatcttcgccgccgcgcgttccggctcaagagtttgtgacttcgttgatccaggagcaaataccgataattcagcgagcacaggcggatctggcccaagccagccgggttcgtttaaaaccggtgcggacggttcctgagtccaggccagcagccacatcgttgaggcgtcagccggaggtcattcagcccagggcgcttgcaggtcagccggtacctaccctgcaggctatccgttatatcggagagcggccagccagtctgacgcttgccaagccgggcaaagcttcaacgctccgtcaggctatacggcagattacccctcctggttggcaagtgactttctctcaagagcttaaaccggatgtccgcacttcactgcaatggcgtggtaacgatcagtggccgtttgtgctggatgacgtgctgcagcaacagggcaaggtcgcgctggtcgattggtcaacccaacggatttccgtcgcggctaaatctgttgaatttactcctggcgccgtggctgcaaattcgcctaaaagcgcatcagatactccgtcctcaaccccagcggtaaccgataagaaaggcagtgtggtatcaggccgtaatccatttggtggcagtaagccggtagccacctcgagcccaaccccggcggtaaaaactacagcttcgttaacactgcccaaatcggtcattaaaccaaaggtttggcggatcgaagcggggagcacgttgaaagataccctgttcagttgggcggcggcagagaagtgttccacccctggtgtcgctaactggactgtcgcctggttgacatcggtgaattaccgcatcgacgccccactccagtttgaaggcagtttccgggatgcattgaatagcctgttcaccttatacggtacggcgaaagttccattgtatgccggtattcgccatgtccaatgtgtcatttcggttgatgacaaggaaatccattga

SEQ ID NO: 448643 - DNA, 276 bp, Serratia marcescens
atggctgccatcgatcctagccaatttaaggcattacacaagtattttccggatttaacactcactcagttggctaccgcctatatgtactcgacaggaatccctgtgggaacgattgctcagcttcgagatgtatcggaggacactgtcaaagattctctcaaagcagcatgtcatcgaatgcacttaacgtcgatatctacgatggggacggcgatccagcttaagctaaaccttgagttgttgattgccattgacaccctgcaaccaaattga

SEQ ID NO: 448644 - DNA, 1956 bp, Serratia marcescens
atgaacgttatcatcccaccaaaaagacgagacggcggcaccagctttatgaagctggtcggctacctgagtctgcgggatgagaaagaacctgatgacgttatcacgcctgataagacttcaaagacctcttcacgctccagtcaggccatttttgatcgcctggtagactatgttgagcggcgtaatgatttctcacctatgcaggttgtcgctagctttcctgatgggcgagagcaagtcattgtcgggggcgttgaatgtgaaacaaattgcttttcactagagacagctgcagctgaaatgaatatggtttctgcgcagaatagacactgtaaagaccccgtctatcacttcattttatcctggcaagaggatgaggctccgacaccgtctcaggtgtttgatagcgctcgccattgcctggaaaagctggggatggcaaaccaccaatttgttaccgctatccatcgtgataccgacaatattcactgccacatcgcagttaatcgtgtgaatccggaaacgtatcgcgcagccaatttgtggaatgatgcagacaccttacaacagtgttgccgcgttctggaaaaacgttttggcttcaaacaagataatggcagttgggtgtggggtgataacaatacattgcgtcgtgcaccctggcgttttcgtaatgctccacagggagctgccaagcgggagatcttctctgacaaagaaagcctatatcattatgcggttcggcaggtgcgctcaaaaatcaccgatgccatcaagaacaagactgcaagctggaactattttcatcttctgatgcatgccaatggtctggggttgcgtgaacaatcgggcgggttggttatatacgatatcgtgcgaccagatactatgatggtgaaggcatctgatgttcatccgtctctttctaagaccaggcttgaaccatattttggtcagttcgaagctccaccaagctttaattctgaagacctggaagagggggcgtatgcaatctataaccactaccaacctgaattccaggtgcgcgatcgggaggcgagaaaagagcgtcgtgaagaaagggctgctgcgcgtgatgacctcaaattgcgttataaaaaataccgcgatacatgggtaaaaccagacttgaacgtgagagcacgctatcaggaacttgctgcacattatcaggcaatgaagggtaatgttcgccatagctaccgcgaccctctgctgcgaaaactgatgtatcgcgttgctgagttcgagcgaatgaaagcgacggcggagctacgaattcagatccgagaggaacgtaagacgctgtttgagtctggacaatatcgtccgttgtcttaccgttcctgggtggagcgcgaagccttaacgggggatgttgccgctattagccagctgcgtggatgggcatatcgtgagaagcgtaaagcgaaagtcgccgaaccgaataagcataaagacagcgtattggtgttcggtgtcgccgacgactcaccgttgctcgaacggtctacccatgcaactcgtctgcaccggaacggtacagttgaatatctgcgggatggggttgtcggtgtagtcgatcgtggtagccaggttgagattaagcccgggttcgaggattacgacgataccgcgaactaccacctggctgcagagattgccggcacgaaaagtggtgagcgagttgaagttgttggcaccgacgatttcgttgaccgcgtactggttgaaggctgtcgcctgaattaccagcaggaaaaagaggtgttccggccaacagacaactggcagcgcggtcgctccgaggtacttgagcatcgccacgttagaccagaaatgggttatgacgctccagctgaatctcgtcaggctgacgagcccgaagatgatgcaccaagagtgaattcgtattggggaccacgtccttaa

SEQ ID NO: 448645 - DNA, 333 bp, Serratia marcescens
atgtcgaaaagcgagtcgcgtcagaaaggaataatcatccaaatccgatgcaccgaagaggaggctgaggccatcaaaggcaaggccaaggcagcagggataagcacttccgagttactgcggcgctccgcgctgaaccggaagataatgacacgaacagacacacgcttgatgaacgaacttcttcgtttgggtggtttacaaaaacacctctacacccaaatgcaagaccagatgactcaggaactcagtaagcagttttctgacgtgctggtcgaagtgaagaaggctatcatcgctttggatttgaatctcgtaccagcaaacgaataa

SEQ ID NO: 448646 - DNA, 537 bp, Serratia marcescens
atgcttaagagacgattcgatgcagagaaggccattgaggccatcttgtacgttgcctccaatgcgccgatccctgacttgtaccacgtcgggaagattctttattatgcggaccgcttacacttggagaagtacggtcgccagattactggtgatagatacagggcaatgtataacggccccgttgcgttcggagtgtatgatcttctaaaaactagcaacaaagacaagtacgaaaaacagtattgtccatgtgacaaaaaacttgtgacgagctcctttgaaatgcttggggaagataaagatcatttggtcgttagcaaacgcgactacaatgctgactttttcagcaaatcagatatcaaatgtattgatgaagcgattgctatggtcggtaggttagaatttggtgagttgaatgacttcagccatgacgaagtctggaagtctgtaaagctaaaccaagaaattcctttagaaaccattgcaagtcattgcaaagacggtgaactcttggttgaatacctccgtggctga

SEQ ID NO: 448647 - DNA, 507 bp, Serratia marcescens
gtgaaacgggtgctattatcactgttgtttgtttttctatcatttagtgttggagcggagacacttgatggttatggtaagtcaaaatgggggatgtcacctcaacaggttgttgaagctgaggacggaagggcccacttattaaaaacacctgttaagtattttaatagctttggtaaagtatccatagatagcgttgagattggctcaagtgactacgaagtcatttatctttttgataaagaaaacaaacttgttcaagtgaacatttcatctaaagagaaagaaaataatctcatcaacgacagtaactttaaaaccatagaatctcttttaactcaaaagtatggcgtccctacatatagggaaaatagtgttaagtcgatttggaatatgaagggaacaacaattgagttagagcatatttatgttgccaatgttgttactaaacttaatattagttatgtgccagaagcagtgacaaaaaacaacacgaataatatttaa

SEQ ID NO: 448648 - DNA, 438 bp, Serratia marcescens; identical to SEQ ID NO: 134213

SEQ ID NO: 448649 - DNA, 501 bp, Serratia marcescens
gtgcgttacgagctcaaaactccgtaccgcaatggcaccacccatgtgatcttcgagccgctggacttcatcgccaaactcgctgcgttggtacctaagccgcgagtcaacctcacacgcttccacggcgtctttgcaccgaacagcaaacaccgagttcaagtaacacccgccaagcggggcaagaagcccgacaaatcggaaggtctcgatactaactggcgtgacaagagtcctgcagagcgccaccgcgccatgacctggatgcaacgcctcaagcgagtcttcaatattgatattgaagtctgcgaacactgcggcggtcacgtcaaagtgattgccagcatcgaagatccgaaggtcattgagcagattctcaagcatctgaaacagaaaacagccaaggcgaatgccgccaagcagcgtgagctgccaccagaacgagcgccgccactgactcccagcctgttcgatccatcacagagtcgtctctttgactga

SEQ ID NO: 448650 - DNA, 840 bp, Serratia marcescens; identical to SEQ ID NO: 6027

SEQ ID NO: 448651 - DNA, 1140 bp, Serratia marcescens
atgacggtagagagattatcggattatctcaaacagcattggccagcgctaaaagagcagttagagacgggtaactaccaacctgaagcagtaaaacgggtcgagatacccaaagcggatggtcgtaaacgcaagcttggtatcccaacggtgctggatcgctttattcaacaagctatagcacaggtactaagtcaacattgggaaagccagtttcataacaacagctatggattcaggccgatgcgcagtgcacatcaggcagttagctatgccaaagctttactgctatcaggcaaaggctgggtagtggatctggatttagacgcgttctttgaccgtgttaaccatgacaggttgatgagtaagttgcgggcgcaaattcaagatccaacattgctaaaactgatccagcgttatctgaaagcgaacattgaccacaatggtaaacaggaagcgtgtcgggaaggtgtaccgcaaggtgggccactgtcgccactgcttgccaacattgtgctcaatgaactggactgggagctggaacgccgtggccattcattcgcccgttacgccgatgattgccagatctacactagcagcaagcgagcaggtgaacgaataaaacagagcatagaacgctatatcgaaacccgcctgaggctcaaggtaaataaagcgaaaagtgctgtagctcggccttgggagcgaagcttccttggcttcacgttcagccgcagaaaaggcaacagactgaaagtgaccgataaggcactggacaggctgaaagacaaactgcgcgagctgacgcgtcgcacgagaggccataatattggcagtgttatcgcagatataagaaaagccctgcttggttggaaagcgtacttcggcatagcagaagtacagagtcagctgcgagacaccgacaaatggttgcggcgaaagttacggtgttatatctggaagcaatggggcagtaagggctaccgaatgttgaggaaagcaggagttgacaggttcttagcctggaacacggcgaaatcagcacacggcccttggcgtctaagcaaaagcccggcgctttacattgccttacctaacagatattttacaaacatggggctgcccaccatagcagcatga

SEQ ID NO: 448652 - DNA, 633 bp, Serratia marcescens; identical to SEQ ID NO: 30074

SEQ ID NO: 448653 - DNA, 900 bp, Serratia marcescens
atgaaaatcgtaaaaaggatattattagtattgttaagtttattttttacaattgtgtattcaaatgctcaagctgacaacttaactttgaaaattgagaatgttttaaaggcaaaaaatgccagaataggagtagcaatattcaacagcaatgagaaggatactttgaagattaataacgacttccatttcccgatgcaaagcgttatgaaatttccgattgctttagccgttttgtctgagatagataaagggaatctttcttttgaacaaaaaatagagattacccctcaagaccttttgcctaaaacgtggagtccgattaaagaggaattccctaatggaacaactttgacgattgaacaaatactaaattatacagtatcagagagcgacaatattggttgtgatattttgctaaaattaatcggaggaactgattctgttcaaaaattcttgaatgctaatcatttcactgatatttcaatcaaagcaaacgaagaacaaatgcacaaggattggaatacccaatatcaaaattgggcaaccccaacagcgatgaacaaactgttaatagatacttataataataagaaccaattactttctaaaaaaagttatgattttatttggaaaattatgagagaaacaacaacaggaagtaaccgattaaaaggacaattaccaaagaatacaattgttgctcataaaacagggacttccggaataaataatggaattgcagcagccactaatgatgttggggtaattactttaccgaatggacaattaatttttataagcgtatttgttgcagagtccaaagaaacttcggaaattaatgaaaagattatttcagacattgcaaaaataacgtggaattactatttgaataaataa

SEQ ID NO: 448654 - DNA, 2112 bp, Serratia marcescens
atgcctttatttacgtgtgggttcccccctaaaaaatcagctgcggcaaatggcaccgttgcattagcaattgccgttgaggccaagaacgccaagctggcagaaatgaaagcgacaatgctgctggaagaggctttccccaattccaccagtaactttttcaaacccaaaatttgcgctgatcgcgaagggctaccacggccgcccgttgatcaattcgacgctgattggatgactaaaaatcagtggaatgaagaaactaaagaatacgaagcaatcgagcttccagagcaggatggaaatggtggggtagtactcacatcgtcaaaaacgattttcgaactgcctatcgacgtccgggtcgcatatatcttgatgtacggcgcagagcctgatgctgtcgatatggagcacctttctaacgcttatgacctgatcaacgatgacgaggctgaaccacgtctgcgcgcgattgttgatgctctgccccgcgtaccacaagttaagtcaatgctggttacctcagtggaaaagttgattgaagctatccaggcgaaatcaccggcgatgacaacatggccagaggtcaaaaagtttgcagatacctgggtacaaacgccaagcgctgacagagcaccagcagccgccaatgaagatgtgaccgtaactcgcacttacgacatgctcgacaatgaaatcgcattggcaatcaaaggcgttaatccattacacgccaaagcggcagatgtaacggcagcaaaggagttgatcaaccagcgagatcaaacatggcgggcatggagtatgtccttgcgggttattgtcggcatactcgacatcgatcgcgaaatcattttcaaaatgatcaccgccgggctttcatatcccgagttttctacaaacccggacatgaggcggaaattcattcacaaatgcctctctgaacgctgtgggatgacttttgaagcagaagaaaagccagccttaaatacggcaagcaaggccgctgacagccagcaaaaagagccatcaggccaggatgaatcgctcaaagtacagagcctgggtgatggcaaatttagcattgacggattgatggggaattcggaaaaaacgattgaaccagccgacgaaactgtggttaccccttccccctctgtaacgacagctaaagcagcggtgcaaactgaaaataaagcaccaaccgctgacgatgcaattatcacagacgatttccaaactcgcgcatctgtactcgaaaaagagctggactccaaagaaggcgatgcagcgaaaaacctcgatatttggaaacgcgttcagcggactgacccagctcgaactaaacggaaagacacccgcgacaatagcggaaaagttattcgcacagtaacgagcattcggccgacataccaatatatgcgcgccacggaaatattcggcccattcggtattggttggggcgttgatgtgcttgaagaacgcttcgatcccggtatccctttaatggaaggcattattgatagcgccggccgtgaaacgggtaagaaagtcatgcgcgatggggatggaaaaatccttacgtctctcaatcacacgatgaagataatgctctggtacaaccatgctggtgcccgcggcgaaatcattgcatacggccacaccaaatatctgtatgcaagtaagtttggtctgagcgttgaagaggaaccaagcaagaaaagcctcactgacgccacaaccaaggccctttcatcactcggatttagtgccgatgtttatttgggtatgttcgaagataacgaatatacacaagaaaacgaatatgagcacagcattaaaaatgccagcgataaggctgaagactcagtacgcctgagaaaagagctggatgaacgattcaaagccaataccgaaacaatgcgtaatgcggtcacaagtaatgaagtcgttaaaatctgctcatcccttacccgtgttattggttcgcatattaaaagtgccaaggctgttgcagatacggaacatgttaaatatctcgaaagccgcttgacccggcttgaggaaattaaagctgaatgcctggctaaatttgaagaggagaaaaaataa

SEQ ID NO: 448655 - DNA, 198 bp, Serratia marcescens
gtgtcaggggatgtgatttgggaaaactccgaacgcccggccggcgggctttggacagtaaaaagcccgcgaaaacgcgggcttgatagcgaggtgagactcaggcgggattatttcgccagtttgcgcatcaccagggtggcgttggtgccgccgaagccgaagctgttggacatcacggtggtcagctcgcgctga

SEQ ID NO: 448656 - DNA, 828 bp, Serratia marcescens
atgaatattttctctattcttgttaagactttttatcggtgtcttcatacacttaccaccaataagaatcttgttatttcactttcaaaacgggatatcggcagtaaatacaaagggtcattcatcgggcttctttggtcgtttattaatccagtattgatgatggtgatttataccttcgttttcagcgtcgtatttaaaattcgctggggcgcaggggtagactccaaaggagaatttgcgttagctctatttattggtttgatttttttcgggcttttttctgaatgtattaaccgagctccctcattaattgttaataacgttaactatgttaagaaagttgttttcccagttgaaacgctgccgctcgtgtctttgctgaccgcgctgtttcaaatggtgataaatttgatcgtctggtcgttattttatgtggcaattgtaggacttcctacctggcacatcctgtggttaccagtgatcattgcgccattcctcatgatggtcctgggcgtatcctggtttctttcatctctaggtgtttacttaaaggacatcgcccaagtcgttggcgtgctcaccatgattttgatgtacctctcgccgatattctatccgatatccatgctgcctgacgcctatcatatcttcatgcaactcagcccgttgacttacgtgattgagcaggcaagagattgcatgatgctgggtaaaaatatcgcctggggcagttggggcgtttataccctcacctctttcgtcatcatgctgctaggttatggttggtttatgttcacgcgtaaagggtttgccgatgtcatctga

SEQ ID NO: 448657 - DNA, 1407 bp, Serratia marcescens
atgtccaagcaacaaatcggcgttgtcggcatggcggtaatgggccgcaacctcgcgctgaacatcgagagccgtggttacaccgtttccattttcaaccgttctggcgacaaaactgacgaagtgatcgctgagaacccgggcaagaatctggcgccgtattataccgttgaagagtttgtcgaatcgctggaaaaaccgcgccgcatcctgctgatggtgaaagcgggcgaagcaacggataaaaccattgcctcgctgactccgcacctggacaagggcgatatcctgatcgacggcggcaacacctactatcaggacaccatccgtcgtaaccgcgaactgtccgaccagggtttcaacttcatcggtaccggcgtttccggcggtgaagagggcgcgctgaaagggccttccatcatgcctggcggccagaaagaagcttacgagctggtggcgccgatcctggagaaaatcgctgcggttgccgaaggcgagccttgcgtgacctacatcggtgcagacggcgccggccactatgtgaagatggtgcacaacggcatcgaatacggcgacatgcagctgattgccgaagcctattccctgctgaagcaggcgctgaacctgagcaacgagcagctggccgaaaccttcgccgagtggaacaagggcgaactgaacagctacctgatcgacatcaccaaagacatcttcaccaagaaagacgaagagggcaaatacctggtcgatgtgatcctggacgaagccgccaacaaaggcaccggcaagtggaccagccagagctcgctggatctgggcgaaccgctgtcgctgatcaccgagtcggtgtttgcgcgctatctgtcctcgctgaaagaccagcgcgttgccgcgtctaaagtgctgaccggcccgaaagtggcgccgttcaccggcgacaaagccgaattcatcgagaaagtgcgtcgcgcgctgtatctgggcaagatcgtgtcctacgcgcagggcttctctcagctgaaagccgcgtctaaagaaaacaactgggatctgcactacggcgaaatcgccaagatcttccgcgccggctgcatcatccgcgcccagttcctgcagaagatcaccgacgcttacgcggcggatgccgatatcgccaacctgctgctggcgccatacttcaagcaaatcgccgacgagtaccagcaggcgctgcgtgacgtggtggcctatgccgtgcagaacggtattcctacgccgaccttctccgctgcgatcgcctactacgacagctaccgctccgcggtgctgccggcgaacctgatccaggcgcagcgcgactacttcggtgcgcacacctataaacgcatcgacaaagaaggcgtgttccataccgaatggatggaataa

SEQ ID NO: 448658 - DNA, 621 bp, Serratia marcescens
gtgctgacagaacaacagaacaaccagctggactgggaaaaaaccgacggcctgatgccggccatcgtgcaacacgccgtttccggcgaagtgctgatgctgggttacatgacgccggaagcgctggcggccaccgagcagagcggcaacgtcaccttcttctcgcgcaccaagcagcgcctgtggaccaagggtgaaagctccggccacttcctcaaggtggtcagcatcacgccggactgcgataacgacacgctgctggtattggccaacccgatcggcccgacctgccacctcggcaacagcagctgcttccacccggccgccagcgactggacgttcctctatcagctggagcagctgttggcggagcgcaagcacgccagcccggacagctcgtacactgccagcctgtatgccagcggcaccaagcgcattgcgcagaaggtcggggaagaaggcgtggaaaccgcgctggccgccacggtcaacgatcgcgaagagctgaccaacgaggcctcggatctgatctatcacctgctggtgctgctgcaggaccaggatctggacctgagcgtggtgatcggccggctgcgcgagcggcatcagaaaaaagcgtga

SEQ ID NO: 448659 - DNA, 777 bp, Serratia marcescens
atgctggcaaaacggataatcccgtgcctggatgttaaagacgggcaagtggtgaaaggcgtgcagttccgcaaccacgaaatcatcggcgacatcgtgccgctggcgcagcgctatgcgcaagaaggtgcggacgagctggtgttttacgatatcaccgcctcgagcgacggccgggtggtggacaaaagctgggtatcgcgcgtggcggaggtgattgatattccgttctgcgtcgccggcggcattaaaagcgccgaggacgccagccagatcctgtctttcggcgccgacaagatttcgatcaactcgccggcgctggccgatcccgagctgattagccgcctggcggaacgcttcggcgtgcagtgcatcgtcgtgggcatcgacacctggttcgacagtgaaaccggcaagtatcacgtcaaccaatataccggcgacgagagccgcacccgcatcacccagtgggaaaccctcgactgggtacaggaagtgcagcgccgcggcgccggtgagatcgtgctgaacatgatgaaccaggacggcgtgcgcaacggttacgatctgcagcagctgcgccgggtgcgcgaggcctgcaaggtgccactgatcgcctcgggcggcgcgggcactatggagcacttcctggaagcgttccgcgatgcggacgtcgacggcgcgctggcggcgtcggtgttccacaaacaaatcatcaatatcggcgagctgaaaaggttcctggttgaacaaggcgtggagattcgcgtgtgctga

SEQ ID NO: 448660 - DNA, 738 bp, Serratia marcescens
atgattattccggctttggatttgatcgacggtaacgtggtgcgtttgcatcagggcgattacggccaacagcgcgactacggcaacgatccgctgttacgcctgcaggactatcaacaacagggcgcgcaggtactgcacctggtcgatctgaccggcgccaaggatccggcggcgcgccagatcccgctgctgcgcaaactgctggcgggggttaatgtgccggtgcaggtcggcggcggcatccgcaacgagcaagacgtcagcgccctgctggaggccggtgccacgcgcgtggtgatcggctccaccgcggtgaaacagccgcaactggtgcagagctggttcgagcgctacggcgccgacgcgctggtgctggcgctggacgtgcgcatcgacgcgcagggcgagaaacgcgtggccatcagcggctggcaggaggattccgacgccacgctggaacaggtggtggagcagttcctgccctacgggctgaagcacgtgctgtgcaccgacatttcgcgcgacggcacgctggccggttccaacgtggcgctgtatcaggcgatcagtcgccgctatccgcaggtggccttccaggcctcgggcggcatcggcaatctggacgacatcgcccagctgcgcggcagcggcgttgccggcgtgatcgtggggcgcgccctgctggaaggtaaatttagcgttgaggaggcgattgcatgctggcaaaacggataa

SEQ ID NO: 448661 - DNA, 591 bp, Serratia marcescens
atgaacgtggtgattttggataccggctgcgccaacctggcctccgtcacctacgcggtgcggcgcctgggctatcagccggaggtgagccgcgatcctgagatcgtgctgcgcgccgacaagctgttcctgccgggcgtcggcaccgcgcaggcggcgatggatcaactgcgcgagcgcgatctggtcgagctgatcaaggcctgcacgcagccggtgctgggcatctgcctcggcatgcagctgctggcggccagcagcgaagagaacggcggcgtgaccacgctcggcctcatcgatacgccggtcaagcagatgaccgacttcggcctgccgttgccgcacatgggctggaaccaggtgtccgcgcagacgggccaccatctgttccgcggcatcgatgacggcgcctacttctatttcgttcacagctatgcgatgccgatatgccccagcaccatcgcccaggcgaactacggcgagcccttcaccgccgccgtgcaaaaagacaacttcttcggcgtgcagtttcatccagaacgttctggagcggccggcgcgcaactgttgaaaaactttctggagatgtag

SEQ ID NO: 448662 - DNA, 1068 bp, Serratia marcescens
gtgagccaaaaaatcctctttatcgatcgtgacggcacgctgatcgccgagccaccggaagatttccaggttgaccgcctggacaagctggcgctcgagccggacgtgatcccttccctgctggcgctgcaacaggcggggtatcagctggtgatgatcaccaatcaggatgggctcggcaccgccagtttcccgcaggaaaccttcgatccgccgcacaacctgatgatgcagatcctcagctcgcagggcattcagttcgccgatgtgctgatctgcccgcacctgccggcggacaactgcgactgccgcaaaccgaaaaccgcgctggtgaagggctacctcgaacccggcgtgctgaatgccgcccacagctacgtgatcggcgatcggccgaccgacgtgcagctggcggaaaacatgggcatccaggggctgcgctaccagcgcggcgtgctgggctggaaagagatcgtgcgccagctgaccctgcgcgaccgccacgcgcgggttaaccgcgtgaccaaagagacgcagatcgacgtcaacgtctggctggatcgcgaaggcggcagcaagatcaaaaccggcgtcggcttcttcgatcacatgctggatcagatcgccacccacggtggcttccgcatggagatcgacgtcaaaggcgatctgtatatcgacgatcaccacacggtggaagacaccggtctggcgctgggtgaagcgctgaacaaggcattgggcgacaagcgcggcatcgcccgcttcggcttcgtgctgccgatggatgagtgcctggcgcgctgcgcgctggatatttccggccgcccgcacctggagtacaaggccgagttcaactatcagcgcgtcggcgatctcagcaccgaaatggtcgagcacttcttccgttcgctctcttacaccatgggctgcacgctgcacctgaagaccaagggcaaaaacgaccaccaccgggtcgagagcctgttcaaagtgtttggccgcacgctgcgccaggcgatccgcgtcgagggcaataccctgccgagctcgaaaggagtgctgtga

SEQ ID NO: 448663 - DNA, 1089 bp, Serratia marcescens
atgagcatcgaaaaactggcgcgcgccaacgttcgcgagctgaccccttatcaatcggcgcgccgcctcggcggtaagggcgacgtgtggctcaacgccaacgaatacccgatcgcgcccgagttccagctgaccgcgcaaaccttcaaccgctatccggagtgccagccggcgcaggtaatcgaacgctacgccgcctacgccggggtgaagaaagagcaggtgctggtcagccgcggcgccgatgaaggcatcgaactgctgatccgcgccttctgcgagccgggcaaagacgccattctgttctgcccgccgacctacggcatgtacgccgtcagcgccgaaaccttcggcgtggagcgccgcaccgtggccgccaaagaggactggcagctggatctgccggccatcgcagacagcatggacaacgtgaagctgatctacgtctgcagcccgaacaacccgaccggcaacctgatcgacccggactcgctgcgcaacctgctggagctggccaaaggcaaggcgatcgtcgcggtggacgaagcctatatcgagttttgcccgcaggcctcggtggccgggtggctgagcgactatccgcatctggctatcctgcgcacgctgtcgaaggcctttgcgctggccggcctgcgctgcggctttacgctcgccaacgaagatctgatcgccctgctactgaaggtgatcgcgccttacccgctctcgacgccggtggcggatatcgccgcgcaggcgctgagcgaagaaggtatccgcaccatgcgtcagcgcgtcaccgacatcgcagccacccgcagctggctgcagcaacagctggaaaaatgcgcctgcgtcgagcaggttttcgccagcgacagcaattacctgctggcccgcttcaccgcctcaagtaatgtgtttaaaagcttgtgggatcagggcattatcttacgagaccaaaacaaacagcccgggttgtccggctgcctgcgcatcaccataggcacccgcgacgaatgtcaacgcgtggtggacgctttgtccgccctgcccggcgccaaccagactcgccaggagccaatgtga

SEQ ID NO: 448664 - DNA, 1308 bp, Serratia marcescens
atgtcgaccttcaacacgccgatcgattgggcaacgtgcagcgccgaacgccaggccgagctgctgatgcgcccggcaatcgccgcttccgacagcatcacccgcacggtgagcgagatcctcgacaacgtgaaggccaacggcgatcgggcgctgcgcgactacagcgcccgcttcgacaaggcggacgtcgccgcgctgcgcgtcagcgccgagcagatcgccgccgcctgcgcgcggctgggcgatgacatcaaacaggcgatggcggtggccgtcgccaacgtggacaccttccacaacgcgcagcgactgccggcggtggacgtcgaaacgcagccgggcgtgcgctgccagcaggtgactcgcccaatcgactcggtgggcctgtatattcccggcgggtcggcgccgctgttctccaccgtgctgatgctggcgacgccggcgcgcatcgccggctgccgccgggtggtgctgtgctcgccgccgccgatcgccgatgagatcctgtatgcagcacagctgtgcggcgtgcaggaagtgtttcaggtcgggggcgcgcaggcgatcgccgccctggcgttcggcaccgaaagcgtgccgcgcgtggcgaagatcttcgggccgggcaacgccttcgtgaccgaagccaagcggcaggtcagccagcgcctcgacggcgcggctatcgacatgccggccgggccttcggaggtgctggtgatcgccgacgccggcgccaccccggcgttcgtcgcttccgatctgctgtcgcaggccgaacacggcccggattcgcaggtgatcctgctgacgccggacgcggcaatggcgcaggcagtggccgaagcggtggaaagccagctggccgagctgccgcgcgccgagaccgcccgccaggcgctggcgagcagccgcctgatcgtggcgcgcgatctgccagagtgcgtggccatcagcaaccgctacggcccggagcacctgatcattcagacccgcaatgcgcgcgagctggtggacggcatcaccagcgccggctcagtgttcctcggcgactggtcgccggagtccgccggcgattacgcctccggcaccaaccacgtgctgccgacctacggctacaccgccacctgctccagcctggggctggccgatttccaaaaacgcatgacggtgcaggagctgacgccgcagggcttcagcaacctggccgccaccatcgagacgctggccgccgccgagcagctgatcgcccacaagaacgccgtgaccctgcgcgtcgccgccctgaaggagcaagcatga

SEQ ID NO: 448665 - DNA, 900 bp, Serratia marcescens
atgctggacaagacacgtttacggatcgcaatgcagaagtcgggccgcctgagcgaggaatcccaggaactgctggcgcgctgcggcatcaagatcaacctgcagcagcagcgtctgatcgccttcgcggaaaacatgccgatcgatatcctgcgcgtgcgcgatgacgacattccgggcctggtgatggacggcgtggtcgatctgggcatcatcggcgaaaacgtgctggaagaagagctgctcagccgccgcgctcagggcgaagacccgcgttacttcaccctgcgccgcctcgatttcggcggctgccgcctgtcgctggccaccccgctcgacgccgaatacaccggcccgcaaagcctgcaggacgcacgcatcgccacctcttacccgcacctgctgaagcaatacctcgaccagcagggcgtgcgcttcaaatcttgcctgctgaacggttcggtggaagtggcgccgcgcgccggcctggccgacgccatctgcgatctggtctctaccggcgccacgctggaggccaacggcctgcgcgaggtggaggtgatctaccgctccaaggcctgcctgatccagcgcgacggcgaaatgccggaagccaaacagcagctgatcgaccgcctgatgacccgcattcagggcgtgatccaggcgcgtgaatccaaatacatcatgctgcacgcgccgagcgaaaagctggacgagatcgtcgcgctgctgccgggcgccgaacgcccgaccattctgccgctggccggcgcgcagaaccgcgtggcgatgcacatggtgagcagcgaaaccctgttctgggaaaccatggaaaaactgaaagcgctcggcgccagctcgattctggtgctgccgattgaaaagatgatggagtaa

SEQ ID NO: 448666 - DNA, 825 bp, Serratia marcescens
atgaaaaaggtagccattattggtttgggttggctgggcatgccgttggcgctgtcgctgatggggcgcgggtatgacgtggtcggcagcaaaaccacgccggacggcgtcgaggccgcgcgcatgagcggcatcgaatgctatcaactggagctgacgccggagctggagtgcgatccggacgatctggaatcgctgctgcgcgtggatgcgctggtggtgacgctgcccgcacggcgcaccgtcgaaggcagcgagaactatttcaatgcggtgcgcatgctggtggacagcgcgatggccttcggcgtgccgcgggtgatctttaccagttccacctcggtgtacggcgaaaccgccggcacgctgcgcgaagagtcgccgctgcggccggtctcgccgtcgggccgggtgctggccgagctggagcgctggctgcatgaattgccgaatacctcagtggacattctgcggctggcggggctggtgggcgccgatcgccaccccggccgcttcctggcgggcaaactcgacgtgaagggcggttcgcagggggtgaatctggtgcaccaggacgacgtcatcgccgccatccaactgctgctgaagctgccgaagggcggccacgtatacaacctgtgcgcgccgcgtcatccggccaaacgcgaattttatccggcgctggccgagcagctgcacctggagccgccgcagttcgccgacgaagcggagcaggatgagcggctggtggacggcaaccgcatctgcaacgagctgggttttgagtaccagtatcccgatccggcgcgcatgccggtcagttaa

SEQ ID NO: 448667 - DNA, 885 bp, Serratia marcescens
atggaaagtctgggttctctcgatgttttcgtgcgggtcagtgaaagccgcagtttcacggcggccggacaacagttggggatctccgcgtcggcggtcagcaaaactatcgcccggctggaggaacggctcagcgtgcggctgtttcaccgctccacccgcacggtcaacctaacgccggaaggggctttgttcctggaaaggtgccgacgcattttgagcgaggtgaaagaggcggaagccgaactgttgcaaacgcggggaacgccccagggcaagctgcgcatcagtctgccgtcgctgggcacgcttttcatgccaaaactgggggacttcaaacgccgctatcctgagatcgagctggatattgattattcggatcggctggttgacgtgattgaggaaggtttcgatgccgttatccgcagcggaaccccgagcgactcacggctggttgcccgccggctgggtacctgccgcaaggttttcgttggcgcgccgggttatttcagcaaagcgggtatgccaagcaagcccgaggatctgacaagccatgcccgtttgcattatcgcttccccagcaccggcaaactggatgtctggccgctgggagacaagacggagatgatccccgaacggccggcaagcatggtgacaaatactctcgatccgcaggtgtgcttcgcggagcaagggctcggcatcgcttatttgccggaaatcgccgtgcgtagacagctggaacagggcagcctggtgacggtcctggatgaatacgaccgcgagaacatggtttttcatgtcctctggccgtcgggccgccacctgtcagtcaaaatcaggctgttcgtcgactttgtgacgagccaccttttcccgctttaa

SEQ ID NO: 448668 - DNA, 1191 bp, Serratia marcescens
atgaatcaaacgacgatatctgcgcctgccgggagcagcgagcggttgccgctggggggcctgctggcattggcgatggccgcttttatcacgctgctgaccgagatcatgccggcgggcgtgctttcttcgatcgcgggcgatttgaacgtatctgaaagtctggcggggcagttcatcaccgcctatgcggtgggggcgttggtcgccgctattccgttcaccgcattgacgcaaggcatgcggcgccgccccttgctcttgagtgcgatctgcggttttgccatcgtcaacctcgtcacggcgttgtcgcatgattacctcgtctcattggcgacgcgtttcttcgccggcgttttcggcggcatcgtttggtccttgctggccggttacgccgtgcgcatgtcaccggcccatcttggcggccgcgctattgcgatctccggcgccggcgccaccctggcgctggtgctcggcgttccgctcggcacgttgcttggtcgagccatcggctggcaaggcgcctttggcctgatgacgttgatggcgctgatgctcgtggtgtggatcattgccatcgtgccggatttccccggccaggctaaggaacatcgtccgtctctgagcggcgtattcttgcaatgcgggatccgcgccgtgctgtttgtggtgttcaccttcatcgttgcccacaacattctgtatatctacctggagcctttcctcacgccgtcggggttatccgagcgggtcgatatcgtgctgtttatcttcgggctgggcgcgattgcaggattgggcgtcgccgggatgctggtcgatcggcgagtccaatctcttacggtgatgagcatcgtcatctttgccctcgcggcgatgctgctggggagtggggggaggatggctccgatggtttatctcgcggtcgcattgtggggcgcggctttcggcggtttcgccaccctcacgcagacggcattgtcacgcctttccggccgcgcggccgacgtggcgcagtctatgtatacgacgggctggaataccgccgtggccgccggtggcgcggtcggtggcatgctgctcgacaagggcggggcggcctctttcgcctgggccatcattgggctcctcatcctgtctttaatcggcacgctgtttgccatgaatcgggcgctggcctctcagcgatga

SEQ ID NO: 448669 - DNA, 906 bp, Serratia marcescens
atgctcaccaacctaagcgatatcgatctgaaactgctgcgggtattcgtcgcggtggcggaagctcagggcgtcagcgccgcgcaggaagcgctgctgatgaaccagtccaccatcagcactcacctggcctcgctggaaacccggctgggttttcgcctgtgccagcgcggacgctccggcttcaggctgacgcccaagggcgaacgcatgctgatcgcctgccgctcgctgttcaacgccgcccgcgacttcacccgggtcagccagtcgctgaacggcctgctgaccggcgatctgcagatcggtctggtggataatctggtttcgctgccgggcaatccgttcagccaggccatcaaacacttccagcgccgccaccaggacgtgcagttgcagtgccgcatctgttcgccgaacgagattgagcaagggctgctgcaccggcagctcgatctgggcatcggctactttggccagcagttggaggcgttgcgttatcagccgtggctggaggagacgcaggctatctactgcagcgcggatcacccgctgttcgcggtggaagaaccggagcgcgagcagattgaaaacgcgcgctgggtcaagcgcggctacctgctggcgcagcagctgtgcccgatcgcgccgcctcacctggcggcggtggcccaccatatggaaagcgtcgcccatctggtgctgagcggcacctgtctcggctatctgcccacccactacgcggcgcgctgggtggaacaggggctgctgcggcagctgggcggcgcggcgctctcataccgcgccacgctcagcctgatcagccgccccgtccagcccgacgaggcgttgaacgcgctgctggaggatttggcgcgcgccgcacgccaatcacttcatcgctga

SEQ ID NO: 448670 - DNA, 933 bp, Serratia marcescens
atgctgaaccaaccccaaagcggtaacgatatgccgcgctttgccggtatccccaccatgatgcgcctgcccgccgccgaacaggcgcgcggtttggacgccgcctttgtcggcattccgctggatatcggcacctccaaccgcagcggcacccgctatggcccgcgccagatccgccaggaatcggtgatgatccgcccctacaacatgggcaccggctccgccccgttcgaacggctgcaggtggccgatctgggggatgtcgctatcaacccttacagcctggcggacagcgtgcagcgcatcgaggcggcttaccacgagatcctggcgcacggctgcatgccgttgacgctcggcggcgaccacacgctgacgctgccggtgctgcgcgccgtcgcccgtcgacatggcccggtcgggctgatccacgtcgatgcgcattccgacaccaacgaggagatgttcggtgaacagctggcgcacggcaccaccttccgccgcgcgttcgaggaggggttgctggcgccggaaaaagtggtgcagatcggcctgcgcggcagcggctatgcggcggacgatttcgactggtcgcgccgtcagggctttcgcgtggtgccggccgaggcctgctggcaccgatcgctgacgccgctgatggcggagatccgcgaacagatgggcgatgcgccggtttacctcagcttcgatatcgacgggctggatccggccttcgcgccgggtaccggcacgccggaggtcggcgggctgtcggtttggcaggggctggagatcgtgcgcggctgccgcgggctgaacctggtgggcggcgatgtggtggaagtgtcgccgccttacgatcgctccggcaacacggcgctgctggcggccaacctgctgtttgaaatgttgtgcgtgctgccggcccgctga

SEQ ID NO: 448671 - DNA, 1386 bp, Serratia marcescens
atgaatctcgatctgctggtcgtggtgttttactttctggtgataggcgcggtggggtggatgggcattcgccgcgccaattccaaagaggcgtatctggtcgccgggcgcaacctggggccggggctgtatctgggcacgctgtcggcggtggtgctcggcggcgcgtcgaccatcggcagcgtcaagctcggctacacctacggcatctccggcgtctggctgtgcggcgcgctggggctgggcatcgtggtgttgagcctggtgctggccaagccgctgctcaagctgaagctgtataccgtcagccaggtgttgtcgcggcgctatcatccggcggcgcgggttaccagcggcgcgatcatgctggcgtatgatctgatggtggcggtgacttcgatcatcgccatcggcagcgtgatgcaggtgatgttcggcctgtcgttcagcgcgtctatcctgctcggcggcgggctggtggtgctgtattcgacgctggggggcatgtggtcgctgacgctgaccgacatcattcagttcatcatcatgaccgtcggcatgatgctggtgctgatgccgatgagcatcgtcaaggccggcggctgggaggcgttcaccagcctgctgcccgccggttactaccagctgtcgtcgatcgggctggacaccattctggtatttttcctgatctacttcttcggtattctgatcggccaggacatctggcagcgggtatttaccgcccgcagcgccaacgtggcccgcttcgccgggctgggggcgggcgtctactgcgtgctgtacggcgtgaccggcgcgctgatcggcatggccggcaagatcgtgctgccgtcgctcagcaacaccgacggcgccttcgccgctatcgcgcaggcggtgttgccggtcggcgtcagcgggctggtggccgccgcggcgttggcggcgctgatgtccaccgccagcgcctgcctgctggcctcttccaccatcgcgctggaggacgtattgccggccatccggcgcaaaccttccggcgggttggccgccgggcgcttcaccacgctcctcatgggcgcggtcatgctggggctggcattcgtggtgcgcgacgtgctggcggcgctgaccctggcttacaacctgttggtgggcggcatgctgatcccgctggtgggggcgatcttctggccgcgcgccaccagcgccggcgccatcgccagcatgctgaccggcagcctgtgcgtggtggggctgatggtctggcacggcatcgacgccaacagcccaatctacggcggcctgctgggcggcggcgtcgccttcgtgctgggcagcctgttgagccgcccggcagcgcagctgcagacccaaaccgagcgctga

SEQ ID NO: 448672 - DNA, 1428 bp, Serratia marcescens
atgaacaatcgcaatgtggcgtcacgcccaaaaattgaagtgcgctcgatagactatgtgccccgtcacgagcggcatggcaaggtttggcatcaggcgccgttttggtttaccggtaatttcgttttgacgacgatggtggtcggtttcaccggcccggcgctggggctgggtgcgctttattcgatgctggccattgccgccggcgtagggttcggcaccttcttcatggcgtgtcatgccaaccaggggccgcggatggggctgccgcagatgatccagtcgcgggctcaattcggcctgcgtggtgccatcgttccctttgccgccgtggtgtttgtctacatcggtttcaacgtgttcaacgttattctcgcgaccgatgcgatcaacacgatgttgccgggccaccgcctgccctggtatgcgttgctgatcgcggtggccgtgctgttggcgatcgtcggccacgatatgctgcatgcggtgcagcgctggctgacctatgtgatgatggcggtgtttggcgtgctgacggtcggcgccgtgttgtcgctgcggatggacgccgccatcggcgccgggcatttctcgtgggcggcctttttgattcagctgtcggccgccgccggctaccagatcagctacgcggtgtacgtttccgactactcgcgttatttaccgcatgaaacgccgtctgccaacgtgatcttttggacttatctgggggcggccggatcggcgctttggctgatgtcgctgggcgcgtttctggcttcagccttaccgtcccccgatgcgatcggcagcgtacaggcggtgggaaatgccgtctatccggggttcggcacgctggccgtgctgatcgctgtgccctcgctggtcggtatcatggcggtcaactgttatggcgcgatgctgaccagcctcagtgcgattgacgcgttccgtaaagtgacgccgacgttgaaattacgcatgaccggcattggcgtcgtcgccctgacggtgtttgcggtggcgttggccatcccggcgagctacctcgccagcttcaatacctttgtgctgctgatgctgtatttcctggtgccctggacggcggtgaatctgatggacttttacgtggtgcgcgacgggcattacgcgattggtgaaatcttcaacccggcggggatctacggccgctgggggcgccccggcctgacggcctacgcgatcggcctgctggcgatggtgccgttcatgacgttgggcttttacaccggcccctttgctgttttactgggcggtgcggatatcgcttttctgatcggcctgctggtggccgggagcgtttatgtcgtgatgtgccgaaagctcgatcttgaagccgaacggcgggtggcgttgcgcagcgagggtttattggaaggagagccggagtga

SEQ ID NO: 448673 - DNA, 813 bp, Serratia marcescens
gtgaaggaaaaaatcagcgtcgcatgctgccagttagcgttgcgggtcggggaagcggaacataatcgggcgctgtccgtccaggctatccgccgggcggcgcagcgcggcgccaacgttatcgtgctgccggagttggtgaacagcggctacgtgctgcgcgataaggcggaggcgcgggcgttggccgaggccgaagacgggcctagcctcagcctgtggcggggcctggcgcgcgagttggatgtggcgatcgtcgccggtttttgcgagcgcctgcccgatggcgaggtggccaacagcgcggcattgatcgatgcgcagggggtgagggcgatttatcgcaaagcgcacctgtggcacgaagagagcaccatctttaccgccggcgatcggccgccgccggtcgtcgagacccgctttggccggttggcggtgatgatctgttacgatctcgaattccctgagtgggtgcggctgccggcgctggccggcgctcagctgctgtgtgcgccggtcaactggccgctggcgccgcgcccgcagggcgaacggccggcggagatggtgaaggcgcaggccaacgccgccgtcaatcggctgttcatcgcggtgtgcgatcgttgcgaaacggagcgcggcgttgcgtggatcggcggatcggtgatcgtcgacgccgacggctatccgttgacgcagagcctggcaggcgaaggcatggtgctggcatcgatggatatcggcgcggccgatgacaagcatatcggccgccacaatcacgtgcatcacgatcggcggccgatgctgtattga

SEQ ID NO: 448674 - DNA, 984 bp, Serratia marcescens
atggacagcaaaagcatggtggtgaactgtgtggcgtacaaagccggccaacggctgggcgaagtgactatcgacgatatcagcgaggtggtcaaacagccggataccttcatctggctggggctgcggcagccggagccggcgtttatgcgcaaggtgcaggaggagttcggcctgcacgatctggcgatcgaagacgcgctgtgcgcgcaccagcggccgaagctggaaacctacggcgactcgctgttcatcgtggtgaaaaccgcgcagtggggcgagaacgacgaaatcgaatacggcgaaacccatttcttcgtcggcaaaaactttctggtgacggtgcgccacggcgcctcgcccagctacgcgccgatccgcgccaaggcggaagagaaccgcaagcagatgtgccgcgggccgggcttcgccctctattcggtgttggacttcgtggtggacaactaccgcagcgtggtgacgcgcttcgagagcaccatcgagaatatcgaagccaacatgtttcagtcggagttcgatcaggtggcgatcgagaacgtctataccctgcgccgccacctgttggcgctgcgcaacgccgcgctgccgatggatgaaatctgcaaccagctgatccgcctgcacgaagaagtgatcccgaaagagctgcgcgcctatgtgcgtgatgtgcaggatcacgcgcatcaggtggtcagcaatatcgacgacatgcgcgaaatgctgaccaacgccatgcacgtcaacctggcgctggtgacggtcaaacagaacgaagtggtgaaacgcctggcgggctggggggcgattttggccatcccgacggtgatcttcagcctgtacggcatgaacttcgccgacatgccggagctgaagttcccgtgggcctatcacgccacgctgggggtgaccgccgtcggctgcattttcctgtatcagaagctgaagaaatcgggctggctgtaa

SEQ ID NO: 448675 - DNA, 420 bp, Serratia marcescens
atggacattaccgttaccgacgcgattgacgaagacaccctcgatgcgatcaggcaaggcctgcgcgcttacaacctgccgcatatcgatgcccgtcaccgcaagccgctcagcgtctatgcgcgagacgaggccggcacggtgatcggcgggctgaccgccgaaacctggggcaactggctgagcgtcgaatggctgtgggtggcggattcccagcgcggcagcggcctcggcggccggttgatgcgcgccgccgaacgcgaggcgcaggcgcgcggctgccgctacgctcgcctggataccttcagcttccaggcgcggccgttctacgaaaagctcggctatcagctgcaaatgacgctgaaagagtatccggtggaacatgagtgttattttcttaccaaaaccctgactgattaa

SEQ ID NO: 448676 - DNA, 1101 bp, Serratia marcescens
atgccccgattgactttgctggccggtttgctgctgtgcagcggcctgctgcacgccgcgccgacggtcagccaactgcaggacggcctggaacacccgtggtcgctggcctttttgccggcggaacaaggcctgcttatcaccgagcggcccggccggctgcggctgtggcagcagggcaaaggcctgtcgccgccgatcgccggcgtgccgcaggtttacgccgaggggcagggcggcctgctggaggtgttgccggcccccgacttcgccgccagccgccgggtgtacctcagcttcgccgaaccgggcgagggcggcaaagccggcacggcggtcggctacggccgtttgagcgaagacggaaggcggctggaaaacttcaaggtgatcttccgccagctgcccaagctgtcggtcggcaatcacttcggcggcaagctggcgttcgacaggcagggctacctgtttatcgcgctgggcgaaaacaaccagcggccgacggcgcaggagaccgacaagctgcagggcaagctggtgcggctgaccgccgaaggcgcggtgccgccggacaacccctgggtcggccaggccggcaaacggccggaggtttggtcttatgggcaccgcaatccgcaagggctggcgctgaacccgtggagcggcgcgatctgggaacacgagcacggcccgcgcggcggcgatgagctcaacctcccgctgccgggtaaaaactacggctggccgctggccacctacggcatcaactattccggccagccgatccccgaggccaaaggggaacgggtgcccggcaccgaacagccgctgcactattggcgggtatcgcccggcctcagcggcatggcgttttatgacgggcagcgcttccccgcctggcggcactcgctgttcatcggcgcgctggcgcaaaaggaactgattcgcctgacgctggaaggcgacaaggtggtggcggaagagcggctgctgggcgatcgcggcgagcgcattcgcgaggtgcgcagcgggccggatggctatctgtatctgctgacggacgagcggaacggcaagctgttgaaggtcggggcgtcgtaa

SEQ ID NO: 448677 - DNA, 621 bp, Serratia marcescens
atgctgaccatttggggccgtgagaattcgaacaacgtcaggaaggtgctgtggtgcgccgccgaactggggctgagctacacccacatcaacgccggcggcgcgttcggcaaggtgaacgaagagagttaccgcgcgctgaacccgaacggcctggtgccgctgctgcaggacgatgacttcgtgctgtgggaatccaacaccatcgtgcgctacctggcggcgaaatttggcgacgcgacgttctatccgcaagatctgcaggcgcgcgccgccgccgagaagtggatggactggaccacctcaaccatcgtcccggccttcaccatcgtcttttggggcctgatccgcaccgcgccggaattgcgcgacatggcgaaaatcgaagcggcgatcgccacgctggaaaagcacttcgacgtcatcgaacagacgctggcgcgccagccttacctctccggcgacgcgttcggcttcggcgatatcccgctcggcagcttcgcctacgcctggttcgaaatgccgatcgcccgccgcccgcggccgaacatggagcgctggtatcagcagctgcgcgcccgcccggcctatcagcgcggcgtgatgagcgaactcacctga

SEQ ID NO: 448678 - DNA, 657 bp, Serratia marcescens
atggatttagccttattcgacctggatgaaaccctgattgacgatgacagcgccagcctgtggatccgctggctggtcggccagggcttcgcgccggcggagctggagctgcaggagcagcagctgatgcagctttattatcagggcaagctgtcgatggaggactacatgcaggccacgctggcgccgctggccggcctgagcgtgcaaaccgtggccggctgggtacagcgttacatccggcgcgatatcctgccgcgcgtctatcccgccgcccgtgaacgcctgcagtggcaccgcgagcgcggcgactgcattctggtgatctccgccaccggcgagcatctggtggcgccgatcgccgaacagctcggcgccgatgatgcgctggcgatcggcgtggaaatcagcgacggccgcttcaccggcaacacctacggcaccatgacctatcaacagggcaaggtgatccgcctgcaacgctggctggcgcagcatccgcacctgcaattcgaacacagccacggctacagcgactccctcaacgataaggcgatgctgcaattcgtcgacagcgccacggtgatcaaccccgacagcgaactgagcgcgcttgcggcggagcacggctgggaagtgtgccgctgggaacgctga

SEQ ID NO: 448679 - DNA, 1026 bp, Serratia marcescens
atgatgacgcatctgacgacgctgaagacgctgccgctgctggatctttcgctgcttgacggcgatgcgcgtcagcggcgcgcctttctcgacgatctgcgcgcggcggcccgcgacgtcggctttttctatctgcgcgggcacggcgtggacagtgtgctgaatgcgcggctgcagcagggcgcgcggcaatttttcgcgctgccggaagccgacaagctggcggtgcagatggtgcattcgccgcactttcgcggttacaaccgggcggcggcggagctcacgcgcggccagccggactggcgcgagcagttcgatatcggtgccgaacgcccggcgctgacgctgtctgacgacaccccacgctgggcacgcctgcaggggccaaaccagtggccggcggcgctgccgacgctgaaaccgctgctgctgcagtggcaacaggcgatgaccgccatgtcgctgcggctgctgcgcgctttcgctttggcgctgtcgttgccggagcaggctttcgatcgcttgtatggcgataagcccaacgagcacatcaaactgattcgctatccggggcgggacgctaccgccagcgcacagggcgtcggcgcgcacaaggattccggttttctcagcttcctgctgcaggacgagcaaaaagggttgcaggtggaggtgagcgaagggcggtggctcgacgcccagccgcgtgaagacaccttcgtggtgaacatcggcgagctgctggaactggcgaccaacggctatctgcgcgccacggtgcaccgggtggaaacgccgccggcggggcgcgacaggctgtcgatcgcttttttcctcggcgcgcgcttggacgcggtggtgccgttgtatcaactgccgccgccgctggcggcgcaggcgcgcggcccggccagcgatccgctcaacccgctgctgcgcgacgtggggtataactacctgaaaggccgcatccgttcccaccccgatgtggcgcagcgcttttatcgggacgtcatcggcgtctga

SEQ ID NO: 448680 - DNA, 1146 bp, Serratia marcescens
atggccaagtttgatacgttgaccgttcacgccggttacaccccggacgccaccggcgccgtgatgccggcaatttacgccacctccacctacgcccaaccggcgccgggcgagcataccggctacgaatactcccgcagcgccaacccgacgcgcaccgcgctggaaagcgccatcgccgaactggagggcggcagccgcggctacgccttcgcctccggcctggcggcctgctccacggtgctggagctgctcgataaggacagccacctgatcgcagtagacgatctgtacggcggcacctatcgcctgctggaaaaagtgcgcagccgcaccgctggcctgcgcgtcacttacgtgtcgccggcggatctcgccgggctggagcaggcgatcgagccggacaccaaaatgatctgggtagaaaccccgaccaacccgctgctgaagctggcggatctgagcgccattgccgcgatcgccaaaaagcatgggcttatcagcgtggcggacaataccttcgcctcgccgtatctgcagcgcccgctggatctgggctttgacgtggtggtgcactccgccaccaaatacctcaacggccactccgacgtggtggccggcgtcgcggcggtgggggataacccggcgctggcggaacagctcggtttcctgcaaaacgcggtcggcggcattctcgatccgttcagcagcttcctgacgctgcgcggcattcgcaccctggcactgcgcatgcagcgccacagcgacagcgcgctgcgcatcgcccagtggctggagagccagccgcaggtggaaaacgtctactatcccggcctgcctagccatccgcagcacgcgctggcggcgcgccagatgacgcgcttcggcggcatgatctcggtgcggctgaaaggcgacgacgcctatgcgcgccgggtcatcaagcgctcgcgcctgttcaccctggcggaaagcctgggcggcgtggaaagcctgatcagccagccgttcagcatgacgcacgcctccattccgctggaacagcgcctggcaaccggcatcacgccgcagctggtgcgcctgtcggtggggattgaggatgtggaagatctgatcgccgatctgcagcaggcgctggcggaataa

SEQ ID NO: 448681 - DNA, 1368 bp, Serratia marcescens
atggcgatcccccattccgtcatcgagatgattggcaataccccgatgctggaactgacccggttcgataccggcccgtgccggctgttcgtcaagctggagaatcaaaaccccggcggttcgatcaaagaccgcgtggcgctgtcgatgatcgaacaggccgagcgcgacggcaagctgcagccgggcggcaccatcatcgaagccaccgccggcaataccggcctggggctggcgctggtggcggcgctgaaaggctataagctgctgctggtggtgccggacaagatgagccgcgagaagatcttccacctgcgcgcgctgggcgtggaagtgcagctgacccgctcggacgtcggcaaggggcatccggcctactatcaggattacgccaaacgcctggccggggagatccccggcgccttttatatcgatcagttcaacaacccggccaatccggcggcccataccaccaccaccgcgcccgaactgtggcggcagatggagcatgacgtggacgctatcgtggttggcgtcggctccggcggcacgctgggcgggttgagccgctatttcgccgaggtttcgccgcagacggaatttgtgctggccgaccctgcgggttcaatactggcggactatctcgacagcggccacatcggcgaagcgggcagctggctggtggaaggcatcggtgaagacttcatcccgccgctcagcgactttgaccaggtccgccacgcttatcgcatcggcgacgccgaagccttcgccaccgcgcgcgatctgctgcgcaaggaaggcgtgctggcgggatcgtccaccggcaccctgctggccgccgcgctgcgttactgccgcgcacagaccgaacccaagcgggtggtgaccttcgtctgcgacagcggcaacaaatacctgtctaaaatgtataacgaccactggatgctggaacagggcctgctgagcaagccgcagcacggcgatctgcgcgatctgatcgcctaccgccacgacgaaggcgccgccgtctccgccgcgccggacgacacgctggcgatcgtgcacgcccgcatgcggctgtacgacatctcgcagctgccggtgctggaaggcgatcgggtggtcggcctgatcgatgagtgggatctgctgaacgccgtccaggccgacgccgcccacttcagcctgccggccggcagcgcgatgaccaagcaagtccagacgctgcaaaaggaagccggctacgacgaattgcaggccaccttcaaccatggccacgtcgcggtggtgctcgacggcgagcgcttcctcggcctgattacccgcacagacgtgctaaacgcctggcgccaaaaattacgttaa

SEQ ID NO: 448682 - DNA, 1206 bp, Serratia marcescens
atgatgaaaaaaaacttatccacttccctgaaagaactgaccttcagcgtaggcatcctgttgctggccgccccggccgtgcatgcggccgagccgccggcgccgccgcaggtagacgccaaggccttcattctgatggattacaacagcggcaaggtgttgaccgaaggcaatgccgacacccgcctcgatcccgccagcctgaccaagatcatgtccagctacgtgattgggcaggcgatcaaggccggcaagatcaagccggaagacatggtcaccgtcggcaaagacgcctgggcgcccggcaacccggcgctgcgcggttcttcgctgatgttcatcaagccgggcgatcaggtgccggtgctggagctgaataaaggcatcgtgatccagtcgggcaacgacgccagcatcgcgctggcggactacgtggcgggcagccaggattcgttcgtcggcctgatgaacaattacgccaaatctctggggctgcagaacacccacttcctgacggtgcacggcctggatgcggaagggcagtacagcaccgcgcgcgacatggcgctgctgagccaggcgctgatccgcgacgtgccggacgaatacgcgctgcataaagagaaagaattcacctttaacaagatccgccaggttaaccgcaaccgcctgttgtggagcagcaacctgaacgtcgacggcatcaagaccggttacaccagcggcgccggccacaacctggtggcatcggccaccgacggcccgatgcgcctgatctcggtggtgctgggcgcgccgagcgatcgcgtgcgctttagcgaaagcgaaaaactgctgacctggggcttccgcttctatgaaaccgcgacgccgatcaaggccgataagccgttcgtcacccagaaagtgtggttcggcgacgtcagcgaagtgccgctcggcgtggcgaaagacgcctcggtcaccattccgaaagggcagatgaaaaacctgaaggccagctacaagctgacccagccgacgctggaagcgccgctggcgaaaaaccaggtggtcggcaccatcgatttccaactggacggcaagaccatcgagcaacacccgctggtggtgatgcaagaggtgaaagagggcaacttcttcagccgcatctgggatatggtgatgatgaagctgagccagtggttcggcgggatcttcggctga

SEQ ID NO: 448683 - DNA, 498 bp, Serratia marcescens
atgaacatgacgagtaaaacgcgctgcgctttgctgtgggcgctgagcctgattagcgccgcggctcaggccgccgaccagggtaccaaggtcaacatcaccgccaccgtggtggcgcctccgccttgcgtgatcaacgacgggcgcaccatcgatatcgacttcggcaaggtcggcatcaagcgcatcgacggcaatcgctatatgcaacgcatcgattacagcatcaaatgcgagtttctggataacagccgccagttgaaaatgaagatcatgggcagcgcggcggccttcgacggcagcgtgttaaccagcagcgtcaatggattgggcatcaaactgttggccaacggtaaggccttcgccatcaatacgccgctgaacatcgactacgccaatccgccgacgcttgatgcggtgccggtgaaaaacagcgccgtcaccctggcggaaggcgatttcaccagcggcgccaccatgctggtggactacttttaa

SEQ ID NO: 448684 - DNA, 918 bp, Serratia marcescens
atgctgtttggcaacgccaacgcgtttacctgccgcacgtccgatggcggactgattccacccgggggctcgaccacgccggttgacgtccgggtgcgcatcgggccacagctttcttatggcaaaaacgaaatcgtcaacgtcagccaggtcacctgtaaaaacgacgtcgcgagctggtatgactatctcaaaaccgacagcccggcgctgtcgatgaacagtgcgatttttggcgccatcggcagcggcaccaccatcaacggcagcgattacaactccccggtgccatcaggcatcagcgtactcagccttaccggcctgcaaacccagtcggtcgccatccgggtctatatcgtgttgaaccgtttcccaacgccggacatcaaggtgaacaagggcgacgtcatcggccaaatcaactttattcagaccaacgatcagccgggttgcccacagtgcggcgtttatcgctggcgcctgatcgccgacaacgacgcttacttcgtcaccaccagctgcaccatcaacaacggccagcagattaacgtcgacttcggccagatccgtcaggactttctgacccagagcgccaatgatgcccagataaaacaggacaaagcgctcagctaccaatgcgacgaccagagcgcgacgcaggatattctgatccgcatggtcagcgatgccagcggcttctccagcgattttatcaagaccaccaatcctaacgttggcgtggcgatgatgtacaacggcgcggtggtgaagccgaacaatgccttcagaacgcgcatcgtcaacggccagggcaacgataccgtgacctttgtaccggtaaagaacaatgtcccttacaccagcatcgccaccggaccgctgtcgggttcggccacgctgatcttcagcgcaccttga

SEQ ID NO: 448685 - DNA, 330 bp, Serratia marcescens
atggaagcgttatctccgaaacaaaaggaaatacggcaattgcagcacgatctgctgcaaacattattcgcgcagtcgccccgtaagtgccctatcggcgggttgccgccacagcagcaatggctatcgacgcggcaactggccaatgccgtcaacgtcggtgtttaccgggcgcggcggctattgctggatcttgtctcccggaaaaaagtgattgtgacggacggctctatcaacaactcattgaggtggtatcccaccgcgttgctgaacggtgataacgacggcatctccaacagcgatgcccctcactcccctttaacggaataa

SEQ ID NO: 448686 - DNA, 522 bp, Serratia marcescens
atgaaacttaacaaaatcatgatggctgcagtgattgcatttggcgcaagttcttttgcacaggcagccgatcagggacacggtaaggtcaccttcacgggctctattattgatgcgccatgctctattgcgcccgagtcgatcgatcagaccgtagatctgggccaggtttccaacgtggcgttgaaaaacggcggcaaatccaacccgcgtccgtttgaaatcaaactggagcagtgcgacatcaccacgctgaaaaccgttaaaaccaccttcagcggcgtcgcatcgtccaccgacaaggatctgttgggtatcgcgggcaccgccagcggcgccggcgtagccatctcttacaatggccagccgatcaaactgggtgaagcgactaccgcgcagaccctgaataccggcaacaacaccctgcatttcgccgcctacctgcagggcgaaggcgcttccgccgccatcgttccgggcgatttcactgccgtagccgatttcaccctggcttatcagtaa

SEQ ID NO: 448687 - DNA, 537 bp, Serratia marcescens
atgtttttaccaaggaatcgagcgggtgccgttcttttggcgtcgttggcgtttgcgcccggccatgcaacttccgccgcgcaggggtggggcaaagtcaacatgcacggcgccattatcgacaccgcctgcgccattgccgccggcagccgcgatcagacgatcgatatggacactattcctctcgggcagatcattcgtgacggccagggggtgaccaaacctttcagtatcgaattggtcaattgcattttggaacggccggaaaacaagcctgactggaaattctttcaggtcacgtttgatggttatgcggaaggcgctctgtttggcgtacagggcgatgcgcgcggcgttgcattggagataaaagacagcagcggcacggcggttattccagggaaacctttgccgatggagggaataataccggggaaccgagtgctgaattattccatgacgttgatgccgaatcaccagccgttgaaggtgggagcgtatttttccacagtgcgttttaagctggattatttttga

SEQ ID NO: 448688 - DNA, 2535 bp, Serratia marcescens
atgctttcaccggcagggaagttatttcgtcttcaggccttggggctttgcgttgccctttctctgggaaatccaatcgcgttggtctatgccgccgacgtgattcaattcaataccgacgtattggacatcaacgatcgcaaaaatatcgatctgagccaattcacgcgcagcggctacatcatgccgggcgtttataccatggtggtgcacgtcaataagaacgatctgccggaacagccggtgacgtttatggcgcccgagaacgatcctaaaggcagcgaagcctgtctttcgccggagttggtcaaccaactggggctgaaagaaaaactgttaagcacgctgaactggacgcacggcggccgttgccttgacgcctccagcctggcggggatggaagcccgcggcgatcttgccagctcttcgctgtatctcaacattcctcaggcctatctggaatacagctcggaaaactgggacccgccttcgcgctgggatgatggtattcctgggctgctgtttgactataacgtcaacgcccaaacgcaaaaacatcagaagggcggcagcagttacagcctgagcggcaatggcaccggcggcgccaacctgggcgcctggcgtctgcgcgccgactggcaggccaacctcaaccatcagaccggctcttctcagccgaccgacaaacagttcgactggagccgctattacgcctaccgggcgatcccggcgctgcgttcgcggctgacaatgggtgaggattacctgaactccgacattttcgacagcctgcgctttaccggcgtcagtctgcgatccgacgacagcatgttgccgcccaacctgcgcggctatgcgccggaagtgaccggcgtggcgaaaaccaacgccaaggtggtggtcagccagcaggggcgcgtgctgtatgaaacgcaggtggcggcggggccgttccgcattcaggacatcaacgatgcggtttccggcgagctggacgtgcgcgtcgaagagcaggacggcagcgtgcaggagttcaagatgaacaccgccaacatcccttatctgacgcggccgggtacagtgcgttacaagctggcgacgggcaagccgtcggagtgggggcaccatctgcgcgggccgatgttcggcaccggcgagttctcctgggggatcagcaacggctggtcgctgtacggcgggggcatcgccggcggcgattacaacgcgctgtcgctggggatcgggcgcgatctgatggcgctgggggcgttgtcgttcgatgccacgcagtcgcgtgcgcgtctgccgcaggatggcacgctgaccggcggttcgtaccggctgagctattcgaagaacttcgatgaatacgacagccaggtcaccttcgccggttaccgcttctctcaggaagacttcatgagcatgggggactacctggatgcgcgttacgaaggggggcgcagcggcaagagcaaggagatgtacaccatcaccttcaacaaacagttccgcgatctggggctgagcacctatctcaactacagccaccaaacctactgggatcgggcaccgaacgatcgttacaacctgatggtgtcgcgctacttcgacatcggcgatttcaagaacgtcagcgtgtcgctgtcggcctatcgcaaccgatacaacgagcgcaacgacgacgggatgtatctgtcgctgtcgctgccctggggcagcgcgggcacgctcagttacaacatgacgctcgatcgcgaagagaacgcccaccgggtcgggtactacaaccgggtcgatgaacacaacaactatcagatcagcgccggcgccgcacgcagcggagcgacggccagcggttattacagccatcagggcgatatggcgcagatcaacgccaacgccagctaccaggccggccgctacagcgccgtcggcattggcgcgcagggcggcctgacaatggcggcggaaggggcggtgctgcaccgcgtcaatacgccgggcggcacgcgtttgctgctcgataccgaaggcgtcgccggtgtgccggtgcgtggctacggcagtacggtgctgaccaaccgttacggcaaggcggtggtggcggatgtaaacagctactaccgcaacaaggccagcatcgatctcaacagcctgagcgacaacgtcgaggcgacgcgttcggtggtgcaggccacgttgaccgagggagccatcggctaccgcaagtttgaggtgattgccggcgagaaggcgatggcgatcgtcaagctggcggacggcagcgagccgccgttcggcgccacggtgctgaatgcccgcaaacaggagaccggcatcatcaatgacggcggcagcgtttacctgtccggcctcaatcccggcgagcgcatgagcgtgcactggaacggcgcggcgcagtgtgaaatccagctgccggcgccgctgccggccgaaatgttgatgaacacgttgctgctgccttgccgtcctcttgccggcgacaagccggcggccgacgccaactga

SEQ ID NO: 448689 - DNA, 765 bp, Serratia marcescens
atgatgaatctgactatgaccagaaagaccgttttccttgtgggcccgctcgccgccgcgttgacgatcggcgcggtcagcctgcccgctcatgcggccatcgcgctggatcgcacgcgcgtgattttcgacggcgacctgaaaacggtcagtctcaacatcagtaaccagaacaaacagttgccgtatctggcgcagggatggatcgaagacgatcgcggcaacaagatccaaagccctttcaccgtgctgccgccggtgcagcgggtggaaccaggcaaaccgagccaggtgaagatccagtcgctgccggcggcgcgtcagctgccgcaggacagggagacgctgtattacttcaacctgcgcgagatcccgccgcgcagcaataagccgaacacgctgcagatagcgctgcagacgcgcatcaaaatgttttatcgcccggcggcgctcgccccgaaaaagaacgcggcgccgtggcaggagcagctgacgctgacccggcagggcgacaagtacgtggtgaacaacccgaccccgtattacgtgacgatcgttgaggcgagcgccggcaagggcgggaaaggggcggcgggctttgaaccgctgatggtggcgccgaaggccagcgccccgctgaacgtctccgccgcgagcctcggcaacgggccgtcgctggcgtacatcaacgattacggtgggcggccgcagttgaacttccgctgcgccggcaatgcctgccaggtcgtgccggtcgccaaatga

SEQ ID NO: 448690 - DNA, 657 bp, Serratia marcescens
atgcaacgaaagatccccatgttgttgggaaaagcctatgaacgtcatcagcgacgcactatcggcctgacggtgttggccgcgctgatggtgccgctgacggcgggcacgatgctgatgctgatgccgccggcccgggcggtggagaactgggaggtggagggcgcgaacggcacgctccacgtctacggcgcgttgacggaaagcgcctgcagtctggaaatgaccaccgctcgtcaggaagtgtggctgggggagacgggaacggcgcattttcagcgcccgggcgatcgcggcacgccggtggcgttcgagctgacgctgaaagactgcctgcgggcgccggcgagtaaccgcgacgcctggaccggggtgctggcctggagcggcagccagcctgcggtgtccgtggcgtttgccgcgccggcggatgacgacgcgccgggtttggtcagggtcgccggcgttaccggcttggggctgcagttggcggatgccagcggcctgccggtgcgcctcggcgcgcgtaacaaaccgatcttgctgacgccgggacaaaacaccctgacgtatacggtgacgccggtgcgcaccccggcgacgctgagcgccggcgcctaccgtgcggcgatcgatttccgcctttattacgactaa

SEQ ID NO: 448691 - DNA, 555 bp, Serratia marcescens
atgcgcacgacagagacgaaccggcgccggagcgcgctgttgggggcaggcatggtcatggtggccggcatgatggcgcagccggcggacgcggcggaaaacatgcgctttcacgggacgctggtggccgagccgtgcgtcattcagccgggagatgaggatatccaactggatttcggcaccatcgtcgacaaatacctgtatctgaatacccgcacccatagccaaaccttcgcgttgcacctgaccgagtgcgatctcagcctgggcaatacggtggccattacgtttaccggcaccgagaacgccaaactgcccggcctgctggcgctggatgccggcagcctggcctcggggatcggcatcgggttggaggacagcagcggcaaggcgctgccgctcaatcgcgccagcgataaattccgcctgaatgccggcaacaccacgctcacgctgcaggcctatgtgcagggggaaccggaggctatccaaacgaagaccatcggccgcggtaccttcagcgcggtggccacttttacgctggaatacgaataa

SEQ ID NO: 448692 - DNA, 423 bp, Serratia marcescens
atgatgataaagcccctcaatcgcaccctgcgcatgagcctgctgtgcctgttggcgttgagcgccgccgcctgtcaaaaccaaaaatcgggcaaacccgccgtgaacacccaaaatcaggctgtgcaagcgccgtcagaagaggctttgcgcaagcagcgtgaggccgagcagctgcagcagtgccagcagcaactgggcgcattgcgcaccatcaacgagaagcagtatcagcgctataaacaggccttcgacagcctgatgagcggcgcttcgcagtacgccaatctgcgcgcccgggtaaacggcgacacgcaggagacggtggatgcgctgtatcgctacaaggtcaactatctgtgcgccggggtgaatcaggcggtgttgaccgggctggcggatcgcggagagcagattaaatga

SEQ ID NO: 448693 - DNA, 1389 bp, Serratia marcescens
atgaggctgcgtctgctcggctgtgtcgctctgctgttcaccggcgttgcgcaggcggacgacggcgtgccggcgctgctgcagtttgccgagcagtatcaacggcagagcaccgggccgaagagcgaaaacgcggcgcccgccgaccgtgcgtcggggcaaaaaaagcgtgagccggcgaagcgcccgtcggacacccaacagccagcttcaccggccaaagcttttacgctgagccaggcattattggcgcgtgaccaacagctggcgcgccagcgaatggaactgacgatgttgcgccaggaacttgccgcgctgcgggcggagaaagcggcgccacccgtcgcgacgttgcctgattcgtcaacgctgcagcagtggatcgccgggctgggcgccgcctggcgcggctcgcccgatgcccagcgcgtcgaggcgctgctgcgtcaggcgacgcaggaaaccgctaaaaccaaagcggcggcgatgcaggccgaacggcgcgccagcgagctggagtccgccgcacaggcatcggcacagacgcttgcacaacgccagcgcgagcaccaggaggcgctgcacgctctgcgcgccgcgttggaagcgagtgagcagaagcgagccgctgagcagaaggcgacccagcaggcgcgcgaggcgctgttggcgctgcatcagcggctgcaatgggagatgacgccggagcagttgaaggatgaacgcaagcgtttgtcctacgcggcgggcagtgcgctagggcgcgacattcagggggtagtggcggagcgtcaaagctggggcgtaccggtggatcgcgacagcctgttggcgggcgtcatcgatagcgtgtcggggcgtttgcagctgccgccggatgaactgaatgcgctgacggcgcaggcggatgccgccgccgtggccgcgcgtgagaaacgcgttaacgaacagcggcggcgtgacgaagattacctggcgcagttccgtcaacaaaagggcgttaagccgtcggcgatgggcttctggtatcgggtggattacgccggggagggggcgttggcgccaacggcggtggtcgatgtggtggtgaaggagaaactgaccgacggcacggtgatccaggatatggaactgagcggcaaggtgctgtcgcaaccgctgtccgaatatccgccgctgtttcgggaggcgataagccatctgcataaccacggttcgctgacgatggtcgtgccgccggcgctggcctacggcgaaaccggctatccgccgaaggtgccgcccaacgccaccatggtttatgaattacgcatcgacaacagccaggcaccggcaaagggtgccaaggcggttaaacgggaagccgacacggcgggagggcagggatga

SEQ ID NO: 448694 - DNA, 666 bp, Serratia marcescens
atgaacaccatgataaaaatcgcgctatttgatgaaaaccgttacttcagcgccggttggcaggaggccctggcgctgcacttcagcacttacggcaagcgcacgctgttactggatgcgcagcaggttcacgaagccgatctggtgttctgctattttcctcccggcgtgcaaagctgtttttgtcacttctttgaggcgcaggctgcggggcgccaaacgctgtatttctcgttgcgaacgccggaggggcggcataaacgcaccgccggcacccgctgcgcgctggaggccggcgtcatctaccacgatacgccgctagtatcggcgctgtatcaggtgaacgccgagttggagcggcgcagcaaatggccgggcaggccgagttgtggcatgaactgcgtatgccagcaccgaggcctgacgctgcgcgaacaggagatcatgcgctgcatgacgcgggagatgggagtgacgcaaatcgcacggatgctggacatcagcgtgaaaaccgtcagcaatcacaagatgagcgttatgcgcaagatggggttccggcgtaatgccgaactttacggctggctgcggcacagcgcccgtcccggcgccgtgggggcgcgagccggcattcagcctggcgttgcggcagggaaggtgcagcactga

SEQ ID NO: 448695 - DNA, 1368 bp, Serratia marcescens
atggtcagcgttttcgatattttcaaaattggcatcggcccatccagttcccacaccgttggcccgatgaaagccggcaaacagttcgtcgacgatctgatcgcccaccagcagttgcaggacaccacccgcgtggtggtcgacgtgtacggttcgctgtcgttgaccggtaaaggccaccacaccgatatcgccatcatcatgggcctggccggcaacctgccgcacgacgtggacatcgacagcattcccggctttatccgcgacgtcgaacagcgcggccgcctgccgctggccaacggccatcacgaggtggatttcccgcagcacggcggcatgaatttccacagcgacaacctgccgctgcacgaaaacggcatgcgcatccgcgccttcgccggtgagcgcctgctgcacagcaaaacctattactcgatcggcggcggtttcatcgtcgacgaagagcacttcggccagtccgccgagggcgccacgccggtgccctacccgttcaaatcggcgcacgatctgcagcagcattgcaaagacaccgggctgtcgctgtccggcctggtgatgcagaacgagctggcgctgcgcagcaaggccgatatcgacgcgcacttcgccgacgtctggcaggtgatgagcgccggtatcgagcgcggcatcaacaccgaaggcttgctgcccggcccgatgaaggtgccgcgtcgcgccgccgcgctgcgccgcattctggtgaccggagacaagaacaatatcgacccgatgaacgtggtcgattggatcaacatgttcgcgctggcggtcaacgaagaaaacgccgccggtggccgcgtggtcaccgcgccgaccaacggcgcctgcggcatcattcctgcggtgctggcttactacgacaagttcatccgtccggtaaacgccaactcctacacccgttacttcctggcgtccggtgtgattggcgcgctgtacaagatgaacgcctcgatctccggcgccgaagtgggctgccagggggaagtgggcgtggcctgttcgatggcggcggccgggttgaccgagctgctgggcggcagcccggcgcaggtgtgcatcgcggcggagatcgccatggagcaccatttggggctgacctgcgatccgctcgccggccaggttcaggtgccctgcatcgagcgtaacgccatttccgccgtcaaggcggtcaacgccgcgcgcatggcgatgcgccgcaccagcgaaccgcgagtttgtctggataaggtgatcgaaaccatgtacgaaaccggcaaagacatgaacgccaaataccgcgaaacctcacagggcgggctggcgatcaaggtcgtagcctgcaactga

SEQ ID NO: 448696 - DNA, 1299 bp, Serratia marcescens
atggacactacacagaccggcacaattgcctctgcggcctcgggctccagcagtacctggcgtaaaacggataccatgtggatgttgggcctgtacggcaccgccatcggcgcaggcgtcctgttcttgccaatcaacgccggcatcggcggtttgattcctctgatcatcatggccatcatcgcttttccgatgaccttctttgcccaccgcggcctgtgccgtttcgttctgtccggcaagaatcccggtgaagacatcaccgccgtggtagaagagcacttcggcatcaccgccggtaaactgatcaccctgctgtacttcttcgccatctacccgattctgctggtttacagcgtggcgatcaccaacaccgtcgacagcttcatcacccaccagttgggtatgacgtcgccaccgcgtgccatcctgtcgctgatcctgatcgtcggcctgatgaccatcgtgcgcttcggtgagcaggccatcgtgaaaaccatgagtatcctggtcttcccgttcgtcgcggtgctgatgctgctggcggtgtatctgatccctaactggaccggcgccatcttcgaaaacgtgtcgctgtccggcagcggtaccggcatgggccacggcctgatcatgaccctgtggctggcgatcccggtaatggtgttctccttcaaccactcgccgatcatctccgccttcgccgtcgccaaacgcgaagagtacggcgcagacgccgagaagaaatgctcccgcattctggcctacgcacacatcatgatggtgctgaccgtgatgttcttcgtgttcagctgcgtgctgagcctgacgccggaaaacctggcggaagccaaggcgcagaacatctcgattctgtcttacctggctaaccactttaataacccgatgatcgagtacatcgcgccggttatcgccttcgtcgccatcaccaaatcgttcctgggccactacctgggcgcgcgtgaaggcttcaacggcctggttgccaagtcgatgaagagccgcggcaaaaccgtcagcaccgccaagctgaaccgcatgaccgctatcttcatgctggtgaccacctggatcgtcgccaccctgaacccaagcatcctgggcatgatcgaaaccctgggcggcccaatcatcgccatgctgctgttcctgatgccgatgtatgccatccgtaaagtgcctgccatgcgcaagtacagcggccacatcagcaatgtgttcgtggttgtgatgggtctgatcgccatctctgctatcgtgttcagcctgctcggctaa

SEQ ID NO: 448697 - DNA, 765 bp, Serratia marcescens; identical to SEQ ID NO: 422368

SEQ ID NO: 448698 - DNA, 681 bp, Serratia marcescens
atgaccaccgaaaacatcgattacgccagctacgttgaccacaccctgctggcgatggacgccaccgaactgcagatcgccaaactgtgcgaagaagcgcagcagcacaacttctatgcggtatgcgtcaactccggctacgtgccgctggcggcccagctgctgcaggaaagcaccgtgaaagtctgctcggtgatcggcttcccgctgggcgccggcctgaccgtcgccaaagcctttgaagccaaagcggcgatcgccgccggcgcgcaagagatcgatatggtgatcaacgtcggctggctgaaaagcggcctgctggacgaagtgaaagccgacatcgccgccgtgcgcgaggtttgcgcggctatcccgttgaaggtaatattggaaacctgcctgctcagcgatgcgcagatcgtccaggtttgtgaaatgtgtcgcgaactcgatgtcgccttcgtgaaaacctctaccggcttcagcaccggcggcgctcgggaagagcacgtcaaactgatgcgcgagaccgtgggcagcgaaatgggcgtgaaagcttccggcgccgtgcgcgatcgcgccaccgccgagaagatgatcaacgccggcgccacgcgtatcggcaccagctccggcgtcgccatcgtatccggcgcccagccggcggcgggcagctactga

SEQ ID NO: 448699 - DNA, 837 bp, Serratia marcescens
atgaagatcaacatcgaactggatcctgaagctttcggggcgcatcggcaggaactgttccgcaatgcggatttcgcggtgagcgcgcatcgctgcgcagaacgcgggccgatgctgacgctggcgaactgccgcggcgcgctgacggtcttgccgtatgagggcctggcgatttgggacgccgagtttgacggttattcattgaaatcgggccgccgcagcgcccgcggtctcgggagaaagcgcgctgacgacgcggcgttctgccccgcctggccgagccacgacggcgcgccgctgcagatgcagcgcgtgtggctgcagctgacgggcgatgagctgacgttgcatggcgaaggcgagcggttgggcgggcgttggcgcatcggcccggcgctgcgtttggcagcccagagcgcgcagttcgccatagagatgaaggtcactaacctggccgagcggccgcagccgctgcgctatgtgtgtcgcctcaactatgattgcattcccgacgcggtattccgccagaatctgccgacgccggctttgttaggggatgcgatccggcaagaactgctgtgctccgacgatctgacgcgctatgtggatcaggccgagttctttatgctgacgccgcaaggccggcgttatgtcacgcgcttcgctaccgggcagttcaactatggcctgcgacgcatcgccgttcagggcaaccggcggctgctggcctttgttcagccggcgaactgccgcccgaatgcgtcagagggtgaggcgggggtgatgctgggagcgggaaaaacgcgggcgttctgcgtgaccaccggcgtggtgtga

SEQ ID NO: 448700 - DNA, 606 bp, Serratia marcescens
atggagcagttaaaccatgttcttttcgcctggatcaatgcgaccccggcgtctcccgagtggatgattgatttcgccacctttttggcgcgcgatctgatcattatcgtgccgctgctgatcgtcggcctgtggctgtgggggccgcaaagccagctggtttcgcagcgcgaagtggtggcgaaaaccacgatcgcgctgctgttcgccatgcttgccgcctccgctatcggcgcgctgctgccgcatgagcgcccattcgtcgccggcgtggggtataccttcctggcgcacgcgccggacagctcgttcccgagcgatcacggcaccgccatctttacctttgcgctggcgttcctgttctggcaccgggtctggtccggtgcgctgctgatgattgtcgccgtcggcatcgcctggtcacgcgtttacctcggcgtacactggccgctggatatggtcggcggtttcctgctcggtctggtcggctgcctgttcgcccagctggtgtggaatctgttcggcgatgccctcgccgacaagctgtcgcgcctgtatcgtttcttgttcgccttcgccattcgccgcggctgggtgaaagagtaa

SEQ ID NO: 448701 - DNA, 735 bp, Serratia marcescens
gtgaatccagaatcgtcattaaatcaatcctcaacggcaccgcaaattaagacaaccgctctttactccctgccggcatccttttaccgttggcaggtttttggcctgctgatcagcggcctgctgttcctgtggctttcccgcagccaacagctggactgggcgatcggcaacttttggtacgatgccgccagcgggcatttcccgtggcaaaacaattattggctggatctgatcaaccaccgcctgctgaagcaaatagtgatcgtcggggcggtactggcgctgttttggggcatctatcgccgcagcgcgcgcctgatcgtgaccatgctgttgatcgggatcggcccgttggtagtgggcattctcaaggccaccagcgcgcactcctgtccgtgggatctgatcgagtacggcggcaaggcgatgtccttcccgttgttcgatgcggtgccggcactgccgggccccggccgctgtttccccggcgggcacgcctcgagcggtttcgcgatcatggcgttgtttttcctgttttatccgcagcgcccgcgcctggcctggtggtgctggtgcggcggcattgcgctcggcatgctgatgggctttggtcagatcatgcgcggcgcacattttcttacccataacctgtgggcgggttggtgggtttggttaagccagttggttatttattggatggttagcggctattggtgccgcaagatgaggtaa

SEQ ID NO: 448702 - DNA, 846 bp, Serratia marcescens
atgcagaataacgcgcgtgtcttactgttggcggctgccggtgcggccttttctccgctgagctttggccaacctgcggccgccgggccgatcgtggtgcagggcgccatgccggtggaggcggaacgtttcgcccagcggttggaaaacccgcgcgaggagcagattggcggctggcgcttttggcacggcaccgtagacggctacccggtggtggtgtcggagacgctgaagggcatgtccaacgccgcggcggccacggcgatcgccgccacgcagtttcacccggtggcgatcatcaaccagggcaccgccggcggccacgatcctgcgctcaaggtgtatgacatcgtgctgggcaaatattcggtcaatctcggggcgttcaaaacgccggccaaggcgttgggggcaggcagcgactcacggcagtggcagccgatggatctgttggcttccaaaggcagcgccggcgaggacaaaaaggcgcacagcctgcgccagtttcccgccgaccccaacctgctggcgattgcgcaaagcgttaagagcgattaccgacagggcaaggtcgtggaaggggtgatcggctcggccgacgtgtggaacagcgagctagaccgcattcgctatttccacgaccgctatcaaactgcggtcgaagagatggagaccgcctccgccgcgcagatcgccgccgaattcaaggtgccgttcgtcggcattcgcgtgttgtccaacaacatcaccaatcagggcaaatacaatccgcaaaccgggctggcatgccaggattatgtttatcaggtggtgaaggcctatatcaccaacctgaagaaacactga

SEQ ID NO: 448703 - DNA, 513 bp, Serratia marcescens
atgaacaaggcatccgttgtattttccggcctgctgatggccgtttccgccggcgctatggcggctacctctggcgatgacgcggatatcagcaaacagccgctggaaaaggtcgcgccttacccgaaagccgaaaagggcatgaaccgccaggtgatctacctgccgaagcaagagcacgaagagaactacaaggtggagctgctgatcggcaagacgctggaggtggactgcaaccgccacatgatcggcggcacgctggaaaccaaaaccctgtccggctggggctacgattatctggtgctggagaagctctctgaaccggcctcgaccatgatgggctgcccggacaacaccaagaccaagcaattcatcgccgccaacctgggtgacgccgcgatgcagcgctacaacagccgcctgccgatcgtggtgtatgcgccgaaagacgcggaagtgaaataccgcatctggaaagccgaagataccgtaagccaggccgagcagaagtaa

SEQ ID NO: 448704 - DNA, 906 bp, Serratia marcescens
gtgcgtcaacgaaggttgcctaacctggcggtattacgggctttcgaagctacggtgcggtacggcagcgtgtcgaaagccgccaaatcactcaacgtcaccgacggcgccgtcagccgtgcggtgcgcgaattcgagcagaccctgggattcgcgctgtttcaacgcaccagccgcatggtgcatccgacgccgcaggcgcaagagctggcgagcgagatcggccgggggctggacaacctgcagtcggcgatcgaccgcgcctgtcggcatcatcagaatcgcccgttggtgatctcctgcgagccgacctttctgatccgctggctgatcccacgcctggccggtttgcagcaggcggtggggaaagagcgcgatctgcagctggtctccgccggcggcgccgtcgccttctcgcgcgaaggcatcgatctggcgattcgccgcaacgatttcccgatcgccgacgacgtggtcgcccgcccgttcctcaaagaacgggtcggcccggtatgccgccgggagcatgccgcggcggggcgtgaactgcgcggcaccctgctccacaccgagacgcgaccgtacgcctggcgcgactggtgcgcccacagcggcttcgagatccggccgggcaacgagctgcgtttcgaacatttctatctcagcctgcaggcggcggtcgccggcgccggtatcggcatcggccctttggcgctggtggcggatgacatcgtcaacggcgcgctggtggcaccatatggctttgcgcctgacgggacggattacgtgctgatgaccctggccgacggccaggaggatgcgatattctcaacggtgttggattggctgatcgccatgggggaagaaaccgaacgggcggtattggcgggcggaaagaaagcgtaa

SEQ ID NO: 448705 - DNA, 1116 bp, Serratia marcescens
atgattgccattctcgccgatgatcttaccagcgcgctcgacggcgcggctccgttcgccgcacgcggactgaacgcctgcgtcatgctgcgcctgcccgatgccgcgttgcagggcgctgagattgtcgccttcgatttagattcccgcttcgtttcgccggagcaggcggagcggcgttttcgccatgccgccgccagtgtgaaaccggcgcgcctcatctacaaaacgatcgattccacgctgcgcggcaatctggggccggaaacgcgcggggcgctgtcgggcagcgggcgccgtctcgccatcgttgcgccggccttcccggatgccggccgcaccacggtgggcggccgacaatacgtcgacggcgtcgcgctggagcagaccgcctttgcgcgcgatccgaagaacccgatcgtcaccggctacgtcatggagtgcatggcggggctggagccgacgcgctttcaggtatttgacgccgtagacaacggcgagttggatgaggtcgtgaggcggatcggtattgccgaaccggtggtgtgggtgggatcgccgggcctggcggcggcgctgtcgcgtgcgttgtcccctaaggagaacgcgccgcccgctcaaccgccgctgagagccagcaaagtgctggtggcgattggcagcttgcatcccgcgaatgacgcccagctggcaagcctgcggcaggcgggtgcggtgcttgtcacgctgcctgaagcggccgatcccgaggcggcagcgcaagaggtgcgagcggcgtttgcgcgcgcagatgtggtttgcctgatgtcgccccggtcgcgagcggccacggcggatcatgccgctgcgctgggcgcggtcgtcagccgttgcacgccagccttcgacgggctggtggcgaccggcggcgataccgcgcggcgcatcgtcgacgccatggcggccggctcattgacgctgttcggtgaggtggaacccggcgtgcctttcgggttgttaaatctgccgggccgcaggctgccgttcgccaccaaggcgggcggttttggccgggccggtacgttgttgaactgcgtaacccggttgcgcgctgaccgagaaggagaagaacaatga

SEQ ID NO: 448706 - DNA, 840 bp, Serratia marcescens; identical to SEQ ID NO: 6027

SEQ ID NO: 448707 - DNA, 333 bp, Serratia marcescens; identical to SEQ ID NO: 167605

SEQ ID NO: 448708 - DNA, 741 bp, Serratia marcescens
  misc_feature (702)..(711): n is a, c, g, or t
atgcaccaagttcctgtacaggatttcacaatagagctgctatcccagtctgattattcactcggctactcgcttaacaacatgtcattagcctgctacgcgaagatgggtggagtaccgtggctgctaaaatcatcgccaactctatcccatgaactcgtgatcggcattggcagtgccaatatcgtccaagagcgtggtgcccacaatcagcgcatcatgggaatcaccaccgtattttcgggagacggaagttacattgtttcgagtacgtccaaagccgttgtgccggaagcttactgcgaggccctaacctctgttttaggagagaatatagaaaaaatacaaaggcgaatgaattggcagaaaggcgattcgattcgtttaatttttcatgcacaagtcaaaaagtttaacaaggaagagattcaggcagtccgtgcggtgatcgataagtatagagattaccagatcgagtatgccttcgttaaaatctcagagaatcacggactccacatgttcgactcttcaacggcaaccatgcctaaaggacgcttggcgacgcatcgcggaaaaacgttcaagctttctaaaaacgaaatgcttgtttacctgatcggccaacgtgaattacgacaagaaacggacggtcatccacgtggtgtgatagtcaacgttcataaagactcgaccttcaaagannnnnnnnnnagcttcctggctggagtgactcagtcatga

SEQ ID NO: 448709 - DNA, 633 bp, Serratia marcescens; identical to SEQ ID NO: 30074

SEQ ID NO: 448710 - DNA, 726 bp, Serratia marcescens
  misc_feature (251)..(260): n is a, c, g, or t
ttgaccggggctaaagggcaggtcgggcgctgttttatcgatcgggtacccgccgattgggttattttagcggccgaccgcaatacgatggacatttccaaactggagcaggttaaggctgtcgtccaggagtttaaaccgacggcgatcatcaatgctgcagcctataccgccgttgataaagcggaacaagattgcgaggctgcgttgttagccaacgttgtcggcccagccaatttggccatggttgnnnnnnnnnnaatgcaagatgcgataattcttcgcacttcctgggttttcagtgaatatggcgaaaatttcgttaaaaccatgctgaggttggcaaagcaacgtgaatctcttgatatcgtagccgatcaacgcggttgcccgacatatgcgggggacatcgcagacgcgatgataaaaatgttgctttgtgaggctcagggagggatctatcacttctgcggggatgaagaggtctgctggagtgagtttgcggagcacatatttaaagttgccgcggaggtgggggcgatttctcgcatgccaaaggtcagtaaaataacatcagaacaatatgtgactttggccaaacgtcctaaatattcaaccttgagttgcaataaaatcaatgggataggtattcctgcttctaactggcagtcagccctggaattcgtgatttctcgattgagaaaaataggttacttacaagagtaa

SEQ ID NO: 448711 - DNA, 1386 bp, Serratia marcescens
atgaataaatcaatacttatcataactcagtattactctatcggcgggttagagacctatatagacacccaggtaaaggatctggttgcccacggttatcaggtacatcttatgtctgccgctgtagcagactcgacattattgcccgaagaactgagctcataccatgaaaattccgatttgaatataggctcaatcagccagctcattcaggcgatcgacacgatacgtcaagtaatcaaagaaaaggatattgatctcgttcatgttcacccctttgattgcattttccccgcagtgattgctgcagattgtgagaaaattccctcgctattgacgctgcatggaccactgtcgctgcaacatttcaccaagaacatttataatcaaacgctggccatctactttctaaagacactgcaaacaatattctgcgtgtctcaagaaatagcagaccaactggcggaaattatcgaccatccgtcggtcatgatcgtccctaatctgatcgataataatcaaattcacaacacagagatagagtgccctgagaataaaagctggctgatcgccagcagattagatagtgacaaatccgatggtattataagcttcatcgatttcgcaagccgctgcgaatccataagcggcttagatatttatggggacggtgataatgcacacctaattagaacttatgtaagtgataacggttacaatgagtgggttcattttaaaggtatcgtgagcgatattcccgcagtgatgaaaaattatgctgggttcgcaggaatgggacgtggcgtacttgaggcgggttttagtcagcttcctatctgcctggtaggatatgacggcatcaaaggaatacttgatgacgaactctttaagcaagccgcctattgtaatttttcaggcaggaacttgagcaatgtcgatgaagaacaactcatagctgcattttccagcgctcgtcctctttctccatcactgctcaaccaatatcaaagtgaaggtcgatggagccaaattttcgaaggtttcacggctcctgataaagaaagatatgacaacagcgattctttaagcctttaccaaaatttagcagaaccccctgagttgcagcacgacgaaaattatttatacgctaacgaatttattaccgctattttcaaaacggtagcaaatcgtttattagaaagccgcactataataaccatgcacgatgaatgtttaaccgagaacgtcggaatgaaaaataaactcgataaggaaatgggggattttcaaagtagtacgatcatccctccgagtgccgagcagtctgtgatggcaaaattaagtgaactctgtctcttatacacatctgacgctgccgacgaatag

SEQ ID NO: 448712 - DNA, 318 bp, Serratia marcescens
gtgctgtttagcacacgcgaaagcgcgctgaaaataaatcagcgaatcagcgaatcagcgaatcagcgtgtcgtgcctggagggaaaaggctgtggctgcaaaataccataataacgtccaactcgattcacctgaaaccgtcaggcatcaggaaacgtttattactcgggtatgcacagctcagaaataactggagaggggtgctgcccgccgataacggcaagcaacaaatcagaagagaattggtcagcttgccttatttgttttattacaactacaactgtccaattgagtttctccaccgaaattttggctga

SEQ ID NO: 448713 - DNA, 375 bp, Serratia marcescens
atgtctggcaaaataatgtctgcggtggtgatcatgcttgcgctggcggccattgccggcgccggcgcttggctggctgctcgtcactatcagccgacgattgatcgtctcaacgagtcgctgacgcagtgtaagggtactggccggcaacaggctgcgacgatcgagagccagaacgcaggcataacggagctgcagcgtaaacaggaagagatggaggccaaggcgaaggcgaagcaggaaaaagcccacagagaggcgcagggcgactatgagagggctaacgcagttatggccgagcgaaccactggcgaaacgtgcgccgccgcatcggccgctttcgacgctgagctgcgccgggagcgtgcacaatga

SEQ ID NO: 448714 - DNA, 2493 bp, Serratia marcescens
atgtcggtacctaaccagaccccatacaacatttacacggccaacggcctgacaactgttttcccctacgagttctacctgctgaatgccggtgatttagctgtttccctcaacggctcggtgatcacctccggctatacgatttctggcgtaggcaacgtagatggcggcgaggtttcattcctgaccccgccggcaaacggcgttaccgtcatgctagagcgcgtgatccctacctaccgcttgaccgactaccaggacaacggcgatctgctggctgataccgtaaacaaggatttcgatcggctgtggatggccattcagcaggcgtttatctacctcggcctggcgctgacgcgtccgttgctcggcggcccatttaatgcaaaaggatacagaatcgaagggttgggggagcccatcaatcctagtgacgctgcgacaaaaaaatatgtcgatcagagtggagcgacaaatctcgcgaaaacactgagggtaccagaagcatttgtggccccaattggaccggtaaactatcggcgaaataaggttttggcgttcgatagcgcgggcaatccaatagctgtattgcccgggagcggaaccgcaaccgaagtgatgatcgagctggcgcagccagatggtgcaaaatacatcgggcgttgccctgacgtggccacgctacggaccattgagccatcagttgccaatcagcggcttgatctcgttcgctatggcgcgggttatgccggtggcggaagcgacatttattacgatccgaacgacacaagcacccctgacgatgggattatgacgtttgtcacccctggcggtgcgcgctggaaaaggcctaatactggagaaattccgctcgagtgggccggttacaacccatcagccagtaacgccgctgctgccctgcagcggattattaatctgatagtatccattgcagttaaaacaagtagctttgcagacctgccaatgattgttgtgaaaaagggcaggtacacaatgctggaaacagtaaaacacgcgccgttcatcacgattaaaagccgtggcaacgttacgtttagttttgccggtagcgatattattggtttttcagttacaaacgtatgggatggattgaaaaacaatgatgtgtcgttcaatgcatcatctggagcttattttcttgatggcagtggcgggatgatcagcatcatcggcattggttccgctagcagcaatcaggctggagtgcagttaggtaatacagttacgggatatcctaatttccgagaggccaaaattagaaatatttttgttactggctttatcgccggcacgcgctggcgctccgttgacacatatctatgtactgtctatgacagccggtttgagcgcaaccgtcatggcttacttgtggatgatacaaccgcacgaaatagcggtgagaaatctgcatttatacggtgcgttttcggtgatagctctaacaatgccataaatcacaatgcgagtggaatgtcgtttgactttgtcagctgcagctttgattttacgccagatcatattctggcatttaaaccgtctggcgcttactcagatttaacgtttactggcggacatatcgaagcatttggcggcgcactggtcaggcaggatgctcagattgcaggggctggtcctaatcgggttttgttcaatggaacgacaattttgccgcgcaagaacgtacccggctataacgcattacgccagctatttagcgctgactcgccagtttacgtgaacatgacagatcatcatttaatatttgaaaagacaaacaatgcatattatggcgcattggtgtctagtggtgatggcaactcaacaaataacgttaggttaaagattcgatcacatactgataaaccggaatatctgacaacctatagcgccgctatcaacagttggatactgctaggaacatcaggaactgatattaccgccacaggtgatagcagcattggtctgacgtttatcattcgaaacggtacggcgtctgtgaagtatatggatgtcgattccaatggagaaatctcgttagaaatatcctgtgcgaatactgccacagaggttgacattaacttcaacggtccgcagtcgatcacgcggcgagatacattttatgcgatgtgctctgtaagaccgggtgggataacaggtgctttaaacgtttccggtattttacgaaacatggctcaacgcactctaaacgcatcaggaacagcattggttgagaacctgataaatatcagtgctgacaccagtattaacatgctgccatatttcaatgctcctggcatgccaaatcctggaacatatcaatttattgctacgccgccgctttcctgtaagtcggatagaaaggcggattattgctacccgggcttgcgagtatctgggtttgttggggttatacacgtgaagctaccagcctggtggcttaaatctgcatag

SEQ ID NO: 448715 - DNA, 249 bp, Serratia marcescens
gtgagcgaagcaaaaccgcaagatggcagtaccgtaaaggggtaccggacccttacgccagagctaatcaaagacatgaatgaaattaagggcgccagccatgcattcatgaagttgctcgataagcagaggggctttactgctgctgaattatccgagacatccaacatgtcgcaagacgcccatgaagctaatcgctgtctggctatcgcccgcaccaagatgcaggaggcctgcatgtgggcctga

SEQ ID NO: 448716 - DNA, 375 bp, Serratia marcescens
atggacaataagctgagcgaactgagcaagccgatgagacttcatcgcgactggaacagcgcatcgatgtgccactgcgggaagtgcgatcggtgggaaatgactatcgccgatgctgatggcgttcagacctgtgcatcatgctacgacgcagagtggctttcagagtggcaggactatgcaaaagcagcagagaagcgcatcgccgaactggaagccaagctggctacgccggtgcggttggtggattacaggaactcgccggatatgcacaccaagcagtattacgaggcgataggttttaatcagggtattgatgcctgctccgttgccgtccgcgccgctgggttcaaagtcgagggggatgatgcatga

SEQ ID NO: 448717 - DNA, 192 bp, Serratia marcescens
atgacgattcccgactcccccctgaaacgacaaaagctggtgatcctgggcggcaccagcggcattggcgccgcggtggcctacgcggcggcggcgcggtggcctacgcggcggcggcgcgcggcgctgaagtggtgctggcttcacgtcgccttccccacgccggggagaaaaacgacgcgctgcatctga

SEQ ID NO: 448718 - DNA, 735 bp, Serratia marcescens
atgactaaaaaatttttgatcacactcttttccattactagcatcttcgcttcaatacctatttttatttattggttacacttcggaggtgaactatccaataaaaattccgactgggctgcatttggctcttttataggcggggtttatagttcaattttttcttttgcaagtgttttagttctttctgtgactctatacttaactcaaaaaaacagcaaagaacaatctcaactcttaagattggaaataacaacaaaggaattcaatttactactcgatgagcttttcataaatttagccacaaaagactatccacattatggtaaagaagataatttctttaaacatatggagaacgatataattgattatagaacagacgatggagctaaggattactttgaggcagcagagatgctcttaaaagataagtgtagtggattttacgaaaacgaatcaagaatactaatgagattagatacaactttaaagatgttgcctgattacgcgcaagaacattatcttataatattatattccagaataagtaatgacagaagattttggctaaaatgttatgtaaaagcatttggcctagatgtagctgactcagtgttaagcaaagataatttttgccaactacccttaaacatagaaacagtgaaaatgatacaagaacctctgtccgagactgcctcagaaatgcctcagcaagtcgggaaccctgagtaa

SEQ ID NO: 448719 - DNA, 1428 bp, Serratia marcescens
atgaagaaactaacactcattagtcagataactgccatgacaatggcctttggtggaattggatatgctacagccgtatcaaaccataacgaagtgctagataaatctaataaagatattacatctgcagaacctttctctgcacaagttttagttaatgggcttgatgcgccctgggacatgatttgggggccggatggcgacctctgggtgacggagcgcaaggctgcgtcaatcgttcgtatcaacccacaaacgggtgaaaagcaggtggtgatcaagattgacggcgtgcatgtcgggccgcagcatgaaggggtattggggctggcgttgtccccgaacttcatgaagccgggaggggataactatgtctacgcctcctatacctatatgaatggcaatgacgagcacgcaaaaatcgtccgtttcgagtacgacgagaaaaccaaaaaactggggaatgagaaagaaattctggcgggtttcccggcaggcaacgatcataacggcgggcgcctgcgttttgggcctgacggcaagctgtattacacgatcggcgagcagggccacaaccagggtgccaatttctgcaagaaaattgacgctcagcgaatcccgaccgaagccgagctggctaaaaaagattactcctcttacgccggcaaagtcattcgcttaaatgtcgacggcactgttccaagtgataatccggtgattcacgggataaaaagccatcttttcacctacggtcaccgtaatccgcaaggtcttgttttcgtcggcaatacgctgtacgccacagaacaagggccttcatccgacgatgagttgaatatcctcgaagccggcggcaactatggctggcctcatgtcgcaggtttccgtgataatcaagcatatgtttatgcaaattactctcaggcaaaaaattgtccttccttacagtgggaccctaaccatatccccaaaggtgttccaactcagaaagaaactgattggaatgctacagattttaaagcaccactaaaaacgttttttactgttagagatggatttacatataataatgaaaattgtcaaggcgactcttcttatatgtgctggccaaccatttcaccctctagcatagcttattatccagagaatggagtaataaaagaatggcgtaactctgtcattataagctctatgaagaatggagcattatatcgagtgccattgaatgctgacaagaaagatgtccaaggtgatactgtgaagtatttccacacggcgaatcgctatcggatggtattagttagccctgacactcgtaagatttatgttgcaacagataactttgggaacgtaatggataatagtaataagccaacgcatacgttaagcaatccaggctctattattgtctttgaatataaaggctga

SEQ ID NO: 448720 - DNA, 903 bp, Serratia marcescens
atgaatttaaacgttgacatcctccgaatcttagatgcgctagataaatatggttctctaaactcggcagccgagcacctctgtaaaacaccttcagctataaggtataccattagcaaatatgaaacgattattggtaaacctctagtcaagcgcaatcagtatcgtttagaattcacctctttaggaaggtctttactaattaaagggcgggcagttctagaggaaataaatcatttagaaaatgaattatgcaccaataatatagcaagccctgatgagtttaaagtaggtgttgacccctcaattccttctgatttcctcacgccattaatggaggattttcttaacttatttaaaaccacgaaaataaaactaatacatgaaaatgactatagcttttggaatatgttaaaagacggggtggttgatgttatttttagtacaaacgcccctcatccctctttcgctttaaagtttgatatcgtatgcactcagattctaagttatagaaatattgtcgtactatcaagcaagctacaggatgaagcagtagatctatcgaacaaatccataaaaaaagcatatgcaagctcacacatggaggtaattgttagtaatggtgggattagcaatcatgagcataagactctagagcaagacaatactattgctgtactaaacacagaagctaaaattaacttcatatcatatggtattggatgggggtatcttcctgactttattgcggactcgtatataaaaaaagggatcttagctaaatcgaaaggttcgtctgataaaccaattagtttattatacgccggaagaaaacttaacaacactgacgaacgagtttcatggtggataagaaatttcaatgattacgttgcttcacaataa

SEQ ID NO: 448721 - DNA, 2280 bp, Serratia marcescens
gtgatactcccggcgctcggcatcgccttgcagccgaacggcaagccgcagccgtgcccaacctgcggcggcaaagaccgcttccgtttcgacaaccagggcgggcgcggcacctggttctgcaatcagtgcggggccggtgacggcctcaacctggtggaaaaagccctatcgctgtcagcaaaggctgccgccgaacaggtggctgccgtaatgggggataatgcctgcactttgccaccggccgctgaggccggtcattcaccacaagacaaggccgaggctcagcgcaaggccgcgcgacaggcacaggctctggtggctgccgcgcaacctcagaccggcaatgcctacctgagtaccaaaggctggccggaggcagaaaccctggccctgcacggccagtcgctgcgcgtcggcggtatcacctaccaccccggcgacctgctgttgccgctgcacaatgccgggggagaagtggtcaacgtgcagctgattaacgccgccggtgacaagcgcatgctggcaggcggacaggtgaaagctgcctgccacaccctcagtggcccggacaacgcggttatctggctcaccgaaggctacgccaccggcctcaccgtgcaccgcctgaccggtgagacggtgtgcgtggcgctgagcgccaacaacctggcggcggtggcgcagcagctgcgcagccactacccggacgcgcggctgctgttggcggccgataatgaccgcagcggcaccgggcaggcacgcgccgccgaggcggccacactcaccggcggcaccccggcgctgccgcccacggaaggcgactggaacgacgtctactgtcagttgggcgctgagaccacgcgcgcgcagctccaggcgttcagccagccgacgcggccgagcccgttcgacacgctgagcgatgctgacctgaaagccatgagcgccagcgagaaggccgagctgttggccgagcactacggcaacactctggcggtgccgccggtgggggaagaactctgccgctatacgcgcggcgcctggcaggtgctgccccaccggcaactgagccgggagattgccgcattgttccagaaggtgcgcgcaccgttctccgccgccggtatcaacagcattctggacaccctcaaactgatggtgccgcagatgggcgacccggcccgccggttgataggctttcgtaacggcgtctttgataccgtgagcggccagttcagcgcccaccgccaggagcactggctgcgcaccgtcaacagcgtggactacacgccgccgcgtgccggtgagaacctggccgaccatgcaccgcacttctggcagtggctgacgcgggccgccgggggcaatcacgacaagcaggaacgtattctggcggcactctttatggtgctggccaaccgctatgactggcagctgttcctcgaagtgactggccccggcggcagcggcaagagcgtgatggcggccattgcccggctgttggcaggtagtgacaacaccacctctgccaccatcgataacctggagtcggcgcgcgagcgtgccagcgtggtcggctactcgctgattatcctgcctgaccaggagaagtggagcggtgacggggcaggcatcaaggccatcaccggtggcgatgcggtcgccatcgaccccaaataccgcgatgcctatgcggcgtatattccggcggtgattttggcagtcaacaacaacccgatgcagttcagcgaccgcagcggtggggtatcccgtcggcgggtgattattaccttcccggacgcgataccgctggcagaacgtgacccgcagctgttggacaaaattactaatgagctgtcagtcattgtgcgccacctgatgcagcgcttcgccaatccgaacgaggcccgcaccttgctccaggcgcagcaaagctcggacgaggcgctgaccatcaaacgacaggccgacccgctggttgatttttgcggttacctgacggtgctgggcaccccggaaggcatgatgatcggtaatgccaatatcatcccgcctaacccgcgccgctacctgtaccacgcctatctgtcgtttatggcggctcggggctatcagcacgtgatgaacctgacggcgttcggtctggcagtgccgcaaacgctgagagagtatgagaaaaccctgctcaagcgtaaaacccggctggggatgcagaccaatgtggtattgagtgaagagtgtgaagcggactggctaccgaagtgcggggcagcgtga

SEQ ID NO: 448722 - DNA, 5877 bp, Serratia marcescens
atgagcatcacggcgcaggtaagtatcgcgcaaaaattgggcttcacctcccaccagaatgctgttccgatgttacgtgagcttgtcttgcataacgaatccgatcaaacctaccaagatctaacgttgcacctgcaaacagcgccgtcggtgctggaagcaaagcaatggaatattgactgcctgctgcctggttcatcgattgatattcgtgaacgagatgtaaggctcaatgcggaatggctggctgaacttactgaaagtgtgatttgcgaagtcacgttaactttgcggcaaagtgacaaagagctcttcacgcttcattatcctctcgaggctttagcgaagaatgaatggggtggcaatgcaatgtccgaactgctgccctctttcattatgccgaatgatcctgctgtagatcgccttatcaaagctacatctgatgtcttgcgcagtgctgggaaaaaagatgcgttggatggctatgaaagtaaatcccgaacgcgcgtgtgggaaatggcttctgcactatggacagctgtttgtaacctgaatatcagctatgcactcccccccgccagttttgagcggaacggtcagaaaattcgcacacctggtgcaattctagaaggtaaagtcgctacctgcctagatacaacgctattatttgcctccaccctggagcaaatggggctcaatgctctggtaatccttagcgaagggcatgctttcgctggtttctggcttcaaccacaagagtttgcacaactagttactgacgacgtatcttctgtccgtaagcgtgttgatttaaaagaaatagtagtgtttgaaactacgttggttactaaagcacagcctccttcctttactcaagctttcgaggaagctttaaagcatcttactgaagaggagtttcacgcagccattgatacccgtcgcgcacgtatgcaaaagattcgccctctggctctggggagcactcgcttagaaagtcggttagattcagagccgaatgttcgacatggctttgaagatgcacctgtacttccttcttttgaacttgacatagagatggaaggtacgaaagatgccgctggccgtctcgtacagtggcaacgtaaactactcgatttgacgacccgtaaccgcttattgcatttacctgacagtgctaaaagtattcgactgatatgcgctaatcccggttacctagaagacaaactggcagagggaaaacgaatccgtattgtctcattacctgacctcgagttgggggggcgtgatgcggaattatatcgccagcaaacaaatgcagacctccgggaggagtatgcccaacaggctttggagcgtggtgaagttgtatcacctctcgaaaaagaacgcctggaatcatcacttattgatctgtatcgaaagtcaaaaagcgacttggaagaagggggagccaataccctgtttcttgcaattggtttcttgaaatggaaaaaatcagctgaagatacacgaaattacttagccccccttattctattaccgattcagctagaccgaaaaagtgtagtttctggtgtgactatgcgtttgctggaagaagagccgcgctttaaccttaccttactcgagttattgcacaatgactttgcactgactatcaacggccttgatggcgagttacctacagatgaaagtggcatcgatgtagatggtatctggaatgtggtacgtcgcgctgtacgtgatatgccaggttttgaggttactcgtgacgtcgtgattggtactttctcctttgcaaaatatttgatgtggaaagacctcatcgatagagcaccgcaactgatgcaaagttctctagtaaaataccttatcgagcggggtcaagaaaatgttgcccttgagacgaacggggagataattgaggtcaatagacttgatgatgctataagcactcaagagcttttcctgccattacccgcagactcctcgcaaattgccgctgtggtagcttctgcaaaaggtcgcgattttgttttggatggacctccgggcaccggtaagtctcagacaattgccaacatgattgcacataatctggccctaggaagacgtgtattgttcgttgccgagaaaaaagcggcccttgatgtggtctatcgcagacttgaagctcaaggattgggcgaattttgtctggaattacattccagtaaaacgtcaaagatggattttctcaaacagctggaacgagcatgggatgcccgcgatatgctcacgaccagtgaatgggaagaagaagctagcaaagttcaacgactacgtgacaagttaaatgaggttgtccgtctattgcatcagcgatggccaaatgggctgacacttcatcaagcaatgggacgagtcatcagagatgccagtatagtcacacctcaattcacatgggttacaggcacattgcatacctctgaacaaatgacagaattcagagaaatcgccaaacgtcttgaactcaatcgagatgcctttaagcaacatcacctgcattttggaagcataaaccagactgactggactaatggatggcaatcgttgcttattgctgaagctctgaccattccggataacattaagcacctagaaaatgctgcaggagacctaattaaagcaacaggaatcattttagaatcaaatgaacctgataaacttgttcaactggcctctctttgcgattcattgtcaaaagcagcaggtactgatctgagctttatgttcgctccagatgttgttagtagaattgaagctacgaaaatggcaatcagccttctcaaagagatcgaattagccaaatcaaaattgtctgttgcttatccaggaaataactggcaaagtttaaatgttctgcaggtcagaaactctcttgcagaggctgataagaaattttggttttttgcaactcatgcccgtaagaaagttattttcgaggtggtccggcaacatttacttaatgctattcccgatctatccgttgaccttcctattattgaaaagcttcaaattctatctcagagattgtcagagaacatacctttgacttcgactatgccgggatggcgtggtcttgacactgactattccgtcttacagaacaccctcgacttggccgacaccattcgcagtgcattaagtaaatttgcttcatcacctcagcaacttgcagagcttcgctccacagttaaaacgttattgattgatgctaatgacttactgggttctcagggcattattgcaacgcttacccagaatctgctcgcctccgtatcagctttcaaggaagccaaagcaagattctgtaatctgattaaaacgttagaacatgacttggagatcgcaacccttcgcgattgcgcattgggcatcgtgaaccatcaatcatctctgaaagcctggagtgactggagccgagttcgcgaagaagccgttggggaaggcttattgccactggtcaatgcgattatccaacttgacacaagtgatatcagtgcggtggagttatttgagacagcttattgccgctggtttgcttcgtgggtgattgactcagaacctctgctgcataattttgtacccgcagaacatatgagtgatattgatgcgtaccgcattcacactgaccgccttgccaggctctcggttcgctatattcgtgcacgattgtgcggtgtgataccagcaaaaaatgaagtcagtaagcaagggggctttgctctgctcaaacatgaattgcagaaatcgcggcgtcataagccagttcgccaaatggctgctgaaatgggcgatgctatgtcgaagctagctccttgcatgctaatgagcccgctctccgttgctcagttcttgccctcagagcaggcgttgtttgatctagtgatttttgatgaggcatcacagatagctccttgggatgcgattggtacaatggcccgaggtaaacaagttgttattgcaggtgatcctcgacaaatgccaccaaccagtttcttcaaccgtgcggctaatgataccgatgaaactgaagaagatatggaaagcattcttgatgaatgtctggctgcaggcctgtataatcacagtctgagttggcattatcgtagccgccatgaaagtttgattgcattctccaatcatcagtattacgacggtaatctgatcaccttcccctcatctaaaaccaaacaaagttccgttcagtggtgcaaagtaatagggacctattccaaaggtaagggacgtcataaccaggccgaagcagaggcaattgtctctgaaacagtgaaacgtctgaaggataaaaaatttatcgcatctggtaaatctattgggataatcactctcaatacggaacagcagaaactgattaatgatctatttgaccgcgccagacaaatacatcctgaaattgagccattcttccaacctgaactggaagagcctgtcgtagttaaaaatcttgaaacagtccaaggggatgaacgagatctgattatgcttggtattggatatggccctacagagccgggcgctaataccatgtcgatgaatttcggaccactgaaccgaaatgggggctggcgccgtcttaatgttgctgttacacgcgcacgtcaggaaatgatggtgtttagctcttttgagccttcctttatagacctcaatcgtacaagcgctcgagccgttgctgacctgaagcattttattgaatttgctcagcgcggcccgatagctctggcacaagcagttcgcggctcggtaggaagttatgactctccgtttgaggaggccgtagcaaatggcctaagaagaaaaggatggcaagttgttccacagattggcgtatcacggtttcgtattgatttgggtatcgtgcatccggataaaccgggagactatttagtggggattgaatgtgatggtgctacctatcatagtgcagccactgctcgtgaccgtgataaagttcgtagtacgattttgcaggggctaggctggaaactgcttcgactatggtcaacagaatggtgggttgataaagaaggcgcactagaaaggctagatatggcgattaatggtctgttggaggaatccagaactgcggaagaaaaaatcgcagataaagatgagctggatcagccaatcactatagaaaatagtagtacagacgtaactgatgagcagggatatattccggttgctaatgatgaagaaatatctgtttctggtaagcatattaaacccattatccatccagtatcagcggaagatgatgcggaggatccattgccagaactgaaatatgcttattctgcgacattagaaaccgctcaagctggaaaaacatgtaagtatgttataaatgaattgaaggagtggcagggaaaaattgatccagagagattctatatcgcagagtacgatgaaacgctaaaaatactcatcgcagaggtgattaatcttgagtcccctcttctagataaaacgctagtacagcgcatagcgcgtgtacatggctttagccgggcaggtagattgattcgagaacgtgttatggagattgttgaccaaaactatcatgtagcgacagatcattttggcgaagattttatctggctatcagaagctcaaagagcggactggaattccttccgtttaccttcaaccgatgctgatgttcggcaggttgatgcgataccaagtgaagaattacgcgcattggctttgagtattgaatgtgaaaataaggtctcggaaatggcaaagtcactaggtattaagcgtctgacaagtcaggcaagacaaagattagaatctattatttaa

SEQ ID NO: 448723 - DNA, 2295 bp, Serratia marcescens
gtgatactcccggccctcggcattgccttgcagccaaacggcaagccgcagccgtgcccgacctgcggcggcaaagaccgcttccgtttcgacaaccagggcggacgcggcacctggttctgcaatcagtgcggggccggtgacggcctcagcctggtggaaaaggccctgtcactgtctgcccggtccgccgccgagcaggtggctgccgtgatgggggataatgcctgcactttgtcaccggccgctgaggccggccctgcctcacagaaggtcggggggcaagacaaggccgaggcccagcgcaaggccgccaggcaggcacaagctctggtggccgctgcccggccccagaccggcaacgcctatctgagcgccaaaggctggccggaggcagaaaccctgaccctgcacggtcagccgctgcgcgtcggcggtatcacctaccaccccggcgacctgctgttgccgctgcacaatgccgggggcgaggtggttaacgtgcagctgattaacgccgccggtgacaagcgcatgctggcaggcggacaggtgaaagctgcctgccacaccctcagtggcccggacaacgcggttatctggctcaccgagggctacgccaccggccttaccgtgcaccgcctgaccggtgaaacagtctgcgtggcgctcagcgccaacaacctggcggtagtggcgcagcagctgcgcaaccactacccggacgcacggctactgctggcggccgataatgaccgcagcggcaccgggcagacccgcgccgccgaggcggccacgctcaccggcggtgtcccggcgttaccgacagacatcggcgactggaacgacatctactgccagctgggcgctgagaccacgcgcgcgcagctccaggcgttcagccagccgccacagccgagcccgttcgacacgctgagcgatgccgacttaaaagccatgagcgccagcgagaaagccgaactgctggccgagcactacggcaacaccctggcggtgccgccggtgggggaagagctgtgccgctatacgcgtggcgcctggcagatgctgccgcaccggcagctgagccgggagattgccgcgctgttccagaaggtgcgcgcgccgttctccgccgccggtatcaacagcattttggataccctcaagctgatggtgccgcagatgggcgatccggcccgccggttgattggttttcgtaacggggtattcgataccgtcagcggacagttcagcgcccataggcaagagcactggctgcgcaccgtcaacagcgtggactacacgccgccgcgtgccggggagaacctggccgaccatgcgccgtacttctggcagtggctgacgcgggccgccgggggcaattacgacaagcaagaacgtatcctcgcggcgctctttatggtgctggccaaccgctacgactggcagctgttcctcgaggtgaccggcccgggcggcagcggcaagagcgtgatggcggccatcgcccggttgttggcaggagccgacaacaccacctccgccaccatcgataacctggagtcggcgcgcgagcgtgccagcgtggtgggttattcgctgatactcctgcccgaccaggagaagtggagcggtgacggcgccggtatcaaggccatcaccggcggtgatgcggtcgccatcgacccgaaataccgcgacgcctacgcggcgcacatcccggcggtgatactggcggtcaacaacaacccgatgcagttcagcgaccgcagcggcggcatctcgcgccgccgggtgatcctgccgttcccggaagctatcgcccccgaggagcgagatccgctgctgctggcgaagatcaccgaagagctggcggttatcgtgcgtcacctgatgcaacgttttgccaacacgaatgacgcccgcaccctgctccaggcgcagcagagttcggcggaagccctggaaatcaaacggcaagccgatccgctggtcgatttttgtggttacctgacggtgctgggtaccccggaagggatgatgatcggcaacgccaacatcaccccgccgaacccgcgccgctacctgtaccacgcctacctgtcgtttatggcggcacggggctatcagcacgtgatgaacctgacggcgttcggccaggcggtgccgcagacgctgaaagagtatgagcatacgctgctgaaacgccgcaccaagcagggaatacaaaccaatctgatattgagtgacgagtgcgaagcggactggctgcctaagtgcggggcggtgtga

SEQ ID NO: 448724 - DNA, 210 bp, Serratia marcescens
atgccctcaaaacccatcgagcgcagctacgccggtcctagcttgctggcgcgtatcgtcacggcgaagttcgccgagcacacgccgtactaccgtcagtcggaaatctaccgccgacagggtatagcgctgcgtcggtccacgctcgggtgctggtccggcgcggtcagtgagctgctggcgcctctgtatgatttgttgtgggagtaa

SEQ ID NO: 448725 - DNA, 453 bp, Serratia marcescens
gtgtatgtggcgttcatcatcgatgtgttcgccggtatgatcgtcggctggcgggtatcatcgtcgatggaaacaacgttcgtgctggatgcgctggaacaagcgctgtgggcgcgtcgcccttgcggtactatccatcacagtgacaaggggtcgcagtatgtctcgctggcatacacgcaacggcttcaggaagcagagttactggcctcaacgggcagcacgggcgactcttacgacagtgcgatggcagaaagcatcaacggcctgtacaaagcggaggtgatacacagaaaaaactggaaaacccggcatgaagtggagctggctacgctgacatgggtggactggtacaacaatcgcaggctgatggagcggctcggtcatatccccccggctgaagcggaaaaagcgtatgatgcatcaatcgtgaacccggttctggcagcctga

SEQ ID NO: 448726 - DNA, 354 bp, Serratia marcescens
atgacaaaaaataatcagttttcccccgaggtgcgtcagcgcgccacccgcctggtttttgaaagccagcatgaatacagctcgcagtgggcagctatctgttccgttgcccaaaagattggttgttcccccgagacgctcagagcctggatacgccggcaggagcgcgatgccggtggcggtgatggcgggctcaccaccaccgagcgtcagcggctgaaagaacttgagcgtgaagtccgtgaactgcggcgcagcaacgatatcctgcgccaggcctctgcttatctgcgaaggcggagttcgaccgcctctggaaaaaataatgccactgctggacaccctgcgcggtga

SEQ ID NO: 448727 - DNA, 261 bp, Serratia marcescens
atgatcgcatctattcttgccaatccttatgtcagtatgtttggttatgtcattggagtgatttctggctctatagctattgtacaaactttcaatatttctaaaaagaataaagaaataaaaaggttgaatgtggatattattaacatgactaatgagttgaatttgcaggtaaataataaaaacaaagtcaaccagggtgataagtcacagtacttccaagataatagcggtccggttaatattgataacagggggtaa

SEQ ID NO: 448728 - DNA, 555 bp, Serratia marcescens
atgtcttctggtgttgattttcataataacagtggcccggtatatattgataaccaacctagacaggtaagggcaagtgttgtaggtaaattaattgaaatcatttcaacttacgaggcggggaatcaaaacttatacagaactgtgtctgacatagatctaaagataagtttcaatgatctaaaaaggaataggtggattgcagaactatataaagaagatgctattttagttgatgagtctataaaaactttagatagtataatacttaatggaagtgcaaagttaaagagacagtttagaggtttttataacgaagcgcttgggcgatacggattgcatgaaaaacctattgatttagaactgctaagaaataactcggacaatataatagatgatgtgattaaatcaactttaagaatgattggttcatgtcagaacttagactctcaatttcttcaagaggatgtagataacggagtaagaatgattgttagttactctattattgagtgtgtggtattggagaatcctaatgattacaatagactctga

SEQ ID NO: 448729 - DNA, 234 bp, Serratia marcescens
atgattacaatagactctgatcctaaagctaatccaattttccttgggggagttattttaaggttttttcaggactccggcgaaagtcaaaaagacataacaagtctttataattatgttaatggaaatgtacagttgtcatttgagttatttctttactcgttagattggctttacatcattggtgcgattgatcttgatgagaatggagacattgtttatgcggctgaataa

SEQ ID NO: 448730 - DNA, 1698 bp, Serratia marcescens
atgcggctgaataaacttactataataaagaatgataatgcgataagagtcatagactttaaagatggtttaaatttaattgttaataaaaagacctctgaaaaagaaagtggaaacagtgttggtaagtccacattgtctagagtgattgactatttattcatgtcttctggtagtgatatttaccatgattttgaatttggtaaagatatacctgaaatggtttcgctaataaataataacatattaaaattcaaactggatttcacctctgtttatggtgtgaaagctagcatctcacgattgatggttatagaagaacgtaactctaaatatctaattgatgatattgaggttgataaaaaagagtactcatcatttgtttcttcgaaaatatttggtctggtggcagaaaaaccaacattgagaaatgtatcgcataagtttatcagaaatactaacgataaaatgcaaatgaccttaaggttcttgcatggcaatacaaaggatgatgcgtacgaccttttatatttatttttgtttggttttgatggtttgccgttgttgaagaaaaaaagtgacttaaataaagaaataagaaaacaaaaaggttacttggctgcctatcgaaatccttatcgagaaactgcactttcaaagatggttaaacccataaaaaaagaaatagaggaggcagaagaaagtattaagaatttcgattttaaggatagccatgacgagagtttgaaacggttgtcagaaattcaagttgtaatcagttctctttcactcaaacatgcctcattaagtatgcgagttaataacttaaatgtatcaatatcgtcattaaaaggggatgttacacggattattgaagatgacttaataaatatatataagtcagcaggtgtttacgttagcagtgaattgaagaaatcatatgaagatatggttatgtttcataatggagttataagaaataaaattaaatttctagagtctgagttagtgaagaggcagggtgaaataaacgaagttaatgataaaataaatgaaaatcatgttcttgaatcatctctttttaaaactataaaagaaccggaaacattaaaatcaataaatcaattatacaccaagttaacagttctgaaagagagtctagctagcgttgaagttaacttgtcaaggattaatgatactagcggactaataacaaagttggaaattgaacgtgatcaactcttggttgatattgacactgccattaaaggtttggagaaaaatattgagatttttaatgagtatttcggtgatttaaccaaggaaatatataacgaaagatatctgtttgatttgtcatttgatacggaaaaaggtagatgcaattttgatatatcttgcctgactcctaatagtaatggagggaagaaaaaaggagaaataacggcttttgatttggcatacatcaaatttgttaaggatgtaggtctgaaaagaccgactttcgtcatccatgatagtattgaagatgtcgatataaatcaaattagagatatatttaattcagcgaaatctataagtggtcaatatatcgtatcagttttgagtgataaattctctactgagcaggatatgacgattattaaagaaagctcaattcttgagctttctgagaatgataagttttttaaagtataa

SEQ ID NO: 448731 - DNA, 1203 bp, Serratia marcescens
atgataatatttagaaacgaagaaaacaaaataatattagaatacacgcctgaaatgataagcgcagagcaagtctataacgagcttgaaaaaaacaacatttacaccatcgccaaaacattctatctttcgaaaaatgagctagcatcaacattcgacgacgacgataatagagacactattgagtttgtcgtcgcagagaaaatcgaaaattactataggttccatggcgagttacttggattggatgtagatgtattcatacacgaagaagtaaatttatcgcgaaagatttttgttgctgaaagattgatatcaattttcaaaaaaataggaaaaataaccaattctgatatctatattggaggaaacaaaataggatgcataccttatgttgaattcaataagttgatcaacaagttccctagcacttatgaactaaatagatatgctctagcaagagtagagtcaatcatctcctcgtatatagaatcagatgggcagcatgaaaagagttatcatgactatcttaacaaaaaaattgatttaaaggacaacagcattagcaatcaacttgctgactatgaggaattcaaatatcagaagattttagaaaaactaaaagaaatgttaaaaaatgaagataaatacactgagaagcaatggcaggctgagattttggatatcatacttttgctgtaccccaaatacttatatgtcttcgatgaagcaaaagtaaaggattttcacagcgcaaaaaacagatctatcgattacctcctagtcgattcttcaggaaatatagatatcattgaaataaagaaacccttcgacaaatgcatagtcaccgaaagagggtatagagataattacattccattaagagaactaagtggtactgtcatgcaaattgagaaatacattttccatctaaacaaaagcggagaagttggtgaaaaaagattaacccagcaattcaagcgtaaaatccctgatgattttgagataaagataactaaccccggaggctttatcatcatgggtaggaagaccaacttaagaaaagaacagctttatgactttgagataattaagagaaaatacaaaaatctcattgacattctgacttatgacgatttaattgaacgtttggaattcattttaaacaaatggtcacataaaaaacaaatcccaactaagtaa

SEQ ID NO: 448732 - DNA, 1212 bp, Serratia marcescens
atgcgcaagcaaactcgttttaaatttaatgcttttttgtcccgccttgccgaactgaacggcgtcgctaccggcgatctggataaaaaattcagcgttgagccgtccgttacgcaaaccatcatgacccgcgtacaggattcctccacgttcctgacccgcatcaacatcgtgccggtgccggagatgaaaggcgaaaaaatcgggctggatgtcagcggcacgattgccagcaccaccgacaccgccggcggcgatgaacgcgaaacggctgactttgcctcgctggatgcagaaggctatttctgccagcaggtgaattacgatttccacatccgttacaacactctcgacctgtgggcgcgttatcaggacttccagacccgtttacgcgatgcgattgtgaaacgtcaggcgctcgaccgcatcatgatcggctttaacggtacgcaccgcgccaaaacctccaaccgcgttaaattcccgctgctgcaggacattgcgccgggctggttgcagaagtaccgcgagaacgcgccgggccgtgtgctggataaaatcgtgggtatcgatggcaatgtggagtctgaaaaagttcgcgtgggtgtcggtggcgattacggcaacctcgacgcactggtgatggatgccaccaacaccctgattgcgccgtggtatcaggaagaccctgaactggtggtgatctgcgggcgccagctgctggcggacaagtatttcccgctcgtcaatcaggaacagcccaacactgaagcgatggccgccgatctgattatcagccagaagcgcatcggtaacctgcccgctgtgcgcgtgccgtacttcccggcggatgcgctgctgattacgcgcatggataacctgtcgatctactggcaggaagacacacaccgccgccatatggtggaaaactcgaagcgtgaccgcatcgaaaactatgagtccatcaacgaggactatgtagtggaggattacgcctgcggctgtctggtggagaacatcgagctgttgaccgtcaagccgaccgagccaaaaaccaaggccgcactgccgacctccggcgatgacattaaggcgctggccggtgccattgttgaagcggtgaaggttgccaccgccccagcggagccagtcgccgaagtgaaagagccggaggaagcaccggcagacgacaaagcgaaaggcggtaaataa

SEQ ID NO: 448733 - DNA, 570 bp, Serratia marcescens
gtgcggccgttcggttatcgcccggtgtggatcggctacgacccatcggaagccaacggcggcgacagcgccggatgcgcagtgatcgcgccgccaatggtggccgggggcaagttccgcgtgcttgagcgccaccaatggcagggcatgaactttgccgctcaggcccagaagattaaagatcttaccgaaaaatactgcgtggagtacatcggcatcgatgcgaccaccgtcggccaaggtgttttccagctggtgcgcgagttcttcccggccgcgcgggaaatcaaatacaccccggaaatcaaaaccgccatggtgctgaaggcaaaagacaccatcgggcgcggctgtctggagtacgacaccagccacaccgacatcaccgccgcctttatggcgatccgcaaaaccatgaccgccagcggtgcgcgctccacctacaccgccagccgcagcgaagaagccagccatgccgatgtcgcgtgggcgatcatgcacgcccttctaaacgaaccgctgaccgcaggcagcggccacagcagcccgaacattttggagttttactga

SEQ ID NO: 448734 - DNA, 336 bp, Serratia marcescens
atgaacactgcatcctgtttaccgattgaagtccgcaccgccgttttccgccgcgccgtggcgcaggcctatctggacacctgcgccttttaccgggtgagcctcgggtacacgctggacgagctgcagatgacgattgccctgcgcctggaggggcattttgtgcgccagtacggtgcggaggacggcatggatatggcgtgcaccatgctgagtgacatggtgcagccggacgttctggtggccgcgccgcgcctgaccgcgctggggcaaaagatgatggacgagctgtgctgcgagcgcctgtcggcggcacagaacgccaccgtacactga

SEQ ID NO: 448735 - DNA, 210 bp, Serratia marcescens
atggagcgcatcacctcatttttagcctacgcggtggcgatgttcctcgcgtggatcggcaaatattcaccgcaggacatcgcctttatggttggcgccgccgtgggcgtcggaacgttcctcgttaactggtactaccgccgcaaaagctaccagctattgaacaagctaggcgttagccggagggtttacgatgaactcaatcgctaa

SEQ ID NO: 448736 - DNA, 210 bp, Serratia marcescens
atggagaaaattacgtcgtgggtggcctataccgtagcggcctttctcgcttggattggccgatacagtccgcaggacatcgcctttatggtcggcgccgccgttggcgttgggacgttcctcgttaactggtactaccgccgcaaaagctaccagctgttgaacaagttgggcgttagccggagggtttacgatgaactcaatcgctaa

SEQ ID NO: 448737 - DNA, 231 bp, Serratia marcescens
atgagacgagatttaaacttagccggggcgtttatggaggcgcttaacttcaacgagaacggcaagggccgccgcataaagaccgttgatttcattcacgccgcaaaccggctcggcacacacctaacgcctgaagaggcgaattactacatcaagcaccagtccggccacgttttcaggctgattgacgaggggcgttatcagcacaatacatacctttttctctgctga

SEQ ID NO: 448738 - DNA, 420 bp, Serratia marcescens
atgaagtttggcgacgatgaggcggaggttaacccggcgatttcatacaaccgcccggagcctgagctgatgccggggccgggctatgcgggggcattcgacaagggcggcatcatcccgcgcggccagttcggcatcgtcggcgagcatggcccggagatcgtcaacggcccggccaatgtcaccgggcgccggaaaacggcggcgctgtcggcggcaatgttatcgctgtcaacgccggtgatggcgtcggccccggctgccgcacccgctacggcgccagccccgatcacgattcaggtgtacggcgcccccggtcaagatgcagcctccattgcgcgcgaagtctcgcgccagcttgagaccgaacgacgcaaacaagcggccgccgcgcgcagtcgcatgaactacggagggtaa

SEQ ID NO: 448739 - DNA, 336 bp, Serratia marcescens
atgaacactgcatcctgtttaccgattgaagtccgcaccgccgttttccgccgcgccgtggcgcaagcctatttggacacctgcgccttttaccgggtgagcctggggtacacgctggacgagctgcagatgacgattgccctgcgtttggaagggcactttgtgcgtcagtacggcgcagaggacggtatgggcatggcgtgcaccctgctgagtgacatggtgcagccggacgttctggtggctgcgccgcgcctgaccgcgctggggcaaaagatgatggacgagctgtgttgcgaccgcctgtcggcatcacagaacgccaccgtacactga

SEQ ID NO: 448740 - DNA, 348 bp, Serratia marcescens
atgtcggtgtggctggtgtcgtattccagacagccgcgcgcgatggtgtcttttgctttcagcaccatggcggttttgatttccggcgtgtatttgatttctcgcgcggccgggaagaactcgcgcaccagttggaaaacaccttggccgacggtggtcgcgtcgatgccgatgtactccacgcaatatttttcggtaaggtctttaatcttctgggcctgcgcggcaaagttcatgccctgccactggtggcgctcgagcacgcggaacttgcccccggccaccattggcggcgcgatcaccgcgcacccggcgctatcgccgccgttggcttccgatgggtcgtaa

SEQ ID NO: 448741 - DNA, 315 bp, Serratia marcescens
atggataacctgtcgatctactggcaggaggacacgcaccgacgccatatggtggaaaactcgaagcgtgaccgcatcgaaaactatgaatccatcaatgaggattatgtggtggaggattacgcctgcggctgtctggtggagaacattaagctgttaccgacggagccaaaaaaagatgaaatcgccgagctggccgaggccattgttaaggcggtcaaagtagccgccgcaccagcggagcctgccgctgataccgaggtgaaagccccggaggaagcaccggcagacgacaaagcgaaaggcggtaaataa

SEQ ID NO: 448742 - DNA, 1509 bp, Serratia marcescens; identical to SEQ ID NO: 81321

SEQ ID NO: 448743 - DNA, 1371 bp, Serratia marcescens; identical to SEQ ID NO: 83601

SEQ ID NO: 448744 - DNA, 1137 bp, Serratia marcescens; identical to SEQ ID NO: 83602

SEQ ID NO: 448745 - DNA, 228 bp, Serratia marcescens; identical to SEQ ID NO: 6111

SEQ ID NO: 448746 - DNA, 1896 bp, Serratia marcescens
atggatcagcaggatgcggcttccgtcgctcaggcgctgcgatactccagcggcgtcgtggcggaataccgcggcacctctaaccgcagcgacgaagtgatcgtacgcggctttcgttacgccccaaaatatctggacggcctgagctatcaaagcggccagatcgacccctggctgcttgaacgcgttgaggtggtgcgcggcccggcttctgtgctgtacggccaggccaacccgggtgggctggtggcgatgaccagcaagcggcccgtcgcccaggctattcgcaaactgcaattgagcgcgggcaacctgcatcaaggagaggccgctttcgacttcggcggcgcattggacgaagatgccaaactgctgtatcgccttaacggcatcgccggcaccaaagagaccggcatcaaagatcacaaggaaaaacgcttcgccatcgcaccggcgctgacctatatcgccaatgaagacacgacgttcaccctgttgaccagctatcaaaaggaaccggagaacggctaccgcaacttcctgccgacctccggcgtggcgatcaaaagcagcgccggctatctgccgtatgatttcaacgtcagcgatcccggtttcaaccaggctcgccgcgaacaaacctcgttcggctatatcttcgagcactatattaacgacgttttctctttccagcagaacatgcgttacaccacggtggatgaacgttacaaatatctggtgttcatgtcgcaagccaaaaacagcacgctgctgcagcgccgtccgcaaaaagatatcgtcaaatcccatgagctggggttggataaccaactgaaagcgcaattcagcaccggcgacgtcgagcacagcgtgttgaccggccttgactacaagtggagcaaggtcaatacccaaaactggcgcggcgacagcgcgggctatttcctcgactggactcggccggtttacggcatgccggtcaacgaaagcgcattgccgaaggtcaccgataaccgcaaggtgctggaccaactcggcgtttatctgcaggatcagatgagctacggcggttggaatttgttgttgtcgctgcgcaacgactggaccgagctgcgcactcaggacatgttgagatccagcgacagtcagcaaaacgacaccaagctgactggccgcagcggcctgctgtacgcctttgacaacggcattgccccgtacatcagctacagcacatcgtttgaacccaacctcgataccggcgcgccgggcaccgatccgttcaagcccaccaccggtgaacaaaccgaaatcggcgtgaaattccagccgaagaacagcaacacgctgatgacgctggcgttgttcgatctgacgcagaaaaacgtcagctccaccaacccggtaaccaaatacaaggagcagatcggcaaagtgcgttccaaggggctggaagccgaagtgcattcacagctcaccccggccatcgcgctcatggcggcctacacctataccgacatcgttaccaaagaaacctatgtcgacgatcagcgcggcaagacgctggtgatggtgccgacgcacgccgcctccgcctggggaacctacagcttcctgcaagggccgctgaaaggcttctccaccggcgctggggtacgttacaacggcgccagccaaggcgatgcgaccaacacctacaaagtgccggcctttacgctgtatgactggatggcgcgctacgaattggcagaagtggctccgagcctggcaggcgccgcgctgcaggttaacgtcaacaacctgaccgacaagcattacgtttcgtcctgcggcggcgtggacgcctgtttctacggcagcggccgcaccgtcaccgccacggtcagctacagctggtaa

SEQ ID NO: 448747 - DNA, 1143 bp, Serratia marcescens
  misc_feature (552)..(561): n is a, c, g, or t
atgctcagactttcacctcttcaagttcgtcaaaaagtgacaattgatgacattttttccgaaccagacgatcttggtttactcgtagtcgaaccactaaaaatatattcccctacgggtaacctgcctgtaagcagattagaagagattaatgcattctatgtggttcatgggcgtccacctctacccgattcggaggaatttaaggaaacgttgctagcacaacgtttgagggttctcaaggataacaagcaatatcgcgagatgttgcagccatttgatattcatggcttactctcaggtgaaaataacgagaatacccttgaatcatctgtatcattctcagctcctcccgtcgaggttgataggtcggagttggtcacctctctggacgatatctttgctgatgacgatgatggattgctctcatttgctgagcccgatattttcacgttaaaacatgttccgattgaaaagaaaacacagcctgacgaaattgccaaacgacagccgtgcccagatttttatcgattttccccactgtttgagacnnnnnnnnnngaggaatatggaccttggaatgcccgtttgcatttggtgtttgaaaacggaactgagatgaatatgcttttcctctcgcttacgcatggtctggtacgagatacagaaggtcgtaaagttgttttgaatgaacagtcaatacgtcctgatgaagctccgattccgacaggatatgtctatgtccttgccacgcatagcgaccagccagctcttcaacgttttaaacctgatttgtataaaattggctttacagagggaactatagaagagcgcattaaacacgctgaaaaagataaaaccttccttgaagcacccgttcgtatagtcatgaccacgcaatgcttcaacatcaatactcacaaacttgaagctctaattcatggttttttaggtaagcaacggctcaatatcacgctacgggggctggatggacaaatttatcatcctcgcgaatggtttcatgcacctttagcgactgtgctctctgtgatcaagtacattcttgacggtacaatttcgcaataccggatggataatacgacaggcaagattgtggcgaagaaagatacaggtcattcgtga

SEQ ID NO: 448748 - DNA, 204 bp, Serratia marcescens
atgctcaacatccattttctgggtacctatgtatttactctcgcaataggcacatttaccgtgaaaaagatgttccaaggcttcgacgatatcttcttctttatatcgcttaaatttatatgttttactgggggctggtacgactgcgtaatatcttcgtgcagcaatacgttcattatcaacaacattacctgccgtggttaa

SEQ ID NO: 448749 - DNA, 1953 bp, Serratia marcescens
atgacttctactgcaagggtcttccggcatgacattaacgggttaagagcctgggccgtcatcgccgttgttctttttcacttcggcatccccggttttgcgggcggttttgtcggggtagatgtgttttttgttatttccggctttttaatgacacaaataattgtcagcggtttggaaaccggcaagttctctatctggcatttttatctggcgcgcgctcggcgaatcattccagctctcatggccctgtgcatcactttattggtgctggggtggtttttccttgtgtctacggattacaccacccttgccaaacacgttctgaccgcaattctttttgtttcaaatgtcaagttttggcgcgaggccggctattttgacgcagactcgcatgagaagtggttactacatacctggtcactttccgttgaatggcaattttatattattctgcccattgctctcgtgttcatggctcgtctgtggaaaactcgcggtattcaattgacgatattcgtcggcctgatactttcatttgcgttgtcctgctacgtcgcgatcaaatctccatcatcggcattttatttgctgccaacgcgcgcttgggagatgctggccgggggggctgtgtggggattgactcgaaacgttcaactccatgctaccagtgctaaatggttagaatggtctggtttcgctttaattatcgccgccatcacgctgtttaatcccggcttggcgtggcccggcttatatgcagcggtgccggttactggcgccatgttggtgctggctgcaagccgccaaaattctctgtttacctctaactacctggcagaacgtcttggcgtctcgtcctattcaatctatctttggcactggcctattgtcgtgtttctcggctacaacaacgctgcgagctcatggaattggctgattgccggcatcattctgagtcttattcttggcgaactctcattaagaatgatcgaaaacccggccagaaaaagactgtcgaagcaaacagcctggggaaatgcatttacgatcgcaacttgcactacgatcatcggtttcgcctctatcgcgctattcaagctcaatttcccaaatcgcgtgccaccgcaaattgatgtagtggccaacgaaagcctgaacgttatccctaatcgcgacaagtgcattgcctctaccagcacccgttcaccggaatgcatatatggcggccatgacattaaagccgtggtggtaggcgatagccatgcggacgctatgttgactggggtcgtcgccgcattacctaacaagaatgacggtgttcttgacctgacttacgccagttgcccgactcttttcggagcgaagatggtgcccggagaagtgccgggaagccagtgtcacgaatttaaccagtgggaacgtgagagattgaagcgcattgatagaacgatcccgatcgtcattataaatcgttcatccgtctacgccttcggccaacacaatatcgtggcgaaaatgaatatgccgatggtttatttttccaagatctattcgcaccctacccccgagtttctgaaggagttcaaaaaggatctggtggcaacagcatgcgagttggccattgatcatccggtgttcttggttaggccaacgccggaaatgatgctggatgttccgaaaacactttcccgctcaatgatgctcggcaagagcatgcacatttacctctcggaagaggattaccacaaacgtcatcaattcgtttgggaagcgcaggacgaggctgcggagaaatgcggtgtcaaaatcctcaatcctcttccgatgctgtgcaaaaacggtctctgcgaaagcactcataatggccgcccgatatattacgatgacgaccacctcagtgaatatggcaacaaactgttagtaccgatgtttcagcaaatatttctgtag

SEQ ID NO: 448750 - DNA, 303 bp, Serratia marcescens
atgagatttataacactgtttacattgcttttcgctcttcccctccatgccgaagaccatgattatggtcctcccatctctagatgcttgaacaaacatactattccgtatatcaacacgacgattcctgctgagaatattgttaatgatgcttataaggagtgcgaagatatcgttaatgaatggaataatgttcgtgcatccttgcccaaggaaatggtaatcaagcagaataaggaatttagggagatgtatgtcaggatgattgatacccgcaggaaaacagatgttaacaaaagatga

SEQ ID NO: 448751 - DNA, 822 bp, Serratia marcescens
gtgaaatactatcttgaaactaacgctctaagagcgcttggcggctccctaaaaaataatgagaaattacttaaggaatcttatacttcaacgttctcacttttcgagttgactaaaggaattggtagagctagagatagcgagcgcagactgggtgtgcttaaatctcttcaatctgttgagttaagttttatcgattttatgccatttgagatgatggagttagcgtttaacagcggtgcgcatgtacatgagtcggagtcagttaaaattaaactgcgagccattctaacaaatacagaatcggcacagcaagaatacaaagaaattattgaacgatatgagtttggcacgaagagttttcaaagcaatatgactacagcctgtgctgttcctgctccccctaaagagatgattgaattaagcttagatcaaatattcgtttcagatcgtgagacaccaagttactttaacaaagtgccaaaagacgcacatccttcacgcttcatgatggaaagtttaaaacaaagtgaagcacccaatgtctttagaacattgtatcccgaatcaaatctcagtgatcatgaaatattaaatacttataacaatggtctcgatttattcttttttgcaaattatacctacaatcttaaaagaacatgccttcgagaggcagcttcaaagaacgaccttcttgacatacttcatacattatatctcgttgatcatgataacataattgttagtaatgatgctattttcaactcaattcttcctaacataaattcaatgtcagttgaggaatatcgtaacctattataa

SEQ ID NO: 448752 - DNA, 855 bp, Serratia marcescens
atggatgaaaatataggcatgagttatattgagaaggtagcaaatggtaatgctggtgagttttattttgcatattgggtttcaaataacttcatctggccttgtcgtattcttgatattgatatggggttggatgctcaaattgaaatttacgatgaacaatatcattcaacagggatgtttattggcgtacaggtgaaaacaaccgcgaagacgctagaagaatccccttgtatttctgtccccttgaaaaacatagtttattgggaaagtattaatgacccagttgttattattcgagtttgtcttaataataactctcaagaacctagcttgtattggaagcaccttaagaaaacagaattaaaaaattatttaaaaaaagcccaaataaaatcttatgaaacagtatctataagtttcgaagaaaataataattttttgaaaaagagtgataaatcattatggttgaagctttttttgagagatgaagatatagtcattattgagcatgcagaaacaattaaatctaaaatagttttcttaggccaatattttgaagaaaattctgacgatgggcggcttactgctgggtatccatatcacaatttcccttcagaacttaacgatattttgaacgaatatgacaagttgtttaacgctgttaaaataaatcctcgattggagtatctctcgaacgaagtaagttcggccattaactcttacaacttacatattaacattatattacgatccttcacagagggggtggaaagccactcaattaatacttccgattttgatcgattttcaacaactaaccctgcacttcatagaataattaatggcggttaa

SEQ ID NO: 448753 - DNA, 1983 bp, Serratia marcescens
atggccgatatcgtccctaacgttgtcgtctcgatgccttcgcaactgttcacgctggcccgctctttcaaagctgcagccaacggaaggatttacatcggcaagattgatactgatccaaccatcccggagaaccagattcaggtttacctggagaacgaggatggggagcatgtgccgatggctcagccgatcatgattaacgcaggaggctatccggtttacggcggtcagattgccaaattcgtgacggtgcagggccatagcatggccgtttatgatggctttggcgttcagcagttctatttccccaatgtgcttaagtatgaccctgaccagctacgagccgacctggctgggcctaatggtgcaactcttgttggctatggaacatcaactgttgcggctacattggacacgttaaagtcagaaattgagaatatcgggtttctcggcggaatttacacaacaccagagcggcacggggcagttggtgatgggcaagccgatgattcagacgcgatcattgatgcagtgaataccggtaaaaatgtgattggcggccttgggaaaacatacaaggtaactaaaaccattctaactaactatttctcatataagcggctgcttgattttactggaagcaaaatcattgcaacccataacaaaggaatattcgttacttcgaatacgtcggttcctacaaatgacccacttgggttgtataacacagtgctaaaaggcgttgacgtaaagggtgttgtgaccagagatagcgcatatgctggtaatgagcaatcaagagtggcggcgctttataacagcggtgtaattaactgccgaatggttggattcactgatgctatcgccatgtacaacgatagtttctggattgatagttatgcagatgatgtccgcgataacatcctggcttcatacggtgagcggatatttgccacgggtatttatggtgggagttgtgccggtgattttctgctggttaaaagcagatactcatacttcggtaatggcagcgtaattaatgctggcctgtttggcccatcgccagctgagggccctaatgttcgcggcggctcagtgatcgccattggccaagatggagcaggggacacgcatcacaacacgattgagaacattgtggcagtaaaccacggcgttggtggcgttgtgttcaatggcagctacaactttgttagcaacgttcattgtggtcgattctctgacgcggatagaacccacgttgagacaacggctcctgttgtttacatgactggtcgtggtaaccgggtgcataacgttactgctgattactatcgtgacggtatcgagattcacgatcactcgttcgattgctcggtaacaaaagttgaactgatatcgcaaagcccatatggcacattcagcctaacaagtagcggcactgacatgtcaaacaactttgttgatgacatcagaatcactaatcctgcgccaaagtacgacatcgtatttattggctcagcgacccttcgaatcggtagtgtcattgttagcaatatcaagacagcgttcaccagcgggctctacccgatcaggctgatcattgctgactcaatccgctattttgaggcatcgtctaccggtaacgtttcaaacaacgcgacgcttatctatcagcaaaacaacataacggctggaacaatcaagactctgaaccatacccacattggcatagcctgggatacggcagtaacacagcttgcggatagcgtcgttatctcgcaatcgtcaaatgcgatcgactttgcatgccgcctcctgggtacaggggcaagatttggcggtgctatgcgaatcaccggcccaaggacgcccaacattggtggcggctccttgtctctgtcgtcatacattggcccagtttggcaaggtactacgggatcgacaatcaactatccaaacctggatgcacacggaatctaa

SEQ ID NO: 448754 - DNA, 261 bp, Serratia marcescens
atggatgatatggaaacgcagttccacctaaggctgccaaaagatgttcatcgcaaggttaagcagcgagcaaagatgaatggtcgctctctaaatgctgaaataacatttattattgaggagtcattatcacaaccggcaacggttactggattccgtgacgaagcagaaaaaaaagctgaattactttctcaggaagtaaaaaaggtcgtatttgaaaaggtggtggcgcattacagaaaagataaaacccgcaactag

SEQ ID NO: 448755 - DNA, 699 bp, Serratia marcescens
gtgaaacttaaattattagcatgctttgcaattttagttttggctggatgcgcgcaaaaaccatctgtaacagtaaatgctatgacatctggcgtggcaactggtaaaaacattgtaatcattcctgctaggcaggagttgtgggattcaaatcagcttgagtatatacaaatatcaagggttgtagcatcaactttgtccagtagtggttatagaatggtcgataaagttgaggacgcggatcaggcgattttgttagattttaatcgcagtggagcggttagccaggcacgcaatgtaacaatgcctatttatggtcaaactggtgttagttcttctacaacctatggtacagcaaataccacactaaataattacggatatggttatggcactgctaacacaacaggaacgtctactaccgtttataatccaacatacggaataacagggacatataatactacagttgttgatacattctacggagcagcggtgtcaattcaatcgttcgattcaagaaaatatcttaaaacaaaacaagctgtaatgatttggaagagcatggcaacatatttctcttcaaatgcagataatatatcagattacaaaggattggctagaatagcatcatcatttgcggataaaaacacaaatggaaacgttgcaatatcagttgatttaagagaatctaattga

SEQ ID NO: 448756 - DNA, 297 bp, Serratia marcescens
atggataagctacgcgaagagtttgaacagtggtggaaagacgaaaactacgataagcagctgatcaacattcaccacgttatggtcaatcgtattaagaaggggatgtttacagcatggcaagccagccgagcaagcatcgtggttgaaagcataactccatctgatgcaccttcaggcttgatttatcagattggcggtgccggtctcagtcatgacgaagcgatttgcgaaggttactcagctggctttaatgaagccatccgctctatcggcctatcaatcaaaggggagtga

SEQ ID NO: 448757 - DNA, 273 bp, Serratia marcescens
gtgaatcacagactcgattacaagcacgccatagcctatacggacgcgatggagttcttgataagccattatgctgagttcccagaaaaagtacctactggcggcccatgcgccgaaatatctgacgcattgcacaagaaccaccgtttcattttaacgccagagggtgaggttgtttttggtgattgcatcattcctggcattaacgccgaagagtttaacgaataccgccgcacggtatcttacgccggtcaggagcataaccatggataa

SEQ ID NO: 448758 - DNA, 363 bp, Serratia marcescens
atggccgagcgctggcaggactacgaaagaaaatatctccgacaagctaccaaagatacggaagtcgaaatcatcgcaaggaagcttgagcgaagcgagtctgcagtcattagagaggctcgtcggttgaagctaaggcgtatcggaggaacctctctgcactatcgaaacaagaagcagccgcttcgaaaatggcggcatctaatcaagccttgcgacaaatggagccaacaagagttggctcttttttttacccattcaaaccagcagatggccgaaattaccggtcgctcaattgagtcaatcggcgataggcgcttgctcgaaaacctccggcgcaatggctggctaaccaaaaactga

SEQ ID NO: 448759 - DNA, 675 bp, Serratia marcescens
atgagcactgagaagctgagcgaactgagcaagccaaaggcattcgttgttgccggcggtaagatgtatcaagaccgtgcattcacggataaatcaacggctgaacgctcaaaagccgatcggcatgatggcgcagttgttgagcccctctactcgcaagagtacgtctccgccctgctggagaggtcgaaagaaaaagatgaacgcgccattgcttgcgttaatgcattcgaaggaatcgaaactgaccgtattgcgggtaaaagcctgggtgagtttttggccggcgaactttacctaaacaaagccgagcccaagcaggatggaagctttgggttcacgttctctggacttgccgtgcaactgatggctgattgctttgctgaccagttcaaatcctctggcgctatcaactatctcgagcttcttttcgagcatgcagaagtcggagagatgaccgtaaccatgcaacgtgttgaaggattaaccccagcacagaaacttgcagcagcagaacagcgcatcgccgagctggaagccaggctggctacgccggtgcggttgcctggttccttttatcctgatggagatattgagtgcccactggttgtggagctcgatgcggcttttgatgccatccgcgccgcaggcttcgccgtagagggggatgagtag

SEQ ID NO: 448760 - DNA, 222 bp, Serratia marcescens
atggaacgcgaaaaccgctatctggttatcaaatttaaagacgtaatcgaggcgctcacagttgagcagcgcgaggcgttgagcagcatcgccattgcagttaccgcccatcgacagaacaacggcaagcagccgctggatgccgttgtcgtcgaatccgactggcctgaatacgaacaggtctgggacatgattgaagcgcgcgtagagggggatgagtag

SEQ ID NO: 448761 - DNA, 192 bp, Serratia marcescens
atgagaacaaaacaaagtgccctgctcatctttggtggccgcatgatcaccatctatcttggtgcggctgatgatgaagagtatgccggtaagatggctattctcgagcagattgttaagcctggcgtaaagctcattgccgagcaatcaactctcatctcacacacttcggcaaacatcacaattcagtag

SEQ ID NO: 448762 - DNA, 1098 bp, Serratia marcescens
atgaaaactgtatttgtgcttggcgctggattttcaaaagaagctggcgcgcctatgcaggcggaaataatgggtgagatatttaaaatacgccaagagaattcaaacgattttaatgattcagattttcagctttttgaaagcttacttactgaacaattatattataaacgtgagcaatttaaagatgttcagattgaagatatgttcactcctttagaccggtgcttggcggataatatacagtttagaggtctgtctattgagcaaatgacaaagacaagggatgctatttttaatatcattggtgtggccattaggaggatcttggaaagaaaagggaatagtaaggaatatattggccactttgctgagtatttagtgaggaaatgtagcgagagactgggtggtaattatagacagcatgatcctgtaagcgttattagtaccaactgggatattctactggataattcattgtatgattatatccagaggaactaccacggacatgcagttgttgattattgctgttatataagctccttagaagaaagggacgaaacggtaaagccgggtctagaaatgttaggggcaggtggttttaatgtgaaactgctgaagattcatggttcacttaactggctacaatgttcgcgatgcatgcgcctttacgtcgggtttaatgaaaaaataggggttgtgagagggacaacatgtaggcattgtgataaaaatcatgacgcagtaaataaagagaatagactgatatcaaatcttattatgcctacctttctaaaggatctatcaaatcctcaatacaaaataatttggcagaacgctggtattgaattatctgaagctgacaaaataatcttcataggttattcgttgccgagtgctgattttgaaatgagacaacttttatctcgaatgattaaacgaagtgttaaaattgaagtcgtaacatatgaaagagataaagaaaaagaaaaggatataaaaaaatattggcaggcgttttttggtgagcgtgaggttaaggttcatttatgtggtgccagtcagttcattgagcaatccttatatcttgaataa

SEQ ID NO: 448763 - DNA, 252 bp, Serratia marcescens
atgtttatgggtaacgcaaacattgtaccacgtcagcctcgtacatacctttaccatgcctatctggtctacatggaagccaacggctataaaaatacgctcagtctgaccatgtttggcaaggggctgccgttaatgctgaaagagtatgggctgcagtacgagaagcggcggaccaatcagggaatgcagaccaatctggcactcagagaagaaagcaatgctgactggctaccgaagtgcagtctctaa

SEQ ID NO: 448764 - DNA, 660 bp, Serratia marcescens
atgagtttacgccaggcctgcaggacgttatcgctgagcaggacggtgtatttttatcagcctgatacccggcgtgatgaaccggtgacccatgcgctgactgagctggcagaacgctatccgcgctacggttttaagaagctgttccagctgctgcgcaggcaggacaatacctggaaccataaacgtgttcaccggatttacagcctgctgaaactgaattttcgtcgtaagggaaaacagcggctgcctgtgcgtaatccagtaccactggcgacaccgcaagcgttaaaccagagctggtccatcgattttatgcacgacgcgctggtctgcggcagacgcttccggacctttaatgtggtggatgattttaaccgtgaagcactggcgatagaaatcgacctgaatatcccggctcagcgagtcatccgggtggtggacaggatagtggcaaaccgcggctacccgctgaaaatgcggatggacaatgggccagaactggtctcgctggtgctggcacaatgggccgaagaacatggcgtgcagctcgaatttatcaagccgggtaagcctacacaaaatgcttttatcgaacggttcaaccggacataccggacagaaatcctggacttttacctgtttagaacactgaattaa

SEQ ID NO: 448765 - DNA, 1542 bp, Serratia marcescens
atgggggtttcattagaaaagctctggattggtacaattcattctttttgtttgagatggatactaaaaccttactcaggcttctgcgaagatataaggtttggatataggattattgatccacatgatgccgatgtattgaagaagacgttttgcgataaatattcttgcagtatttttaaaactgattttggttggaatgaaagagggttgaaagttaagggggtaaataacaggagggcagttgagagttattataaccatcttaaattgaatgatttaatagattttgaacaaattatatatttctcttatttgcttttagttcaatatgaatccattgctttaaatctatctaaaatattcaatcttattcttgttgatgagtatcaagacactcaaatactgcaatatgagttgctttttaatctggctaaggcaaggggtaatacctgtcgtttattttttgtaggagacccaaatcaggcaatatttaactctatgggaggggttgcattaagtattgaagattttcgcgctaggtcagggattgattttgaattattatcattaaatgataattatcgttcaagtcaatctattgtaaattacttttcgctatttagaacaatttctggagagccatttaaagctgttggtgaattttgtaattatgattcaaaagttacttttaatataagttgtagtgttgatgtgttagatgactatgtaagaaatttagttctttcagctatagatgatggaataccacaatctaatatttgtattatagccccatggtggttccatttgtctgagataacaaggcgcttaatggtattaatgccagacattgctttcaatggccctggtgttacacctatctcgctaaacagagaaagtctctggtataaatttgcaagaatcgctttaaccccatcctctccgaaaaactatttgacaaggatttattatgctagtgagttgctaatgcagttgaatgaagctggttttattttgaaaaatgattcaaccgaggtgaaaaaatttttaaggtattgtaactcattgaatgtgcaggaaatggaagggctagactatctaaagggttttttttatgagagttcagcgtattttgattttgatattatgcaaaacgaagagtttagcgaatcttacaacgcattttttgcttctgcacaaaaaaggaaggagaagctggagattgaaggtttgggtgtgctgacaaaaactgaacactataaaaaaatgtttgataaaaaatcaggtgtgacagttacgacagtacattctgctaaggggttagagtttgactgtgttattgcttttgggctgttgcaggggattatcccaagatttgatgaggatgagcagcagtctaagaggctgctgtacgtattatgttcaagagccaagaaaaaattacacttaatatcagaagtcgaacggcggcataaaagcggtccttatcttgcaaacgaggtgctctgtaaaaccaaatttgattataccaatgaatga

SEQ ID NO: 448766 - DNA, 579 bp, Serratia marcescens
  misc_feature (558)..(567): n is a, c, g, or t
gtgctaaaaacaaaaaaaagaaaagcactaggctcagaaaaaattggaaaggaaagaaaggtattgttagatgcattttgtaataacaacgcttatgtaaagcctttttatgcagattatacctttgaagttgaatttatgagtgagtttggtaatgaagaatatgttattaatgttcttgatgaaatttatactcatgaaagtaaaatagaatctatcgaaaaagacctcaattcccgatcagtagaggtgtatggggatagagttttgagcgtagctaaatatgctgggaaaggatggttggcattagctcttgctgaaaaggttgatcataatgttaaaattccagagtatattctagatgctttggctttttcaattggtaaatttaataagtcaatattagttgctgtgttgatttaccgcaggcagttttatattgatccttctcaaacagcagagttggagtgtattgacgaaataatatatttactaacgcaaagtaaaacgagtataaaaagacaatttataaaagatctctactcaaaaaaatttgannnnnnnnnntgctgccgatga

SEQ ID NO: 448767 - DNA, 924 bp, Serratia marcescens
ttggttgatgatatcttcaaggactccgagtcaattaagataatcttagaaaaattacaccttcaacaaaataaaattaatgatttagaacaggattatagacacgcgcttacaaaaatcagcttaaatgaagatgactatgaatcaaagcgttctgcgattgagaaaggtttttatatctcctccgaattgataaaaaaccataagagtatcaatgatgagttggaacagttgaagggatattccgctgaatctataaaagttgttaaaagattaaatgattttacaatgtcgcataataaaaaatatgagaagaactcctcagagttggagtctttgactcttgaggctaaaaaaataatgggtgatgcttctgctgcaaaaatcggggaacactttaaaattcagtatgatgcatcaaggaggctgttggctctctggccaactattagtggggttttcttgatgtgtgctatattaatttgcttgctgacagtttttcctgaattatatgtaatggtttttggtggtaatgtgattgaacatacttctgcaaatgccgctccatttttgatttctagactattggttgcccctttatttttggctggcgcttggttttgtgcaactcagtatataaaacagaaaaatataacagaggattatgcatataaaaaagtgctatctctttcgctactatccataaaagcggaggttgagaaaactggcgaggctaatacatctgaatttattcgagctattcagggggaaattgtcaagtctcctttggactcgcttgataaaagttattatagaaatgaaatagaactacttaggacagtgcaatcagaggctgtgaaaaacatcatagctagttcattaatgaaagaaaggagtaaaaagactaacagtaagtccaagtaa

SEQ ID NO: 448768 - DNA, 276 bp, Serratia marcescens
atgggtatgaattggaaaaaaagtgattacttgctgaaactaatgatttcactggctagctcaattaaaattaatgctcgaaaaactggcggtgaagatcttaggggggtgtcctatcttttgcttaaaactcacgctagcttcaagcagcttttgaatattttaaagaaatttgagctaaaggaaattccttttaattatgaatttgaaaccttgtcagatgctatagatgctttatatcctccgaccgaggaattgttccgtggagatggttaa

SEQ ID NO: 448769 - DNA, 1782 bp, Serratia marcescens
atggcatttgtgagtgatttaaaatctgaagacaacagcgccccagctagcccaacatcacaaataacagcccaacgattaggcaaggccctaagagaacgatatcaagcccacattcacaaaagagaatgtacaccaggtcaagctgactatgatgttaaaatggccagtagagcactagcagcatttagtttatttcacttgggaggcgtagatgatcctgaagcaggggctggagtttgcgatagttctacagatggaggtatagatgggatttgtgttaattataatgagaagctagttgttgtagtgcaatcaaaatttaatcagtcaggtggaggcacatggactcgcgatgatttccttgcatttaaagatgcatgtgaaaaactacaagtggaaaaatatcaagtattcgatagcatattaaaagacaaacagtcggacatctccttagcactgtcttcctttgattataaatttatctttgtaatgactcatacagggaaaaaaggggctgctgatcaaatacttaaagacatgcaaaattggcaggaagagttaaactcagcggcattgatggatgagaaaacccctaatgaagatttagcatttcaagttcatttggtatcagcagaagatctgcaacaatggcttcatgctgggacgagaaaaaccatcgatatagaagatgtagaaatagaaaaatatggttacatagatgaaccatttaaggctttctatggtgtcataagtggagatcaaattgcagactggtggaaatctcatggcacaagattatttagcaagaacatcagaaatatattaggaaaaacagaagtcaacgaggcaattaaagccacagcaacatccaatcctgatttgttttggtattttaacaatggtataactttactagttagagatattgaaccacatagaagaaacagcgccaaaggctccgaaagaggcacatttggtttcaaagatgttagcgttattaatggagcgcaaacggtcagtagcattgggatgatatctgacagtctaggtgattctatttctaacgttaagatttcagctcgatttataaaaatacccgataatgacagtgactcaattgctaacaacataaccaaagcaaataatttccaaaatagagttcttggcagagattttgcctcccaacgaccagaacaacaccgtctggcaagagaactagttattgaaggctataactatcaattattaagatcagatgcagagtctaaccaactagataataaaacgattgacctagatgaagcgttgaatgcactagcatgcatgactaagaacagtgcgatagtgacaactctaaaatcaaacagaggtcggttttttgataattttgaagggacactgtataactccgtattcaaccctagcactccggggattaaattaattaacgccgtattgcatctacgagtaattgacaacctaattggcaaaaatttaggggaaattgacaaagcaacacatagtcgccgtcatcttataataacccatgccaataggtatttagcctctgttctattgaattcagtaaaaggagttaaaagatccattgaaaaaatcgaaccagacgagacaagtttaaagactgagttagctatgctaataacaaaaacggaagattttattgaggataattaccctaatgcctatcctgctcgtttctttgccaactcaagcaaactagatgaactttataattccttagagaggccagtctcttaa

SEQ ID NO: 448770 - DNA, 675 bp, Serratia marcescens
atgaatctgtatatcctcgttgaagggcaacaaacagagaggaaattgtatcctgcttggcttagtcatttgtcgccaaaaatgaagaaggttgatgcaatttcacagatgaccgaaaattgtttttttctaattagtggggaaggatatccccgcctgttagatgtcgcccttataaatactttgaaagatttaaatgaaaacaagtttatatcgaatctttgggttgtattagatgcagatgataagtcggttgaagagcgtcgagaacaagtttttgaaagggttagggctgcaggaattgacatatcgcattgtaaaattgatgttatagtccaaaaaacatgcattgagacatgggggttggggaataagattataatttcccctaacaagctaagtgccgagtttaatgaatttctttcatattataacgttcaggacgaagatccggagttaatggggaaacctgataggcacaaaggttcgatagcgcattatcacgagtgttatctaagggctatgttaaaactacgtaatgcaacttatcaaaagaaaaaccctattgctttaatggagccagcatatttagcccagttagaagctagagttaaagaagggagaaatcatttacctagctttgaatattttctgagcttggcgaaaggtttgtag

SEQ ID NO: 448771 - DNA, 1140 bp, Serratia marcescens
atgaaaattaattcacttgaagtttacaatgctcatagcaagttgagaataaatcaaataaattttgatgatttcacgttgctagttggagcgtctggcgtaggtaaaactcagatattgcgctctcttgttaagttgcgaacaattgcatcaggcaaatctataagtggatttcagtggacaatagaatttgaaattgagggacggatttataaatgggatggtgcttttgagacccaagattcatatgatgaaatgtcattgagtgtaccattcataataaatgaaagtgaaaagcctgaggcacgaattgtacgtgaactggttactgttgatggagagacactcatcaatagaaatggtgatgatatcatctataaagataataaaaccgtaaagttgtcgttgactgagagtgttattcatttgctgcgtgaagaggatgatatttcaattattcatcgttctttatcaaaaataattctggttgatcctaatgagggagtcgctttttatccttctaaagataaagactttaatgaagatggtgtgtattccattaaggatgttagggaaacgacattttctataaatgccaaattgtatttgtgtcaacaaaagcaacccgagtatttcaactcaattgttgagagttataaaggaatattcccttttgttgaggatgtgaaaatagagaagattgagaatgatgccattcctaaaatatttgctaggcattttattctccgagttaaagagagaggtattgatagttggatacctcactcctcaatgtcatcaggcatgatcaaaaccttcatgcagatagctcatattcatttgagtccgagggggacggtttttctgattgatgaattcgaaaatggatttggtgttaattgcatcaatgatattacggatattttaattcatcaaggtggtgaagtgcaattcatcataacaagccaccatccatatatcattaataacattcctttggataactggaagattatatctagaaaggctggtgttgtagataactatacggcaaatgattttaatttacatgaatctaatcatgaggcgtttacaaagttaatcaatcttgatgtatatgttgacggtgccgataaatga

SEQ ID NO: 448772 - DNA, 321 bp, Serratia marcescens
  misc_feature (274)..(283): n is a, c, g, or t
atgcacccaatacagcaaaaagaaagaactcagaacgtgaagtatcactttgattcaattgatatccttagaggctttgccgcgatatctgtcgttgtttaccatgtcatagagcattttaactggagctctttccctaccaattggccgtggctgtggttccgctttggttggatgggggtcgatatgtttttcgttatttccggttttgttattgctatgtcagccttcaaccaactggatagaagtggaaaagataaattttttgtccctnnnnnnnnnngcgtcgtctcaatagaattgtaccgcttcattacttga

SEQ ID NO: 448773 - DNA, 186 bp, Serratia marcescens
atggtatacaagaaaacgcttgtcttgataagaacgacgctgagactcgtgaatcaccagggattcagggaaataacgtgtcttatgtttcaagcaaattctacgagaaagatcgacatcttcaagatacaaaaagaagcgagtatcaaaatacccgacatcctgaatagcctgattactcactaa

SEQ ID NO: 448774 - DNA, 1431 bp, Serratia marcescens
atggaaaaactgaaagaaaaaacaaccagaggcctgaaatggagtgcgctggaacgagtgatggcgcaaggagtgcagctttgcgtaatgctgattttagcgcgaatgctggggccgacttcatttggtctggttggcatgttagcggtgtttattgccgtagcccaggtctttgtcgatagcggcttcagtgcggcattgatacgcaaaccggaacgtagcgaggccgatgttgccactaccttctattttaatatcactgtgtcgttggtttgttatgccgtgctgtatttcagtgcggatagcgtggccagattctataatcaaagtgagttatctttattactgaaagtgctggggctggccgttatctttaactcattcctggttattcccagaaccaatctgacgatcgcgatggatttcaaatcgcaggcgaaaatttcaattttaagtgtgttggtgagtggtacgattgcgttgttcttggcttggaaaggctacggcgtatgggccttagtcgcgcagaccttgctcgcgtcgctaaccagcgtagtgatgtacaatattatttccccgtggaaacctaaagatcggttctcttttgagtcgtttcgttatctttttggttttggtagcaagttgctttgttcatcgttattggaaacgatctacaataatatttatcagctcattatcggtaagcatttttcgccgaattatgtcgggcaatttacgcaggctaatcaactcgccagcgtacctgcaatgacggcgacaaccgtgatccagcgggttacctttcccatgtttagccacatgcagagcagcccggaaaaaatggatcaggcctatttactgacgttaaaactggcggctttcgtcattttcccgctattgtcgatattgtgtgtcgcttcgacgccgttgctgaccttgatattgggtgtaaagtggatttatgcctctcatcttttatcgattttatgcattggctacctgctatatcctattcatgcgataaacttgaatatactgcaagtcaaggggcgttcggacctgtttctaaagcttgaggttatcaagaaagtgttgggtgtggcgattttgttggtcactatgcaaatcagtatcacggctatgtgtataggcattgtgcttcactcatatctttctttgattatcaatacttactatacaagccagcttacgcagattggccaattgactcaatttaaagctttatggtcattgtggttaggttctgttatgagcgctgcaagcgcgttttatcttaaccaggcatttgttttttcgttgcctgttgagatctttatcgcgatatgtattccggctattctctatataatgtattcggtactattccaaagagatttgctgaagattatcttcactgcagtaaaaaaataa

SEQ ID NO: 448775 - DNA, 567 bp, Serratia marcescens
atgctttatattaatgcacgttttttggcgcaagatcttacgggcgtccagcgtttcgctgaacagatatctatagcgcttaatgagattcgtgatgatattattttccttgttcctaaagatactaagcgaaacggcttgttgaagaaggttaaatttgaagaggttggcgagcgtcaaggtcacttgtgggaacagttggacctaccggcatatttgaagaaaaaaggctctccactattattgaatctgtgcagcacagcaccgatattttaccggaatcaaattgtcactcaccatgacgtgacctatagacgctatccagaaagcttctcaagaaaatttagagcgctttatcgaattttaattcctaccatgctgaaaaacagcaaaaaattgattaccgttagtgagttttctcgcaatgagataaatgaagtttatcattgtccaaaagagaaaattgcggtggtgtataatgcggttagcggtgattttttcagaaagccagctgtgcaacaagagaagtatttgcttgtttaccgaaggaaagcggcgtctccttga

SEQ ID NO: 448776 - DNA, 453 bp, Serratia marcescens
ttgaaaatcattggcaagtcggcaacaactttcgcagcacaagacttcagcaaattgattaatggctcggatgacattcaattcatggggcgtgtcgacgataaagaattaattgagctttaccagaatgctttggctttcgttttcccgtcattctatgaggggtttggcatcccaccgctagaggcgcaagcttgcggttgcccggtgattgccgctaaagctgcatctatgccagaagtgttggcggatagcgtggtttattttgatccgaataatgtcagtgatattgcggcggcaatggaaagaatcatcaccgatgagcggttgcgcgaggatctgatcgccaaaggcgaacagaacgtcgctcgtttctcgtggcatcattccgcggagaaagtggatcagatcgtaggagagattcaggctgtctcccaggggagaaatgcatga

SEQ ID NO: 448777 - DNA, 648 bp, Serratia marcescens
gtgagtgggtttcaatactggaattccaatggtgctcttatgattgattcgaactacaaaggcacatattatcaggatagcatggagtatcagaatattgcggatattggcttttaccaaattgaaacaaccattgggaatagtcttgatatgggatatgttttcaaaaaatttcctgaaagtgatagccttatgtggtttaaacccaacaacagagcgaaaatggttttcggtgaaactaatcttatgaccgccaatgcgggaagaatggctagaacacgtagtgatttgcctatagaaagtggttatcgtgacgtttttaatgctgcaggtgaattggtttggtctgttgtacatgcagctaaaatccctcggattattgggttttatgatatacctgcaaattttgaattagataaatttgcgtattctcaatatattggtccagacacctggattttagctagtaatgcgccggggtctattagctttgatggtgaagtcgccgggcatagtgggctttttttccgtttccttgatggagtcttatcatgtcaatggataagtaagaatcagagttcttggttgtctacaatgaaaccttatggactaagaataccaattgcaaagctatcgaatcttgattga

SEQ ID NO: 448778 - DNA, 606 bp, Serratia marcescens
atggtttatagaataactcattcattacaagagattattaaacacatagaggggcaaatgggtacatatatctcagataaaacagaaacatgttttgatgaatattctttaatcgaaaaagtcgaggatggctatgagattagtgtgtactcatttaagcttcatgcaggaaatccttaccaaccacatatatcagaaagttatagtggtgatatttttattagctatttgtactatggaaatgattcttactacgagcgtaggcgtcaggagtacagaaaatatttatcattaaaagaaatccatcttgctattctaacgatatttccagatgagcgaagaatcgcgataggtataaaaaaagaaagctatagcatcgttaaaatatcttatgtggcagcggatgaagtatatcttcttgatattgcaaataaagaaatgttattgctagataatatattttgccttcataatattatttccaagcatgaaagcaatattaataagttggaaggtgaattagcaagtggtaaaaaagaattccaaagcatgaagttagatgtaaaagaaaaatgtaaatctattcttgatattgttgatcagtaa

SEQ ID NO: 448779 - DNA, 1122 bp, Serratia marcescens
atgagttggccgatggtgaaacttcatgatatttgtagaccaaaacagtggaaaactatagctgccagtagtttaattgcatctggttacccagtttatggtgcaaatgggaaaatagggttttattctaaattcacgcatgaattcccaacgttgatgattacttgccgtggagctacttgcggtaatgtgcacatttctgagcccatggcatatattaatgggaatgccatggcattggacgatatagaccgaagtaaggttgacatcaagtatttgtactatttttttctaaaacggggatttgacgatgtgatttctggctcagcacaaccacaaattactggccagggtttaactaaagtagagattcctctccctccgttattagaacaaaaacgaattgcagctattcttgataaagccaatgatatacgccaaaaacgtgagcaagctgtcaaactcgctgatgattttttgcgtgccacgtttttggagatgtttggtgatcctgttgcaaatccgaagaaatgggatgtggcttctttgttagaatatggttcatttaaaaatggaatgaattttacgaaaggtgagtcaggctcggtactgaagtgcctgggagttggcaatttcaaatcactagcaactattacctgtatggacaatatcgatgaaattgaattaaatactcttccttccgatgattatcttttgaaagatggtgatatcgtctttgtccgctctaatggtaataaagccttggtcggaagatgtcttactatttatccaaataaagagaaagtcacatttagtggattttgcattcgatacagaatagaaaaatctgcaataacggcagagtatcttaactttctcttccgtacaccttcaatgaaacagcaaatgttgagcgggggccagggagctaatattcagaatattagccaaggtaccttatctgcactcaggatacctgtacctccattggataaacaacttgcttttgccaaattggttgatttccgtgcatctattttgaaaaaacaatatgataaaatgtctgaatctgaaaaactcttcgatgctttgactggcgattttttcatatttaatgagtga

SEQ ID NO: 448780 - DNA, 1527 bp, Serratia marcescens
  misc_feature (5)..(14): n is a, c, g, or t
atgcnnnnnnnnnnatttaatacagatacattttcattatcatctacatctaatttagatagaaagaaatcttatttgttatatcatcttggtcaatatgagcaggcttacaatctgattgagagaagtgtttactcatgtctaaaaaataaagactatactggcctttttatctctcttttgaacaaagtgcttatactcaatagattaaaatataattttaattctgatcgagaacactacaatcacatagaagaaccaaaaataaaagagctttatgagtcattgcctagggtaattaaaaataaaaactcagccatatatgacttagtaactttcaactacctaagtagaatgagttatgaagcaagtaagctgttgacaaaatatcaggatgcaaataaaactaagacaattttccttatggacaatgaaaagttcaagggttcatttgtactaaaaaacctgataaattttagcagcattaatggttgtctgatagatgcttatttagactttaaacatcttgttagaaaattgcttgaggttaaaatagctaatgattcaaaaaatggttttattgaattaagtaaggtagaaatttacgcatgcattagatatcttgatattaagacgctaaggataatattcaaaagggaagataagagttggtttatgttcaagacagacgaaatctcactcaattggctggtttgttcatctttaacaaacataaagaatatgtatgtgtcgagcaaaataaaacccaatatttttgaaggcgagatgcttaatgttttcttcatgatttctcatttttcattatcagataagcaagaggtaaaagttttagagcagcttgatatcatattgaaatcatctctacacaacatatcattctatgactctctaatagagtacttaaccattcggtttaataattcaaaagcctccttacctccaaatcaagttaaatcaatattggatggtattatagataaaataacaatgtcttctggttaccatgaaaagttagccattactcagtttggaaatcagaatatatacagtattttaaatgctattggcatcgtatacgatgatgattcaagaattgacgctatcctttcagctttaaatgattaccctattagtgaaagaataaaatcagctaaaacaataatgtatggtttatttagaataactcagggaaaaaacaataaaaaaattaaaaaggcaatgttagatgtaattggaagcgctgattccaaaaatgttatgcttagctatgaattgtttttggtggctattgatattttgcgcgcaagacaagagttaccctccgatattgagtttttgattgaatcaatcgataagaaaattacttattctactgaagtgttagggttacaagaactactcaatcatattgtgaaaaaaagaggtttaaaggatttctctaaagcgctaaggaagataaaaaaaataacgtcacgctttaatcacttatcttccgccaatccctga

SEQ ID NO: 448781 - DNA, 1170 bp, Serratia marcescens
  misc_feature (1155)..(1164): n is a, c, g, or t
atggataatattaaagctcatatcaatcagataattaaggctaatgaagatgaatcattggcaatatttgtgggtgcaggtgtttcaaaatcttctgagagcggaagtattaagatgccagcttggtcagatcttatttcctgcttgctcaaagatttaaatatcaaaagcgagagtgattatttaaaaattgcacaactatactatttaacttttaaagaatataattactacaaaaagataaaacaattctttcctgacaatgttccctatacaaagatacatgagacaatttttgaaattaacccgcatgtaattataacaacgaactgggatgatatacttgagtcggccgtttacgataagagctatttttatagtgtggttgcaagcgataaagatttgatgaaatcctctctcgataaaaaagtcgtaaaaatgcacggtgattttaaaaaccataatattgtcttcaaggaagatgactatataaattacagtatgaattttccattaatcgagaactacatcaaaagtataatatcaacacacaccgtactgtttattggttactcgtataatgatattgatttgaagcaggtaattaagtgggctcagaatcattcggacgtcaggccccccatgtttttagttacattcgacgaaacaccatccgaaataaaatacttagaaaatcatggaataacaacattagtgatcactgatgagtactacaaaaaatttgataattcttattctaataggctctatacctttttattaaacattaaaaaaccagagcttttaaaaataaatgatgatgcggatttaatagaaggtattaatgataaattaagaaatttagatacaatagattccatactttctgatcagatagtcgacacgctgacaaactgtcatctgatttatttatttcatgatgatgaagagagagctttcctagaattctatacggatgaggtcacgtctggggataacaataatgaattgcgaacgtattacgaagagttcgttaatatcttaagaagtgaagcaagaatagagtgcaaccgccaagcacttgaggaaatgtttaaaattttatacaaagcggatatttatggtgtaatattaagtaaggataaaggtgatgcnnnnnnnnnnatttaa

SEQ ID NO: 448782 - DNA, 543 bp, Serratia marcescens
atgaaactgaataaaatcatgctggctgcagtaatggcgtttggtgtttcttctctggcgcacgctgccgatcaaggcaacggtaaagtgaccttcagcggctcaattaccgaagcaccttgttcgatcgcccctgattctctggatcagaccgttgaactgggcgccatctccaacgtggcgctgaaaaacggcggtaaatccaccccgcgcaacttccagatcaagctggaaaactgtgagctgatcacttctggtattaattccaacaacaccgtgaagctgaccttctccggcgcgacttctgctgcgggggcggatctgctggggattaccggtacagccaagggagccggtatcgctctgactgatggtgcgggtaatgacatcaagctgggtacgccgactaatgcacagacattgcagaatggcgctaacaccctgagctttgcggcttacttgcagggtgacaaggcgtctaacgccacgatcgtcccgggtgagttcaagtccgtagccgactttaccctggcctaccagtaa

SEQ ID NO: 448783 - DNA, 543 bp, Serratia marcescens
atggaatgtcggattaaaagagtaaaggcattttgcctattgccgtggctgatgggttttgcggttccggctatttcagccacgcaagggcagggccgcgtcaatatgcaaggcgccattaccgatgccgcctgcgcgattgctaccgaaagtcgcgaacaagtcatcgatgcgaaaataatgccgatagcggatattgagcgggaaggaaaaggaaaacgcgtgcctttccgtattgagttaattaactgcgtattggaacgccaaaatactgcattgccggactggcagcactttcgggtgaccttcgacggtaatgcagatggtgagatgtttggcatagccggcgacgccgacggtatttcgctggtgattagcgatgaggcggggaatatcgcccgccccggcgttccactgccggcgatcgctattcagccgggtagtatgacgctgaattaccacattacgctaaccgctaatcagcggccgttaaaggccggcagttatttttcatcggtgagattcaaaatggattattactga

SEQ ID NO: 448784 - DNA, 2556 bp, Serratia marcescens
atgatgctttttccggccaggaagccatttcgtttacctgttctgagcctccatgtggcgctggcgctaggcatcttgccattcagcgtagccgcagtggaggagatccagttcaacaccgacgtgctggacgtgaatgaccgtaaaaacatcgatctcagccagttctcgcgcggcagttacatcatgccgggtcgttatggcatggcggtgcacgtcaataaaagtaccctgccggagcagcaggtgccgttttatgccccggacgacgatccgaacggcagccgcgcctgcctgaaccgggagctggtggcacagctgggcctgaaagacgcgatgcaaaaggtgctcacctggtggcaccaggacgagtgtctggacgaaagcagcctgaagggcatggaggtgcgcggcgatctggccacctcggcgctgtacctcagtatcccgcaggcttatctggactacgtctcggaggactgggatccgccggcgcgctgggacgaaggtattccgggggtcttactggactataacctcaacgcgcaaacccagcatcaggtacggtcagggacgcgcagctatggcctgagtggtaacggcacggcgggtgccaacctgggggcctggcggctacgcgccgactggcaggcaaacgtgcaccaccagaccggttccgggcagccaacggatcaacgcctggactggagtcgctactacgcctaccgggcgctgccggcgctgcgttcgaaactgaccgtcggcgaagattatctcgactccggcctgttcgacagcttccgcttcggcgggatgagtctgcgctccgacgacaatatgttgccgcccaacctgcgtggctatgcgccggaggtggtgggggtggccaagagcaacgccaaggtcaccatcagccagcaggggcgagtgttgtacgagaccacggtagcggccgggccgttccgcattcaggatatcaacgacgcggtgtcaggcgagctggacgtacgggtggaagagcaggacggcagcgtgcagacgttcaagatgaacaccgcgagcatcccgtacctgacgcggcccggttcggtgcgttacaagctggcggcgggccagccgtcggacttcgaccaccgctatcgtgggccgctgttcggcaccggcgagttttcctggggggtgagcaacggttggtcgctgtacggcggcgcattgctgggcggcgactataacgcgctggcgctgggcatcggccgcgatctgatgctgttaggggcgctgtcgttcgacgtgactcagtcgcgcgccaaattgtcgcaaagtggtgaagagcaaagcgaagaaacgctgagcggcggttcgtaccgtctcagctactcgaagaccttcgacgagctggacagccaggtgacctttgccggttaccgtttctcggagcagaactttatgagcatgagcgagtttctggaagccagtcagtacggccagcggttcggcaacagcaaggagatgtacaccgtcacctacaaccagcggctgcgtgacctggggttgagcgcttacctcaactacagccaccagacctactgggatcggccggccaacgatcgttacaacctgacgttgtcgcgctatttcgatatcggccgcttcaggagcctgagcctgtcgctgtcggcctaccgtaatcgttacaacgagcgcaatgacgacggcatgtacctgtcgctgtcggtgccgtggggcaacggcgccacggtcagctacaacactacgcttgaccgtaacgacaacacccatcgggtgagttactacgacaggattgacgagcgcagcaattatcagctcagcgccggtagttcgcgcagcggcgccggtttgagcggctactacagccgcgatggcgatctggcgagcatcaatgccaacgccagctaccagcaggaccggtacagcgcggtcggcctgagcgcccagggtgggatgacgctgaccgccgagggcggcgcgctgcaccgctctaacatggcgggcggcacccggctgctgctggataccgaaggggtggccggggtgcctgtgcgcggctacggcagaacagcggcgaccaaccgctggggcaaggcggtggtgacggacgtcaacagctactaccgcaacaaggccagcatcgatctggacaagctgggcgacagtgccgaagcgaccaaatcggtggtgcaggcgacgctgacggaaggcgctatcggctatcgcaagtttgaggtgatcgccggggagaaagcgatggcggtgatcaagctggcggatggcagcgagccgccgttcggcgccacggtgctgaacgcccgtaagcaggagacaggcatcgtcaacgacggtggcagcgtctacctgagcggcatcaacgccggtgagcgcatgacggtgcgctggaacggcgcggtgcagtgcgaagtgcaaatgccgacgccgctgccggcggagatgctgatgaataccttactgctgccgtgccgggccctgagcgtgggcgacggcggcaacgaacattga

SEQ ID NO: 448785 - DNA, 657 bp, Serratia marcescens
atggcgaatatccatgcgaaaccgggcgaatggcggccgatgcggagcgaattgcgttatcacgcggtccttggggggctggtattgatggtgccgattagcctggcactcctgctttggctgttgccagacgcacaggcggttgacaactggaatgttgagggggcccacggcgagctgcacatcagcggggcgctaaccgagagtgcctgccggctggagatggacagtgtgcggcaggatatccgactgggcgaggtggctaccgggcggctggaacaggttggtgcgcgcggtgagccgacaggatttcagctgcggttgcgcgactgcctacgtgctccggctgtgagtcgggacgagcgcaccggcgcacgttactgggcgcatgaccagcctgcggtgcgggtggcgtttaacgctccggccgatgcagatagcccggagttggtggaggttcagggcgtctccggtctggggctgcggttgctggatgctcaggggcgggatgtgcgcctgggggggcgcggagcaccgttgtggctgacgcctggcagcaacgtgctgagctaccgagttgcgccggaacgcaccgcagcaccgctgaacgccggcgcctatcgggccgtagtggattttagcctgaactatgactaa

SEQ ID NO: 448786 - DNA, 849 bp, Serratia marcescens
atgagtggaaagctgttgcagtggatagtggcgttgatcttgtcgatgccgaattgggtgttagccgacattgacgtttctgttatctggaaaaaggtgaggggtggttattattctgcctcgatggcgccacgaggcgcggtggtaagtcctttttgggattgggcagatccgcgggcgaaatgccttgccgatacggggtgtgaaagtgtttggcaactaatagtcaacaacaattacttcacatgtcccgcaaaggtcttcgccatgaaacaaacgccgatcgaagagcacatagagagggtcaacagaatcatgatggtcgcctgtggattctttgatgagtataggttcaaaggggacgaaaatatttgtctgcgattagtgaccagtggtgggtgggccagcagcaacggctctatcggccccttcgaattctaccgtgccggaagtggttgccctatgactgacgcttcttctcagttaggcggcccgattgatccgccggtagcacttgcatcttgcgcgttcaatggcgacatatccatcaatcacggagaggtgaataggtggcaactcgatggtcatgcggccagcacgacagtgagcctgtcttgcagtcgggaggtttcggcgacggtgagtatcagcaatggcggtgttattgaattaatggattctggcgccctgaaatcgacaatccacgtctccggcgttgtgggaaagaatacataccgaaatttcacctatgtgaatattccatttaaatcggttctttccgttgtgggtagtgattttaatgccggtgtcttcgggaaatcggcggtggtaactgtcagtatcatctag

SEQ ID NO: 448787 - DNA, 477 bp, Serratia marcescens
atggcggtattgttgtgcagttcggtgctatgcatgccccatgtacgggcggcggagggggatatgcactttcgcggcgggttgcgtgcgccgccaccctgcactgtcaacaacggagccgaagtggcggttgattttggcttgcgagttgggattaacaaagtggatggcgataactatcgccaggcggtgaattatcgtgtccagtgtgacgagccgggggcgctaccgtgggaggtggtattaacgttaaagggtagcgccaccgggttcgacaaggcggccgtgcaaaccaacaagacttaccttggcgttcgagtttaccagaacggtattccgttcaccctgaacagtagcatcaaaatcgatccctccaatccgccgcaactggaggcggtacccgtcgccaaaccgggggaggggttgacagagggcgcgtttgccgccaccgcgacgctggaggtcgagtaccaatga

SEQ ID NO: 448788 - DNA, 528 bp, Serratia marcescens
atgatgaaacagaacagagtgatacgtattgccgcgatgcttttactggtgctgccaacgctgtcgaacgctgccgataacctgaagttcagtggcgcactggtggctgagccctgtgtgatccccccgggccaggagatgatcacactcgattttggtagcgtggtggacaaatatctctatctcaaccagcgtacgccgggggctgcgtttgcgttgaccctggccgattgcgacctcagcctgggtaaaggggtgcgcatcaccttgcgtggtaccgaaagcaggtccttaccgggattattggcaccggtgagccaggcgggcggcgtagctatcggcctggaaacccccgaggggcaagcgatatccattaaccgtccgggggagaaattcagtctggagggtggaagcaatgttatccgttttcaggcgtacgtgcggggtgaaccggaggccatcgccaacaaaaccatcggccgcggcgcatttagcgcggtggcgaccttcagtctcgaatatgagtga

SEQ ID NO: 448789 - DNA, 861 bp, Serratia marcescens
atgattggcctgagagggaatatgaatatagtgaaacgtggaataacgtgcctcctgttttttttgggtatttactcggctaacgcatccgccggatatgaagtgtacggtgaggttgaacaaatacaggtaggcaagccggagtacaaggctatgttttatattggtaacgttgactgggatgatgctcgtccgcttagttgtgttattagctggatatcgccaagatgtctgattatcttgagtgtggagttgaatcgaggcagtaggagctatttatatctttgggatacgagtgtcgataaagatatactgcttgacgcaggcgtaaggaccgtgggggaatattttacctatcttcgagaccacaagggggtgaatatttctggtgaatatgagttgcgtgggtcatatcaatatatatctgaggcaatggaggctggtttgtgcattattgaggagtcgtttcagactatgattcctttagcatgctcatatagaggtgtggtaactcagccgggatgcgatgttcgagagggggaaatatcgatagagcacggtgccgtgggtgcggatagcgttaatggtcgggaggcaagtacggagctgacggtcatctgcgaaggtaacggctcggtaaagctgattgcgccgagtccggaaccgaaattgcgtctggcgccggacggcagtctgtattcgaagctttatgtgggcgataagcttttgaatgatggcgtgattgtaaaggccgggccaaacggcacccgagtgaaactgacctcgcggttggggacggttgggacgccgatgacgggtcgattttctggcagcgtagtggtggtgctggcaaaaccctaa

SEQ ID NO: 448790 - DNA, 570 bp, Serratia marcescens
atgtccctgcaacttattattcactttccagaaattagccaaagtaaaacattgggggaattggggcgtaattttattgccagaggttttctcagtaaggaatatagaacactcgactacgctaatactccgaaatgcttttctttcggatatctggcgggcagcggcagcttgggatatgtcccccttgccggcgggctgcgttgtgccccacccgtggtgacgccgacggtgtgcgatatccgcgagccgcagctggagctgcgccacggcgcgctgcgggctgacgcggtgaacgggcatagcgccagcacgccgctgaccgtggcctgtagtattgatttaaaggtgcggatcatgtcctccgatcgcgacggtgccatttactttaacgccggcaagcagttccgcagcgatctgaccattaacggcgtgagcctgggggaaggcgcgctggttacggcaaacacagcgggggtcggcctcacactgacctcgaccctgaatggctacgacggcagtatcggtactttccagggagcgaaaaccgttattgtctcgttgccttga

SEQ ID NO: 448791 - DNA, 543 bp, Serratia marcescens
atggaatcagttaatatccttatcgacgatgagaatcgttatttcgccgctggcttgcaacacggcattatggaatacgcgcaggttaaccataagacagtgcggtttctgacgccggagaacgctggctgcgccgacgtggtgtttgcctcgccggggcgccgcgcgcagcgctggcgccgggccggccagccggtggcacaggtggtgacgattaaagccgccaggtcggccgtcgctaatgatacctcgggcgtactgtatcgctcagacaggcaaggcgagttgtgcaggctgctgacccgaatttttgccggcgaagccatttgcatacttgagccaaccttgccgttgaccccgcgcgagcggcaggtgatcggttatctgcgccgcggcttgggtcagtcgcaaacggccagaatgatgggggtgagtgtgaaaacggtgcatagccataaacgctcgatcatggggaaactgctgttgaaacggcaacatgattttatttattggttattgtcacaaaaggaagaatattcttaa

SEQ ID NO: 448792 - DNA, 300 bp, Serratia marcescens
gtgaaaattatcacgtttccattgtttggcatcggaatggcgctggccgtttgcgcccatgccggtttcaacggccagcaaaacattcagggcaatcacgggcacggcaacggtgcggggagcagtcaggcgggcctgtgtgccaacggcgcaggccagaacggcggtcagtgtatggggccgggcaacggttcgccagcgccgcagcgccctgccgcggaaaaagataagaacgctgcgattaaggcgctgtgcaactcggcgtttatgcagcagtacgcggcggtatgccgccaatag

SEQ ID NO: 448793 - DNA, 1089 bp, Serratia marcescens
atgttaatcaaggcaaccccttacaagtggcctcactgggacacagacgcagggctgttgacaaccaaaggcggagcgttggaagtctttatgggggggtatgttaagagttggcttgttgccacagggttagtagagaaaaacagctgcgctaatgataccctcttcgtttacacgaacactatgcccagaaccattgcgaccgggcaattctttatggacggcgcttttcctggttgtcgagtagaaatacagactcaagccgataataaaaacccagacccgttattctatcagtctataaaaaaaccatcagagagctttgtcacagagaataagaaaagcatcctgaatttcattaaaggaaaagatcttgacgcctctttcaataaacttgaggaagtcgtaaattataaacaatcgtttgattgccgcgaaaaaaaatcctgtaacctatcgagggaggataacatcattaaccttgacccttctaaggagccctcaattgatgggccgttgcacaaagggttcctgatggttgatgcgtttatcctgcagaattatgaaggcttccccgctaaagatgtggcctggggccatatcaaaaatgacgcagaatggaaattactctcaaggttaagaaatacatatatagaggctgcatatctacagccaaacattgctaaaaacttaactccccctttgattcaaaaagttggcgaacttctccctgagagaatgggtgaaaatgataaaaagatttacactcttgtaggccatgataccaccgtaggacccctgttggtggctatgggggttaaccgctatgagttgcccggtcaatttgagcatacaccgatcggtgggaaagtcgtgtttcagcgctggactgacaaaaaaatcggcaaggattatttaaaaacagaatatatttatcagacaacggaacaaatgagagaactgatgccactctccatggcaacgccgccaatgcgcgtgacattatctttcaaagattgccctgtcgatagtcatggttactgcgaatggaagaatctccgtaaagttctaagttcggtacaggattaa

SEQ ID NO: 448794 - DNA, 273 bp, Serratia marcescens
gtgtgggggcaggggatggatatactggatagggggactattagctatcatattgtaactggggagtgtgaagacgctattcgcaaatacattacatcgggtaataatacagatggggtagataatattattgagtcagcaaaagctcaagctgtgctgatgctctggtataacctgacgcggaaaggaaacatcgctcaggaggtcgtagaagcagacctgcagcggctgtatgagttaacgttaggcagcgagagtggggaaacgttatga

SEQ ID NO: 448795 - DNA, 846 bp, Serratia marcescens
atgagcaaaattaaaattctcatcaataaatcattttattacaatccacagaatcacatatttataccgttagaagatgaaaacgagttcatcactctggctacgccggcaagcctgtgtttaaaactcctcatcgacaaccaaggaaaaataatctctcctgaaacgctgatttcagctgtctgggttagcagaggcatgaacgtctcaacgaatacactttatcagaatatttctattctgcgaaagtcgattgataaagtcgggggggattctcatatcatcaagaccatatctaagcggggttttctcattgacaacaatgttgaaataaacataatcgaagagatcccggaggaaaagcatacgagcgatctcattataagctcggaaattgcggacgccaccgaaaacgctgccgtgtccgcgggcatacccaaggaaagtcatacgctaacagccccggcgaatgaaaaatccggcaggcacctttacgcattgttcaagaaatggtgggtatggacgacggtccctctgcttctcgttgccggcatcacaaccctattcttcatgcaaaatgctaaaagcgggctggaatcctaccaggcatttggaaccacaggcgactgtaagctttttaaaaaccgacagttcaccaatgaagaagagtttatgtctttcattaaggagcgaaaaatatcttgtgcggaaaaaacgtggtggtacgtcacaaactatccgccatcaacctccatgtcgataataatgtgtcaatatcctttgaatgagtcgatatcagagaacaattgtgcgtcatattatcagcccgatagcaagagaagataa

SEQ ID NO: 448796 - DNA, 459 bp, Serratia marcescens
atgaaaaagatcttttttaccttagctctgctggcaatggtgttgtctacgtatttctatatcaaccgtccggaaaacatcatttgtgattccgacctgcacttgtatagcgatcgtggccatatggacgtattgttcaaactacaggtaattaatggaaactatggatttatcacgatgaaagggatctatatagacaatgatggcgtcaatgtccccttcagaataaaaaaagaattttccgtgcaaaaaaaagatgatctatacgtcctttccagcaacaaaaagaatctgacagacaatgacatagctgaaaagccgtgggcgagatcgttctttccgacgtttttctactccaataatgacgcagagaaatacattataagattggataaactgaataaaaatgcttggtttttctcagtctcaaacacacctattttattatgtgagagataa

SEQ ID NO: 448797 - DNA, 909 bp, Serratia marcescens
gtggcttctgtatgcctaatggcatactcatccggcgctaatgcttttatttgcaaagacccaacaggaaagcagttttcatctctctctggcggggggactttaactgtttcggcaaatttgacaccacgtctagaatcagggcaaaacttagttgtagacttatctgccagtttaaggtgtcgaaacactgatccgagaaactataatgattggattagtataacctctggatcttcttttggtggggtattaagtaacttcaatggaactatggattattatggttcgtcttacacatttcctacgcttggtaatactaaagaagtggtgattaatagttctgccttcgtgggcttgaatattagattgctattaaaacctattggtgctgcgtcaggagttgttataaataaaggggaaccaattgcaattctcaatctttataaatattcgacaaatcctaatactggggcaataaacggggtcagagataattataaatggaatatatatgcaaataatacagtgtttataccgacggggggctgtgaagtttcatcgcgcaatgtgacagttaccttgccggattaccccggcacggctgcagtaccgctgactgtccattgcggacaaaaccaacagctggcatattacctgaccggcacaactgctgatacggcaagcaccatatttaccaatacgtcatcttcaaacccggctactggcgttggcgtacaactgtctaaccgtaatggcattgtagctaccaataagaatgtctctctcggtacggtcggtaccagtcctgtcagcttgggactgacggcttcctatgcacgaaccacggggcaggttgtggcaggcaatgtacagtctatcatcggagtgacgttcgtttacgagtag

SEQ ID NO: 448798 - DNA, 333 bp, Serratia marcescens
  misc_feature (309)..(318): n is a, c, g, or t
atgtcctctgataacgttgccataagcattcaggacataaaaaaatgtttttatgtctacaataaccctcatgacagactgaaacagttcattttgccaagaataaatcatatgttcgggcgtgaacagagtagctactacaaagaattttgggcattgaaaggtgtcacctttgaggttaacaaaggggaaaccgttggtttgattggtaaaaatggcagcggaaagtcgacattactacaaatcatttgcggtaccttgacgccgactagcggtgcaataagtacgaaagggcgtattgccgctctnnnnnnnnnncggttctggctttaa

SEQ ID NO: 448799 - DNA, 498 bp, Serratia marcescens
  misc_feature (424)..(433): n is a, c, g, or t
atgacatttaaaaaaaccatgatggccgcagtcattacttctgccgtgttttcattttccgctcaggcagcagatgaagggcatgggagtgtaacgtttaagggggcaattattgatgcatcttgctccatcgctcctgagtctgtagatcagaccgttgaactggggcagattgcgaatgttgcgttaagagacggagggaagtcgacgcctaagtttttcgatatcaaactggaaaactgtgagtttggcccggcagatcctaataaggtgtctgtcacctttactggctctgcggctcctggtcctcatggtctgttaggcattactggatcggctcagggagcaggcgttgcgttgaccgatactaatggtgcaaaaatcaccctgggtcaagcaaccaacgctcaggcattgcaagacnnnnnnnnnnacgctgagattctctgcttatctgcaaggttctcaggcttcaggcgtgcaggttgttcctggtga

SEQ ID NO: 448800 - DNA, 591 bp, Serratia marcescens
atgcggaactccgcatgcatttttctgggtgtgcaaacaaggaaattaaagtcgatgtggagtgcgaaatatttcccatcagcattttcttttatcctcttcatatcgtcgatatcttttcaggctgaaggtgtgccacaggagtgggggaccgtaaacatgcgcgggacggttgtggatgctgcctgttcgattgcattagaaaatagagaacaaaccatcgatatggggatcgttccggtatcagatattgttcgtgaaggccagggcctgcagaaaaccttttctataagattggttaattgcattctcgaacactctgataatcatcgacgccagtttctgatgactttcgatggggatagagatggcgttttttttcgcctgcgtggcgaggcatccggcgtggcgttgcaaattgctgatgaaaccggacgtatagcccttcctgggaacccattactgcataacaatattaatagcaataataatgcacagcttaaataccacatcaggctggttgctaataaccaaacgttgaaggccggtaatcattcatctgcaatccgttttaagttggattatttctga

SEQ ID NO: 448801 - DNA, 657 bp, Serratia marcescens
atggcaaaggtgatgggtaagcattcgcaagaagggcattggatagacgagctgaagtattacggcacgctgggtgggctggcgctgatggcgccgctgacgctgggggccatgctgtggctgttgccctcggcacaggcggtggacaactgggaggtggaaggggctaacggtgtgctgtatgtgcatggcgcgctgaccgagagcgcctgtcggctggagatgagcagcgcatggcaagatgtggcgctgggcgaggtcggcaccggtcgcctgcaaacggtgggtgcccgtggcgagccgatacgttttgagctgcggctggaagattgcctgcgcagcccggcgggcagcctcgatgtgcgcaccggtggactgagctgggcggacaatcagcctgcggtgacggtgagcttccgcgcgacgcgcgacgcggataaccctcaactggtgaaggcgcagggcgtggccgggctggggctgcgcgtagctgacgagcgcgggcgcgatgtacggcttggcagccgtggcgcaccgctgctgctaacgccggggcaaaataccctgagctataccgtgaccccagaaaggacgccggccagcttgatggcaggcagttaccgggcggtggtggattttcatctgagttatgactga

SEQ ID NO: 448802 - DNA, 495 bp, Serratia marcescens
atgaacgcgttcggaacccgatcaatgacccgattatttatgttagcgcctttactgctgacttctgtcgtgacgcaggcagagacagttagcatcaccgtcaaggtcactgttgaggcggcaccttgcgttatcaacaaccaccagcccattacggtggaattcggcgatgtgctgaccaccaatgtgaacggcagcaactatcggatgccagtgaattacaccttaacctgtgattcaccgatgtccaataacatgcagttgcagatacagggagtgggagctggctttgatagcgccttactccagactgacaggaacaacctgggaattgagttgcacagtgtgggtggaaagcttgtcatcaatacaccgttgaattttacctatcctgccaagcccgagctgtgggcggtgccggtgaagcagccaggcagtaccctgactgcgggcgagttcaatgctgccgccaccatgaaaatcgattatcggtaa

SEQ ID NO: 448803 - DNA, 492 bp, Serratia marcescens
atgaaaaccagagtaatactcagcgctttgctgctgacagtggcaggcagcatcacgacagtctgggccgaaggcgaaatgacctttcacggcacactaatcgagccgccaccgtgtgtcatcaatgatggccagcaggttgaagtgaattttggtgaccgcataggggttaacaaggttgacgggagcaattaccgcaaagcggtgagctatcaaatcacctgcgaaagcggtgaaacgagcggggctgccctgaaactatccctggcgggcacggcatcgggatttgatacagaggcgttgcagaccaacatgaatgacctgggaatacgcatataccgcaatgacgtgtcgtttaccccgaacagcgaactggacatagatatcaccaaccctccgcgcctggaagcggtgccggtaaagcggccggggtcgacgttgaaggaaggagcgtttgaggcactagccaccttgagggcggaataccaatga

SEQ ID NO: 448804 - DNA, 555 bp, Serratia marcescens
atgaggcgcatgaaacgcccactcaacaaagtactgacgactgctctgtttcctgcctgcctgttgatgctgagcgcaaccgcgcaggctgcgaatgacaacctacggctgtttggggcgctggtcgccgagccatgtgtcattccgccaggcgaagaggaaatcgcgctggattttgggacgattgtcgataagtacctgtatgccaacacccgcaccttgggtcagtcgttcgagatacacctgaccgaatgtgacccctcgctgggcaatacggtcagcgtgacgttccagggcacagaaagtctggagctgccggggctattggcactgaacggtgccagtcaggcggatggcgtggcgattggactggagacgcaaggcgcagatccgctgccaattaaccgcccgagccagcgctatccgctggagacgggcagtaatgtgatagcgctgaaggcgtatgtgaagggcgaaccgacggcgctggcgaaccggacgataacgctgggtgagctcagtgccattgcgacgttcagcttggcttatgagtga

SEQ ID NO: 448805 - DNA, 834 bp, Serratia marcescens
atgaaaagagtaatctcgctttcctttttactgctctcatcaccttgccttgcttatatgactatcacttctacagagactaagtccgctattagcggtaccggtagcaatcaacgcacccacgtacatgtgaaaatcaattacacacgcagctcaacacccggcgataacgaaggtcctcctaacggctcttacagatcttatggtgcctacatataccctggctataatatgccatatacttgcacgttcgacaaaacattgaccctatttcctggcgtgcccttcgccagctgtataaattttagccctacccgttgggagcttcttgaattagattggattcgctccaataataatgggggctcagttgttttatcatatagctaccctgtgaactcctccccgaccaacgacgcctgcgtagcctttatggccaccgaatcgccttccagctctaatttcatcacatccaatggggcatttcattgccgccctatacagcccctgcccgaaccaaaatgttatattgaccctataagtgatatcgaatttcgtgtccctacaggccgctttaacgaacagaaaacggtttcttcaaacatacactgtgattacgcaagtaccatcactctaggttccaccacgggttctgacctcctcgacttctcttggggctccgccacggtaaacataaacggtcgtacactccctatttctatgaatgcccaggctggtgctactccaataaccgtatccgctaggataaatggttcatcatctaccccctccgttgaagaaaaaaccatgatcttaatacttggctaccaataa

SEQ ID NO: 448806 - DNA, 504 bp, Serratia marcescens
atgatcattatcaagaacattatgctggcgggggcgttgctttttactacaacattcgccgcgcatgcagctgacgtgaccattacggtcaacggacgcgtagtggccaagccctgcaccgtatcaacgccatcggcgacggtagacttgggcgacttgtttacatttaattatatacaggccggctcgggttcagcctggcatccggtaacgctggatttgaccaattgtccaataggcacttcgagagtcacggcaacattcacggggataacggacagcacgggatattacaaaaatcaaggtggggcaaccaatcttcaattggaactgcaggacaccagtggcaataacctaaacaacggaaaaaccaaggcggttcaggttgatgattccacacagtcagcgagtctgccattacaggttcgtgcgttatcagttaatggcaatgccaagcaaggcagtattcaggccgtaattaatgtcacgtacacttacgcctaa

SEQ ID NO: 448807 - DNA, 525 bp, Serratia marcescens
atgagaaaataccttccaatcctgtgtttgttgccgttggttgcgggatatgcccatgcggcggacagtactatcaccatcacaggttatctaaaagacaatgcctgctcggtctctgttgactctcaggattttacggtggatttgttgagcaatgcggccaagcaattcaaccgggttggggccgtcacgccatccatacctttcaagattgtcttcgacaagtgcggcagttccgcgacggcagttcgcgtggggtatgtcggaacctctgacaacgacaacactaccctgttaaagattgatgctggaacaaacgccgcaagcggtattggagtgcaaatactggatcgcgacaagactccgattccattaaatgcggctcaggactccctgaagtggacgacattgacggcgggccagcccaatacgttgggcttttatgcacgcttaatggcaacgcgcgctcccgtgatggcaggaacagtgacagcgacggccaatttcaccttagagtttcagtaa

SEQ ID NO: 448808 - DNA, 2592 bp, Serratia marcescens
atgaaaaaataccacatccgggaacgggcgctaaacaaagcaatgcttacgccgctggcattactcttggtggcgtcgacattttccgcgcgcgcagacaactacttcaatccccggttcctggctgacgacccggcatcggttgccgatctctccagtttcgaaaaggggcttgatgcgccgccgggtacctatcgtgtcgacatttacatgaacgagggttacgtgacgacgcgagacatcacctttgataaaagtgatgacggtagcaagctggaaccgtgtctcactcgctctcagctggcttcacttggcgtcaataccttgactattccagatattgccgtaatgaagagcacggcctgcgtgcctttcacacggcttattgctgatgctgcaagctcattcgatgtcggtcgccagcgtctttccatcagcattcctcaggctttcatgggaaatcaggcgagagggtacatagctcccgagctttgggataatggtattacggccggtttgctcaattacaactataccggcagtgaagtgcgcagtcacaatggcggcacccgcaattacgcctatctcaatctgcaaacgggtctcaacctgggggcatggcgcctgcgggataactcaacctggagttacagcagcggcacgggatataacgaaaatcgctggcaacatgtcaatacctggcttgaacgtgacattgtatcctggcgcagccggctgacaatgggtgatggctatactgcgggtgatatctttgaaggtatcaacttccgcggccttcaggttgccacagacgataatatgctgcccgacagtcaacgcggctttgctcctgttatacatggaatagcacgtggtaccgcccgcgtatcggtcaagcagaacggatatgaaatatatcagaccacggtacccgccggcgcattcactatcggtgatctgtatgcggcaggaaacagtggcgatctgcaggtgacggtgaaagaggcggatggctccgttcaggtctttaccgttcccttctcatccgtcccgatgttgcagcgtgaaggacaggtgaagtacgcggtgactgcagggcagttccgcagtggtaatgaacaacaagacaagccgaagtttttccagggaacggcgctttggggattacccgatggctggacggtctatggcggcacacgtgcctcaaacgactatcgtgcctttaacctcggggtgggaaaaaacctgggctacctcggggcggtatcttcagatattacgcaggcgaatgccaccttgcctgacggcagcaagcatcagggacaatctctgcgttttctctataacaaatcgctcaatgagttagggaccaatttccaactggtcggataccgttattctactcggggcttctattctctggccgacaccgcgtggcgacgcatgagcggttactccgtgattagtgaagacgggatcgtgaatatcaaaccaaagctgacggattattacaatctgaactacagcaagcgcggtcgtttgcaggcgacggtgacgcaacaggttggacggacatcgacgatatacctgactggcagtcatcaaagctactggaataccagccgttcagatgaacagctgcagattggttataacagcaccattcaggatatcagctggagcctgagttatagtctgtccaaaaatgcctggtccgacgataaagaccaactgcttgctttcaacattaatattccgttcagccactggatgcgctcggatacccggtcagtattccgaaatgccaatgccagttacaacacgtcgacagacttcaagggacgtacgacaaatacggccggcctttacgggacgctgctggaagataacaacctgagttatagcgtgcaatcgggctataacagcggcggtaatggtaacagcggcgcaacgggtaacgccgcgctgaattaccgcggcgcttacggcaacgccaacgttggttatagccacagcggtgactataagcagatttactatggtgccagtggtggcgtacttgcccacgaaaatggcatcaccttcagccagccactcaatgacaccatggtgcttatcaaggcgccgggggcgaaacacgtttctgtcgagaatcaaacaggggtgcgtacagattggcgtggttatgccgtgctcccttatgcgatggactaccgcgagaatcggatatccttgaacacgaatacactggcgaacaacgtcgaactggaggaaccggtattaagcgtcgttcctacacggggagccgtcgtgcgtgcggacttcaaggccaaagtcgggctgaaggttctcatgacattgacaaacaacggcaagccagtcccgttcggctctgtagcctcttacggagatggtcagtcaggcagcatcgtggcagatggcgggcaagtttaccttaccggccttgcgccaaaaggtaccgtcaacgtgaagtggggcaatagcgaaaatgagcgctgtacggcgacgtacagtttgccgactgacagtcaaaaccaggctttgagctatgcctctgccatttgccggtga

SEQ ID NO: 448809 - DNA, 789 bp, Serratia marcescens
atgaaattcattataaataataatattaaatatcatgaggataggtctgagttggaatcattgaaagattcgctccctcccattgtgctgacggcgacgctcaatcgcctgctttccgcattaatcaaaaacaataatctggtactttcgcgcgacacgctattgacgcaggtgtgggaggcgcatggccaggttgcctccggcaacaacctcaacaacgctatttccatgctgcgtaaggcgttctcttcgctcggcgaggaggagattatcgttaccctgccgcgtcagggctttatgttcaccgccgccgaactgaatacggcggacagccaaagtgaaccgatgccaacgggtgaggcggtggcggtagccgatttttccgagacgccgccggggttgggtggttcccgtatccggcgcttcgctttagcgaccctgttgattctggcggccgccagcggcgtttgggcatggcaggatgccggttatatgccgctcagcacggtagctgtaggccatattggcagctgcgaagtgcggtttgtgacctcttttcataagccagctcccgggcacgtcgatttgactcacctgaggaagatgctggatcaggacggtatctcccgctgtaaagaaccggcgacattgctctactatgacacccaatctctggtgccgcatgcggaggggcgggctcgggttgcctattactattattgcccacaggcgcagatgaaggcgggtacggctcagtgcgagaatacttatgaaaatcaggaactatga

SEQ ID NO: 448810 - DNA, 360 bp, Serratia marcescens
atgatgcgagtggttaatgacgagcaggggaaaactttgaaacgcgtgctcttattgagcgtggtaccggatggagcacgtcaggtgagcttactgctcaacggtagcttctatgatggtgatgtaaggtataggattgatcggatcgtgacgatggagtaccactaccagaatggaaattatctgttacacgtaaagcagaacagcaagaagccgcaggactccgtacgatctgaagcgctgaatcaccgcctgccaaccgttgggcagcagttgcatttacatatagagcggttagatcggcgtcattatctttttgttagcaataattccccgctgtttgtatgtacctcatcctga

SEQ ID NO: 448811 - DNA, 747 bp, Serratia marcescens
atgatttttaatatcaataacagcatcctctataatgaggaggaaggtacgttggcgcagattgacaatgccagcggtaaagttgccttgctcaaacccacctgcagattgctgtctctgtttatccgtcataataatgcactgttattgcgggagagattgcttaatgaggtttgggtagagcatggattaaaggcttccaataataatctgaacaattatgtttcagggctgcggaagtcattggcgcagtttggtgaagaagagataatcgtcacctatccacgccaggggtttaagtttaccgccagaaccattcatgaaataaatataaatgaggggaatgatgaaagggaaaatgaaagcgcaaaacagcaaataaccgaccagacggggagcagtaacgtttggcggccgctgcagcggctggtcatggtgatagccgcctgtttggtaccctttgccgcgatcgtgctttatcaaaacagcaatcgcatcaacgtttatccgttgggaagctaccaacagtgccagatttatagcatgcacctgggcagcggcaatctggataaaatcaagcggatgatccaacgtagcggattaagctgccagagccgtgcagacgtttattattatggtagcgtgcgcaatgaaaaatcgttgtacgatgaggagcagttgacctactgtccacgagaaatgaacagcccgtgtattaacaactatatcaataataaccaagagtaa

SEQ ID NO: 448812 - DNA, 141 bp, Serratia marcescens
atgctcatccctggctcttatagcatgcatgccagccagctcaatgaggtgagtgaaaacgttgctatccactgccacgccccttgcaaaagcttctttatgggcatcgataacattctgtactgtaggcggctctggtga

SEQ ID NO: 448813 - DNA, 393 bp, Serratia marcescens
atgagttacgaagcgctgaaggctgagcgcgatgcgctggctgtggagaatgcggcgctgaagtcgaaagcttccgagcttgtgcatgaagcatctgaagtctactcagcatacaacgccacaatcaaagagccagatggtgacttcatggatatgcagacactgtatgagatgcagcgtatcgaaaccccatccactgacgcagtacttgcagctatccaggcgcagggagtggagaaggcgctggccgttgtttctgcttgtcgtgaaaacatctgtcccggtggcctatctgaaaatcgtcagtatgaagaatcgatagttcaaccgcatttagacggtatttctgacgagttggaaaatctgattatcgagctgcgggaggccaaatga

SEQ ID NO: 448814 - DNA, 591 bp, Serratia marcescens
atgaagaaagtactgataatgtatcattttgacttcgcctctaagggtaagtttgagcgcaaacttactcgaatactttccaaattaaatgactataaaatattttattttgaagatcatcataatctaatcaagcagttttttactgctgatgttttgacgaaacttgcaccagaattacttgctgacccattctctattggtctaactcatgcagttatttttgattcagccactaagccagaactccttgatccccgcgatgttttgtccaataaaattactgttcgatatatcacggataaaattactttcgtttcaaataaagatagaggtgaacacttcgatacttattgcggaagaggaactctttggggaaatccttatgcgataggtgtagatggtgatcgagatgaagtgatcaggaagttcaagtatgattttgaacgtgattatctgaagggggggaatgatttcaaagaaaagctcaagaagctgagaggacacacattgggatgccattgtaagccctatgcgtgccatggtgatgtcctcgcccaatatcttaatgaattagatgatggtgagtga

SEQ ID NO: 448815 - DNA, 684 bp, Serratia marcescens
atgatcaaacgtttggtacttttagcttgctcttaccgccccggtgggcgctgtgtcgcgggcattgaattggttgataatgtgtgtagcggctgggtacgacctgtatgctctaccggtgaaggccaagtacacgatattgatcgtatttgcgataatgaagaatcggccatcaaactttctgttgttgaaattgatgtcggtgaaaaccaaaatcatccaatgcaacgtgaaaatgtctactttaatcatggtgttaagtggaggtacatctcatcacatcgtaaatcacatgaattcttatcccctttccttgaaacgcctccatccttgtgggaaaacggcacacatagtacgaacggtttaaacgacaaagtccctgttggtatggttagaaggccaaggcaatcattattcttcataagaccaacaagacttttcattcatattgctactgaagggggggatttcggcactcctcatcgaaaagtaagagcaagattcttttataacagtgtggaatatattttctcattaatggatgcggaagttcttgaggagtttaaaacacatgaaaatggtgagtacgagatttttaattcatatatgactgtaagtttagctggggaatatttacagcattattggaaaattgcggcgtctattataagggttgagccatga

SEQ ID NO: 448816 - DNA, 696 bp, Serratia marcescens
atggctgagctggtttatgaatgtccgagatgcggcgttcaaagggtaacttttagaattcgcggaattattcctgatagaacaatacctgatcaatataataagtatgattatttttgtgagtgtggcgtttgtcattctgctgttgtgctaaatattcgcttgagaaatgatttattttctcggcaattatcatctgatgaggtgataaaaaaggctgggatgattgacaatcacataacagtgctgggttattcaacttctgcagattacatttataaaagaccaccggaatttttaccccctgatatcgaagcagcatttattgaaggggcaaagtgtatgagtattggttgctataatgccgctgctacgatgtttcgcttgtgtttagatttcgctactaagtctctgttaccagaaggtgaggctattggcttaaataattcaacaagaagaagtttgggtttaaggatgcagtggttgttcaaaaatggtttattgccagactccttaaaagaactcgctgaatgtgttaaggatgatggaaatgatggcgctcaccagggcgctttagataaaacggcagctttagatttgcaagatttttctgaaacacttttcgaaagactctatacagaaaaagaaaaattgaggttggctaaagagagaagagaacaacgacaccagatttaa

SEQ ID NO: 448817 - DNA, 186 bp, Serratia marcescens
atggatgtcactaaagagatccaaaaatacagatataaatacataacaatacacgatggctactatgcaacgattggaggcaggattgaatatgactatctcaattacacaggcactgaacgcaaacacattcaagtactgcaatcgatgatcgacaccgtaacagtactgttcaaagaggaataa

SEQ ID NO: 448818 - DNA, 213 bp, Serratia marcescens
atgaatcaatggtttatttcttataaagttttttatcatgatggtcgtattttagaagaggatcagattttagccgataacattgtagctactgttgaagaattatatggcagcacgccaaaagatatcatctccagcttcaaggccgagcaagcaaatatccatggcgtcaacataagcgatatcctgattatatcatttaaccaagtataa

SEQ ID NO: 448819 - DNA, 651 bp, Serratia marcescens
atggctaaaacagcacaggatgagagccatgagaggcgcccatacccaccgttaaggtttatcgaagaccatcagctgacgccttatatcggcctggtgcctgcgaacgaggtgcaggagtggatgcagcgtcaaatcatcgactactccggcagcctatttaacccagaccacggacaccttgcagacgctgatctgcgctttatgtgggcgtcgtcggcgtttgagaagaaagggcgccacgtgcttggccaggctgaagaggtagcgatgcgcgccggcggctggcagaaggcccggatggaacagcagatgcatgagtggttcggcgatgtgccgaaattcatcatcacgctcgctgccgactactgctcacagtgttctgatgcggagttctgcgccctggtcgagcatgagctgtaccacatcgcgcaggctaccgacgatttcggcgcaccaaaattcaacaaggaaggtcagctggtgctgaagctgcgcggccacgatgttgaagagtttgttggtgtagttcgccggtatggtgccagcgtagaagttcaggaactggttgatgcggctaacaggcctgcggaggtggcacaactaaacattgccagagcgtgcggtaactgcatgttgaggctggcgtaa

SEQ ID NO: 448820 - DNA, 201 bp, Serratia marcescens
atgcaaaaaaaacaaattacaactcaagatattctgcatgagatgtcagaagttcaagtaatacaaacctatggtaacaatacgcaaaaagtgaatgagttactggccactagagtatggaaactaatcgatgttgctcacggtagtgacccggaagggaatacctatcaggtttggagcctgggttgtcattcatactaa

SEQ ID NO: 448821 - DNA, 1338 bp, Serratia marcescens
atgggtactgtgatttctcttgaagtgtcaggaatggagctagattctactaagaactcgctgggtatagatcatggaggcctgtttcaaagtgccgatcatcacgtcaagccactaaatgaagatcaaatagaagaaggagaagactacgacactcctgatggcatcctctgtcgtactgtgttgcgtaagcctttgggacaagtagcttaccgattggagttgttaggtttcacccttgaaaatatacgctacgagtatgaactcatggcaaaagaatcaattgaataccaagaggaatttaacgaatcctgtccggaatatgcaaaacaaattagtaacatgatgggttttgatgaattcgttaacttcatcaagagcgtaaatattagcgaactaaacgatggttatattagcttaaaagatagtgaaaaagaacgtgaacttatcatgggcagatttaataatgatgaattattaaacagaatacctcaatacgacgatacctttgataatgcatggtctgaaaaatctgcttttgggactttaattagcattctgcatccatactctgtaatgcgacttttggccgaaaatccaaataatcataatgaatttgtcacttgggattacggaggtctagtttctgctggttatgcgaatataaaagatattcaggtaaatgctcgcagacgtgacaagttcctgattgccaccgagggaagcaccgactccaacgtaatcaaatatgcattgcatctcttacggcctgatatagaagattttttccactttatcgacatgagtgaagggtacccgtttactggttcaggaaatctggttaagttcgcagctggactcgtaaaaatcgacattcaaaacttgatttttttcgttttagataatgattgtgaagggattgaagcatatgaaaaaatccgcaaactcgcattgcctcacaatattaactgcattcatctacctgatcttcctgatttcaatcaatttccagctattggccctcacggcgttacctatgaaaacatcaatggccgggctgtagcgattgaatgctatctggatctaagattttctgattatgatgaagctcaaatccggtggtcaaattacaaaaaggaaagtgatgcttatcaaggcgcgctggaaaataaagactattacacgaaaaaattcatgaaactaaaaccagggagtaaggattttagcaaatatgattttgccaagctcgctattgtcttggatgaattaataaaggcgtgttcaaaaatctcatcagaaattagaaaaaatgaagtagatgttcaatatccagattaa

SEQ ID NO: 448822 - DNA, 615 bp, Serratia marcescens
atgaatttagatctagacaaaggtgggcgtgctgcgatcgagcgaatgattgaggcatatgggtgtggaactaagacagcgctcgcggagcttctggggatttctaaaggtacgttatcaaatcgttatctacgggatacttttcctgctgactatgtgattcagtgtgcacttgaaactggagtatcacttgagtggctagcaactggagttggagataggattgataaagctgaattacaggatgaagtcactgtaaatccgaacgttatgagtgatgttattgtaataccacgtaaaaaaattattgatgggaatctttatgactctaattttgtcataatggataaaacaattatacctagccatatcaacaatgcattggttattaatgacgatgaagttctttacttagcagaacaagaaatcgatgacattactgatggaacttggttaattgaagttgaaggtaaaattagtattaaaaatctaattagagttcccattgggaaaataagagtgctttacaccaacggaaaattagcttttgaagcctctcttcatgaagtacgtcctatagcgaaatgttattttaaagtcatggcaaacgtataa

SEQ ID NO: 448823 - DNA, 1086 bp, Serratia marcescens
atgtcacgtagttttgctgtttggggatgtaggaattacaaagacacatccaaatcaaattatgactcaactcatgtaaatttcattgatgaattacacatcaatttttggagccttaactctcccaagcaatactatctagattttggcataacctttagacatcctggagatgaagacattgccaataatggagcagtatgtgtatatattccgttcattaagagctcggaagatttttctgatctaagccataatttagatcaaagtagagatctagttactgcagttttcaatgagttcttaataagcaaaaataatttaactgaacgacacttagaaatagaacttgcaaacaaaggaagtttaattataaatactaagttagattttagtggtggtgagttagatcaccgaatcaagactactaccatgaaaaatggtacattattagcattcaaacttaaacactgcctctctaataaaaacgaactaaacaccaagcattacattagatttagaattaaactaactgagaatgatacaaaaagcattgtaaaaacattttacccgaaagatcactttctaaaaagcagtatcgagcgctcagatattatcgatttcagaataaacgagcaacgtaatttacccaatgagatttcaaccacattagcgagtgcagcttgcacacctttgaaatgtcatttattcataattcgcgacataactgatgattgttctgcttctggctcgaattataagggctccagaatcttggagtctgaaacatggggtaaatactttgatgaaactgtatcatttggcaagattgatccgatgatctaccattggaagataagtaatgatacaaaatcgagattaaatgatttttccgtggccgtaaaattcaaaaataccagagcaaaaataagcaaagtatttgcatacttattctatgctttagccattacctacataatgaaattcctcccttccgatatattaaaggataaaattttcttttccgtagcatttgtgttggttgcattatatataatgctccacttcattaagtatagaaagtaa

SEQ ID NO: 448824 - DNA, 1047 bp, Serratia marcescens
  misc_feature (68)..(95): n is a, c, g, or t
atggaaaatttgcagcatattaaattcagcgaagttaactttgatgatgccttttttgatactttaannnnnnnnnnnnnnnnnnnnnnnnnnnngacagaaaaagcatatgttttgttcaatgacgataatacaatcgatggattcatgtacttaaaaatagaaaaaggaatcgttgatgatgttagtcctatacttaaagaatctaagcatttaaagataggaacttttaaatttaatcccaaaggtacattaagagggcaacgcttccttaagaaaatctttgatcatgccttgaaagagaaagtaaatgacatctatgttaccgtttttgagaagcacagttacttaattcgtcttttccaaatgtatggttttatcagacatgggaaaaaagaatcgtctaatggtattgaaaatgttcttgttcgcgaaatgtcaagagaacatctcacgggtgatttgctcgcggattatccatatataaacaataggaataacgaaaaaaaatacattctctctatttatccgaaatttcacactaggctatttcctgattccattctagttacagaaacaccagatattgtatctgatgtatcttacgcaaatagcatcagaaaaatttacatttgtggaatgaaagacacctccgtacttaagcctaatgatataatcgtaatttatagaactagcgataacaaagggcctgcatattataggtctgtagttacttccatttgcgtcgttgaaaatgtaaagcatatatccacatttgtctcagaggatgagttcgttgactactgcattaaatacagtgtctttagcaaaactgaattaattgatttttataagacaaaaaagtacccttacataattagctttacatataacgttgctttacctaagagattaaatcgtgctacactaataaatgaagcgggtatgaatccgaactcatattggggtgtcatgcagctgaatgatgctgagttcaataagataatcgaattaggtaatgtagatgaaagtattattgtcgattaa

SEQ ID NO: 448825 - DNA, 144 bp, Serratia marcescens
atgccgattactgcgatgccaccgatatggctgcttacggcggcacgggagtatgcacccgcctatctgaattgccagggggtgataagcggtttacgtctctactcgatggtgctggcgctgaaggcaaagcgcctgatttaa

SEQ ID NO: 448826 - DNA, 1353 bp, Serratia marcescens
atgactgctgaaaatgccactcctcgtattaaccgggggggcgcgttggtttcgatggccatcgttctggcgatcgtgttgattgccgctcctattgggctggaaagatattcgaactatgtagaagaacaaacatgggtcgttaccgcgacacacctgagcacagtgagcgagggtgcccgtcgatacgtgaaagataactacgatatgttgctgaatcaggtaaaggggggcggcaacgtaacggtaaccggccagaccctgcgcgataaagggtatttgccggcggggttttccctgaccaacaataacggccaaacctatattcttgccgtgacacgcaatccttcgcaaaccgacaagctggtcgcctttgttttgaccgccggcggtcaaaatattacgttcaagggccaacgctatatcgctcagaacacgtctggcttgggcgggtatatcgaacccgtcaatgttgccaacggtgccggcggtggctggcaggtcaacctgtcgaatatggggctaagtggacagagtggacacctggccgcttacctgacgtccgacgtattggcaggtggggctgaagagaacgatcgcttgtatcgcttccaggttaacggtcgtcccgatcttaataagatgcacacagcgattgatatgggcgccaatgacttgaataacgcgaacaatataaatgccaaatcaggtaattatagcgaagaagtcacggccaagagattgagtgcgcatgatagcgtttggtcgaacggttggattggttcgaatggtgatattcgaagtaattccggttggcttattaccaaacatggtaaaggttggctcaacgaagatcacgggggcggattttacatggatgacaacgactggattcgttcggtgaataacaaaggtatttataccggtggtcagctgagaggtgggtctgttcgagcagacggaagggcatcggttggcgaatatttacaacttgatggtaaggcaaatgaaggctggggttgtaaccctaatgggcttttaagtcgtgatgagtctggaactgtactttattgtaaaaatggggtatggaatgcacctggtaaattaaaagattttcagaaggtttctgggggggatgcttgcggaagatacaacttttcaaaagcatattgtccttcaggcaaacaacttctctctggaggatatatattatcacgttgggggggggatggatggaatgctccggatctaaaccagcccaccgaagacggtaacggatggcagatatatacgggggggggagtagcaggaggttcatgtattcaggctgttgcttggtgtgctaataactga

SEQ ID NO: 448827 - DNA, 870 bp, Serratia marcescens
atggcgacgttgttcatcgatctacttatcaaaccacgcaaaagatttcgagttaaaacaacgtctcaggatgaactgacgcagcgactggtgttgtatgtgcaacgtcactatctgcgtgtgcctggctgggagctctacaagtatgggcgtagctggggttgtttgtgccaggtagtaccgcttccgttcctagactggttatcttcgaacgagaactgcgcaaaggctaaagagatcgctgaaacctgccggccgttctttgaagatggacaccgtactgtcgttccaccgatcgctgtatacattccgttaagctggttatgtatcataatccctcccctggagctcatgcttcgagaacattggcaaactcaactcggaacaactcagacagtgccggatgttgattacgatacttccctcaaaccatctgattactatctgttgtgtgaagggcgggcaattccagacgtttggcagcgtcattatgaactatgtatgaaaagaggtatgcctttcatagtattatggcatttcccgcctaagcaggctcggttcagttctcgatacgatattctattttcatgggaaactttagttaagagccatagccatgtattcgataaccccgattgtcaagatatcaccacgatcgtgaccaaaaggattatgcaactgttaagggaacggcgtgatgaagaaggttttgaaagagtctctcttcagaatgttcttggagaaggtcaaatcaacattttgaagcttagttttaacgcagcagaaaaactaactcttgatctgatacaacttataggacagttgatcatagaagttgaagtgatgctacagaacgatttattagactga

SEQ ID NO: 448828 - DNA, 1389 bp, Serratia marcescens
atgtctaatactaaaaaactaccctattatcgaaaaatcatgaatcattttggaattgctgctggttcatttggttcaggtgaaattaatagacttactcgtgattggatgtatcagaagctatctgtagaagaagccatcaagcgattaccaacaacaaaagaattcgaaaagtggttgagattccacaacgacaatagagttgacttatcaaagaaatcgccaagaattaacgcgttaatggttgagttggagttacctcacggaactttaggtagaagaaaaatgcttaaagtagtccaaaagctcgctaagaagtacaatgacaaccaaagtttgatttctcatctaaaatcatcgaaagaatggcgtgatcatgaggtcgcaaaacaaaaatcagttttaaatgaagaaataagaatacaaaaaagaaaagaagctcatcaaaaaaaggttgagaattattccaagctacctagaaaccagagattaaaggcttggggtttaattaaagtcctacaatataatggacgtcgttcatcgatcacaaaaaatgttataaatcaaattgataactattttaaagagcttgtttccaatgctatactcgctcaagatgaaaaacatttatctcatatgaggttactggccgaggaagaaagacaacgtgttctcatacaagaacgtattgcttatgatgaggaaagaaaaaaaaataggcaggaacgcattgaaaaacttgattacgaagtttatttggaggaagcacaagaatacgtgcgtgaaaatattgaattcaatcagttaaaggattttcgtctgtggtttaaaaaaaatttcgatgacgacatatcgaggattaaagaaagtgttgaagaatttaacaataaacattccattaatttgagtgacgacctttgctttcctcgagcccacccctcaaaatcagaagaaacaccacataaaatactagttaaatcaaatataaaaagagtcgggaaaatttatggtgttcaatccaggcctgaccaagcggcatttgcaaatgccgttagggataattgttcaggacgctgcgtagttactggttctggtgtacttcgtagatgtgaagctgcgcacttagtggagcataaaaatggtgggttagattgctacacgaatggattatggttacgtaaagatattcatgctctattcgatgcaggattatgtgctatcaatccacaaacgatgattattaacttcctgccaagaattttagaactcgatgtagacctaagaattttggatggacgaaaaataacttcaccgaagcgagctatcaactcgagttacctggttgaccgttgggaacgattcaccaaagagatcgacgttcccggttaa

SEQ ID NO: 448829 - DNA, 429 bp, Serratia marcescens
atgttcgcccagctctggaagcacggccgcgcgctggtgccggcatcgggctggtacgaatggaaaaagtcgacggaggatccacggctgaagcagccctattttatccgtgacgccgatcgccagccgttgttctttgcggcgctgtacgccgcagataccgctggcagcggcagctttgtcattatcacggccgccagtcatgccggcctggcggatattcatgacagacgccctctggcgttgccaccggccgccgcgcgcgactggctcgataccagcctggttccgccctctggccatatgcaggctgatgtgtacagcctgcaggcggaggatttttcctggcagccggtctcaccggctgtgggcgccgttcgcaatgacaatccctcactcatcctggccatcgaggcaccaacggtctga

SEQ ID NO: 448830 - DNA, 633 bp, Serratia marcescens
atgctgcccgagacgtcggtcgttatcgttgaggaaggagatggtgaaggtgcaatcaacctgcaaaacaccgacaactttcccgtcctgttactgactagtttgcgggatatcgaacaggacaccgaaaaactgttggccgtgacgcccccggttgcccgcgtcgaacccggcaagacccagcgcgtacgctttatgctgactgccaaaacaccgctaaaaacagaacgcctcaagcgagtggtgtttgaaggcgtgccgccgcaggagaaagacaagaatgtggtgcgaatgacggtacgccagaacctgccggttatcattcgccctgccgggctgccccgtgatgaagcgccctggaaacgtctgatatggacactaaaggctggcgttttgagcgtcattaacccgtctgcgtatgtcgtgcgtctggggcagggagtgaccacgttgcctgacaagatgatctggatgctgccgcacacctatgtattgccgggccagcagctgacgctgacccgtcaggcgaagcgaggtgacgccggtgccgaaacggccagtaaagtacgcatttccccggccaccacctggggttttaccgtcgacagctatgaagcgccgctggcgccgtaa

SEQ ID NO: 448831 - DNA, 708 bp, Serratia marcescens
atgatgaatgcagtcaaaaagaccgcctgcgcactcgcagtgcttgccaccacctcctcagctgtcatggccgagagcattgatgtgaaagtcatcggtaccattaccccgacggcttgcaagccaacgctgggtgggggggggaccatcgactatggcaatattgcgcctgcgtctcttagtaatgacacctttactgttctggctgaaaagcaggttgattttagtatcacctgcgacgccccagccaaggtagccattcacgccgttggctcgaaagccgacaccgcaacgaatgtacttaaaacgcctgctggttatgacacttttaatggaattctcttcgctccaaatcctggtgtagtaggtctggggggggtagacggtaaaaatatcggtgggtatggcatccgattggtgccgggaacctatactgtggacggcaatgatgccgataccattacacgcagcgcagctaccggtgtttgggttccctccgccaatctctcggcgggtagcttatttaacacagcgttcaaagacttgcaaatgtcttgggccccaaaaggtcagcttaccccaatagctttcactaccgccgctgggaaactgggagtccaggcctacatcaccaaaacctccgagcttgacctctccaagcccatcaatctcgacggcctgaccaccctggagttggtctacctgtaa

SEQ ID NO: 448832 - DNA, 552 bp, Serratia marcescens
atgaaaaaagttgtatatgaagatgacaacaagcttctggctgccttggcacgagcaatagttgagaggcccaaggccaacttgcacgaattagcgcaggctgtaggaattagtaaagcaaccctatatcgattctgcaatactcgcgaacttttaacagagagattgatacagagtgcaagccatgcaattagtaaagctattcatgatgccggtttggatgatgagtcaccgcttgaggcgcttaagcgactatctaataattttataaataatcaagagtttatgattttttttctgtacaactggagtcctgataggccaatgggaattgaatcgccaacagagtggtattcagcgctggacgggttcttcctgagagggcaacagtttgggatttttcgtgttgatattgcagcagctgcgatgagtgaacttttgttttccatgttgattgggattcaggatgcggagcgtcgagggcgtgtcgcaaaagtggggctagccacgcttgtggaatcagtattcttgcatggtgttactagagtataa

SEQ ID NO: 448833 - DNA, 261 bp, Serratia marcescens
atgaaagaattgtttactgaagagactcataatgttgctggcggctatggctatcctaatagctatagcgatcctaatagctatggctattctgacccgggacgccttaagaacattaaaaatggtatcgatttgggcacctccgtatttggactcattggtcaaggcgcccaaacatatacggcagttcgtaacgccctgccaggctatcagcaaggctatcagcaaggctatcagcaaagctatcagcaaggtagctag

SEQ ID NO: 448834 - DNA, 306 bp, Serratia marcescens
atgagagcggaaatcgaaaactgtgtgagggcttttcgccaggcgctggcgctcgccgccggcgaacgcgccggtgaaccggaaccgcgcagctggcataactatctggcagactttctggccgactgttgtgagctggccagccagacgctggtaaaatacctcagcgatcacgacccaaacctgttttcgtatgtcatcgccctgcagtggattgaaaatggtgacattcacggtcacgtctttgtcgtcctggacggggagtacatcgaccagacgctggctccagtcaggtacattccctga

SEQ ID NO: 448835 - DNA, 471 bp, Serratia marcescens
atgcgcgcgttccgcgccagcctgcgcgaacagcgcgcggagcaggtgccggcgctgccggctgagctggcacagctgctgagcggtcagctggagctgctgtggcaggcggccgtgaaacaggccgacgccgacaccctggccgcccgtgaacaggccgatgcggatattgcccaggccgaccgggagcgcgatgcagcgctggcgaccgtggcccggcttgatagcgagctggcggtgctgcgcgaggtggtggccgagcgtgatcgcctgctgcaggaggtgcgcgcgctgcgggatgaggctttgccactgcgcgagcaggtcgcccagctgaccgccaccggcgagcacctggcaacgcagctgaaggacaccaaggccgaactgaaaggcgcccgcaaggaaacccgcaccctgcaggccgagctgctgacgctggcgcgcggcgccgggaaggtgaagcaatga

SEQ ID NO: 448836 - DNA, 321 bp, Serratia marcescens
atgacatctaaaccgtcgcaacaatttgccacgttctgggcggtgcttgccgaactggagagcagcggacacccgcaagactctctgtggatcaaggcgggcaaagacgacactggggaaatgaattacaccgcaccgatcgcgttcatcgccggtgactgccgcatgctggcacagaaatgggctgatggcacctggcataccctgtacggttacgacaggccgaatgcacccggcgcaccggggcctaccgttgaacgtggtaacggtgtgcactacctgccgagttgtatagaagggctcgaactttttctgtcctga

SEQ ID NO: 448837 - DNA, 885 bp, Serratia marcescens
atgagcaaagtacaacagcattatattgacgagacggaggcgcaggccatgtttgatccgcaggaagggcccgatcaggaatcgccgatggtcgagtggattttggcgacctatcccggtatcgaggaagggactgaggaatgggagcaagccgaacaggaatattgcgactggtgcgatttcagatccgccattctcgatcaaatctggtttgaggactcgctgaatgacatcggcgatcgctatgcgcatgcgcttgctgaactggataatctgcagccattacaggctggcgaacatccgggcatcgtgcggcgcctggcgtatgcgcactgcgtaacggtcatggaggccttcctgatgtatgcagcgtgcgcattgctgaattaccctgctctcctggcgcggttccacgaaaagaaatcggcatttttacgcgaggatatcgttaagtccttggatgctgcatatcgacgtgagagggataatcacgagccatgtatatggcacgggcgtgaagtgccaggtcaaaacgaactggaattgaccggtgagaccttggcagatcgtcagatttacaaaagcagggcacaggcagcaatcggcgcgctggcatttcataacctcaaacgggttaaaagctacttcaccgcaatgctgaccaccccgcccgactggccattagacgaaatactggaggatctgatcactacccgccaggatctggtgcaccgtaacggcgtgacgaagaacaaccagcccatcaccattgcgcccaccgacctagctaacgccgtggaaatagtgcgtcgtcttatcacgcaggcgcacgacgacttacaggctgaagtagcgcgccaccttaaaaccgaagaggaattctga

SEQ ID NO: 448838 - DNA, 405 bp, Serratia marcescens
atgccgaattggtgtgcaaaccgccttatcgtgactgggacgcctgatcaacttaccgctgtggctgaattttcacgtagcgaaggaagtgacagttttttcagcgatgttgatgttgcatttgtggagctcgacggtgaaatacagctggattttcatacccgatgggctccccctgaaggttccgagatccgtaatctgagtaagcgtttctcctgccatatttgccacacgttttgcgagcagggggagggtttttgcggctatcacgtctattcaaatggcgaatacatagatagtgccagcgacgatattgaatggtcagattatttggacgaatacggatatgccgagcttgtaggcccggagtatgtcttgggcaatgtacccgattacggtggttaa

SEQ ID NO: 448839 - DNA, 2046 bp, Serratia marcescens
atgccaaagaccatgacaaaaccaaaaaccaacaaagcagagccacagaaaaccgcggcggcgaagtttgttgctgatgcgcttgcaaatgccacagttgaaattctgacgctcaaacaattggtggatacaaagctcaatgcccgtaaaacagctcgcacccaaggacacattgaagggatagccaacagcattgaaggaactggcttactgcaaaacttagtcgtgtaccgtatggccaacgggttttacggggttgcagcgggcgaaacgcgtcggttagcactcaatctattgatggaacagggtcgatctgcagcaggtgtaccagttacaccggacttcccggtcttcgtcaaagttgtagatgaagacaaagcgcgcgcgatttcttatgcagaaaacggacagcgctcaaacctgacacctgcagatcagctggaaaacttccgtgatatggcgaaagacgggacgtctgtcgaacaaattgctgccattctcggttaccgcactgtgcatgtcagaaaatgcctcaaattgacaacggttgcgccatcgctgcaagagttattgaaaaccgaccagattacccttgatcaactcgcggctttgggagcgagtgatgatcaccaacgccagattcaggcgtgggaaaatggccgttactacgagcatcttcgaaaaccaaaggcgttgcgagacgctgtgctcaatggcgaaatctcagcagtagggagcgagctggtcgattttgttggtttagatgtttaccaatcagcgggcggagaaattcgtgaagaccttttcggtgaaagcgtcatcctgaccaatccattgcagctggaatctatggcgatcgccaaactgcaggaagctgctgatgcgatcgtgaaaaaagaaggttgggcatgggggataggtcgttgccgcgaagcgcgacgttataccgacgatgagaagactttcgagatcccttacgtaaccacgaggctgaccagcgggcagcagactgaaatggatcagctgatcgccgagcaaaaatcgctggatgatatgctcgacgcgactggtcttgatgcagacgaagaatgggaacatgcgccacgccttgagcagattgaggcgcgtatcaacgaaataaacgcagctgcagaactcaacaattggccgttagaagttcgtgcgacggcgggcataatcgcttacctgaaagatggtcagatccaaatccaacgcggcttgatgaaagtagaagatatcaagcaacaagaaaaagccaaccgcgaagaaatcaagaagaacaccccgccatcagaaaaagggctttcccaagttttggtggcaagtttgtccgccgaacgtactttggcagtatctgcggcgctggcgcagactcctgacgtagctattgtacttctcacttactcgctgacgcgtcgggtattcggcactggctatttctatgagatgaacacctccatagatagcgtgcgcagcggctgcctgagccaatcagctgatgcaggcagcgcgaatggcctagccaatcagaaacttaatgatctgcacgatagttggttgagcaagttccctgataattgggtggaaagctttgagtggttgttggcatggcaacagcgcgatgttctgggactgttagcctattgtgtttcccacggactcgatgggagagatagccagttgaacgataagcgagttggcacaaggttggactctgtagaaaaagcccttggcttccagattggtgactggtggaaaccgactgccgaaaatttcttctcgcggatcgctaaagaccagatcgttgacgctctcaatagcgccggtgaaagcggtaaggccaaagacgccgagggtatgaaacgcaaagatgccgccgagttcgccgcagcggtgctgggcgaaaccgattggttgccgagctgcatggcaccgcagtcgcaggccgaaccggaaaacagggggagtgacgctgccaactccgatactaatgatactgacgctgacgactgcgctgccgcctaa

SEQ ID NO: 448840 - DNA, 228 bp, Serratia marcescens
atgatagtcgtaaaaccgatctcgagcaaagaaccagacctgttggtaggaaatgaacacaaaacactcataatcaaggatttatccggcgttgtactggcaagcttcaagcctgatggtgctggctggacgcatgaccaattgctggccattgatatccacagcatggcgccagagggatgggatgcctacctggctgatgattggataggcagttcagaaatataa

SEQ ID NO: 448841 - DNA, 855 bp, Serratia marcescens
atgttaaagaatattcaggtggcaaagtttgataacgatttaaatattattgcttgtcatcatgtgattccatttgatgtgtcacatggtgatgggggatatgcagttcgtgctattgaaatttatcgaatccataaaatggaggcacttctaaagcaatttgaacaactgacagggtatgtagtaccacgttcaaattgtactgcggaagagattcatttgttgatagagcaaggagaaaaagtctgcttggaagccgaagaaaaagtggctgaaatcaagaatgaaattatgttgtgtgatcgtgatttaggaaacgccaaacgcggggtcggtgaaatttctcgctggagtagtggtatcaaagacgctgttactcaagccaacaacagccttgaacgagcgcacacaaaaattaccgaggctcatgcggttgtcgctgcgcgtaaagggttgttggggcttctgcgtgaaccggttgaacatatgttggcgaacggcgaaaaagggtttaaaggcaaggtattgacacgtataccactagagccgctaccagcgcatacctatcgtaagggaatgtatagcgagggattacgttcccatatctatgcctgggaattgatggatgaattggaaggagcattacgctcgataatccaaaaatgcacgccgcctacagataagtacgctctcaatcatggtgggttagatcgtgccttgctggctgtagaatactacagcgttcccggtgagacatggcggaatgtcatgacggtcgatgaatacatcaatctgatgatggggcctaaatcacacctggaaattaaacagaaagaaatgcacgcatcactttaa

SEQ ID NO: 448842 - DNA, 1002 bp, Serratia marcescens
atgacagcagctattattcccgctgtggcgggccgctatcaccaaaatctaatgaatagcgttactttcccttatggaaatcagcgaacattcactatttcagatgtggcagaaaataaattgcgcattgccatgctagagtctggttggatgatgagtggcatcacgttaatggatgttgataccgaaaaaggccaggcaattgaaattggcgattcttcattacataccggacgggctattgaggggcgctttaataaaggtctggcagtaaatggcactgattatttcctggtagaaacagactcatgcgcttccttgtcttatgagaaaatgtccgcaatcgcgaatgttggagggatggagcattttgcacaaagagtagatgaattctttggtatggcggtttcgctggatatgttacgcatcgggttaaatggggagcgtatagcgtatccgacagatccggaaagtaacaccaaaggtcaagacgtcaatattggttggcacgccattgcaaaaacctttaataacggctcgcaggtcatcactgaggcagtcacgttaggtgaaggcggtgatttcccccacctggatgcgttggctaatcacctgattacgacgaatatcccggagggtttccgtgaagatccacgcctggtggtgatggtcggggcagaattggcggcagcagagcgtttgcgcttgtttaatgccgctgaccgtccggcagacacagcggcggcgcagatgctcaccagttcagtggcaggccgttttgcctttgtgccgccatttatgccgggaaaacgccttgcaatcacgacgctagataatttgcatatttacacccaaaagggcagtcgtcattttcgcgctgaatttgtcgatgatcgggccgtatatgaacaaggttattggcgtaatgaaggttatgcgttgggtaatggttttttgtacacagcagttgatgaaaaagcaataaccttcgcacgtaaataa

SEQ ID NO: 448843 - DNA, 633 bp, Serratia marcescens
atggcgttaattctttcctggcgaaatgtcgcacttagctcattctttgtcaatctcaggatttcggataaaaatggcttgcgcggtgctgttcgctcacggtatagttttcgcgttgccgcacaatcggcagccgggcgtaggaacccgtgtaatctgaaggcgataccagacgccatttgcgtctttttttgtatcgtagctttgacacaccttaattttttggtgtggtgctcacaggtctgtatgggcgtcattctggcctgtgtgcatcatttccatcgtattatggtagtccaggcggggcagctttcgggctggccggtatccttcagagccggtattcctacccccgtttgggctaccaccagtcttgggcgtaggaaccccggtggtagctgttccagctatctgaaggaggttgccaccatggccactgccccaatccatccatacccccaatttatctatctgtttctggctgttcgccgtgctgatgttcacgccgttccgtgtcgcgtgcaagtcaccgcggattcgcagcaagctgcttatctcgcactggtcaaagaatatgtattggcgtttgctggtcgtttgccgtcgctgaatgatgttaaggggggcaaatga

SEQ ID NO: 448844 - DNA, 243 bp, Serratia marcescens
atgaacaatacgcaagagatgaaaatgcatcccattaacgaacaaggttgcgagcaattaattcgtgccacgttggtgtgcgaacttatggccgatttgatgagtaagagtgatagcagtaatcaaaagatggtgtcggcgttaggggtttctgcactgtttgaatgcctggcgggtcaactggacggagcaataaacaacagtatcttatctgatccaatgaaaaaccaggagggaagataa

SEQ ID NO: 448845 - DNA, 408 bp, Serratia marcescens
atgctttcaattaatcatcctacctcacccgaattcaaaattgcgttgctgcgtcattatatcgcctgtgcttttatcgatgtgattgttattaagcatggccgtgcgatattttcggaggatggcgaagaagtcgtattaaccctggataaggttgcgctgaacattatttatcatattgaggcgcctttcattgagaattttggcgtaatgaagggcggtatactggctgcggcagatctaatggccatgctcatgcctggattcatggctgcgcaagtgcagctgtcaccttatggctttcaacgactgtacgcggtctatcgagacatcatttttggtgccccggatggtgaattacctcctggtgcggcagtccatcgctgtgatgccaaggaggcgagctaa

SEQ ID NO: 448846 - DNA, 1335 bp, Serratia marcescens
atgaatttatctcagcgatttgattctttttttacaagggagtatttaaataaaatatattctgaacatgtgattttgtcttctgctacaggtgttgacaatatgactcatgaaattctgtgggggatgttagatgagcagctagatataattaataggaaagttacgtgttcgaattatattttcagtaaatataaattgaaattaattagtaaggggcgtggaaaatcccccagagaaatatccatacccacaattagagataaaatagccttgcgagccctttgtgactttttaaagttcaagtatgatgatgttctagattttcaattgccgcaagctatagtgagacaggtaaaaaacgatgtgctaagtggagagtataacgcttttataaaacttgatgtcgcgaatttttatccttcaattaagcatgataagttgattcggcgtttacgtgctcgtctacgagatgatcgaattattacactcattatcaatgcattaaaagctcctacagtgagcaagccaaataaaagcgatgccctaaacgaacgaggtgtaccgcaaggtctttcaatatctaacattttagctgctattttcttgtctaacttagataagcgcttaaaaagcaggagtgatataaaatattatcgttatgttgacgatattctcattttttgcaaaatcgaaaatgtgaaaatgatctctgaggatttagttcaaagcttcagaaagttaagtttaaaagtatatgacccgataaagcatcctgaaaagtcatcattaggatatttgtcgcaagaaaggtttaattaccttggctataatttctcttacgatgtagtatctgcaaggtcaggttctgttgaaaaattaagggaatcattacttgcaatatttacaggttataaacattctagattaaaaagtttagaatttcttgagtggaggcttaacttaagaattactggatgtattttccaaaacaaatcaaaaggttggatgtatttcttttcggaaattaatgatgaagtattgcttcatcagttagatgcttttttaaaaaatttatgcaaaagatttaatgctcaggtcaaactgaaatcttttgtgagaacatattaccaaatacaaaacaacaggcaagaaaccaaatacatacctaattttgataactataccttagaggaaaaaattcatgtattaagctattactttaaaaagaatattgaaaacttaactactagagagatcgagtatcactttaagaaaagaatatctaggcaagtaaaggatcttgaaacggatgttaaagatgcggggtattga

SEQ ID NO: 448847 - DNA, 1953 bp, Serratia marcescens
atgataacacttgagaatgctgttgaattagctaggccttgggctgttaagttatttgaagagaaaatacttccatttattctccataaaggagcagatgtatataggaaagaaaaaaacttgattaggctaaaatatcaaatgtcagattacttagccagaactagagctcaatgttcaataatcaattcgttggctttcccaaatatcttaaaaaaaatcagtgacatctatgtgccattaaccttatcgacattagactcaagggaagaaaatgaatacattgtacataggggtgatgccttccttagtcaattttcaaaggttttagtaattgataatgctgggatgggtaagtctaccctgatgaaaaaaatagttatggatactattgattattcggaaaaaataccaatttacatagagttaaggacacttacggatagtcctattgcggagcaaatcaatgctctcattgggttggaaagcactcttgatactagcacgttaaaaaaaataccatttatatacttttttgatggtgtcgacgaaataccgtttgatataaagaatgatttaataaagagaataaaggttttcagtgatgagatggttaatgctaaaataataataacatctagaccagatcagtcattattagagttgcattcttttaatagattcaaaataaagcctttggatatagaacaatcatatagtctgatacgattatatgatgctaattcttcaaagattggtaatagtcttatcctatctaataaattgattgctgaaataagaagcatgcgtgaaagggataatgcggcaattttggacttcttaacaacccctctatacgtctctcttttattttgttcatataagtataaacctgttataccaaggcgtaaggatttgttttatagtcaagtgtttgaagcgctttttgaaacacatgatcttagcaaggagactggttacgttaggagaaaagagtctgggttagatataacggattttagtattatattacggaggctagcattctggtgcttaaagaataatggacgcttagaatttagtagggctgaacttgagagtgtcttaaatgatataactaaaaagttgaaaggtgttagtgttaaaccaatacactttattaatgacttgatctacaccgtgccgctatttattaaggagggttctctataccggtggtcccataagtcacttatggagtatttttgtgctgaattcatctgcattgaggtaaaggataagagggatgagttgttaataaaaatatacgagagtaatagcgcggtgaaatttaaaaatataatcgagctttgttctgatattgattatgcttcttttagaaaagctattctacataagtgccttgtagaatattttgtgcactcaaagaacatgatgcatttcaattttctaagtgattgtgataaggaaatatgggcaagcataagtttcttctctgatttacgtctgctattaactccttatagtaatgccaatctaggtgactttgatttttttgatggaaagatatcttcacatacttcatttgagagtaacttcataggctttcgtgattttattactcatattacttacccggtctctttaaaaagcactgtttttgaaattcttagattgaaaagccctgagtgtttttttaaagaaaaagactactttaatagattgtctattgattcattgaaaatacctgagaacgtgattatctcaaccaaagatggattcgtgaaaacgtataataatgatgttattccagatattatcggtatactattacaatttagacatactctagtaattccagtaatacacaaactgtcagctatcaaagttttagacgacataactgcagacacatctaacggtgtgaatgatttgcttgatggttttgactaa

SEQ ID NO: 448848 - DNA, 993 bp, Serratia marcescens
atgaacgaaaaacttgttcgtctagttgttgattttcaagaaagtgtcctaagtgcactaaaactcatgcagcgttctggtatccgaatgccatctagtcgcaatgattggattgaatcaaagataccaacaatgggagagctagattgtggcgtgagatattataaacacggggctggatgtctggtaagtcttagtacgggggaagtggatttcgattttggtgaagagggggaaattggagggtttaatttatggtggctggctaagtttgcaggtgaaaatctaacacattatggctttgataatacagatgatattgatgaatgcttgaataatgcattagactcaggggagttgattcgtccagatcatggtctttactatatagctaatgttccatatatctacgctacagatatagacagccgagatcctgaggatacactccctagtcgcaacaaagatcctgttcttgttcttcaatcacattactttcaatcagctgatcttatgctggaaaattacaataaactcagtcgtaaatttcataagattggctgtttaagtcgacgagaagagactgatatgagtgtttatcttactacctggcttggtcttttaggggtggtttgtgagggagtgagaaaattaaatatgcgtatattattagggaatgaacgtcctgagagttttaagaaactgttaccaatttcagataatatagggcggttgatgaaagaacatgctgattctttacgaaaattcaggaataatgtttttcatcttcgtgaaaatactgaattggtacgtgatttctttgacaataaattagagcgtattcaatgggctcgtgagttgcatatgattcttgcagagtttttttcgcagtatagagttagttgtgaagtgcattatctcattaatggacgtagaggtgagtgcgatttaacaagaaataaaagagtgttttttaaaagaaaatcgcgttga

SEQ ID NO: 448849 - DNA, 1812 bp, Serratia marcescens
atgaaactgataaaacaagtggaaatcgcatattttcgatcgatttataaagatgatttaagcaactgctctggtaccaatgtaattttcgggagaaacgatgcaggcaaaagcaatgttttacgagctctaaatttattttttagaaatgaaacaaatccgaatcagacttttcggtttgaacgtgatttttcacatgctcgccgctctgaagcaacaccagataatgacattaggaagtttgtttatgtgaagatttggttcacaacccccgcaaactggagggcatcactaggaagctcattttgggttaagaaacagtggagtattacaaaccaagaagagccaaaattatactcatcaatatctcaacctaatctacagcaatacttgactaggttccttaacaaaatacaatttcattatatacctgcaataaaagatcgaaagatatttgaaggtcttcaggctgaaatttacaaagtcatttctgaacatgccgaattttctgggtcattggtaaatttcactgaagctctcaggaacagaacaggacagttaacccaaggactactaacctctcttggaataaatagttctgtttcaacacctagagacctaacagacttatttaaatctttggacttcgaggttacttcagaagagggtgactcgtacagtttgacgttacaacgcggtgacggcattcaagtcaggcatattccgcagattctttcatttatctcagacaatagttcgaaagaatatcacatatgggggtttgaggagcctgaaaactcactggaacttgcgaatgcaattgaggaagcaaaaacattcttagaacttggtaggtctagcaacaaacaaatattcttaactagccatagcccagcatttttttcacttaaagatgatggggttagtaaatatttcgtttcaaaaacgcaggagcatatagggcgtttgaactctgttataaaagaattatctaatgattcaacacaacttccaagcgaacttatgggtgagacaccgcatcttcctgttattagcaactaccttcaacaggcccatacagagatcgaaaagtctaaagcgttaagaactgcattggaagaagagttggcacagcataatacctcaatcgtttttgttgaaggtgctacagatgcggctgtgtttacaaaggcttgggagttatttattgggggtgacatgcctttcattttcgaatctggtggaggcacgactaaaatggaggctctcgccagtaatggaaagattatcagcacactagcacctggacgagctgtttttgcattagttgataatgataaggaaggccgtgagctctataaaaacaataaattaggagatggcggcatttggaagaaagacaattccaataaagtttactggtgtcgattgccgtttattaatgagctgcagcaattgatgattagatgtagagtagacaaagcattttggcctggatgtttggagaatatattcaccgcagagattaaacatagagcatctgaagcgggagttttgacaattacaaaaacgccgcatagtgaatttctaacagataactacggaaagattgttgattacataaacgaaagagatgatcatttccattaccacattctttgcctagaacctgaaagtaaaaatacatttgctgaatggatagtacaacaagcagatcgagaaccaggattgttagagcctttacgtaatacaataatgggacttcgggatatattgaactcgatttcagaagtagccgcacaacctgaataa

SEQ ID NO: 448850 - DNA, 354 bp, Serratia marcescens
atgaaaaaaccaataattgacttttccgagctggttaccatcgaagaccacctcaaggcgctggttgacgcagaggactcaatcagccatatcgagcaccagttatcggcatctatcgataatgactctgcctggcgccaccgagcgaatcatgcaatggcagcctggaaagcaagccggcgtcgtatcactgcacgcctcgctgttctgcgtcagcaggagaaggtaaggaatatggagatccaccagcaacacaacgattttctggtgaaagagctcatgacaatggtctcgccggagacattcctggaatgtgatcggcgcgccaagaagaaattggagggtatccagtga

SEQ ID NO: 448851 - DNA, 303 bp, Serratia marcescens
gtgaaaaagaccccgtatagcgcggcagccgaacaggctcggctttatgagcaagccaaacaattcgacttggcagctatcagttggaagcgagccgcgtcggtagcgagattgcgcgtgaaccaagaatgggccgccgttcgtgctgatgtctgccaaaaaattctgagcctcgccgcacgcctggagcagttgcaagaaaacgccagcgagcgagcaaaggaagccgcgaaaaccaaggccaagaagaagatggctaaggcgctcgaggcccatatcaagaccaccagcgaggaggcgtag

SEQ ID NO: 448852 - DNA, 201 bp, Serratia marcescens
atgaaggcatattttgacgccagtagccctgaacttgcgattctagttattgagccagagacgcatgaagagaaagcgatgttgagcttgtggcatcgattcaatatcgctgaacaggccgtgtatcacgaaatagtcaacagtggctctttggggtcgctacacctggaacttgccactctgtgtgacggtaaggactaa

SEQ ID NO: 448853 - DNA, 255 bp, Serratia marcescens
atgcaagagcaagttcgtgaagccattcagtgctgggcaagacgtccgacctggtacacttcccatccaagtgacgaaaaggaattgagaaaagccgtatctaacctgaaaaagctaccttttcatcccactgtcgctgagctggcagaagcgatcctattctttactgaaaaagcgccaacgctgcttggaacgccgtctgacatccctgcagagtcttacgccttcgcgcaaaaaatccataaaagactgtga

SEQ ID NO: 448854 - DNA, 279 bp, Serratia marcescens
atgaaaaaacgaacgttctccgacgggtatgggctgaagtatcgatattatattacgggtaaaacagtttggacaaaggtgcacgggtatctctttaccattcacaacttcattcttcgttcgaataagagaacccgattcaagctgattcagaacgtaaccttcagtattgcgttcaaaatctttgaactttgcaacttctgctttgagatgcattatctcttcctctcgcgagcggatcgcatcgccgagagaaaagcattcagattgaagggttag

SEQ ID NO: 448855 - DNA, 375 bp, Serratia marcescens
atgagtaagtctttaggaacagtcgtgcttgtgtttctgcttatcagcatagcgctggctcagctggcgttttacttccacagcaacgcagtaaaggccggtgagcaggttaagcagcaggaaaagacgctggcgcagcagcagtcactgataacagcattgcgcgagaacgccgcccggaataactcgctaatggcagaacagcaacagaaagaacagcagctgcgccagcagggcgaaacctatcagaggaaatatcgtgaagcaaccaagaatgacgagtgtagtcggcgcgttgctcctcccgctgttattggcctcctgcgcggaacggacaccgccgccgccggctccgatcgtgctgttaccccctga

SEQ ID NO: 448856 - DNA, 342 bp, Serratia marcescens
atgaaagaccagttagcccaacgcattcaagagttcatgaagcaatacgacgcagccgagtttagcgctgaagaatttggacgaacctatgcagccaagttttcgcacgcgctggctgaacaactcctgccgacattatcacctctgtcgaagacggttctgaccttgggacagattaaagagctggcacgcttcgcagaagaggaaggtcagctgtcctacaccattaccaccggcactattcccgcgtttgaggctgataatggtgagatggttcccgagtacagcggcctgatcgcgtattcggaatcggaagagcacggcgttctgcagttggcctaa

SEQ ID NO: 448857 - DNA, 495 bp, Serratia marcescens
atggataaagaattggagaacgtcaggctgaacctgaatcagctggcggcaattacgggatcacatcggcaaaccatcgcggcccgactgaaaaacgtcgagccagcccctggcagtaatgccaaattgaagctctacacgttgccggatgtgctggctgaactggtgaaatctgcgccggtggctgatgttgatgaaatgcagccgatggacaggaaagcctggtttcagtcagagcgggaacgcctcaaatttgagcaggagatcggcgagctgatccccgcagcagatgtgacccgtgaattttcaaatatggctaaagctatggtccaggtattggaaaccctgccggatattctggagcgtgactgtgctttggctccatccgcagtttctcgggtgcagtccattatcgatgacctgcgcgatcagatagcgctgaaggttatgagcgctgatacagagattgaggaggaaatgcccgaggaggagtaa

SEQ ID NO: 448858 - DNA, 2127 bp, Serratia marcescens
atggccgcacaggcatcagctgcagaaactcggcgaaatatggccggtattattcaggctccgcgccgcataccggttgctgaggctgttcaaaagtttatgcatgtgcctatgggcgcgggcaactctgttaagtgggacccgagcgtggcgccgtatgtgattgagccgatgaactgcctggcttcgcgtgaatacgatgcagttatctttgttggtcccgcccgaacgggtaaaacgatcggcctggtagatggctgggttgtctacaacatcgtttgtgatcctgccgatatgttggtggttcagatatcagaggaaaaggcgcgggagcattccaaaaaacgcttatcgcggacgtttcgtgttagccctgaagttgccaagcggttaagcccacgacgtaacgataataacgttcacgatcggacctttctggcgggtaactatctcaagctgggatggccctcagtcaatatcatgtcatcctccgattacaagtgcgtagcgctgactgactacgaccgtatgccggaagatattgatggcgagggtgatgggtttttactggcctcaaaacgaacgacaacgtttatgagtgcgggtatgaccttggtagaaagttccccagggcgagatatcagagattcaaaatggcgccggcgatcagagcatgaggcgccgccaactaccggtattctctctctgtttaatcgtggcgatcgccgtaaatggtattggccttgtccgcattgcggagagtattttcagccgattttggaagttatggccggctatcgtgaggtatccgacccggttaaagccagtgaggccgcttacatgagttgtcctcactgcaatcagacgatcaccgccgagcataagcgcgcgctgaatcaaaagggcgtttggttgcgtgaaggggagagtatcgactcagcaggcaatcggggcggtgagcctcgccgttcacgcatagcgtcgttttggatggaaggtccagcggcggcttaccagacatgggcgcagctcgtttacaaactgctgaccgccgagcaggattatgaggcaaccggcgcagaggaagcgctcaagacggtaataaataccgactgggggcgcccttatttgccgcgttcggcatcggaacaacgtcgcagtgaggaactgctggcgcgtgtcgaggattacggtaaacgcctggtgccgccaaaggtccggtttttattggctgccgtggatgtgcagggcggtaaaaaccgccgctttgtggttcaaatcatgggatatggcgagaacggggagcgctggctggttgaccgctacaacatcaagcagtctatgcggtgcgatgctgaaaccggtgaggcgttgccgattcatcctggtgcttacccggaggattggcagttgctgatcagcgatgtgctcgataaaacctatcggctgcaggagcaaccggataagcgaatgcccatattggcaatggcggtagacacgggcggtgaagacggtgttaccgacaatgcctataagttttggcgccagtgtcgccgtgatggggtgcataaacgtgtgtacctcatcaaaggggacagtaaccgccgccaaaaaaccatcacgaaaactcacccggacaataccgatcgcagtgatcgccgtgcctctgcgcgcggtgatgtgccggtgtatttgctgcaaaccgacgcgctgaaagatcaactaagcagctcgctgagccgtgaggctccgggcgctgggtatattcatttccctaattggctcggtgaatggttttttgacgagctgacgtatgaagaacgcggcgcagatggcaaatggcgaaagccgggcaagggcaataatgaggcttttgacctgttttgttatgcccacgccgtggccatgctccggcgttatgaacgtattaagtgggaccagccgccggcctgggctgagcctcaagatacaaatcccaatatttttaacgaagattcgcatcgggaggttgtggtggcgaaacgaaaacccaaagttgaggcgaaacctgccgcccaccaacaggtggccggtagcagctggctgagtggttcgggttccgggacgggtggaggtggttggctatga

SEQ ID NO: 448859 - DNA, 216 bp, Serratia marcescens
atgacccggcaagaaattcaggctcagcttgaactggttcgaaaatattacaacgactcattggacggcaaagccgtgtcgttcaccggagttaatggccgagcgattaccaatcatgatccggccgccatgcgtgcagagttggaatattgggagcggcgtatgcgtaaggcaagcaatcgcggcaatgggtataaactcgtcaatttcttgtag

SEQ ID NO: 448860 - DNA, 1524 bp, Serratia marcescens
atggggatattcgaaaaaacactcggtgcgctggcgcctgggtgggctttgtcacgcgcgcgaagccgataccagttaaaagcctatgaagcgacgaatccatcccgattgcataaggctaagcgggaggggcgggcagcagatacggctgtgtttgctgccggcgtgtcgttgcgagaacaggcccggtggctggatgaaaaccacgacattgtgatcggcatcctcgacaagctggaagagcgggtgatcggcgctaatgggatccaggtggagcctcaacccctgcgccatgatggcacactgcatgaagagtgcgcggagatcctggctaagcattggtcggagtggtctgtaaggcccgaggtgacgggaatgtttacccgggccgaaatggagcggctgatcttgcgctcggcgctgcgtgatggagaggtgtttactcaactggtgcgcggcccggtgtctgggctaacccatgcgaccagcgtaccgctttccctggagtgtctcgaagccgattttgtgccgatgaacctgaacagcctcaatagcgggaatgtcgtgcaggggatcgaggtgaatggctgggggcggccggtagcgttcaacgtttacaaggctcacccggccagctctctccgaatgtctaccgcaaccaaacgtgtgccggcagagaacatgctgcacctggccatgcgcaagcgtctccatcagttgcgtggcgtcagtctgttgcatggcgtcattacgcggctgtcagacatcaaggactatgaggagtccgagcgcgttgccgctcgtattgcggcctcgctggggttttatatcaagcgtggcgatgcgagtcagggagatgacggggaatactctgaaccagggacccatcgccatttcgatatcgcgcctggggtgatttatgacgacctgcgccctggtgaagatctgggcatggtggagtcaaatcggcccaatgtgcatttgtatgagttccgtaacggtcagttacgcgcggttgccggcgggactcgagggagctattcgagtattgcccgggactacaacggcagttattccagccagcgtcaggagctggtggaagggtttgaggggtattacgtcctgcaaaactggtttgtaggccaacaaagccggccggtttaccgggcgtgggtcgatatgctgcgcctgtccaaaatcaaacttcccgatgatgttgatatgtccacgctctataacgcgctctacctggggccggtgatgccgtggatcgacccggagaaggaggccaaagcctggaaagcgattgttcggggtggggctggaacagaggccgaatggatccgcgcgcggggtgagtcccctcaagagattaagcgccagcgcgtgcgcgaaattgagtttaaccgcaaaaatgggctggtgctggattctgacgccgccaatgactcaggagctaaagcgaatgaagaagacacaacccccgcagtggatggcgccaaaggcaagcctgagcgggattga

SEQ ID NO: 448861 - DNA, 2079 bp, Serratia marcescens
atgaagaagacacaacccccgcagtggatggcgccaaaggcaagcctgagcgggattgatgctgtaaataatgaaagttggtatgaaatccgggctgcagctgggcgccctggccgcgtagaaatttatctttacgaagagatcggccggtgggggatctctgcgcagtcatttatcaatgattgccgtgatgccggggtgtttgaggcgacaaacatcgagctgcatattcatagcccaggcggggatgttatgcatgggttcgccatttacaacacgatgcagcggctgacagggaccgtcgatatttatatcgatgggctggcggcgagcatggcgtcggtgattgcgtgtctgcctaatgccacggtgcatatgccttccaacgcctggatgatgatccataaaccgtggggcggtatggcgggggactcggatgaaatgcgggactatgccgacttcctggatcgcaatgaaaacatgatgctgaccgcgtacatgtccaaaacgggtctctcccgcgatgaaatcgccgcattgctgaaagctgaaacctggatggatggtgcggaggcggtggccaaaggcttcgccgacgtgcttgaagaaccactcgatgcagctgcatcgcttaatcaaaataaactgaaggattaccaaaatatgccacaagaagccaattctctctttggggcgcgcgctcaggcgacaacgcaggcggcgcaaaacaatgcgacacaggccacaacccaagccacgacacaagtgacgactcaagcggcgacgcagatcgacgtcaacgcgttggctgtgcagctgcagcaaaccctgcaggccaacaataccgcgcgtgttacggcggtgaaagctgtgtttgaggggttccctcatttggcggccctgtgctctgaatgcgttaacgacatgagttgtgatgcgggtacggcaaaagatcgccttctggcgaagctggcggaagggactacgccgagcggtggcaccggcgctcacatttatgccggcaatggtaacttggtcggcgatggtgttcgcgcgtcggtgatgagccgtgccggccatgcgcaggcagaaaaagacaacccttaccagggaatgacgttgcgcgagctggcacgggcatctttagccgatcgcggtatcggggtttccggtatgtcaggccaaacgatggttggcctggccttcacgcattccagctcggattttggcaacatcctgatggatgtggcgcacaaatcggcgctgttgggctgggaagaggcaaacgaaagtttcgatcgctggacgcgtaaaggcacgctgaccgacttcaaaacggcacatcgtgtgggcctgggagcgctcgacaagctgcgcgaggtacgcccgggggctgaatacaaatatgtcacagtcggcgataaaggggagcctatcgcgttggccacctacggcgaattgttcagtatcgatcgccagaccattatcaacgatgacatggatatgttaacccgtatcccgcagatgatgggcggcgccgcccgttataccgtcggcgatctggtgtgggcggtgctgaccactaacccggccatgagcgacaaaaaagcgctgttcagtgccgaacacaaaaacctggtcaatcagccgctgacgatcgacggtctggataaagcgcgtcaggcgatgctgctgcagactaatggcaagcgcaagctcaatatccgccctgcctacatgctgacgccgatagcgctggaatccaaagcgaatcagctgattaaatcggtcagtgtgccgggcgccgacgcaaacagcggtatcagcaacccaattcaaaactttgtcgaagtgatcggagaggctcggctggatgataatagcgctgatgcctggtatctgacggccgcgcagggtaaggacacggtcgaggtggcatatcttgatggcatcgatacgccttatctggagcaacaacagggattcactatcgacggggccgctttcaaggtacgcatcgatgccggtgttgcgccgctcgattatcgcggcctggtgaagtctaccggcaaagcctga

SEQ ID NO: 448862 - DNA, 357 bp, Serratia marcescens
atggcaacgaatttacagcaagacggcacaacattggattggcacaacaccacagccgaaaccgtcctttcggggcaacctgtcgcggtggggggcctggtcggcgttgctcataacgacattcccgccggtttgtggggtgtgttgcatatggtgggcgtctttgttctgccgaaactggccgatgagacatggaacgccggcgataagctgtatttggatgctaccggcgcgctgacggctaaagctgatgatggcggcgccaaggcgaaggccgtcgcctctccgctggccggtagcgcctggagtgatggcgaagcagggcaagaatcggccccggtgcgtttggggttctaa

SEQ ID NO: 448863 - DNA, 1131 bp, Serratia marcescens
atgccgaataaatttaaaacgttactccctccgaatgccattccggcagagcgcgcgcttgagcaggcgacaattgaagaagtgcgctctatccctgacctgatccggatagtgaaaaacccggcgttatgtcccgttgagctgctgccgtggctggcgtgggagtacagcgtggacacctggaacacggattggacggaggaggagaaacgggcggctattgcccgtgctgcctatatccatcggcacagaggtacgcgggcggcgatcgaaatgtcgttgtcctcctcgccgttcgccagcgatgttatcgagtggttcgaaaagacgccacggggggagccttacacgttctcccttgaggtgacgcaggacgaccggccgatcacgttgggcgatgtgcaggacctgaaaagcgcggtgatgaaaggtaagaatttgcgctcctggttcgatgtgacatttaaggggaacctggacggcaaggcgattttagccggctacatgattgcgtcggagtctatccagattttgcagccgtttgaatttatcggtgtgcatatcaatggctggatgacgtcaaattttaccccgacgacatcatttaagggagcaacctataccctttcggtgcaaggcaattttggcctgataacctggcgggcggatggcccggctacggtggcatctgacggaacggtaaccattacggggccggggaaagtgtcaatcattgcaactgacgccaaaggccgcgaactggtacacacgattaatccgcgtctttatctcataccaacccccgagcgcatgtatcaggccgatatgcctgcttttctggcgtcgaacaacggccgctggccacatgaaaaagagttatcgctaaagagcaacgaatttgctccgcgaggtaatggtgcgctgtggaacgagtggggaaacatggtggtgtatggatggctgcaagataacacagaccggcatttgtatgtcacagacaccccgggaagaccaaatccagagggtacccggcgggccattattttgcagtatggccgagggaaaaacctggggctgaccaacccggacagatattgcacggccgccgtaattgaactggagagtgaataa

SEQ ID NO: 448864 - DNA, 1386 bp, Serratia marcescens
atggcatcaggattaattttaaccgccgtcggggccgaggcgatagaggcggcctatcaggccggtgaggtggtcactatcccgatcgtcgcgttcggtgatggtggcggggcttctgtgacccctgacccagccgtaaccaaactggtcaataaatttggggatgtgccctttacgcagggcgaatcgggtagcggcatgattgccggccaggcggtgattaacgcccgtgagcacccgggtaaagtagtccgggagtttgggctgatgagtagcgccggcgttctgattgcctatggcgcctatccagacacctacttaccggaacaaaacgactcgatcgtaaaagagctggtggtgaattttgccatgccgttggtacacgctgaaagcgtggtgctcgagattgatcccaatatttcggtgctgaccatcgaggaggccgacggccgttatctgcagataaaaaacgccctgtcggaaattgccgttgccgggccggttgctcaggcgctcgctcgggggtatttggacattcgcagtaagaccgagtcggatgagcattttttgcttaaagcgggtgataccgccactgggcaaatcattgcccctacgtttgccagcacacccgaggcaatgccgcccggcgcgggttcttatgctgaccagctgagcacccaggctccatttttccagcctaactggcagtggtcggtgaattctggcggtatttttgtacccgttgccaagggaacgtcaacccgcaaggggcaaggctacccggctgcagtcagctacggctacctgatgcccgcaaataacgaacacgcgcaccctacgatccatgttcgcggtgatagtgatgtggattgtgcctgggacttcaacccgtacaacggcaacattaaaagtaaagcgggtacgtttgccacgcaggagtgggtcaacaacgcggtgcacaccaacgagctgcatgtcggtgaggctcagatggtgcaggacggcaatatttgggggactcgctggaacccaaacggcggctggttatgggacgccattctggctcaaattcagaacgttggcgatatgtcggtcgatggtaatcagtggtgggcgcgcctcaatctgaacggtggggcgctgattatgcagggaggctttttcgaaggccagcgggctgacgatggcgtgatagaacgcgttcccctgaatatttctgttcccaaccgcttgttgggcgtctggacgatagttcgaaactatgcgcagggatttgagacgacctggagtgcgcaggtgcaggatctggctggcgcgcgcgatgcgtttaattggttgcatggcacaaaagagcgaatgatttactggatagcggtggggcattaa

SEQ ID NO: 448865 - DNA, 438 bp, Serratia marcescens
atggggaaatacaaatttagcgccacaacaaccgggttttaccctgttggcctgcttgagcactatgagaatgcggggacgttgccggctgacctggttgacgttgccgacgatgtttacatcgaattcactggccctattccagagggaaaagtgcgtggcagcaacaaaaaagggcatccggtatgggctccggctccacaaccgacgccggagcaactgcgccgacaggcggcttatcaaaaacaacaggggcttgccgaggcggaagcgatcatcgtgccgctggcgcgtgccgtaaaactcaatatggccaccgatgaggaaaaggtaaagctcgaagcctgggagcgctacagcgtgttgttgagtcgctttaacccggatgatacccccacacgcaaaccgccagaaaaaccgatttcccccctcccttga

SEQ ID NO: 448866 - DNA, 396 bp, Serratia marcescens
atgactattgccaaagtgttatcatccttgctaataattcccgcatttgttttcgcggggcaaaatatatcacccgtatctcaaaatcatgtgacagttacagttgatgaaatgcatcgtgcctatgaaaacaatgagatatcaacccaagaaaagacagatgcagtgtttttatctgtaaaaggcaagatagcaaagataaaattatcctttgataatgaaatggttgtcatcatgaacgcagaaaaatactcgcgtgcctatttctacctcgaagagatagaaagagatgctgccaagaaactaaggaaaggtatgaccaccacagttttttgtcgagattataaatttattgcaaactcaataaatggttacggctgcacatttaaaaaatga

SEQ ID NO: 448867 - DNA, 1005 bp, Serratia marcescens
gtgttcacaataaaaaatgccagcactacaattaatgctatttacggaaagaaaaataaaaatcttgattttgagtacatgtattcattcttgactaggaaaacgtcttatttaacaagggagtttatccgagctgatggtgttgataaatcaaagattacagaaacatacatagagtctctatcatggctaatcgcaataagccaatatcttgagatagaccttgaatcttcttttttcagtaaatttccagggatttgtccttattgcataagctcgccatgcctttgttcgcaaacacatagaaagcctgagttcacttcaaatgcaagaagaataaaagaagagttatccaataaaaaagatgccatatatagatttggtggatcacaagtttatactccagatatgatcaatgatatatatccatcaaataaaaatatatttaatatatttggtgggttctatcactcatctagacttttcgaagaactaggtgagcttcatgaggcatatgccaagctcaaagaggatagattctatagtaaaactaatttaaatgatgagttggctgatattctcgcctggatgttgtcattgtgggggataatgttcaaagatacagatttaggcgatgctatcgataattattatattaaagggtgtccgtcatgtaatagcagtgaatgcatatgtgatgattactctggtagaatagtctccacatcaagcagaaatgaagctttagaaaaaataaaatctttaataaggaaggaagtggatagcactagtgataatgaagttgatataattctaaagctagagtcttcaatactatctattgaagatgctatttcatcgggaagtgagtcggatgccagaagaacagtgtcggaagttgatagtgccttagcatttatattccagaaagctccggcgtcgtctccgacctccaatcagaaagaactagactgcgaactaaataattctagaaaacttatttaa

SEQ ID NO: 448868 - DNA, 747 bp, Serratia marcescens
atgaacatttcagacatccctcctagtatatatgtaatgtcaggtagtttatcgatagcattaataacgtgcctgtcggcatatgcgtcagtagtttataataaagagaataaaatttcagattttcgacaggagtgggctagtgagttaagagatgagtcatcgcaactaatttctaagctgaatcagttgtcgataatatcagccgcttttatggataaagatacaaaaaagttagctttaaatggcattgttgaaaataaatatgaacatattttaatggtggttaaattaaaagcggaaatcaaagagttaacttcaaaaataaggattaggcttagccctgaaaaactaaaaactgaaggctctattgagagctttattaataaaaaaatgaagggagttgaagatcttattaatgattttgctctcgattgtgaacagagtaaaataacaaccattggtgatgaaataaacaatctagaagagaagttgggcgaacttatcaaggagaattggagggtggtaaaggcgggagagcctgcatataaattcgcaaagaaacttactttatgggcatctattattatgtttgtgtttatagtgtttgcagcaattgttatcgcagtatcattaataaacacacaagatttatccaataagaatgcagaaaagattaaatcctctacattagaaatagttatatcaaatgcaccatgttatttaccattgcagtgttgtgaatag

SEQ ID NO: 448869 - DNA, 294 bp, Serratia marcescens
  misc_feature (274)..(283): n is a, c, g, or t
atgaaaatttcacttgtagttcccgtattcaacgaggaagaagcaattcctcttttctatcagtctgtccgtaagttcaagccttttgagcatatagacgttgagatcgttttcgtaaacgatggcagctcagatacgacagaaaaaataatttcttcgctgactatcaatgaccccaaggttaaagcagtgaattttacccggaatttcggaaaagagcccgcactgtttgctggcttggaagccgctaccggagatgccattatcccaattnnnnnnnnnnatcccaattga

SEQ ID NO: 448870 - DNA, 822 bp, Serratia marcescens
atgaaatacataataaataaattcgttgtttttgattcaaatgaactgacgcttcacctttatgagaacagccaggtcgttacccgactgactaaacccgccactcgtttgctgttggagctaatacaaaacaacagaatcagcatggccagagatgatttatttgaaaaggtatggctgacgtatggattcgcggcttccaacgccggattgaataattacattagcgagttacgcaaggccttctctttattgggctgcaatcacgaaatcattatcaccatccctaagttaggtttcaggctggaggcagagattgacctgtttgattccaatatcgtgcctagcggattagcggccgttgcagatgaaaaagattcttctgaaaataatgaggtacttctggacaccacgccggaagaacactctattcctgaacgatccccttcattcttacgccagaaagtcattatcttttcagccgtgattatccttggcactataattgctctagtagccctaaagatgacaaatcagggcggctatccttaccagaagatcgccaccctcgaccaatgtgaaatttatgggctggggaaactgcggcacagtctcaataatgagttaactgtacgcataagtgggatcctaaagcacgaagaggtggattgtaagaatatccccagcgatgtcttctatctggaggatcgaatcaataaaaactccgttcatgccgacctggtatccatttgcagcaaaaccggtggccaccattacgatacgtgcttcaatatcaaaagccagagaaacacatcaaaatga

SEQ ID NO: 448871 - DNA, 495 bp, Serratia marcescens
atgaaggcgacgtttagagggtttttacccggctgcggattagcggtgctggcgttgttcgggccgcaggcacaggcggttaccaccatcaaggtgacggtgaccatcgtctcgccgccgccctgtgtgattaacaacaacaacctgattgaagtgagtttcggcagtgacgtgatgaccaaccgtatcgacggcagctacaagaagcagccggtggtgtactcggtggagtgcaaaaacgcgccgaataacgcgatgaaactgcaaatccagggcaccggcgcaggctttgacggcgaggtgctgcaaaccaacaaggacgaactgggggtggcgctactgcgtaatggtaaccggcagcctatcaacagttgggtgaactttacctatccgaatctgccgacgctggaggcggtgccggtgaaacaggccggcgcgaccctgagcggcggcgagttttctgccggggcgaccatgaaggtggaataccagtga

SEQ ID NO: 448872 - DNA, 822 bp, Serratia marcescens
atgtcaagaaacacaacaattccgggactcctggtcctactggctgcgtggtctgcctcctcactgcccggaaccgcgtcggggtattcgttgtcgaatcatcccgaccagctgcacccaaacccagccttggccgagtttagagttgactacccggaacccgggttagccctcttcgaggacgtcgtattgctggaccatgacacttgggctgggtttggggggcaatgcaaggggcaggcgtcatgcatccgtatcttcgtgccctctgacgggggtgtgcggttgttcgaaaaggaagggcccgggtgtgtgccttccgaaggagacgggccgctgggtgatgctgcgttaatcgctattgtcgatgggtttatacgagacgggattatacccgaagtcaagaatcgcttcgtcgaaatgccggggggtgttcatatcaatctccgcatctgtgataatccgtcgtacttccttatgtaccgggcggatggtagtcctgtcactccaataatatgcgtattggatgccccagccgtcgtggaccttggacggatagccactgactcgactcggaacgtaagatcgtcggtccggtgcagtgggtcggggggggctgatatccgcgtgtcggtgcttggggcggcgtcaatcagtcccgttcctggtcttgaactgtgggctactgctccctcgggcatcctgcacgtgacaagcggggggggccctgggtatgttgatctgaccgtgggtgcaaaggtagataaccctgagccaggcacgtattccggaacgtttgtttatgcgatagagtatctgtga

SEQ ID NO: 448873 - DNA, 204 bp, Serratia marcescens
atgcgagtctatcccgaggggccgacaactgtgtctcccgtgccagggttgacgatttggattgtcgggcccacggccggcgtattggggcgacccaacggggccacgccggtgacactgcgcttcggtatggatacgcctgcgccctccgtggttgccggcacctaccgggcgagtttcgtctatattgtggagccgtggtga

SEQ ID NO: 448874 - DNA, 582 bp, Serratia marcescens
atgccaactctgttagagcatgatcccgcagccctatgtcgccaccggcatgcgcccaatctcgttttggacagtgtgccccgttcagcaacggtatcggtatctgctgcggataactattttgcccgaggtttgcaggcggtggctgccgatattgtgcgtgtatcaggcagagcgctgagcgtgcctgtgcgggtgttctatcggcgtggcatggtttgcgttgtgatggaaagaagggcatcgcaaataaaaggagtcgtgtcgccctggcgggtgctgcccgtgtgggcgtcactgggacaggcacgccatgtgttatcggcgttgctggaaataccagaaatatccgcaactcagaacgtccctaatgagccgcacactagcccggtggcgtttacatggcgggaacagcgggtgttgcagctgctgcgcaaagggcgctcgcaaactgaagcgggcatcatattgggcctcagcgtaaaaacggtaaatgcttataaacaacgagccttgcgcaagctggggctgaagaataaccgacagctgcaatattggttgctggagaatttatcagaataa

SEQ ID NO: 448875 - DNA, 222 bp, Serratia marcescens
gtggtggagaacaataccgcattagatatgggcaacggcacctattttagcatccgggaaaaaggcgtgaaggttgccttcgaaacccccgtgaagttttgggacaatgtgcaaagcggcaatcaatttcaggccacttatcaaaccgagctcaacgtaaaaaatacgctgcagatggggacagcgagtaaaagcatcatactgaacgtcaactctcgctag

SEQ ID NO: 448876 - DNA, 957 bp, Serratia marcescens
ttggggctggcgctgccgctcaatttgctggtctgtagcggcgccgctctgttgatggcggtatgttggggggccgtatcgctgcgttgcatggtgataacccccctgtgccgtacaatgttgctcgtcggcctgctgctggcgctgccgatgttttttgctcaggctgagtggcgaaacgccgccatctggcggttggccggcatagtggcaggcatgatgttctatttcacctggctgcaggtgagcatgaccgcgcggcaacgttatgccgtgctgtatctgatcctttttgcggcaacggcgcaggcgatggctgtcttattgcaactgtttgctttatcgaacgtgcaaggtgcctttggtattcttcaacagcccgatttgctggccagcttgttcgccaccgggctggcgctaatggcgttttggctgccgggattccgcctgccgcaggcccgtgccgaaggttggcgccgccgggctctggccgcgatgttggcgtcgctctcaatggcgctggaatgggggcagtccggcagcggttggttggcgggaggagccgtgttgggggactttggcctgctcctgcggcggcgttatccgcggggtgttgtcacggtttcctcatgggtgagctgctccgcgctggtggcggtagtgatattgcttataagcaatgagtccggaggtatgctgcgttatgtcagttatgagggcgtcgacgacgatcgcagcagccagctggcgatgattatcaaaaagccgctgttcaactggggctatggcaggtttgaatacggcttccagcctgttcgtgaagatcaaactccaccgaggagagcggccgagattgttcgtcattccccaggcgagccggtcctgtggagagtagaaggcggtgtggcggcgtggcggcgtggctgggcgtggggatgctggcgtgggcaggtttga

SEQ ID NO: 448877 - DNA, 348 bp, Serratia marcescens
atggacaataagctgagcgaactgagcaatccagcatggattgttggacagcaggaaattgctgacttcatgcgtggtgatgaggcgctccttgtgcgcggctatgaccctgaaagcactgagccagcattgagaatgtactcgcaagagtacgtctccgccctgctggcgcgcatcgccgagctggaagccaagctggctacgccggtgcggttgcctgacatacgccaatcatcttccggcgacagatatcaatggtctgatggtgcacataactaccgcctggatgttatctcaatgcttcttggtgctggtctcactgtagctgtagagggggatgatgcatga

SEQ ID NO: 448878 - DNA, 207 bp, Serratia marcescens
atgaaaaaaattgtcatcgggatcaccattctggtgctggtcggatgcgacaaaatcgccatccctaccggcgtaaactcggccaatgccttgacccgttacgtggatagcgagaatagcgtgatttgttaccaggcgatgtaccaatccagcactgctatcagctgcgtacaactggatcgtgaggtgcgtgatgccagcaaatga

SEQ ID NO: 448879 - DNA, 201 bp, Serratia marcescens
atgcgcaaatctgatgccgttgagtatttcggcagcccgacaaagttagcgaaagctgctggtgtttctttgcctgcggtgtcccgctggggtgaggtcattccagaacgccgcgccgcgcgtctggctcgtcttacgggcgacgagttgaagtacgacccagccatgtatcaagaccatcagcaaacggatgtagcttaa

SEQ ID NO: 448880 - DNA, 918 bp, Serratia marcescens
atgacagagtttcatgacgttcatctggagctgctggttgaagcctattcacttccgcaggcagaacggctcgcgtacatcgatttgtgtatacgatatcttggcagcatatccagggccgaaattatggctgagttcaaggttgcacaggctgcagcctcaaaagatcttgctttataccgagaactcaagccgggcaactctagtattgatacggcaaccaaaaggacggttattgcgcatgagagctatactcctttggtacagattagtgttcacactgcgctgaatctgatccagtatggtttctcacgttcggagctgatgcaaaaacgtccgatgctgccgattgatgagatagacccgctttatctacctgagcgtttgaaagaagaacaggtctatgttgtcactagggcaatcaagggccgctatgctatcaaatgctcatatggctcaaaaagtggcgagcatggcgaacgaatactatttccatcagcattatttgtagatcgaaaaaactggtactttagagcgtatgatcgaaatgattcggatccaaaccagagcgggtttaagaactttaagttatcgaggatttttgacgttgggcaagaggaatcgttactgcctacggttgcagagttgaccgatagagaatggaatgaagaggttacctttatcattgcattcaaaaaggatcttcgacctgagattgtcgataaaatctctcgcgagttctcgatcagcggtaatgtgcattctgttacatgtcgcgctgctttggcctgctatgtaaagaccaactggaaaatagatttgacaggaaataacaatagtggttggttgtattttgatgtactgaataaagaagctttacaggaagtcaaatgtctggagaagttgtttgaagaatag

SEQ ID NO: 448881 - DNA, 516 bp, Serratia marcescens
atggaaaaagtaacggaccagtattcacctgaaattgcacgacataagctcagtgcttatttttcaggtaatctcatcatgcttgatgtgacaaaacgtttgcaaaaatcaagcctgtgcgtatttgcagccttatgtgatggtaaaacgatcacaaccacagggtatgaggttgatgccgattttagcgttaaacgagcctctgcagtcattcactctttaaagctgaaaaatctccctatctcaacgaattccgtttcaacgggctcagatgtaggtggtaccaccaatcaggcggtttttttcatcagtaaagatgatcttcactccctaaagtccgagccggagaaaattatgaggaaatgcgcaaaactacacacacaacataaacgatcacatgcacaaagggagattgctcgtctatgtaaagagtttggcaaggaggcaattcttaaattattaaaccaggctgctgtcagcactaagatgcctcctgatggtatgagtgcaggttaa

SEQ ID NO: 448882 - DNA, 972 bp, Serratia marcescens
atggctaccctcgttttttcctattcccatgcggatgaggccttgcgcaacgagctcgaaacacatctatcaccattgaaacgcatgggcactatcagtgcatggcatgaccgacgtattgctcccgggcaggaatttgagcatgaaatagaccgttatttcgccgaggccaatatcattcttctgctggtcagcagcgactttattgcatcggattattgttggaatattgaaattaagaatgcaatggcccgacatgaacgaggagaagcaattgtgatcccggtgattttgcgcaactgtgcctggcacaatcttccttttggtaagctactggccgcaaccaaagacgggaaaccgattactcaatttcccagtcatgacgacgggtttgtgcaggttgttgatgcggtatcaaaggctgctgcccgcattgataccagcaattcaatccaagagcttcaccttccaaccccatcagtagcccaactctcatcgtcggtaaatacagttttgcagccccggtccggcaacctctcacttccaaaaaaattcagcgatctcgataaagaccgggccagtcgtgaagggtttgagtatgtcgcgcgctattttgaaaactctctcttggagcttaaacaacgcaacccgggtattgaggtggaatttcaggcggtagacgccggtgcgttcacctgtgctatttatttacacggaacccgaacgggacaatgtgggatctggcgtggtgacagactctatggggtaggctctgtctgcttcagccatgacaacatggtgagaaacagctacaacgaaagtctgagtctggcagataacggccagactctgggttttcgtgcaatgatggggttcaccggaaacggtcataacacattgctgacgaatgaaggaatggcagagcatctgtgggatatgttcttcaaatctgtaaaacaacgcatgtcctga

SEQ ID NO: 448883 - DNA, 324 bp, Serratia marcescens
atgatacaactcaatctggcaaaagtactgttgataggcaatgagcttactggctatgtccgctacgagatcttctcgaaggaaggtgaagaccccgcttatccggaaaaaatcatcgtttatcgtgagggaaatatcggtgaacatggtgagcgcggctggatcaagactgacgatgttatcagtctggaacatctgggatttcaacccggagggggattccagagagctataacctaccacatgcgtccagggcgggatttgtgttcggcaacggctgaatgccggcagcactttcaggaaaagttttgttctgaaagataa

SEQ ID NO: 448884 - DNA, 1152 bp, Serratia marcescens
atgtattctcctgatgagctgcgtaaaaagcttgcccggcagtgggataacgcaaagcttcgggttgaacgtttacttccacccggtcagtggccactatgcctgtctattggtaaaccttcacctaaaatattcgcagagcaggttcagtatgttttacaacacgtgcagctatggcggcaagtcactgttgggcgtgtggaatgggaagaggtgagctatcgagcgagcgacggaccgatatcaatgccactgcgttgggttttgaatagcccatctgactgggttaatgccgctatggatccggcgttgagtcgggagtttcgcttgctggagggaattattgagcaggttgatcccatttttcatccgctgttgattagccatcgttctctttggcggtacaaagatccgctggacatcatcagcgcagccaggctggcctgccgattagagcctggttgtgcaaaaagactgccgttaaggttgctttccgggcaaggcgtggatactaaatttatcgaggataatatttcgttattaacccggctgctggatgtgcgttttgctggcgaagccagcgagcagggattagtggcttttcttgatgcttttgatgaggccagccactgggttttagttgtgccgttatcacccggcttgcttccgtttaaaaaatgtcgagtgacgacggcagaactggctgaaacgacattgcctgcgtcgcgtatactggtgattgaaaatgagcagtgtttgcatcaacttccagcgttatctgacactatcgcgattttaggttgcggccttgacgtgcaatggttatccagctctgttctggatgaaaaacgcgttgcctattggggagatatggatagctgggggatgctgatgctggcgagagccaggtgttgttgtccgactcttgatgctctgctcatgaatcgtgagttgtttgagcaatatgccagcaatagtgccgttcctgaaccggtaaaagcgcaggagacagcacccgatggtttgattaacggagaggcggatttttatcgctacctaaccaagttgcccaatggccggctagaacaagagtttttacccgccaacattgtccaggcagcacttgttgaatggcgtttaaatgttgattag

SEQ ID NO: 448885 - DNA, 3288 bp, Serratia marcescens
atgaatcaggcggttcgtctggctgggaaggaatctttcattcttacccacatcgagttgttcaactggggcggttttcatggattgcatcaggccacaatccatcatgaagggactgccgttatcggcccaaccgggagcggaaaaaccacgctggtcgatgccttaatgacgctactctgcgccaatcctcgctacaatctggcctcaaccggcgggcatgaaagcgacagggatcttatctcctatgtgcgcggcgtatccggcccgggtgatggaagcgaaggccaatcgcatattgctagaccgggtaaaacagtgactggcattgccgctacgctggcgtgtgaagggcaacaggttcgcctgggggcactgttgtggtttgattccaccagttccagcgtgacggatatgaaaaggctttggcttttcagcgataaccccgggcagacgctggagcattggctgaacctttaccatgacggcggcacacgtttgctgcggcaaatggaaaaggaagtgaccggcatctggacatacccgaataaaaagcagtacctggcgcgcctgcgggatttcttcgaagtgggggaaaacgcgtttacgctgttaaatcgggcagcagggttaaaacagctcaacagtattgatgagatttttcgcgagctggtgctggacgatcactctgctttcgatcgcgcgacggaagtggccaatagttttgatggcctgacagaaattcatcaggagctggaaacggcgcgcaaacagcagcaatctttacaacctgtcgccctgagttgggataagtaccaaaagcaagaacgacaacttgcagacaggcaggcgctggaatcgctgttgcccatctggtttgcacagcaggccggtcagctctggcgggaaaagattagcctccttaatgctgagctaggtgaggcgcaaaccagcgaagaacagatccagtcacggcttgagttgcaaaaaaaggtggttagcgactgtatgcagcgctatctccaggtcggcggcgccaatattgatgaactgaacgagcgaatcaaggactggcaaaaaacgctcggcagtcgagagacccaggcacgccagtatctacagttgacccgcaatctgggattgccgcctgacctgagccaaccacagctggaggcgaatcagcatgaagccgaggcccgatgtgagcagtttgctgctgatataaagttgaaacaggaagaggtgtatcaaaaaggtgcgctcagccatcgcatgtccgaaggacttcgggagcgggaaactgaacgcgccgagatcgcgcgtcgtccggattctaaccttcccgcacattatcaggcattccgcagcgatctggcaaaagcgctgaacgtagatgagtctgaactgcctttcgtcgctgaactgatacaggttaaagcggaagagacgcaatggcgtggcgcgattgagcgtgccattgggagtaaccggctgcgtattcttgtttcgcctgaatctgcaccggaagcgctgcgctggataaatcagcgcaacaaccgtctgcacgtgcggctactggaggtcaaattaccgcactctcccgcctggttcttcgatgatggttttacccgcaagctgttgtggaaagagcatccgtggcgagaggccgtcaaagcattacttgccgaaagcgacaggcattgtgttgacagtcctgcacaattgcgtgacacgcctcatgccatgacggtgcagggattaatgtctggtaagcagcgtttttatgataagcaggatcagaaacgcctcgatgaagactggctgactggattcgataaccgcgatcgcctgaacttccttgccaaagaaattgccacgcttcaggagcaggttaaaactgcaaacgaggcatttgagtttgcgaaaggtgaagtggggcttttgcaaaatcaggtcatttcattccagaaaatacaacaaatcgatttcgatagcatcgatgttcccggcgcaaagagccaactggaagtgctcaaggagcggctggcgaatctgatccgcccggattctgacgccagcgtagcgaaagcaaaacttgatgaggctcaaacggttgaatctgagctcgataagcagctcagagccgccaataaagtcactaacgggctggatacagcactcacctcagcccgagccgcagaacgtaaggctcagcaaaccgcgcaacaaggtatgcaggatgaagagcgagagttgtgcgcgtcacattttccgatggtgactctggtgcaactgcccgacattcgcgatctggagcgtcaacatgagcggggaattcagcaagaaattgagggcgttaaaagtgaactgcatcgactgaacattgagctgaccaaacgtatgtcggaggccaaacgcatggataccggggcgctcgttgaggcaggggctgatttggacgatgttcctgtctatttacagcgtttgcaggaactgaccgaagaagccctgccggaaaagctcaaccgcttccttgattatctgaatcgttcatctgacgacggcgtaacgcaactgctcagccatatcgatcatgaggtgctggtgattgaagcgcggctcagtgaactcaatgaaaccatgttcagggtcgattttcagccgggccgctatctgcgtctggatacgaaaaaagttgtccatgaaagcctgcgcacgcttgaaaaggcgcagcgtcagctaaatgccgcccggtttgttgatgataacggcgagagccattataaggctttgcaagtgctggtggcgcaattgcgggatgcctgtgaacgaaaccgtaccttgggagcgaaagcgctactggatccccgttttcgtctggagttcgccgtatcggtgatggatcgccagagcaaaagcgtgattgagtcacgtacaggctcacagggcggtagcggaggagaaaaggagattatcgcttcttacgtattgaccgcatcacttagctatgcgctttgtcctgcggggagccgctatccgcttttcggcaccattatccttgatgaagccttctcccgcagctctcatgccgtggcgggcaggatcattgccgcgcttagagaatttggtttacatgcagtatttatcacccctaataaggaaatgcgcttgctgcgtgatcatacccggtcggcaattgtcgtccaccggcgcggtcaggattcaaatatggcttcgctgagctgggaagagcttgaacaacactcccagcgacgggagaatgcgtag

SEQ ID NO: 448886 - DNA, 750 bp, Serratia marcescens
atggcgggcttttttgacaaacttattaaccggagcgttgccgatagtgcaggcagcgaaccagaaacatcggacgaagaagttaccgatgcgtcggttgaagaaaatgcggtcagtaacgaaacgcgaacgctgaaaaaaatacgcgaagcgactcaggaattgctcaaatacggcctgctggaagaggtcagtaaacccaatctgtaccgcgtcgtactgacccatcctgaagaggttactcgcattctggaacctctcgatctggatatcggcatcgatgagatccgcggcctgctgtatgtcaaagtcaggcttgatgaaacgccggagcaggatgaatggtctcaccctctggtgagacggcaacggcttaacctggaacaatcattattagttgccatactgcgccagcattttgttgcctgggagcaggaacgtggaacgggtgccagccaggcgcagattgctatcgacgatctccttcctcaactccagatttaccttggcgatccggggagtgaatcaaaagaacgcacccggttgcttaccttgctggatcaattaaaggggcatggactggttacatcgccggatgcgcatgagcggatcgtgattcgtccgattattgctcatcttgccgacccgatgaatcttcaggcattactcgcatggctacgcgaacacattgcccggccaatctccccagatgattcgtcagaaaaggaaaatagtgaggaggacgcatga

SEQ ID NO: 448887 - DNA, 1497 bp, Serratia marcescens
atggaagaaaaaacaaagctacgtacggaatattatatttcaataagaaaccaacaccctgcttggatacttcttgccactcgccgcgctccgctggtattgagttgcctgaaaatgctgtttgaaaaatcacatgatggtatcccccttgaggaaacgattcagtctcttaccggcattcttgtcgaacacgtgagtcaggaacagtatgacattaatcaggacaatccctctcttcaggccagccgtgaactgcgggaatggattaaacgccgtttaattgtcgaacgagatgggcgtatcttcgccactgatgcgcttgagcttgcgatcacgtttgccgagtcgctggataatcgtttcatgacttctacagcctcccgtttgtccaccgtacagcgagaaattgaaaatctggaaacccggcttaatcctaatccggcaaaccgggtttcaactttacgtcgtcgtattgccgagctggaacgtgaattacaggaggcagaggccgggcatattgaagtgctggaaacgcatcaggctgttgaacatattcgagaggtcttcaatttagcttccagcctgcgggctgactttcgtcgtgttgaagactcctggcgcgaggccgaccgcacgcttcggcaatccattattggtgagcagtatcatcgcggcgatatagtagaacgcctgctcaacgatcaggaggcgctgcttaatacgacggaaggaagagtcttcgacagttttcagcaacagctccgtcaatcttctgaacttaaagcgatgagtgaacgattacgtgtgatccttagccatccttctgcttccgatgcactcaaccgtctacagcgtcacgatttgcgctggctggttaaacgcctggtagatgaatcgcaaaccgtactccaggctcgcgcccgtagtgagcgcgatgtccgcggttttatgaaaaccgggcttgctgctgaacatcaccgtgttggtcatctgcttaacgaatttctgaatcaggcgttaaaactcgactggcagcgccagaaggttcgcaaacaagaggttccgcttcctgccgttggtgtagcggtaacgggcatccccgctattgaacgtttacgttttaaagagatggatgatgaagcggaacaaacgttagatctcagtaatcatgcggcagatttaacgcagattggtgatgatttctgggatgctttcaatggcctcgatcgtgaggcgttgattcagcagacgttgcagctgctggcaaaagaaaatcgccctgttggtctggctgaactggcgtcgctgttgcctccggctcacgatctcgaaacattcgccgtatggattggcatggcgagagaagcaggtattgaactcattgattcacagcgtgaatttgctgaacttagtgatggtgaggggcgctgctggcgatttaatttgcccactaccggtctggaaattcaggcattgatggatatcgattgggagtaa

SEQ ID NO: 448888 - DNA, 1818 bp, Serratia marcescens
atgatcgacgaacttcaagccagcaaatcttgttatttctaccgccaaaaaactccgatcacgattagcgcgatcaatggcttattccgagttataagaagagcacaaatttcaccatcgaacaatcttttctcttttactaggcaacagcatggagcgtcaatatggtctgctttatgcttccagttcgacaagacaccgcctttcttgcctggtacagaaaatgtaatcgatcgggtaacaggatatttgctgatcgttgaatatcgtgattatgtagcaattttcaaatcccagatagaggtccctgctgattttaccaaacggcatttgcagcgtatcagtgcccaggatgttgaccgcgggctgactagtaaggactcggtattcgcccgtgttaggttgaggcatatgacgttgtcccgttttgcattgcgtggcaagacgcttgaaggtgagaacctccagaacaacgtaggtatggcatcctctgctcgatttgccccgctgggatatagcttcactgaggcggacgaacatttctcaactacaccgagaactgggcggatctccctgcgatcggatcgcgctggctatctggagcttgttgagtatgccagtgatattattgaccggctacaccctcgtccaggacggccatcttcctctcctttcctggcagccttcgcgagaccattggaattatcagatctaactgctagtcctactcaatttgcggttgatactgccattctggggcaggctatctttgatgataaaatcatccgatttgtcaaacgtgatagaggtggatatagagagctgccaaaagctgagatcgaacccatactctctcagctaactgatatcttgctggtagccagaaacgctaatggtaagttgaggttgacacagacgacaacagggcttgaggtcggtgagatagcgataaataaaacacgaatcgctttgaaacgttttacgctacctctgctcactgatgtatatgttgaggatacccagtacgcaattggggcggacaatgatcgtaccccgcttaagcaatttatcgataaggaggatacgttcatcgtattgttcgatcagccacgatttgcctatctggatggaagtctctatcaggatgattccttagttaatggtggtactcaatttttgggttatctctttggtaattcagagctggaaacagtaacagatgagaaaggtacttttaccactgcacatcgtacgtttgatggcgactccacgtttggtgcggtactttcaactgttgcccccgaggatgatgtcatcgtttgtgacgatcttggcgatgaatgggctgattttattggttttcgaacggatccggcttcccctagagttaccttctatcatgcaaaacatggtgagttgactctcggtgctggcgcgtttcacgtttcggtaagccaggctatcaagaacttaggtaacctcacattgccagcttccacgatgggtaaaaagttcgttagatgggggcggctttacaccaacaatagggtacggacaggtatttctcgcacatgccgagggactcctgctgactccagggctgcggtagaattctgcaggaatgccccccatactttcaaacgagtggccatcgtgacatcatcactaagcaagactgcggttgagcaaacgtttcaggatattgccgcaggaggtacagccagtccctattttgtccaactgtattggttgctgtcgtcattttttgctgcgtgcactgaagttggagctttcgggtgcgtgatatgtcaaagataa

SEQ ID NO: 448889 - DNA, 639 bp, Serratia marcescens
atgcaaatagatgataatattaccattgctcagttaaaaactattggtgctgtcgataaaaatacgaggcattttctggggcaactgttgtgttctacctatgatgattttttatgtcttttatacaaagatatgactgagtgtatagagttcatggaagaagaccctaaagtcaggcggaatgacggggaagaccgtctgacaacagatatcattcatcacttcagggctaaggggtatcaggcgagtcatgatgagatgatcggtggacactctgatgttgtcatcagatacagggattatatgtggctgggtgaggctaagatccattccggttatgattatctgatgaagggatttaatcagctgtgcacgcgttactcatccggcacgaataacaactgtcatggtggaatgttaatttatattaagaacaataatgcagcagccgtggtatctgaatggagcctgcgtcttaactgtgcaggactcgatggttattcattttctgattgtgaggaccgacaggggctaagtttctactcacaacatatacacgctcgctccggattaccttataaagtcaaacacatgggggtggtcttgggattcgatccgcaggataagaagtcatcgtga

SEQ ID NO: 448890 - DNA, 237 bp, Serratia marcescens
atggtcatcaatgttgcacgctatttttctggcgacgctttaccgattattaatgtttgctttgaatttatcgagaatgattttatagagcaggtgagtcttgaagagtttcggcagacgcaatcagaaaatagatattatcatccggaaacgggcgagttagttaaagattttgaagcgaaaatatttatgtatttctcactttcaacattcgggtgggaagtggaatgcaaatag

SEQ ID NO: 448891 - DNA, 1080 bp, Serratia marcescens
atgaatgcgtgtgactatttgttgttgatgagagaaaaaggggtgtctttcagggttgttcagcatggactgaaatttttaaatctttcatccgcgagaggctgggagcctttattagcgcactatgctgaaataaatagcgctgacattgatgattcgataaaaacactatatttatctcagctttattttggacagcggacggtgtatttcagtcaggtgtctgaagatgacaatgatgtcttcgctactaatgttgctcatgtgtgtgatgtgatgagagaattatattattcatcagcacattcacatctatcgctttaccgggggcgttatcccctgcctgtcagccaggatgaattacattccctaccgctgaccaatccgtgcccggtttttcttgacgaaacgagtgagaggttacggcttatctttacctatccgagggcatataaggaaagagtggccattgacatctccgatgttgatttttcaggcgatgaagtcagccaatttcgggggtttgacgagattatcggcattaaatccggcagggcacagtcttttgactgcatccagctggataaaatgacgggggtggtgcagttccagattgatcacagccgtcatattttaaaagatgaaatggacaacgccgcacgccgttaccgtcatatgctcatggatggataccgggaaatgacgggcgtttctgctccagtggcgaggataaatatccattctaaaattgatgaactgtatggcagtgatgatggcagagtttataatcttgaacatgccaccgcgacaggctctgtcaaaactgaaaaaatgagaaaacgtgaagatgatctcagggatgaacaattccatcaggctgggctggatgctattgacggcgaaactaataatttttgcattactaaacaatgggatggtgaatgtggaagctgtctgaaactcaccatcgatggtggtgtttcattagcggcacgctcggatcctcaggtggattatgctacactggaaggctgtatcacagataatgacttcaggttattgatttcaaaggtcctgtaa

SEQ ID NO: 448892 - DNA, 690 bp, Serratia marcescens
atgaaaagagagacccccgggacacgccggctgacttgccggtcgctgacggctctgtgtgccctgctgtcgccggttatcttcagcgccggcgcgcaggcggctccttccacggtggtgaccgtcaccgtgacggtcgtggcgccgccgccgtgcaccatcaacgacgacaagccgatagaggtgaacttcggggaagtgatgaccacccgggtggacggcgagaactacctgatgccggtgaactatagcctgagctgcagcggtgccacctcgaacgccatgaagctgcagattaagggcacgggggccgcctttgacggcaacgtgctgcgcaccgacaaaacgggcctgggtatcgccctgctgcgggacggcaacaaactgccgctcaacggctggacgaacttcagctacccggacaagccggcgctgtgggcggtcccggtgaaacagagcggcgtcaccctcagtggcggggaatttacggccggcgccaccctgagcgtggcgtacggcgacaggcgcgatgcctcctcccccgccgctgttgttgatgggcgagaaaacgctgcatgcggacggggaacgcagaccaatgccggtggcatgttgtcggagcgctatcagcgcctggccctgcaggggccctgggtgatgaggccggtaactggctttcgtccggcctga

SEQ ID NO: 448893 - DNA, 633 bp, Serratia marcescens
atgacaagagaacacgagaataaccgggcctattggttaagtgaactgcgttattacggcacgctgggcgcgctggccatgatggtgccgctgacgctgggcagcatgctgctgcttctgccgccctcgcacgcggcggacaactgggaggtggagggggccaacggcgccctgaccgaaagcgcctgccgactggagatgaccagcgcgcgacaggatattgcgctgggcgatatcggtaccggccgcttgcagaccgtgggggcccgcggcaccccggtgaagtttgagctgcgactgacggactgcctgcgcagtccggcgggcagcaaggatgtgcgctccggcggcacgacctgggctgacaaccagccggcagtgacggtgagttttcgcgccgtccgtgacatgaacaatccgctgctggtgaaggcgcagggcgtgtccgggctgggtctgagtctggaggacgcgtggggtcaggatgtccggctgggcagccggggcaggccgttgctgctgacaccagggaacaacaccctgacctacacggttacgccggagcgtaccccagctgcgttgagcgccgggcattatcaggcggcggtggattttcacctgagctatgagtga

SEQ ID NO: 448894 - DNA, 570 bp, Serratia marcescens
atgaatcatgtcataaacgaaaatcaccccgcggataagtcgatacagcgtattttgttaacgcatcaggatgcgctgtttgaacgctattcaaaactactaatgttccgtgtggattttgcctatcggcgagaaagcttgtcatttcactttgctgacgaaaatcaactggctgcccaaatgacttacctaatgcagcagtgttctgatatcccgggaatagtcgggtatgcatgggtgatggaatacacggaacggcatcgcttccatgtccatgccgcattttatatcgatggacaacgccaccggaagatctggttgttctgggaacagataaaacatctctgggagaggatcacggaacttgaaggatatgcacattggtgtgagcccaagtcctgttatcgggttcggggcgagagagttgtggcggcgtctgatgtgcgaggccgcagagggatgcaatacattctgagctatatggggaaacaggagcaacgtacggcgcggcccatttaccgggtgagtactgttccggcccctgtcagaagagggcgacctcgccgctga

SEQ ID NO: 448895 - DNA, 858 bp, Serratia marcescens
ttgtcactttcatcgcctaaaattgccttgctgcctacccatgattgggatgaatgcgattttttcatcgactatttagaccggaaaaatattataagaaaaaacagactcgcgaattatgatggcccggcagatatctgccgctatatcaataactcgctgcagaaacacttcagggacacccctgaaaaaattaatggcgtggtctctgacatgctttatgcactcaacgaaaaaatcccgtctgaggaagaggtcgcctggctgaagaacgacaagcgcgcctgtttttggttatggacagaactcaacaatatcattcttgacgtattgccacttgagaaagttaaagaaatcattccacacagccatcaggaacggcttcgagaggttttaaaaaaacataaagtattccacctgaaagatgaacatcagcgttggggggaactggttagccagtggagtgaaataaaagaagatggttcactggtgggccatctttcgccagatgatgaggatattgtttcgtatgcatggaaatacttatgctcccatgggcatgacatcgcgcagaaatacgccccgttagacaatgaggagcgttacttttccatcctgaattacatggatttttacctcaccaatcctctggaaaaagaattgctccttagaaaaataaagccggcaattcatcagtacagttacagagtgaaaaaacaagacaccagcgtcagtaagaaattttatctaaaaaatgaaaatgcgggcaagctaaaagcattgttgaataaaaacagaatgaccctggatgaatactttaatgtactcattgagcaggagtctgacaaactgacgtaa

SEQ ID NO: 448896 - DNA, 369 bp, Serratia marcescens
atgcgaacagtacccgcgccaccctcacgggcggcccaaacatgtccgtcccccatcactgtctggcaatccttgctcgcctacctgctggcgcagcactacggcctgacgctcaacgacaccacattcagcgaggatgccgtgatacaagcccatcttgatgacggtatctccctcgcggatgcgctgaataccatggtggaaaaatttgatctggtgcgcattgaccgcaggggcttcaccggtcaggcgcaaccgccccttgtgaccgtcatcgacatcctgcgcgcccgccgggcctgcggcctgatgacgcgagccggttaccgggaggtcacacgtgccattcagggaggcaagcaaccatga

SEQ ID NO: 448897 - DNA, 837 bp, Serratia marcescens
atgcagactgaacctgaagtattaaccggccacacagacgtgatttgctctaccagcattgaacgtatcgtcacagggcgcaacgccgcgctggcgcaaatagaagcgttaatccaccagcttgatgttatctcaacgctgaccaacagcatcggtagtggcatcgccaaagactgggggatgcggccggggcatcgctacgactgttggtttacagaaaaaccggaaaccgccatgaaagccattacccgcagtattgatcgcgatatatggagagacctcatgaataaatcgggaatgctgagcctgatggatgcacaggctcgcgctgaatggcacaacagcttggaaaaagaagatatccccgccatcaacgaaagcaatatcctcagtacgtttgaacaactccatcagagcaaagaggaggtatttgaacgtggggtgataaacgttttcagaaatctgagctggaattacaagtcgaacttaccttgtaagtttgggaagaaaatcatcgtggaaggcgtcgtaaaacacgacagatggggatttggtctgaactgggggtcgcagcgcgacaggttaacggaccttgaacgcatgctgatgctcctcgatgggcagcccatacccgacaaccgtgaggatgtcgcccatcgccttggtgaccatatccatgagaacagacacggtaaccgctacgaggacgagatgtttgcgattaagtactttcagaaggggtcggcacatatcatattcaaacggcccgagctggttgataagctgaacgatatcatcgtcaggcatcttccctcagcgctaccctcccgcatctga

SEQ ID NO: 448898 - DNA, 1065 bp, Serratia marcescens
atgaatagaaacatagggctcgacatccttagaatacttgcttgctttatggttgttgggatacatacaacccccatccatataaataacggacaggaatataacagcgcaaacttattaatgcaggcattctatagggctgggctgccaattttctttcttttgtcaggctttttcttgataaataaaaaatggaatgtgaaatcctacatttactcaataattaaaataacaataccattcataatcatttcactagctcattacatatatctatacgacatttcacccaatgtgttattggattacataaaaacgatcacaaccagcattaccggagtgtccgttcatttctggtttgtatatgttattttggctctctatattttctcgccaatcataacagtaattctatcttgtataaatgaaaaaaaatcaatcactgcattattaatcacattgataatatacgctttcatttctaattaccccgcgctttcttttgcactcaagactccagagtataatttcaagccagggccttttgtgtgggttgtatatttcatattcggtggcctattagctaggtgttcgtctatgataaacatatatacaccaattgttgtttcgcttgttggcctaatcgcaacctacaagttgtcatccatagattttattgattttaggccgtacgatataaacgccacaatgcttgcttattcatcagcaattttaatcaccttcttaaagctaggtgaaaaaatacagtcaattagcaataacataaaaaacgcgataatatcaataagcgataaaacttacatcgtttacctggttcacatcatggttcttgatgcaataacaacccatctaccagaatttatagaggggttaagtaaatcaaatctttacatattattaacgctaacctgctttgtgtttagtttggttatttccttcctaataacaccaatagcaaatagaattacatggctagtaagccacatgcttaatgttatccctacaaataaaattaatagccaattgccatccagtatgcggtga

SEQ ID NO: 448899 - DNA, 228 bp, Serratia marcescens
atgagcaaagaaacaggtggtcaggcgttcccgtttacgcctcatattgaatcaaagaatacggaagaattagggatgtcattgcgtgattacttcgctgcaaaagcgatgcaggggattttatccaacccatcgatgattgactcttttgataaaagttcttttgactgggttgcagaaagagcaaaccagctggctgacgccatgcttaaagcccgcaacaactaa

SEQ ID NO: 448900 - DNA, 375 bp, Serratia marcescens
atgtctggaaaaataacatctgcgctggtgatcctgctggcgctggcagccgttgtcggcgctggcgcctggctgtccgcgcggcactaccagccaacgattgaccggctcaacgaggcgctgacgcaatgccgcgataccggcaagcaacaggaatctacgatcgccagccagaacgctggcattgaggcgctgcagcgtaaacaggaagagatggaaaccaaggccaaggcagcgcagggaaaagcccgcagggaggcgcagggagactatgagagagcaaacgcggttatggcagagcgaaccaccggcgaagagtgcgcgggggcgtctgctgcgtttgacgcagagctgcgccgggagcgtgcccaatga

SEQ ID NO: 448901 - DNA, 240 bp, Serratia marcescens
atgactcgcatgaccagttttgacagactggcgaagactctcgggtacgaattggttcgaggttctagcgtcgctattcgtagcgttgtggtttctgaagtaaaggaaactgagatctatggctatggcatgccgagtttgagaaaaatgacttttaccgaagcttgtaacctatctcgtaatttgtcagagtctcgtgaagagagactaatgagtgccagcttcgatgacccagaataa

SEQ ID NO: 448902 - DNA, 516 bp, Serratia marcescens
atgacccagaataaattttcaggaagtatatactctgagtctaaatttaaaaatgaatctggactcaaggggtttaaagattcgtttatttaccactggcgctttggtcatcatcctgactttggtaaagacaccctatttcacaagcccccctgcgtttacccaattcacttaagaaaagtacatgtaaacattggattgtacaccaatagttacggaataagcggtactgctgaatgctggaatgattggtcaaccggtagatatgggcctgggggacatgagaagcaaataccaacatcagatgcttatctgatatatgccgtttgtgaaaaaagaaatgcaggtgttttggacttctggtttcctcctgcacacaaagaagcggagtttgaatcgtctgttcagtttgttgctgagttagctgataaattttacgaaaaaatattatctaaacctatggctagagaccagaacccttggcaccaagattttcttataaaaaagcccgcctag

SEQ ID NO: 448903 - DNA, 837 bp, Serratia marcescens
atggtcagcagttcgcacctgccggccgacgtgatacccaatgacaaggaacacgatatgactgcattgaatttagcaaacaacgctggcgctgtcactatgtccagcctggaaatttctacgctggttggaagtcgccatgacagtgttaagcgcacgattgaacggctcgcagattcaggggcaatcactttaccaccaacggtggaaaagcctaccacagggcgcccgacgacgatttacgttttcgaaggtgagaaaggaaaacgagatagcattgttgtagtagcccaactctcaccggagtttactgcaaaattggtagaccgttggcaggagctggagcgtgtattaagcaggccgacatttgacgccgctgctgcgttgaatgatccggagttcttgcgtaccactttgctgacctatagcgaaaaggtcattgcgctggagagcaccaacaaggagctggcgagtcaggtcgagcacatggagaacctcttcaaggacggaatgacgccaacgcaattctgcaagatgctgaacggtgttaacgtcatgcaggtatgccggtatctcgaaggccgcaagtggctatacaacgagagcaagacggggacacgctggcgcaccgggagctacgcgcgcgacaaatatctgaccgaacatcagagcagggtgagcgtgcacggtggcgaagagttcgtgaagttcacaccggtgctactgcataaaggcgccgtccggatctatcagctctatctacgtggccaactgccaatgaagaacaattggaatggcgtgttcacccatgacaaagaactaaaaggagcagcgtga

SEQ ID NO: 448904 - DNA, 2760 bp, Serratia marcescens
atgccaattgtcccaacttatcagcgtcagtcgcagtctcaagttgcgccagttaacacgcaagatttgcggatccctaaagacaacgcttttacagcgttggcagatgtaggcgccaatgccctggatgtttatcagcagcagcgtgagcgtgaggatctggcattcgcgcaagatgccatgttgaagtatcagcaagatgctgatgacctgatcaataacccacagaccggactgatcactaagcagggtgctaatgctattgggcagggtgagcaggtggccgcacaactaagccagatggctagcgctgcctttgactcgattccaaacggcccggttaaagagcgattcagaaatcagttccaaatagctggccagcctctggctaatcgcgctcggcaatacgaagtagggcaacgacagcagtttgaggcaaatcagcagactggaatgctgtctaatctgcaaaggcagggcagtgataattatgacaatcaggagattatcggtagttcgttaactcttggtggcaatcagatagtttcttacggacaggcccacgggcaaagcccggaagagattgaagccaactggaatgaatatcgtgaagggctggggcgtggagttctccgtgcgcgtgtagcttctggaaagttccaacaataccttgatcgtaatggggagccgtcagaccttggtggggtgtctcgcttctctgctcatggcaattcgtctgctgctcgcgggctgcgtaataataaccctggaaacattgaggctagtgacaaaaacccatgggaaggacagataggcagcgatgggcgctttgccaagtttgaaacacctgaacatgggattcgcgcgctgggcaagaaccttcttacttattaccagaaacacggattagatactgttggcgaaatcattacccgctgggcgcccccaaaagagaacaaaactgatgcttatattaaagccatttgtgatcagctcggcgttgctgcagaccagcaaatagatgttaccaacccgcgcaccttggcagcgctttgtgccggcattgtgaatcatgagaacggcagccaaccttataccgacgaacaaattggtgccggcgtcagtgccgctatcggcatcacggctctacaaagttcaaagcgacgcactggtgatctggcattcgatatttcaagtcctgccgatcaagcatcctaccttagccagatgcaggcaatgcagaatcagtatcgtgcacagcaatctgatgcgcttgaccaacaggtgaaaaatatttattcagcaactgacgaaggcttgcagccagattacgtcccaagccagcaggcttttatcaattcggcaaagacccctgaggttggactgcgtaagtggcaggatatgcaggatcagttgcgctatggcgctgcgattgccgctgctaaaaacatgactcctggtgcgcgtgatgacctgcttcagcaattgcggccaacggatccgaatgcatctaattttgcagccaaccagcagcgctgggacaaaatgcaggcgaaatttaagcagctcgatgccgaatgggagaagaaccaggggagcgcgcgattctcttcatccttgcaaaataatttcccccttgacccgaacgacaaaaacaatcaggcagcagctgatcattactttgatcaaaaggttgcccccggtttcaatatcaacaacgcagacagcttgaaacaggttgcagagataacgactaaatccggcatgctgccgacgcagatcaagacgatgctcaccgctggggcaacatcgcgcgatcctgctgtcgttgttcctatggccaagatgtacgggcagatttttgacaacaatccggcggcggccacaggtgttgataaaggcgcgatggcgttttactcgaaagtttatgcctatgaccgcgccggcgtgcctgcagagaaagcagtcgatatggcctacaaccaggtctatcagcaggacgatcgcttgaagcagatgattagccaacaggtaagggataaagactacatcaaggctagagccaccgcagcgcaggataatatcaatagtctttcgccgtcgtggaccagcttcggggcgccaagcatcagcgccgcagggcaggctaatcagttgtaccaacgcgactaccagaccatttacgatgcgaactttgcacagaccggcggcgatgctgatcaggccaaggcaatgactaacgccatgattaaaaaggtgtgggcggtatctaccatcaacggcaaagaagaggtgatgaagtatgcccctgaagccgtttatggtgtgactaacggttcaggtaactggatcaaaggccagtgggaggaagagaaaaaagctttgaaaagttccgcgtttggcggcacgcgagatgataccgatttggttttggttcccgatgctgttacgccacgcgatcagagttacagcgttatggtgcgccagaagaacgcagaaggctatgacgatgttcgcccgtattacggcgaaaatggtatgccgttgcgattcaggcctgagcaaaaaacctcgccgatgtacaagcaaactatggatatccagcaacagagggttgatgcggcgcgcgctgctcggcaggaagaaaaacagccggcattcacaagccagaaaggatatacaccgcctgattttactaaaccatttggcgccggcattgccaaccaactgccgagcaacatcaccgcaggaggtcagtaa

SEQ ID NO: 448905 - DNA, 762 bp, Serratia marcescens
gtggtgctgggggcgtcgttgatgctgtccgggaccgccatgggcagtcaacagaccggggcgatagccagtggtcagcaaaaaatcgatacggcgaccaagaccttctccgtcaagctcggggcgacgcgtctgatttacaacccggagtcggcgggcgctacgctggccattatcaacccgcagggctatccgattttggtgcagtccaaggtgtacgcggaagacaagcaagggaatgcgccttttgtggtgacaccaccgttgttccgtctggacggcaatcagcagagccgggtgcgcgtggtgcgcactggcggcacgtttgcaccggatcgtgaaaccctctattggatgtgcgtcaccggcgtgccgccgaaagcggatgacgtctgggggcaggacaaggacggcaagtcacaggcgccgaaagtggccacgctggaggtgcaattgcgcatcaacagctgcatcaaactgatggtgcgcccgtcctcgttgaaaggcgatccggcggatgtggccacgtccatgacctggacgcgtcaaggcaacaagctcaaggccagcaacccaacgccgttcttcatgaacctgaaggaactcagcgtgggcggtaaaaaggttgaggggctggaatacgttccaccaaaaggtgaacgcaccttcacgctgcccgccggtgcatccggcaaagtgcagtggaaggttattacggactacggcggcgacagccgcgaatatcaggctgcgctgcagtaa

SEQ ID NO: 448906 - DNA, 2520 bp, Serratia marcescens
atgaactattcacgcctggcgttggctatcggtctggtttgcctgtccggtcagggttatgcacgcgaatacagttttgatgcggcgctgctggatggagccggtaaggacgtggatgtttccctgttcgaacaggggggacagttgcccggtacctataccgtggacatcctgctgaacggcgaacgggttgatgcgcgagatgtggtgttcagccagggaaaagaccgtgctggcaagccggtgctcgtgccctgcctgagtgtcgaccaactgtcacgttatggggtgaaggtcgaggatttccctgcgctgtcgcgtgggaacgatgccggtgtcgataaatccaccggctgcgccgacctgagcgccattgcgcaggccaatgcagagttcaacttcaacgcccaggcgctcaatctgatgatcccccaggcgtctttgcgtccccgcctgcagggcattgctcccgaacagctgtgggacgacggtgtaccggcgctgttgctgaactggcaggcgaacaccagccgcacggagttgaagggcaacggacaaaagcaaagcaacaacgcgtcctatgtccagatacagccgggtgccaacctgggggcgtggcgcttgcgtaacgccaccacctggcaaaagaccgggcaggacagcgggaagtggcaaacggtttatacctatgccgaacgtggactgtatggcatgaaaagccggctgactctcggggagcgcagcacgccgggtgacatctttgacagcgtgccatttcgtggggtgatgctcaactcggacgagagcatggtaccgagcgggctttattcctatgcgccggtggtgcgagggattgcgcggactcaggcgcgggttgaggtgaagcagaacggttacaccctgtatagcggcctggtggcgccgggaccctttgcattgaccgatttgacgccgaccggctccggtggcgacctggaagtgacggtgcatgagaccgacggcagcaatcaggtctttaccgtgccctatcagacgccggcaatcgcactgcgcgaagggtatttgcagtacagcctgatggcgggacagtaccgtccggcggacggtgccgtggacaagaaaatggtctaccaggctacggccatgtatggcttgccgtggaacctgacggcctataccggggcgcaggtggccgatcactaccaggcggggtcactgggtctgggggtgtcgctgggtgactggggtgccttctcgctggatgcgaccgagacacgtggtcagcgccgcgacgaagagacggagaaagggcggacctggcgtgcgcgttacagcaagcaggtggtctcaaccaataccacctttacgttggcgagttaccagtacgcctccaccgggtacagcacgctgtccgatgttctggacacctggcgtgataacccgaatggcgcgtatgtcagcagtaacgaccgtcgtcgcacccggaccgcgctgacggtgagccaggcactgggggattacggttacctgaccctgacgggggcgcgtgatacttactggaatcggccggggcacaacaacacctttaacgccggttacagtatcgggcttgatggcatgacggtgtcgctgaactggtcggaaaacaagaataccgacagcgccggtaatcagcgtaatgaccgcgtggcaagtgtgtggctcagcgtgccgctggagcgctggttgggcggcgggactaacgcaacttaccgctggacgacgccgtcgaacagcagcgacagccacgaggttgggcttaatggtcgcgccttcaaccggcagttgtactgggatgtgcgccagcgctatcgccctgacgcaaccaataacgaccgcgacaacagcgcacttcgcatgacctggtatgggggttacggtcaggtagggggcagttacagccacagccgcaatatgacccagatgggggcggatgccgccggtgggatcgtcgcgcaccctggcgggatcaccttcgggcaaccgctgggcgaaacggtggcactggtcgaagcgccaggcgcttcaggcgtgtcggtcggtggctggccgggggtgcgaacggactggcggggttacaccacgctggcgtacctgacgccgtaccaggagaaccgggtcacccttaacccggcggaattgccgccggatgcggaaatcacccagaccgacaccaaggtggtgccgacccagggtgcggtcatcccggcgaagttcgccacccgtatcggcggccgcgcattgatgacgctgacccgcacggacggctcgccggtgccgtatggcgcgctggcaaaactggatgggcagggcgtaggggccggcgtggtcggtgacgacggacaggtttacctgacgggattgcctgaccagggccagatgaccgtgaagtgggcaggtgcacaatgccgggtgacctataccttgccggcgaagaaagggcaggcaggtatctatgaaatgcgtaacgcgtgtcggtaa

SEQ ID NO: 448907 - DNA, 450 bp, Serratia marcescens
atggcgatgacaaccgaaatgaagcgctgcctgatggcaaccctgctggctgccgccgcgttatggagtgggcgtagcctggcggaggcaccgcagctgacgctgcaggtccggtcgggacagaccgcgggccaacaatctgacggtgcgctgctggcgcaggggaccgtgacataccccggcgggcacaacggttttcgggtatggagcgatgcaacgctcaatggcgcgccgcagcgctacaccctgaacggacagcgcgacagcagacaccgcatgaacgtgcgtctggtcgggcgggactggcaacccgacgcggaacgcggccagggtattgtgctgcgcaccggggactacagtgctgcgttcagtgtggaggtggacggcaatcaaacgctgccggtcgacagctggccactgcaattgcaagcggtggtgctgctgccctga

SEQ ID NO: 448908 - DNA, 501 bp, Serratia marcescens
atggaaatcatcaaaaacattaaacgcgtatctgccatcgccattctggttgccggcaccgcaggcgtggctcaggctgcaccgatttcagcggtagcgaccggtaccggcgacgtggtgttccaggaaaccggcaccgccaccatcgtggtgaccccggagtctaacttgactgccggccagcacaacaacaccctgattgcacgtgcaacggcaaccgccaccggtggtcagattgcttaccgctggacgccggatgccagcgtcgtgcgtaacgacgacaaccagcagcgcaccatctccggtaaggctgatgcgtccaacaagctggacgtggtgtcttctgctgcggcaacccagtctccagcttatcctgcgtggtacgcagcgaacagcggcgccagcaccctggatatcaccgtgcgtactgcgccggtcgctcaggctgttgctgctgacacctatgtggtgtccatggatgctgcggtgtgggctgagtaa

SEQ ID NO: 448909 - DNA, 528 bp, Serratia marcescens
atgatagggagtgggcgaataatgaagattgttcgtaaaagcatgctggcactgctgctggcagcaagcgtgccgatgaccggccaggctgcagggattgtgtcggtcgtggcaacggccagtgatgacattgtggtattgagcaatgcagaagccacggtaacggcgaccggacggacggatttgatttcagggagttattccgacggttttgttgtgggtacttggggtgctgaggttacggctggggcggttgcatatcgattgaatcgaggagtaaatgccgcagttactacgtacggcccgcgtgttgggcttgctgttaatagttcggattcgactaagtctgtatcgattatcatcccttctccctctagcgctggaactgagataacagataacggatggagggtggctcagcaaggtaatagcagcattactgacgggacgattgcgctattcggtgccagcactcttactcctggttcctaccctgtcggtattgatgttgccgcttacgcctactaa

SEQ ID NO: 448910 - DNA, 516 bp, Serratia marcescens
atgaaacaactaaaaattatcgccagtgcaggtgcactgcttctggtgtcattacaggctcatgctggtgatattatttcgtctgtcgccagtgcaagcactgaatttaaagtggtgaattcagctgaggctgaagtgacggttagtgcacggaaggatttagcggcgggaagcattgcgggtgcttttgtgcttggcaattggtcggctagtgttactgcaggcactctggcatatcgtgttaatcgaagtgtcaatcccgccccgaatggggcaacttcaaatacttataatgcccacggaatgagttctaattccaatgatgccaccaagaaaatccattttcaacttacagacggcacaagcggcaccaaaagtgatatcgatggctggaaggttatgcctcagggggttgtgagcacatcttcgggtgcagaaattaaaactgtatcaaatcaagttctcctggctgggcgttaccctattgcaattgacgtagctgcttacgccttctga

SEQ ID NO: 448911 - DNA, 531 bp, Serratia marcescens
atgaagcgggaggtgcgtgtgtataaaaataatgctgtcgtgattgtggtggcgttgcttctcccgcttgtcgggagtgtaaatgtgtacgccgaaaccctcagcgagccggccatcaccagcgaaaacatcacgctggcggccaccggtgaggctacggtgcaggtgacggcgcacaagcagattgcgacatcgacctatgctggcagtcatctgctgggctcctggtctgccagcgtcacgtcgggcacggtggcctggcgcctcaatccgaccacggtgcagcagcatgccacgcccgattatgtgaatgggtttgtcacaagtagcaccgacaacaccaaacaaatcgaggtctccctgacgacggacagtgcttgcgcggccagtcagttgtcaggtgagtggcgacactgcccggaaggcgtgacggcggtaagtggcactatcaccaccgtcgccggcaaaaaccagcttctggcgcccggcacatatccggtggccatcgatgcggcggtctggtcgttctga

SEQ ID NO: 448912 - DNA, 522 bp, Serratia marcescens
gtggcaaattccacgcggatattcctggtgggaaccctttttgcgcccgttttattatcagggtgtgcatggttaggtgagcgcgaagagtcatcatcagtctctgcacagccatcaacgaaggcgcctgacacgtcggcggcaatggcggggcaccctgcaggcgtatcaaatgatacgcctgcgcgcgccggcattccgctgcaaaaaccgacgttgttgcaaccggcggcagcacaggtacctgccacgaatgactccgcctttgcgcagtgccggcgcgagctgagttcgttgcggctgattgcgccggcggcttacacccgtcgcaaggcagagttcgaccagttgattaatcgggcggcaatttatgcccgggtacgcggtgacatcaataaccagacccaggatgcggtggatgcattgtatcagtaccagacgcgtcagctctgcatccgcattcaacgcgacgtggtagatgggctgttgttgcgtgccgggagcggtgacgggaaagcatga

SEQ ID NO: 448913 - DNA, 537 bp, Serratia marcescens
atgaacaagcgaatgaccaacgaggacatgaaacgcatgaacacgataacacgcaccgtgatggcaggtagtctgatgacgttactgctcggggtttcttccggggtgagggccgttcccatttcctctattgcgaccggcgcggctgatgtggtgttccgggaaacgggcaccgcgaccatcacggtcacccccgtcgctgcattgcaggccggcctgcataacgcacgggtgatagccaatgccacagccagtgccaccggaggcccggtggcctaccgttggtcgccggcaggcagtgagccgcgcagcggttttgatggccaacgtacgctgaccggcaaggcggatgagcgtaatcggctgaatgtgctcacggtggcaaatgccctggcatcagacgcgtacccaggatggtatgccgccaacggagaggcgacagcgctggatatcacggtcatgacggcagcggagaatcaggctgtggcggccgacacctatgtggtgtcactggatgcggcggtctggggcgggtga

SEQ ID NO: 448914 - DNA, 1434 bp, Serratia marcescens
atgaataaccgtcagaggttacattgtggcgcgtggtggatatcactggcgctggtgtcggcttgtgtggcacaggccgccccgtttgatgccgacaacgacccgcaaaccctggcgtcgctggatggcattgttgagcgcagtgacggtgtgccgccactgttgggtatggcggcctcgcagtcgcctgaggtgccgatgtcgcagcagccgaagcgtgacgcttccgaccgcatcgtggttgagcgtttgcagcgtcaggtgcaggttcaaaagcggcgtattgccgagttgagccgcacgattgccgcactcaacgagcgccaggttcagggggcggctgctcccgatgcgctggcgcaattgcgcgtggcgcgtgatgcggcgaatgacaaagtcgtggtgttgcaggatgaggccagaatgttacaaaagaaactggccgacacgaagcggaatgaaagggtgggggtggagcaaattgcgcagctctccgagcagctcaaagctgctcaaaccttatccggcgagcaacttgaccgcctgcatgcgcaagaggcggcgcaacgcgcgctggagggtgaagtggcccaggtgcgtagtgccctgaccgacaatcagcaaaagctgatgacggtgcagcaggagcaggccgccatccaaaaagcgcatgctgacgcaatggcgcaaaaagatgccgccctgcaggcaaaagaacaggcgttgttggcacagcggaaagccctggcagagacgaaagctgcgctgagcaaagccacggcaacaccggcgcggataaagccggaagacagggcggcgatacgggactacgccgtgggttcggcactggccaaagacatgctggcgttattgaaggagcgagaggtagacggagtgaaggttgaccaggcgctggcgctggctggtgtgcaggatacctttgccggcacccttcgggtgcctgatgccgagctgaccgaggcgctctccgcctcagagcgcgaagtgacgaaggcacaggcaaaacgcaaatcgcagactgaaaaagccgggcaggcttacatgaccgattttgccaaacgcaagggcgtgaaaaagcaccctgacgggttcttgtaccgcatcgactttgccggcaatgacgcaatagcggataccgacacggtgacgatagtggtgaaggagtcgctgaccgatggcacggtcatcaatgacatggatgtgagtggtgcactggtctcccagccgctgaatgcgtatccggggctgttccagtcggctattcgcctgctgaaatcgcacggcagcgtgacgttggtggtgccgccagcgcttgcctatggcgacaaggggtatccgccccaggtcccgccgggcgccacgattgtgtatgccctgcgcattcatgatgtggtgaaagtgccggagacctga

SEQ ID NO: 448915 - DNA, 504 bp, Serratia marcescens
gtgaagcgttttacttttatttgcgcaagcgcgttgctgcttgcctcgacggcaaaaggggctgggattgtctcgacggtctcctctgcggcggatgacgtcgtggtgttggttgcggccaatattgaggtcagcgtcagtccgtatacctatttaccggcaggtgccgtgccggcggattttgcgctggggacatattcggtgaacgtcagcgacagccagttggccgtgcgtgtcaaccgggaaattaatcccatcatacccgggttgccgaatgccgtggcctttgggcaggcgaaaaacaagaacgacgcgaccaaaacgttgaactttaagctgacgtttcccgccggtacccccggaacaacctcatcggatgggtggcaggtcttcgaccagggggtgacatcattgacgaatgtcccgatacagacatacctgtctcaggatatcgcctcgggtcgttacccgctggcgctggatgcggcggtttatgctttctga

SEQ ID NO: 448916 - DNA, 435 bp, Serratia marcescens
atgggcgaggcaatggaactggtgcaggcggcgctaaaagccggtatggaaattcaattgaaggaggggcgtttcccgtattttgctgatgccctttttcgtgcaggtgtactcagtaataccaggtatttgccttccggtgacagtttatatgtgacgcgtaaggggccggtaaaagtcacgggagagccactggctgtcaggtcaacaaaacccaccccttttaatgagcgggcactgtatttggcgattcaggaagacaagagagggagtatcacctttcgtgatttcttgcgggcgatatgggcggccggcgtggtcagttatacggtggattttgtgttgcgcacggtcacctattacggtgtggagggtgatgcctgcaaggaacattatccttcagttgttcagtatttaaaaaagagagtgccgtaa

SEQ ID NO: 448917 - DNA, 531 bp, Serratia marcescens
atgcagcaaaagagcaatgataatcagcggtcgggtatgcccagcggtcgaaatccgggtggacgggcagtgcgcatctcggcgcgccagcgcaatcacgaagattaccgtctgccagccaatttgtcgcaccttcctcccatgccgctctatcttgcggtggcccattacgcactgctggcgcaggagccgatatcgcgtcaggccattagcggagcgtttcgcatcagtacgcggcgtgcgcttgaggtgatgcggtatctccttaatgcccatgttggggtgatgtgcgctcgactcccgccgttgccggaagtgcgtgaacagggctatcgcatccaggtgtgggcgatatcgtcaggcggtcagggtgtgattaacgaacagtcacgcattaccgctccggcatcccccgagactgcagccatacagcagacggagcgtgttgataagccacgttcgcgcctggaaaaggagcgcgcgtgccaagatatgcgccgctggttcttgcagcggccgaatcgtgaatga

SEQ ID NO: 448918 - DNA, 411 bp, Serratia marcescens
atgatgtctctgtgggggtggatgggactggtggcgctatggctcagcctgacggcaacgttgctgggcggcatgtgggtgctgcctgttcggacgattgcattgccgcgtgtaccgcgcccctggttatggcgttatctgcgcggtgacatgggaatgtgggggacgctgcgtgcaggcatgttcgcggccggtgtggggtggtggtatcaggcagcagggttctccttgtctcgggacgtgcgcgacattgccgtgttgctgttgggcgcctctctgctcgttgccgtgttcaatgctggttgtgcgaggacgttgtcatcgggaaaggcggtaatgctgtgtggcgcgctggcgctgggctggatgggatggtggggtgttcttctgaacgcattgtatcgctgttga

SEQ ID NO: 448919 - DNA, 756 bp, Serratia marcescens
atggggatgtgtcattcagtcgaacagtcctccgtcagggggatgcaggcacggcatgatgggcggggcgaccgaaatgagaccgggttcaccggcgcccgctgggatgtcacggtggtggatgcgtgttgttatggtcgtgcggggataaaagccgtgctgcagaagcatccgggtgtggtgagggtggtgacgacagagactctggatggcccattatcgctgtttgcggctcgctcactgctggtcagccctccattgtcgtgccttgttctgcggttatcgctgtcggcgccggcggccttgtccatgctgttgcaactgggggaccttcccgcagcgtgttattcacgcatcgtggtgatgtcttccgtggcacctgatgtggtgtttcgggttctggcaaatatcggtatcaattgtgcggtacgtattgtcgatatgcgcagcacaccctcggtattatgtgaggccatattgtcgccgttaagcggggggagcgatgtcccgcccggagagtcgtgtactccgctgtctccgattgagcggcgagtgctgcgcagaacgttgcacgagatgtccatttacacgcaggctcgccaggcgcaggtcagcgccaaaacgatttatacgcagcgcgcccaggcgttgttgaaactgggggtgccggatgtgctgactttgctgcgtcagtttttgccgacgaaccggatgggcgtgagcgggaggagtgttaaaaggagcacacgatggtga

SEQ ID NO: 448920 - DNA, 1395 bp, Serratia marcescens
atgcttacctctttacacatcaaaaattttaaggcttggaaagatactggtcctatacggctcgcgcccttgacagtaatctttggtgccaacagtgcaggcaagagtagcttggggcatttgctactggcacttaaacaaacagccttatcagcagaccgaaagcgcccgctacatttgggcgatgacaattcattgatcgatttgggaacatttgcagaatgcttgcataaccatgacttgaagaatgctttggagttcgagctagggtggaaaattccaggtaaagatctggaggcacgtgatccgctcagtaagaaaaaatttgcgggtgatgaattaactctttcggtcacacttgccgtagatactaaagaacaaccaagggtagataagctagcttatcaattattacgccatagcattgctcaacttgccgtttcgtacaatagagacgagaaaggtaagcttgaaatcacatcaaatgaatacaagtttgtgcgcaatacaggcagaagttggcctctagatgaaccggacaagttttaccgtatttctgatcaaagtcgtgctcgattccaaaatgcggaatttttgtcggattttgcactaaatacggaagctgcgcttaatagtgtttactacctaggacctcttcgtgaacacccaaaacgtatttattcatggtcgggtgaaacaccggaaagtgcggggcaaaagggcgagtttgcgattgccgccattttggctgccagtgcccaagaacgaaaactcaatcgtggtcctaggcaacatctgactcgctttgatgaatttatcgcgaaatggcttaaagacttgggaatcatagaaagttttgctgtaaagccagtagcggaaggcaggaaggaatatgaggttgtggtcaaaactcatgcaactgccagcgaagtcaaaattactgatgttggctttggtgtgtctcaggttttacccgctttggttcaggctttctattgcccacctaattccactatttggatggagcagccagaaattcatctgcaccctcaggttcaggctgaacttgctgatgtgtttatttccgccacacaggctcgtgaaaacggtaaagagcgccatgttcagttaattgttgaaagccattctgagcatttcctaaaccgcctgcaacgacgcgtcgctgaaggggctgtggcacctgaagatgtcgcggtatatttctgccgtcgtgctggtgctgccgctgagctagagccactacgcctgaatatattcggtgaaatcgagaattggccagaaaatttcttcggtgatgagatggctgatattgccggccgtaccttagcggcactgaagcgtaagcaggaaatcgccagggagaaaagtaaatga

SEQ ID NO: 448921 - DNA, 540 bp, Serratia marcescens
atgaggaaggttgtcattgatactaacgttctgctagttgctaatgggctgcatggggaggtttcagatgcatgtgtaatagagtgcgtaaatcgtcttcaggctatggaacgaacaggtataacggttattgatgacggtttccgcattttgaaggaatatcaaaataaaacaagccttacccctccaaaaggggttggggatgtatttttgaagtcgttgctacgccatgtaggaaaccctgcacgggtggagcaagtaagcttgactgagttgggtgagaatgaatttgttgaattccctgatgcgctcttgcaacctcaatttgatgctccagatcgcaagtttgcagcagtttctaatgctcatccagataaaccaactatatggcaagcggcagattgtaagtggttggattggtggcaacctttgcaagctaaaggggtttttgttgagtttctttgcccagatgatgcgtgtcagttttatcgtgccaagtttcccgccaagcaggaacctcaattgcctgagattgaataa

SEQ ID NO: 448922 - DNA, 681 bp, Serratia marcescens
atgaaggacttctttcgattcccccacactccacacctagtgtggttaggtgacgatgctcctcgtgatgacaaagtattatcacccaatgatgtaaaatcacttcttgcgggtgaggtggtggtagaagaaaagatggacggtgcaaatgtcggtctgtctcttgccccggatggcagtttgcgaatacaaaaccgggggcaatatctggtggatccacatgttggtcagtttgccagaatgcctgcatggttggctctacacggtgatttactatgttccaaactgacgtcaagtatcattctgtttggtgaatggtgtgctgcgcgccattcgctagattatgtagctttgccagattggttcctgctttttgatgtgtatgatcgtaaagcagatcgtttctggagtagtcctcgccgcaatgttttggccactgagatgggtttggcaactgttccgcgagtgttcaatggaaggaccacggttaatgaactaaatcattttgttgccactacaccaagtagatatcgcaaaggtgctctagagggcgttgtggttcgtcgcgaatccctcgaatggtgcgaagctcgcgctaagttagttcggcgcgattttacccaggctatcgatatccattggcgtaagcgtgtgcttgagtggaatcgactaaaggtgtag

SEQ ID NO: 448923 - DNA, 690 bp, Serratia marcescens
atggccggccaattagacgaagcagcaaaacagattctggggacattgttagcagattttagcgatagagggttaactgctaaagatttgaagtcgggttatgaaggtccaaaacctgagactttggcaacagctgtatgcagtgttgcagatattacaacagttgattttgaagttgcattttcagatctcgaaaaagcgaaattgattaaaaccggcccgatggcaatgtacgataacgacagagatagctctgttatcatcattgcatcctatagcaaacgtgaatacgtgtacttaacagaggcaggttacaaggagtctagaaaagcgcctaatcgcccgcaaagagtccagcgaatagttaacaacctaactattactggggggcagttcagtaacatgcaactcggacaaggtgagagtcttaaccagtcaatgagcgttaccatgaacaattctgactctgaaattgtggaaaagctgatctctatccttgagcagcaagggcaatcggttgatggcgctcagcgagctgatattaccgccgctgttgcggctgcaaatgagggtgatggcaaagcggctaaatctttattggctaaagtctgtgggcctgtatgggagtcagttcaaccggtgatgtggcctatcgttggcgagcttgttaagagaagtttggaactctaa

SEQ ID NO: 448924 - DNA, 807 bp, Serratia marcescens
  misc_feature (566)..(575): n is a, c, g, or t
atgacaactattattccccaagaacttcagaaaaagaagttgatagctcctcctttcacgacctcactacctgctcctgcatggttcagagtagggacaatgccagcagatgccacttatccggtacactctcatccttggggtgagttcgtatattcatacagtggtataatggaagtcaaaatcaagaatgagcatctcacagccccgccacatttcggaatctggttaccaccgaagctaactcatgttggccttaacagaaatgaagcaacacattgctctttttatttaatgccagagctgtgcgaagagctgccaacttttccttgtacgttgaaaataaatgaatttactatttcgattctagagcaccttaaggacaacccgttgacagcacctattgatgataaaagcatgcgtatattacaagtgcttagcgatcagttatgtgcagcccctcgccaaagtactttccttccctataccagcgatccgttgctcagtaaagttattgctgaaatcgaaaagtgcccgtcggtggaaatccctctaaatgagctagnnnnnnnnnnaggatatactgttcggacattaaatcgacgcagccatcaattattaggaatgtcacttggcgattggcggcagcgtttgcgtgttgtaaaagcaatagatcttctagaaaaaggtgaaaaagtagaaatcgttgcctattcggttggttatagtagtgcatcgtcttttatagcaatgtttcaccgagtaaccggtagaaccccaggtagtattgccactcggtgtcgataa

SEQ ID NO: 448925 - DNA, 558 bp, Serratia marcescens
atggttaaatttgaaaactttgctatttacaagcctgactttaaatccaccgaagggaatgagccagcatatagacctgatattctttacgccaaagataaaaatgggcgagactggtacgcctgtcaggcggattttagtccagacacgctgaaggtcatgtatgacgagaatggtattatcgtctgtatatcaaaagacgtcacagcaattttccctcctggtttctcagtagcagaggtggccatttgtgagatgcctgatgatgcttgtaatgacactaattgggtatatagcgatggtaaagtagtcaagagagtctataccgctgaagagaaacgacagaaaatcgaagatgagaagtcacttcggatcgaccgtgttaaccaggttacacaatcattgcatacaaaactaatgctgggaatgtgcaccatcgaggagaaagatagtttgaaaaaatggatgcactatgtcaatcagataaatggcattgactccaatatggagcctcgagaaattagatggccagaatctcctgaaaaaatcactaggtga

SEQ ID NO: 448926 - DNA, 387 bp, Serratia marcescens
atgagcggctggatctcaaaactagccggcgggggaatgttgctcctgctggtgacggccatatgcctaggtggctacagctcgctgttgtcgcaccggttggacctggcacgccagcaggctgcagaacagcagaagacgctggcgcagcaggcaggactgatcaccacactgcgcgcggatgacgcccgtaatcgcgcaatgatggccgaacaacaacggagagagcagcagctgcgtcagcagggcgaaaactaccagaggaaatatcgtgaagcaatccagaatgatgcctgcgctgctcagcctctgtctgccgctgtgcttgagctcttgcgcccggccgccgatacaaaccccggtgccgttaatcctccttccccctga

SEQ ID NO: 448927 - DNA, 1386 bp, Serratia marcescens
atggatattgtcagtcgggttgagctttcaagaacaaaagctttttatcagttgcttgtggacaagcttggtactgaggcctgggctactcgcaaagctgcatatttgaagcgcatacgagagaaggagtctaagttcaacatcaatctgccaatagagccccagctcttcttaccagcagaagatgacatcgactggtacattctggcgtcgtatctgtatcatgattatccatatagtgatgctgcttacagcagcagccggatctacccctatgctatggccataggagctgttgcagaccagcttcgcaaagtcccatacgtcgatgatgttctcgacaaaatgctagcaaataacaacaaaccagaaactcaaatttttgagctgctgacggcatcgttctacctgaagaacggctatgaggttgccttcatcccagaaaacagcattgtctggcccgatggaaagaccaaaaaatcaccggatatgctcgtcaagttaggtgagctagagttctacgttgagtgcaaaaggtcggataagcaaaccaagtactcgaagaccgaagagcaagcctgggccaacatctggcatgaattgagccaacatatgctcaaagtcgcaccgtggaacattgtcgatataattttccatgagcaggtcgctaatgtaactccggcagacattattaaagcggtgaatctagccattaaaggggggacgggaaaagctaatgagggttcaatcagtgtgagaatacgggccatcgacaaattagggctcaaacgtcactaccgaaaattttcagtcagagccaatagcccacagcatgaactgctggtatttggggacctagacagcaatgagaaacgaagtatctcgactatcgctcagcgagttattcgtcctggtactaataaggacattctcaacatttttgtaaaggatgttgcaaagtgcgttggtgctcagtggcgctgcgatcatgagatttctctcggtctcagatctaagcatttcaagagcttgctcaatgatggagtcatgcagattccccccgatcgggctggcgtggtgcacatttggtatgagacttgcgaaggcatagatatcgaagaactacgtagggataaaaacatggagaatatctcgacctacgatgcctctaaaacaaccgtgttgggtgctttcctccatgccgtgaattattacccgttagaggaaaactatgagtgggctgagaccgtgcaagactttgcccgtgtgccgcatttgataaggctcttccctagacagccattgatgcttacatctgacgcgacgcgtggggtcaaaggcgtcacacattgggagcaagataaggccgcaaaaattacgcgttga

SEQ ID NO: 448928 - DNA, 1347 bp, Serratia marcescens
atggcagcaggattaattttaaccgccgtcggggccgaggcgatagaggcggcctatcaggccggtgaggtggtcactatcccgatcgtcgcgttcggtgatggtggcggggcctctgtgacccctgaccctgccgtaaccaaactggtcaataaatttggggatgtgccctttacgcagggggaatcgggtagcggcatgattgccggccaggcggtgattaacgcccgtaagcacccgggtaaagtggttcgggagtttgggctgatgagtagcgccggcgttctgattgcctatggcgcctatccagacacctacttaccggaacaaaatgactcgatcgtaaaagagctggtggtgaactttgctatgccgctggtacatgccgaaagcgtggtgctcgagattgaccccaatatttcggttctgacgattgaagaggctgatgcccgctatctcttcaggaagggcgacacagcgacgggggatctaggcgccccaatgttccaggcaaacggcacgaacggcataccggccggcgcaggcatgtacaaggagcaattggacaaccacgccccattttattcgcctgattatcactggtccgtgacacctggaagcacttatatccccctggttaaagggcgagggactcgaaaaggcaaagggtggccgacggccgttagctttggctaccttatgccgggtacagatatgcacgctcatcctgttatccacgcaatcggtgatagcgggatggagtgtatttgggagtttgatacacagagcggggggctgagaagtaaagcgggtacgttcgcgatagaggagctgcagccgatcgttccgctgcctttttccggcgatacaccgccgccaggctatgccttcatgctggggcaaacctttgataaaaacgtctatcagcgaacggcgcaagcgtatcccggaggatttctccctgatatgcgcagtttgacgattatggggaaacctgatgatcgcgccgtattgtcctgggctgaggggcaggttaagagccacggccacagcggggaagttatgggcgaaaatcttggttcgaaagagacaacgccaaatggtgcttttcaaccaaggattagggcttattcatccaatacagcccttgaaggtggaacaagtgaacgtttctctttcactttacataatgcctatgccgattttgatctcgttgaagcatctccgaatcacacccactggcttgatctcggctggcacggccacggcctgcgcatcgatgcgttcggcgccgcaaaaaacaccgtcgataacatcgcctttaactacatcgtgaggcttgcatga

SEQ ID NO: 448929 - DNA, 696 bp, Serratia marcescens
atgagcagacaattaacgctaaacgagtttgattttgatggcagtgcagtaagaacgatgaccgatgatgactcagaagtgtggttcgttgccaaggatgtagcagacatccttggttatgccaaaacaaacaacatgactgagcggcttgatgacgatgaaaaacggatgttatacatacctacttcacaaaataaccaaacgtttataaatgagtctgggctatataacgcagtcatggggtcacagaaggaagaagcgaagcgctttaagcggtgggttacatcagaagtgttgccatctattcgcaaaacaggaggttacaaccttacaccaaaatcctattctgaagctctattcgctgcggctgagcaagcaaaaagagctgaggaagcagagcttcttgccggcaaaagggattctcagtttaaatctgttcgcggcgcttacggcaaccacgttatgcagcataacaagtacgtccatagcaagggcgagggattcaggcacgctaccattgctcatgtaaagagcgtagttcctgggaaatacagttggcagacgctggcaaactactgcagttatcacaagctcccagtggagatcttgacgccacactaccaatctgttcctttaaactcctatccagcagaggcgtggatggctatctacaacatcgatatctcgggattttga

SEQ ID NO: 448930 - DNA, 759 bp, Serratia marcescens
atgttagttaaaaaagaatcctttactgatattcgcaacacaataaagcccggtctggttgtaggcttactttttgctcttgagtttttatttgttgccgaagggctaaaatttacgtctgcatcacatatgtcagtttttctttatactgcacctgcttttgcagcgttaggtttacaaatcttcctcccagcagaacgcctttccttagtccaatggttaggtataaccctagctttcgttggaattctggttgcattcctatcgggttctgctgataacaccagcaaaacacatgatattctaatcggtgatgggttaggccttcttgctggcctttcgtggggtatgacgaccattgtaatacgctgttcaaaattaaatgagtctccagcgagtcaaacactattctatcaacttgccgtagcggctattttattgtttatctatgcattctccagcgggcagactctttttacggttggcctaaaaggaggactaagtttaatttttcaagcagtaattgttgcattccttagttatatggtttggtttacacttttgaaaaaatacttggcatcacagctaggtgtactgtcattcatgactccagtatttggtgtttttgcaggcgctcttatattgaatgacaagataaagtccggcttcatttttgggacgctacttattcttttcggaataattgttgtcagtggttacccttggttgcagagcaaaattaactcacgaaaaaaataa

SEQ ID NO: 448931 - DNA, 627 bp, Serratia marcescens
  misc_feature (589)..(598): n is a, c, g, or t
atgaaagtactcattgttttcgcacatccagaatcaaagtcattcaacgcagcgcttaaagatactgcggttgaaactttgctttcccttggtcatgaagttgaggtaagtgatctatataaaatgggttggaaaagccagatagatgagaaagatattccaggcagcagattgaatgactccatatttactgtacatgaagaacaagaacacatggagaatacaactggggcaacactagatgttcgaaaagaacaggaaaaactcgtttggtgtgacatgttagtcttccaattccctatatggtggttcagtatgcctgcaatcttaaaaggctgggttgatcgtacttttactcgaggatttgcatataagacagggagaaaatacagttctggcatttttaaaggaaagagagcaatgatatgcgccactacaggaacggctggctccctatatgctccagatggtattgacggcgatataaatcatatactttggcctattcacaatggaatcttccattatactggttttgatgtcctcccacctcagatggtttggatgccgggaaatcttacagaatcannnnnnnnnnacagaatcagagagagaagctgcacttga

SEQ ID NO: 448932 - DNA, 303 bp, Serratia marcescens
atgattactaatgctttcgggaaatactggaatgaaaccattactaaaggtaaaggcatgttctataactgcaacgcttacaaagagcgttatgaggactgctgcctcggcaaactgaaacgcggtgacagtagtaaggacaaggggttgcttaaggcgttgagctacataaccaaaatcgatgcctgtgcacgtctggttcttccgggtaatgccagaacctttggtcgaggagaagtacgttcattgaaaaaaagagaacaaaatcggccggtaaatctaacccgttataacgggcggtaa

SEQ ID NO: 448933 - DNA, 2349 bp, Serratia marcescens
  misc_feature (1772)..(1781): n is a, c, g, or t
atggaaagtaccgaaagcagtagcctctatagtaaattgactgacggcttcgaacacgcggtcgttcatgtcgcagtggttgtaccgccaagctctacttctgagcggccccctctacgtttgttgttcgcatcggtctggtttctggcatcgggaaggcaagctcctataagacctcccaagccttacatcaaaaaatttaacaaagaaggtgccattgcggtcgatcgtatagtcatgacagcagaagaggccatcaagtggtatcgaagtgaatccaaagagcttcatacaccgactcctctgcatggtttccgggctaattctgacggcgaacccctcacaagtggctggttaagcgactttccaagatggccagtactgggtgtaccaatggaaagtgaagacattacgctgagatctgagcgttcttcactccccttccgcaatcttggtatcatcaggtattcacgccgaatttcagacagccaggaatggccgagctttcttgacacagatggacaaagcaagcagtgccaggaagcctttcaattcttggagcaccacatgcacgtcgattttagggagtatcctgaatatttgggtgggatggcgctcgctgtccctgactgtgacgttcattctgtgcgacagtttgttgaccctagagaggacggttccgaattgttgtacttccatgtgagacctcacccaggccgtaaactcaaaaatctcagcttgacttcgatggaaggacaagaagggatgctcacctccttcgatacagttcctgtaccagaggatggcttggttgtgattgaaaggccttcctccatccatggctctggtcttgtcctcacacatacggaacgcggtgtcttgctgcaaacgcccatgcgacagttcatacgacaaatgaacatgaggactgagatagtagagcgacgcgtcaaggtaagatccccagagacagatagaaagaagagcccagtcaatgagtactttaccgaaaaaaaaaccttagcgtccgcacaaacattgggtgaagcaccaaacacagcagacgccttccagcgtttgttagaggcgaaaaacgagcgactccttaattacagcgcccaaatatatgatcagacatggtttacagctaaccagcgcaaggaagcactcgatcacatcaggaaaaagctcaagcatgctcgctcaagcatcttcatagccgatccctacttcagtgcaaaccaaatttcccaatacctatttgctattgagcgagacgacgtcaagatacaaatccttacttcaaacaatgccttcaaacagatcaaagaagcgggatcaggtattgaagccgatagtgaggcggaactggacacacagcaggcattgctgcaaatcctaactatgttccatgccagccacaaaaacagcattgaaataaaagtcgccaatactgaaagcagtctgttccatgatcgattcatcgcggtcgatggacgtgtatggatgatcggcagttctttgaactctattggtatacggccaacactgaccatgcgcataccccatggtgaaaaaatactcacccacctcacgggcctttttaacaattctatccctttggaggacttcaaagtcctgaaaggggtgactaagaagacatgtgtatattgcgggcgtggtatggtagacgctaaagaagcaaaggtagtacatgaagcgaaaggtgggactaaggctcatggtaaaccggacgctcaagggacgcaggnnnnnnnnnnacttataccttgcgaggcaccctaccgggacgaatctcgtcatcatttcccatgcgccaatgccatcattgctcgtcgtgaggctccagatgtacggttagtcgaggagtttgaaaaagcacttagtactgctagagaggtgtggataattgacaggcacttattttctgcagatggtcagaagcccgaccataatcgaagaataaatcatgttgtggcgtggttttacacagaacatattaaaacagtaaagattttgactggttatcataatttacagaaagacatcgagaaagctttcgaggatttaaagcaggtcgtaacagaagaccgttccaaactctccccacctataacaatagagctctcatttaccctcaaagacgccgactgccttcacgatcgctttgcaatcatcgataacgaattatggcattttggcgcaactgtcggcggttttcaccgagacgtaaatgctgtgagtagaggctggaatgctgaggctcatgatgccgtgcaattttttgaaacagtttggaagatggccaacattaaagggaaaaaatag

SEQ ID NO: 448934 - DNA, 1176 bp, Serratia marcescens
atgagttcatttgctgccttagcattaaaaatacttaatgaatctcctgcagcaacgcgatatattaaagcgagatatagccatatatttatagatgaatatcaagattcatccttatctcagcatcaattatttctaaaaataaatgaacttggtttatgctctattgctgttggtgatgtttggcaatcaatttatgagtttcgaggtggaaatgctgagctgttacttgacttggttagagataagcagatgtttgcacattttgaaataaatttaaatcataggtgtcatccatcaataattaattatgcatctaggttactcgattcaaaatttgtgctattaccaagcgaaagcatcaatgtttacagaaagagattatcagggaacctaaaagatatttcgatgacaatatcatcatggatttcaaaatggttaaatgaaggaagatgggggttggagcaagctaaccaaatagctatttttgcaagaaaagagcaatcattgctattactatgctcagaattaacatcaaattttagagtttatattgatacgccattagataaattgggcacagaatgttcagatttatataaagacctcctagcgtataggtataaggccataggcactgcacaagagttaattaataaagtatttgatggtttgattataaatgacaatcatcagtttttattaagaaaaaaaattaaaaccctcaggagcaaactaacagatgaggaactaattaataacttccacgaaatcgctgaaatgctaaatattcagttttctataactaatgataatgctgttttggacattatatcagacgatatttacttaaagcagtttatgccattagataaaaatgaagttcaagtaatgacacttcacaagtctaaagggcttgaatttaaaatagtattgcatttggatatggatgaatggtcttttccatatagattaattaatgaagttgatagaaatacggcactatatcccagcctttcgcaagaaacaaaccttcattatgttggtattacaagagctgagaaatgctgcgtattaattaatgcagagttacggcaaaactcgactggggcatttaagaagtctgaagcatcttactttttcaagttgccccaactagagggtctttatcgttag

SEQ ID NO: 448935 - DNA, 1224 bp, Serratia marcescens
atgaagctaacaatcagacaaatcgacacagccaagcccaaagagaagccgtacaagctatctgatggtggaggcctctaccttgaagtaaccaccaacggctcacgctactggcgtttaaagtatcgttatgcgggtaaagaaaagcgccttgctttcggcgtttatcccgaggtttctctcgcccaagctcgcgaaaaacgtgatgctgcgaaaaagctactgtctgcaggaaatgatcccggcgaactaaagaaagcagagaaaattgcccaaaagcttaactatgaaaatacattcgaagctattgcccgtgaatggcatcagttgagagccgatcgttggtcattgcgctatcgggatgaaattattgatacttttgaaaaggatatttttccttacataggtaaacgccccatagctgaaatcaagcctatggaattgctggaaacccttcgccgaatggaaaaacgaggagcgttagagaagatgcgcaaagtcagacagcgctgcggtgaagtattccgtcatgcaatcgtgaccggacgcgctgaatacaatcctgcccccgatcttgctacagctctcgcaacaccaaagaaaacgcattttcctttcctgactgccgaagagcttcctcactttcttagagatcttgcaggctattccgggagtgttattaccaagactgcaactcaaatcatcatgcttacaggggtacgaactcaagaattacgttttgcccgttgggaggatattaattttgaaaaacggctctgggagatccctgctgaagttatgaagatgaaacggccacatatcgttcctatgtcggatcaggttgtcgcgctctttgaatcactgaagcctattacggggctatatccgctggtatttgtcggacgtaatgatcgtacaaaaccgatctcaaaggagagcgttaatcaggtgattgagttattgggttataaaggaaggcttacagggcacggtttccgccacacgatgagtaccatcctgcatgaagaaggctttaactcagcgtggattgaaacgcaacttgcacatgtggataagaacgcgatacgtgggacttataaccatgcgcagtatttggaaggcagacgagagatgatgcagtggtacgggaattatcttgacaatcttattgttgatagagatagttcaatatccattccacacctgaaaaccatcaatatgtaa

SEQ ID NO: 448936 - DNA, 138 bp, Serratia marcescens
atgacaatatttttatttggtttttgtctattgtgtaattttatgaattttattgttattttgttttttattattatttttttcagtgacaatttatccccgttatcttattttctgcgggcgcgcaggtttggttaa

SEQ ID NO: 448937 - DNA, 183 bp, Serratia marcescens
atgatagtaccggaagactaccaaagcccagagtggctggtggatgggagccagccacatcactggcataattatgtctcaagcgctgttcagcaaatatggcaaagctttacagatgagcaaaagcaggtgctagccgctgggtttgcagaggtagctctgaacgaggcgtggtgggattaa

SEQ ID NO: 448938 - DNA, 570 bp, Serratia marcescens
ttgtcagattacgattttaaaaaagcaacctataacatagccaaacatgaagcagggcactggttgtgcgctaatagtctaggttggtcgccaagagatatagctgttagggtgccttcgcatcccaaagggcattatggatatgctttgagctcttacaggacgtcactggctgcaatagaggatgttcgtgaatattcaatgggaagagtgaaggtgctttatagcggagcttatgctgagaatttcaatggtgatgattttgaccatgagcagattatgagcgacctaatgcgaggcggtggcgcaaactctgattttttgaaggcagaagaaatatattttttttactacaattgcttgtcaaacccacgtggctgggaagttgagttttccccaatcatttgtgatgtacaactattaatcgatatgcgatttcacttcattgataccgtcggtagaaagtttgaagggttagctattgaggttgggcaagagatcgcaatgagtcgcgatgagctgattaaaatttatcacgagagcccgatcaggctggctaataccgcatga

SEQ ID NO: 448939 - DNA, 285 bp, Serratia marcescens
atgtttatcggcgacaaaaacatgggcttcgctaaaaacctgggaagtgaaatatcagaattcaataagaacaacaaaaatcaagatataataaattacaacatagatacaattgtaaaaatatcatatgtagatgcatcagaagagaaaaaaacaaaatactatataaatcaattagctgtcaccgaaagcgaatacttcgccatttatgataaaattaatggcataccagcattaagtagaaatgatcttacgcttgagaatctgctaaaaagaatcaattaa

SEQ ID NO: 448940 - DNA, 657 bp, Serratia marcescens
gtggacattttagagcttgttagattggttagtaatcctctaaataaaatatcagttgatatagtttcagagaaaagtactgttgattacttgttgttgtgggtaccatctgtaataggcattcttgccttaataatatcatatttttcagtcagtacggcggcgaccacacagcgtgatacctcattaattcaagctagaatagaaatagctacgaaattaaaatatgaacgattgaatgccatgagggagttaacatccaaattatctgcaagcctagatgaatttatgatgttatgctataggcttaaagttctaacggatgaaataaatcactacaaggataacctcaaggcaagcaagcctgatttggtaatgacaagggctggtgtgtttgatgagcatgttgttaagttaggggctgtcaaaacgttatcttatacgcttcaaacatatttagacactaaagtccatgaagaagttataataacaattaaaagaatggaaaagattgtaggcgggaatgaaccatacgcggaaataaacttatttgtggagcttgtgaaacaattttctcgagaaatgtatgtgattatgactaaagagtgggaggaaatcttggattatccttttgaaaagagagtttgtaaaaaatag

SEQ ID NO: 448941 - DNA, 246 bp, Serratia marcescens
gtgagacgttatttcgcgcacgccggtttagtgatcgtcgaagcaaaagcttattgcccctccggcgctgacgctccgacgatgaaaaaccaggaagcggtaataccgccccccaaagcgaattatttatgcgtgaccaccggcgtacaggtcggcgcgctcagcgacggcgacgaacctaaaattcccggcatcatcagcgacgagcaatcgaaaatgcggcctttttccgtggtggcgcgataa

SEQ ID NO: 448942 - DNA, 636 bp, Serratia marcescens
atgtgtataagagacaggaatatcagggtatacgttgaattaatgacgattgataactttattttggatgaggctatatcaatactttcttggcaagttgatgatgatttgaaagttaagctgctcgagtttgttaaaacaccgttggctattcatggtaagaattactctcaggccgttaatgactatattttagaaaacaattttaaaccagatgaacttctaattttgacgtcatcttataaaacttggggaacctctactcaatcgctcatcttgagtcgagcaatacaggatatatcagaattgatagcaagccctaatgatgtttctgaaccgttactaaaaaacctttttgtcgcagagggactgaaaatgcagaataaaatagcattgctaatcgctttgttgccgggtaaggatttaagtaagacgacttgcaaagagtatcttgatctgcttggtttatcggagttcagtaaagttttggggcggggcaaacctaaaattgaggttgatgaaactaatcaaaggttattaacagcattaagagataaccactttttctctgatttcggggtagatgatgaaaatccctcttattacaaaatagtaaggcggagttcaaatacatag

SEQ ID NO: 448943 - DNA, 1116 bp, Serratia marcescens
atgataaagactttctcatctgaagtaattgataaatctgacactatgtttgattatttttctaacacattaaataagaatataaaaataatctcaaacttccctttggaatggactaatgtaaatggcttaccgttgatgataaggcataacgcaagtcgtatattcaacaccccaggttttataaaacaaaacatccttcttaataataacgaattttcaatgagtatagatagttttaaaaaaatattagtcatcagctcctttaaaactggggaccatataagtaatgatataaaaaatgaattgcatcgggtattaaaagaatgcaacgaccctagaattaattctgtagtcaatgaaaaagtttctagtaaggggtcttacatcccgaactttgaaatggaagtgatatttaaagatgtcacaaataaaaatgagctagtggacgctttgaattcctttgaattcgctcttgtgatattcgatatgcacggtggacatgactgtaatgggcatggattccttgagttatctggtgaaattttgtacccttatgaattaatgagtttagcaaatatcccaccaatagtcgtattaagtgcttgtgatacaagcccagccgatagaaatcatttcaatgcagcaaatgcttttctatgtgcaggcgcaaaaacggtactggctagtacataccccatattaagcagagatgcggcaatctatataggacgattatataaacgcttaagatactatttacctgaaagaattttatccacaaaaaaaagtttaaggtggtcagagttcattacgggacttaatcgccgagtttattttgattatttcttaatgtacattttcagaaagtataagattaatgacaactccatattaatagaattacgaaatcacataaatattgcattagaaaatcaccctcacgattttttagatggggtttattatttctttgaaaatttaacagacctatctaaaaaccaaattagtgatgaacttaataaccacttcttgtttgctgaatgcctgaactatgtgcaaataggctctcctgaaaaaattttaatttctgcagaagatataaacatagaataa

SEQ ID NO: 448944 - DNA, 579 bp, Serratia marcescens
atgagtcagcacctgtacaccagctttagcgtgttccgctattggcagaacggggccaatctaactgagcagaaggtgcgctgtgagcgaaaagtggacatccatttcaaccctaaaatcggcgcagactggcaacctcgcggtcaacaaaagcatgtagccacgccgggccagaatgaaaaatactatcttgccggagccttacacagcggtacgggaaaggtcagtcatgttggtggcaatagcaaaagctcggcgccgttcatatgtctgctgaaacaccttaaagccacatatcgacgggcaaaaaccatcacgctaatcgtggataactatatcatccataaaagccgggaaacgcagcgctggctaaaagcggatccaaagttcagtgtgatttaccagcccgtttattcgccgtgtgtgaaccacgttgagcggttatggcaggcgcttcacgatacgataacccgcaatcatcagtaccgttctatgtggcagcttctgagaaaagttaaccacttcatggatacggtcaatccattccccggagggaaacatggtctggcaaaagtgtag

SEQ ID NO: 448945 - DNA, 165 bp, Serratia marcescens
atggtacgccgattttatctcgggccttggtcgctagaaaatgccgccaataaatcgttaaaaccccctggcgcgcaatgctacccccgcctcgcctgcccgctttatatgtcgcttttcatgcaggtgcatgagagaccgcaggccgcgctgctactggcgtag

SEQ ID NO: 448946 - DNA, 810 bp, Serratia marcescens
atgaaaataagtatgcaatgtgtactagcctcggccttgttggctgtgtgtaccgttacttctgccggaactgtcgtggtgactccgatacaagatccgcttcctacgattggggtagccactggtactggaggacattggaggcacaaattcgaacagggtacctgcttgcgtcaatatgcgagctacctcatggtttatggctctccggggaccgaattcgaagattatggagcctcttgggaatcgcctgaaatcctaatcgactgtaaacgaaccgtgaaacagaacatggatattgtggaagctgccttcgcccgggggatcacgtactctcgaatattcaatccgataggtaaatatccgggtagaagcggctgttgggtatcttatggttggattcaaaacaattcatttcacagttacgggttcggggcgaccgatcgtcctggtacaacgtgttctcaactacctgtaaatccgcctgtaaaatgtgatgtagcagtgccaagaccgatcgaacatggccgggtgaacgtcggtactaagagtacacggcgcggggatttgtccatcacttgcgataaaaaaactaccgtgaccgtcgacgtcggtaacggggccgtactgctacgtggttccagcggcacgatcacgtcatctttaggggtaaacaatgaggatgatctgaccacaacggttgttgctgaccgtacggcgactgtacctctgattagtgtagttggtgctcaacagactcctcccggtgcgtacgatggcacagccatagtgtatgtcacgtgggagtag

SEQ ID NO: 448947 - DNA, 447 bp, Serratia marcescens
atgggcagaaaataccgaatgagtacgctgttgtgcctggtgttggcgggcggtgcctgtgccgaagtgaatacgccgcgcgtgccggatcacgcgctgccgcatgcgcccacgccgccgggggagatgctgtcgcgagaaggtgtgttgtgggtcgagggggccatgctgtcgtcaccgtgcgcctcgggcagagtgatggcgggcaagctgcaggacggcgtggtgaaaacgcagccccagtcggtggttgtgctgctggaagggtgcggcgatggcgttaacgggggtggggcgcgattgccggtgtccattgacgtcactccaggcctgccattgcaggcgagacaatcccaccgttatcgcctggcgcacgggaatagcatgctgcccgtgacggttcaaccgggtacgcaggtactgcgtgtggagatgaattatgaataa

SEQ ID NO: 448948 - DNA, 1017 bp, Serratia marcescens
atgaaaaaaagattattttttcatatattgttaatgttcgttgtgacctacataggaagcgctcatgccgtatattatcaatacttttggtcagctaataatcgtacgcaaggaggtttaaattatcaagggctgggaggtggaggggtttctacaacaatcgggggatttgcttatggtttatccacactaaaatatgctagctgtagtactcaatctcaagaaagggttgattatcatagacaggattactatattcttgtcccaaagacagttatggtgggggcagttgaagcgaaggtttttgtaacttccggtgattatagtgtagatgattctctgagtagtgaatttcatgttgtgaagaaagttggttctgttattacgcaatccatgacgggggcgtgtggtagagtaggtaatacttataatatgactaattcagtacctcttgttaatttgcggttggagataccatctgatattgatgttggggggtataatggagttgttggggtgaagctatctatggctgaatatcattatacggggagtgacatccatcctttcaatgatgcattggccttgcaatactcaacctctacaatttctgttccttataatctcaatattataacttcttgtgaagttagtccgtcctccatcgagtttaatcatggggatttgccgcgctcattcgcgtcaggaaaccgaaaggaacaaagtgtcagtttaacttgttctaagagtgctagtttaaatttatccattagggcaaacaatccacctaaccacacatatcctttgggacagggggttggtgtagggcttggagggtattgggatagtttgctaatgcttgatgatggcaagggtgtgaccggggggagtattccgttgtcggtgactgataacacccaggttataataaatgtatcatctgagattagaggtgatggaaattcggttgttggtgatattaatgggagcgcggtattgctactgtccgttaattga

SEQ ID NO: 448949 - DNA, 474 bp, Serratia marcescens
atgtcacgggaaaatgccaataaagaaaacatgggtgcccaattcactgctggagaaaagaaacgtattgcacctcgtcagtctaaccatgaggaatacacgttacccgactgcctcgtcaattaccccccgatgccactgtatttggcggtggcgcactttggactgttgacgcaacaaatattatcgagagaggtgatttgtcaggcctttcaaattgacactcgtcgggcattggaagtgatgcgttatctcgtcaatggcgcaccgagtgtcacctgcgaatgcctctcgctcatacagcggcggggatattgtctgcgcgtgctgagcattgtgtcaggtgagacggcggccgaaagcgcgcgccctccctccgctcgcacgtctgcacgcaagcggggaagtacgcttgagcgggaacgtgcacagcatcaagtacgccagtggttcctgcgccggcccaatccctga

SEQ ID NO: 448950 - DNA, 429 bp, Serratia marcescens
atggaagacgcgacgatgggggcatgggtatggatgtgggtgctgtggctgagtctcagcgcgttgctgttgggggggatgctttcattgccatcgaaagaggttattgagccttgccctgtcaggcgtccgccttgtctgtggcgttttgtgcgcggtgatatggcggtgggcggtacggtacgcattggcctggggttaggtggagccgggtggtggtgcagtgcggcgggcctgttggtctctgacttcacccgcagcctgtgggtggtcatctccggggctgtggtgctgattgcgttgttcaatgccggccgaaaaagtgtgatgtcgctttgggggttgaccgtattggcaggggttcagggtgggggctgggttgtcctgttgctgatagccctgcaatggtacgggttttcggtgcagtaa

SEQ ID NO: 448951 - DNA, 672 bp, Serratia marcescens
atgacgacaagttattcgccggtacctccccagctcaccgtggtggcgccgtgtacctacagccgcctgggggtgctggagttggtgatgcgacatgcctcattgttttccctggtgcccggggcggtggaggtatttgaggaagtggcgctggcactgaaggcgatgcgcaaggcgcgcgtcctcgtcggaggcggagtgacagctgcgccctgcctggtgctgtgtttgccgcgagagccgctctggggcgtggcgcaactgttgcagctggacagcgcgttgctggcgcagactggttgtcaccggctggtcgtgatctccccctttgaggtgaataacggtatccggcgggttctggtcagttgtggcctgaccctgccggtacgacttatcagggcgagcagcacgacggagcatttgtgccgagtgttgctggggcaggggacgttgttgcaggagggacgggacgagctgttgcccatcatgccggcgcgaacgttgtcgaggccggagcgagaggccttgtgccggacgttgcagggggcgtcgatttatcagcagtcccgacagcggttccgcagccccaaaacgctgtatgcgcagcgcagcagagcactgcaaaaattgcggatatccggtgtctcgggcttgctacggtggtttacctga

SEQ ID NO: 448952 - DNA, 246 bp, Serratia marcescens
atgagtgcactatcggatgaaaggcctctggagatgtctggctcattggcgcatcaggcgcacttgcgtgccgttatgcaacaggcggcgcagtttgagcgtgacggactgtttgacgatgcggcgtcatattggcagaggggagtggaattgtcagcacgcgagaatgaacgccactggtgtgaggtgcgggcattattatgccaaaaaaaaggtctgcgcggtgaagacacctatatacgataa

SEQ ID NO: 448953 - DNA, 144 bp, Serratia marcescens
atgagaacgttgtggagataccttcccgtaattaaaaacgcgtgcctgaatcatcgccgtgcggtatggctggtattgggcggcgcgtgtctgttgttttggttttgtctgctggtgttgctgacgcaatggttattgcggtga

SEQ ID NO: 448954 - DNA, 129 bp, Serratia marcescens
atggacacgataacattgtggttgattgacatgctccatattttgagtgccgtggtgcatgaatggccgggaacgaccgccctgttattggggttgtggttgtattggataatgctgcgcgtgccttga

SEQ ID NO: 448955 - DNA, 381 bp, Serratia marcescens
atgtcactgtgtcaatggattttccgtagtggttggcggcgaggatgtttgcttttctgtgtggcgctcggcgtcacggaggctgccgcgaatgaaacggcgctgttctttccggacgagactccccatgtggtgtgtgacgcgacggcggggttttgtgccgacgcccagggcatttcctttggtctgacggcgctgtacctgggggcgcctgcacaggatgcgctgttgtcgcgcttggcgcaggccccgattggggcattgaagcggtttacgctgagtaacggcgccctgtgcgacagccgattgtcagcctgttttaccgacgcgtccgcgcagcagcgtgatgtgacgttgacgcggcggttgttcagagagtga

SEQ ID NO: 448956 - DNA, 828 bp, Serratia marcescens
atgagaagccggcctgacggatggaaagcggcatggtgtttggccatgaccctggggtatggtgcccccgcactggcgaccgttgccaccggccagacagccccggtggaggcgcgcgccgccgacgcggatgacgcgccgggctggcggtttgccgtgacgccctacctgtggatgcctgcgctgcaggggaacggggcgctggaaggggaaagcggccgcttcaccctgccgttccacaaggcgatgcacaacctggattttttcacgctgggtggcgtcagcgcgagctacggcccatacagcgtgttcctggacgcgcagtacctggacgtgtcaaagcgcatgacgttcgcgatgccggggataagcgccgacgcgtcaatgcggtcgacgcaggtgagcctgggaggcagctatcaggcgtatgcacaggtgctggggggtaacaccgttttcggggcgccgcagcaattcacggtcgcgccgatggccggggtgcactggacccggctgaacgcgcgggtgtggggggaggggcataccctcggtaaaagcaccgactgggccattccgtttgtggggggcagggtagggtacgacctggatccgcactggacgctgaccgccgaaggggatgtgggggcctgggggcgcgactgggggctccagggacaaacctatctggggtatcgcctggggctctgggggcaggagagcctgctgcgcgtcgggtaccgggtcattcaccaggaccaccagacggatgatctgcactggaatgtgacgcaatacggtccggcggcgggattgaccgtctggttctga

SEQ ID NO: 448957 - DNA, 519 bp, Serratia marcescens
atgcgcggttcagtgatgaaaaacatcggggtgttggggatgctcatggtcgccatgagcggccatgcacagggtgaggagaagagcgtattcgacagactggtgcagcagcatgacaaggtgggcagcgcccggtttaccgccggcgattaccgtccgggactactgaagcatatcgtgttgttcaaatacaaagatgatgtcaccgaggcacagcgagcggcggtggttgcccgctttttatcgctcaggcgcaccacgcgcccgggggagacctcgccgtacatactgtccattgtcgaggggccgcaaaacagcggcgagggggccagccggggatttgagcaggggtttatcgtgacgttcaaatcggaaggtgaccgcaattactatgtgggcaagccgctggtgacgacgcccgggcactatgatgaggcgcatgaggcattcaaggccttcgttgggccgttgctcagcgaagacaatggcgtcctggtgtttgatttctccgtaaggtga

SEQ ID NO: 448958 - DNA, 2202 bp, Serratia marcescens
ttgtcttcgctgtacacgttgacggttgacgtgctcagcgataaccggactgtcgaccccaaagccctgctggggcagagcatgacgataacgtgtcgccaggacacgctgaccccgccgcgttatctgtcggggattgtgacccgcgtcgaggtgaacggccgggacaggcgcgaccgtcatgacggctataccgtcacggtgaacccgtcgctgtggtacctgagtaaaaaccgggattgccggatatggcaggagaaaagcgtgccggatatcgtgaccgccgtgttgcaggcgcgcgggatcgcgttcgtcaaccgcctgagctgggcgtaccggcgctgggaatattgcgtgcagtatcaggagagcgacctcgattttatccatcgcctaatggagcatgaaggtatctactattacttcatgcacgatgagggcggccacacgctggtgctggccgatgcgcctgagcagcacgaggcccttgggggctttgccgcattccattacgtggatgcgtgcgcggacgacacgtccgggcagggcattgcacgctggcgggtgtccgagacgatggccgcgtcgctgtatctgactgacgactatgattttcgccggcctcgtgccagcctgctgcaggcaagacaaaatcccgcccctgacggtcggcaagaggctgccgtgttcgactggcccgggcgctacaccacacaggaagacggggcgttttacggccgtgtccggcagcaagagctcgccagcacgcaggcgcagatgtcgggggagagtgcgtcgctggggattgcaccggggcatgtgtttaccctgacgcgtgcggctcgtgaggaagacaaccgtgcttacctcgtcagtcgtgcgacctactttttcagtgaggggggatattacagcgaggacccgcaggacgtgacaccgccggtgcaccggacctgttttaccgctcacccggcggcgctgaactggcgccctgcaaggcagacggcctggccccggacctgtggcccgcagacggcggaggtggtggggccggagggacaggccatctggaccgacaggtacgggcgcgtcaagctcaaattccgttgggaccgtcataatgaccataaccatgacgaggcagcctgttgggtgcgggtctccagtgcctgggcggggtgggggtatggcagcattcaggtgccgcgcgtgggggaggaggtcattgtcgatttcatcaacggcgaccccgaccgccccatcgtaacggggcgtgtctataacgaaggcagcatgccgccctgggacttgccggctgccgcgaccaaaatgggcttcatgacccgcacggcgggcgggggcacggagaacggcagttttttggtgttcgacgatgcgtcggggcgcgagacagttgacctgcacgccgagcgtgacatgaacatgagtgccgagcgcgacctggcggtgactatcgagggggcgcggaccacgcgggtgaggggtgaggacaaccacacgtttgatgaccgtcagcgcgtgcgcatcgccaaagggcgacaggttgaaatagcggccgggggcgatacccgcgaggtgacgggggacagcacgaccacgttgcacggtaagcagaccgtcctcatagaaggggaactggtcgaggaataccgcagcgggcaaaaaaccacgctcaccgccggcggtcagacgctgaccattcgtgccggcggccaaacgattatcatccgtgagggcggtcgcaccattgatatcgtcggcgaggcaaaaaaaaagataaccggcaacgagcacgaggaggtcacggggacgtggacgaaggcggtgggtggtgccattaatattacgtccgaggcggacgtaaccatcaaaagcgccacgaaaatcacgctggatgcgcctaatcaaaaggccacgaccggcaaggggcacagtgaaagctatacggggcactctttcagcatgacgggtgagtcggaaagttttaccgggagttcggtcagttttaccggctcgtctgtcagctttacggggatgagtgtctctgtgggggctttgggtatcagtaatacgccgttcaagttaaagaaacacgataacaaggtgcaatttgtcagtggcagcaccacgcttaacagcaatttcagcgccattatgagtgcactgacgaccttatcgtaa

SEQ ID NO: 448959 - DNA, 369 bp, Serratia marcescens
atgacgatggtcaatgttgcgttctggtcaaatgtggcccttaccctggtgctaatactgctggtcatggtagggatttggaacacttgccgagcggcccgaaaaaatcgggtcattatgaagcatggcaaggaaacccgtgcgctgattgtgaatgctacgccgcataagagacaggttgttgtgggaaagatgtcggtgcaattacagcttgctttttcggtcaatggcgaagggtatcacgtattaaaggatgttatcgtttcaccctattatgtggatgcgctcagggttggaaaacgcattattattcggtatcaggaaggggggccgagaagcattgttattatgcaatatgttgagaactga

SEQ ID NO: 448960 - DNA, 159 bp, Serratia marcescens
atgcaggtttcggcgccggtggccaaccacgccggcattctgctggcagatggcctgttgctgcaccatatgtacggcatgctcagccagcgggtgccttacggtggttattggaaagagcgaacggtgaaggtgttgcggcacaacgcgctgatgtga

SEQ ID NO: 448961 - DNA, 1029 bp, Serratia marcescens
atgactcgcggaaactttgattttataaactctaacgtggcctactcagaatccgataagtcatggtggatagatctcataaataccgattgcatctggtatgatatgattattaatcctcccgatgacatcagaacaaataagataataaaaaaccatctcagcgccatcgagaaacatgtgagggaaaactgtgaaaagagatttatttatttcttaggttcaagaaagaaagtgaggttttcaaccaagaggaagcctagatataacccttttacaaaaaatatagtattcactctgttgattggcaaagaagagcgaaaatttcgggtaaaatatttctttcgcaagcttacgctggatggcgttataaagataacgccgaatgttagagtaactgaaaagtttctctacgttgaacatgaagatggtaattcacttgtgatttcagtccatgacttcgtgaaagaaaattacattgatttagatatccatactgaagtgcattatgtaggatatacacgtcatccgcataggcgtcctattgattttattcaccgtggcttatcgaagatgctgtatagtgtttcaaatgacgataatgatttttttgtttattttagtttatttaacccaagagttatatctctgaataataactacaatatagtgtttaatatttcaaactctcaattggatgagattgaagttgataatgaaggtaggattattgaaaactgcttcatacgctactttgaccctaagcttcaagatgatgacaaggaaagcaaaaggccagatttaaataaaatgtttatggatttagtgaaaattaaaaaaattaaaaaaatctctgtaaatttgcaatatgaagtgaacaatgagtatttctgcttttactctaaaattgtcccaccgcaaactgatcatttctttgtgctggatttatctgatggcaaggtgaatattgacagggagcaggatatgactactcagatggaattatacatgggagattataatcattga

SEQ ID NO: 448962 - DNA, 1215 bp, Serratia marcescens
atggataagtctctacattttctcgatctttttgctggagcagtagcacacgtggaatcaaacagagccgcttgttttacgctaagaaccagagctgcttaccactggctcaaaaaagaatcgaaactagatatttatgatagttatctgcgagggactatttctcgtgaacaattatataaagaagtgccatttgaaataatcgactcagttattaacgaagagataaaaagcgaatcacttgatgatatcttcatacaagtagacaattcaatcaagcaaaaaagaatagacattattattggagggccgccatgtcaagcttattcattggtagggcgttctcgctctaaaaataaaatgattggcgaccaaagaaattatcttttcacttactatgcaaattttttagagcgctaccagccaagttattttgttttcgaaaatgttataggtttgctttcggctaaagatgagagtggcaaactttattttgatataatgcgaaagttatttctctcagctggttatcaaacagaatataaaatactatctactaatgaatatggaattcctcaagcaaggaaaagagtaatacttgtaggaaaaaaaggaaatgaattggggttttatcctgaaccagataaatcctccattaacttaactgtaaatgatattttttcagacttacctgaaatattatcaggccatggtgaacttattcaacgaaaacataaaaagccacattcattcttggtcgaaaatcagttatgtgactcaaataattatattacatggcatacagctcgtcctcatactcagcaagacttggaaatatatagaatagctgtaaaaaaatggaatgatggtcatcaaaggattgactataactctctaccagcacgtttaaaaactcaccgtcaacgcgaatcttttttggatagattcaaggtcgtagccggggatttaaattactcccacacgatagtggcacatattgctaaagatggccattactatatacaccctgatttaaatcagaaccgctccttaacaccgagagaagcggctcgtttgcaaacatttcctgatagttactattttgagagtgtttcgggaaaaccaagcagaactgcagcatatctacagattggaaatgcggtgcctgtattactggcagagaaattagctcataaaataaaaacgagttggtaa

SEQ ID NO: 448963 - DNA, 714 bp, Serratia marcescens
atgcctagtcagtttttaaaaaccattcttcataacaaaattcagcaagcatatgacaatgcagaggctgtttctgacatatcccatactactgtcaaaggcacattcagagagagttttctcattccgattattaaatcactactaccatctcattttggtatcggctcaggccagattgttgataaatgggatagattttcaccacaggcagacatcatcatttatgacaaaaggaaaataccaccaatcattgaacagaatgggttaggtgtctacttcatagactccgtacatagagcaatcgaaatcaagagcgacctaaatacagaggggatgcatcaaactttaaaccttgcatggtcactacatcctgacaacccacaaggattaaaaacggctaaaaaagggaatcttgaagatggaaaatctaactaccctatggttagttgcttcagttataagcaatctataacagatttggataatgcgctgtcaaaatggggtgtcacagaaaatataccaagtgtgatgttctgcttgccagatactggtttttatatgtattcccctcaatcaaagaaatataataaattccctgcgaatggtaaagttgagaccactgctacatatctcaccctgttcttgaattgtattgaagatgaagcaacttccagaggcgactactccttacttgaatggcttttgaattaa

SEQ ID NO: 448964 - DNA, 573 bp, Serratia marcescens
atgttaataaaacagcgtgaaagagtcgacactactttgaacgcagaaagagctgcaatagtggatagactaaaacttcttatcaataatttcttctatgaagaccttattaattctatttataagaaaatagatccacatcctgcctttaaaaaagtagagtttaaggcagactttgattctgataagccaggcttaaatattgtggttagtgatgaggttggagagcaaatttcgccaatactttatttcagtgcggctcaaacgaatattctaagtttaagtgtatttttagctagcgcacttcatgcgaaagatgatgagggcaatcccatcaatgttgttatgattgacgatccaatccagtcaatggattcgattaacatactttctacgatagatcttttaagaagtatatgtattcaatttgataagcaaattattatctcaacgcatgatgaaaacttttttgccttacttcagcgcaaaattcctgcccaaatttttggttctaaattcttgcaattggaaaagtttggtgtagtcgtcccggtgcaaccctttatgaactaa

SEQ ID NO: 448965 - DNA, 2142 bp, Serratia marcescens
atggcaaataaaacaaaagaaataggtttcaaagcaaaagctcaccttctgaaactattaggtgatgaactaattggcaatgataaacttgctgtgtttgagcttgtaaaaaatgcttatgatgcagacgcatcctcagtagaagtgacactagacttagactcatcagaacctactattacagtaaaagatattgatggctgcggcatgtcactaagtgatatagaggataaatggctatcaataggcacagatagcaaaagagggaataataaaaaaaggactaaagtatttaatagaatgcctctcggtgaaaaaggtgtcggaagattagctgtacataaattaggggagagcttacagcttaatacaagatctgaaaatgaaggcgagatagaaataaaaataaactggccaacactaattggagatgcagaattcattgatcaaacaatggttaatattgagttattagaaaaccctaagttttttaaagagactacaggcacaagaataaaaatatatgacctatataaaaaaacatggaatagaggcgacattcgtagtttaaaaaaaatgctagtcagcttaagctctccatttgaagcacactccgactttactgttaactttgaagcaaaaggaagagaaaaggacttggatggtgttctagacattcaggatattcttgatgtcagtttatggaaatatacatttgaagtaaaagaagatggagtaattgactatgaatatacatttacccctccatcatcattttccccacttaaaaagtcccacaaattaaaaagtgagcaatttttactatcaaaaattaacgaaaagaaaattgacacaacagagcctatatatttaaaagagataggattaaatggtatagggcctataaaaggtactttttatactttttcactatcacaaaatgtcattgaagccaaaagagccggtgcgcttcaacaattgcgtacatacctaaaagataacggtggcgtacgaatatttagggacaagatacgcgtatttaactatggagagcctggtgaggattggttgggtttaaatgcagatcgtattaacaacccaggaaaagggattggcacaaatacaattataggggcaatcgagcttgatctcgagaaaagtttcggactcatagaaaaaacaaacagggaaggtttctctgaaaatgagacctacaaaaccttccattggattagtcaaaatgttatagagaattttcttaggctacatcagagtgatagggaacgagttgatgatttcattaaatcaggtcgtactgcggatccaaaattaaaattcgatgacaacataaacaaaataaagaaggttgtgaaagataataatctagacaataagataggtggtgctatttcttatattgagaaagagtacaatcaaatgagaaatgtaatgacctcttctggtctcagtggtcttaacatctctgttattttccatgagattgaacgggagattgattctctccatcgggcaataatgaaagacgacgcagtattggaagaactaagggaacgttcatctaatttggttagtattcttgagagcttcagctcactgttgaaaaaaaggaagtcagaaaaattcagtgccagcgaggttattgaaaaagtactagcgctttcaattcatagatttaaacatcatagagtttcactctctacacccgtactagtggacgacaaagaatctgactttatactccatgcaccatttgggattgtacaggctaccataacgaacattgttaacaactctttatattggactcaggctaaaagtaaactaatagagagcgatgagtatatgcctggtgttggtattttttgtctccccaattggtatgatgaaggacctgcgattacaatcgtagataatggtgatggatttagtataccaccagaaagtgcagtacaaccttttataggaaacagacctggtggaatggggttaggattatactatgcaaaaacagcgatggagtcaattggcggcagattgattatcgactcaattgaaaacttaaaattaccgaaagcattcaatggcgcagcagtttctttgatatttaaaggaaataattaa

SEQ ID NO: 448966 - DNA, 1722 bp, Serratia marcescens
atggatgagcttaagaaaaagtttcataaacacagttcaagattcaaaataataacgcagtccaatcaaaatactgctgaaaggaacatttttatctacacgcaagagagagtaatcgaacgtgattttgaaaatataaaggttgatttttttatcatagatgagttttataaacttgcacctaatagtgatacagattaccgatgcgataggttaaacattgcattccataaattgtataaaaaatgcaaaagattttatatgcttggtccaaatattgatgggattatggatgggcttgaagatgatcttaattgttcttttgtgaagtttgataaatataaaacggtagcggctgatgagttctattatgaattagagtcagatggtaaagatgaattggtggatatagagagagataaacatttaataaaaatattaagcactattaaccaagatgaacaaacggtcatttattgtaagtctcctaaacgcgctaatgttttgatgtcaaagatactgtcaatgggacataccgatagatgcaaagataatgaaacatttactaaatggttgagaggtaattaccatcctgaatggaatttagcgaatgccatagactatggtatagcatgccaccacgcaaaacttcctagagcaattggctcgtttcttgttgatttgttcaataaaaaaagagtttctattttggtttgtacatcaaccctcattgaaggggtaaatactaatgctaagaatgttataatttatgatgattgtatcactggcagaacaaaactagactcctttacttttaataacatctcaggaaggagtggcagaatgttcgagcactttgtcggaaaaattcacattataggtaatagaccaaaccaacaattgccattaattgacatacctatcattactcagagtgataatgcctctgattctatgcttctccaaatacaaaatgacttatcagaaaatagtttatctaaaatatttaaatatacacatcagcaaattttaccaattgaattgattaataaacatcaaggtgttccgcctgaaaggttattaacatttgcagaggctttgatggaccattgtggaaaatggcataaggatatggtgtgggattcgctttacccaacaaaaaatcagcttaatcatttatgtgagattttgttcagatatttttctttgtcaagaatggggaatggagctgtcaagtcagcatctcaacttcacacaaggctgagatctatcatgaatcatgatagtgacctaaagttgattgatgatgaatattcttattggataaaacgtaattcaaattatactgcagatgatgcagttcaagttatttttgatttcaaaagaaacttagttagttataatctccctaagataattctcgcgatcaatgatatccagaaattgattttttcaaggtttaattatacttttggtgattatacaggtttttgtcatgccttagaagctcactttgaaatccctacgctggtgacacttgaagaatttggtattccaatgcaaatatctaaaaaaatcacaaaattagctggcgttaccagtgatgatgatatcgataaagctttagggaaaataaagaaattttcacgggagaatagtgtttctaattttttagatgattttgaaagttcgcttttagaaagtgtagtatatttcttatga

SEQ ID NO: 448967 - DNA, 318 bp, Serratia marcescens
atgaagatgaccgaaatgaaaaaagtaataccctccgtattattactcagcgctatggcgtcatgttccacctccgtcatggccgctgacgcctgtaaagtggtgttatgcatgtacggtaaagccaccggtaacggcggcggcaatgaatgccattcggccgaacgttcattctttaatatcgtggaaaagaacaagcacggttttctgccggaccacactgccgatgccagaaaatcatttttacttgagtgcgattcggcagacccggcaattatcagccagataatcagtaaatttggccgcgtgcgtagttaa

SEQ ID NO: 448968 - DNA, 1068 bp, Serratia marcescens
ttgggcattttaacttcctctatatggggggacttaaagcaaaattcttctgactgcatgcgacataacagacttgtcatattgagtcttattgtggaacaatctatttatcctttaaatagacctaaacggacaaacacttaccccaaaatgaacaaaataaacttgagaaatgacgaccttgaagtgtttttacacgtcgtcgacagaaacaatttctctgccgcagcacgagacctacagatactccccaagatggtgagcaagcagatagccaggctggaaactgcacttggcactacactttttgaaagaaacacccgtaatctacgtattacagacgagggcagagctatagctgagagggctcgcgtagcgttggccgttctggatgagatgaaggaactttcccgaggggatagtgaggagttaagcggaaatattcgtttgactgcgcccgcaccgtttggccgaaaatatgttgctcctgcgatcgctgcattctgccaagtacatccgagggtgggctttgatttaaggttatctgaccaaatccaggatctttacagtggtgatttcgatctggctattcgtatgggggatctggctgattctcgccttctggccagaaaaatagcaaataatagacgtattctcatcgcatcgtccgaatatctgaagaatcatccacccattgagcgaccagaagatcttttaaatcacaactgcttagtattcgcttacccgggttttttacacaattcatggacgttacgtaaagccggtcatgaaagaagcatcagcgttactggcaaccttatcagtgacaacggagacgtattgcatgcctggagtttggcggggcttggcatatctcttcgagaaacttgggatattcatgatgaattgagagctgggaaactttgccgagttctgcctgattgggaagcaaacacatctcagatcagtgttgtccgggcgcggcgagaaccaataccccgtaggctaagtgtatttattgatttcatgactgaaaaatggaaacgggcaccatgggatgatgattaa

SEQ ID NO: 448969 - DNA, 1818 bp, Serratia marcescens
atgccgtcacgtagtgtcagtgcagcctacttagctcaggctgccgagttggccggaaatccgggccagttagccgcgtatcactcccggggacactgcgtggtgctcgccgggccagggagtggtaagacaaagacgcttgtactgaagctggcccgaatcctggctgaggatgttcaagctccacgtggtgcggcatgtatcacatatagccaagaatgcgcacgcgagttaacccgtcgtctcgaagcgctagggctcagagaggcaccgaatctctttattggaaccgttcatgggttctgcttgcgccatctgttgatgccctatggacgacttgccgatctgccaatcccatttccgctgtcagtagcgtctcagcgcgagagcgaacggttacttcgacaatctggtgaccgtctatttggcgcaaaccatccctataaggctattgatctcggacggcatcgccgttcggtgttgaatcgcaatagcgttgcctggcgtgcagaggaggagctcgctgcatgggccgaggcctacgaagcagcattgcggcagcaagggctaatagactacgacgatatggtgatattcggccagcgtctgatcattgagcatgattgggttctgcccctaatacaggcgaaatttccgatccttgctgtggatgaatatcaggatttgggcgtggcgctccaccgtatggttaaacgcctggctttcgagggaggcgtacgcttatttgctgtgggtgatgcagaccaatcgatttacggtttcactggtgccgatggtgcgttactcctagaactggcaggcaggagagacgttgaaacagttcggctccagttgaactatagatcaggggcgggcatcgtcaatgcatcggagatggtgttgggtgaggttcgtggttatcgagcaaacgacccgaaccgccagacaaccattgcgttccagctgtgcccggatggtttggtggatcaggctgtccatgctgtcgcgcagattattcctgctgcgttggccgctaagccgggtcgaacgctgggtgacatcgccattctgtacaaggactaccgtgccggcgatgtggtggccgatgcggtgacagctgggggtttagattacattcgtgtggacaccgcagcaccttatcgcaaggttaccttgacgagctgggtggaggattgcgcggcatggtgtgctggcggctggcgtattgggcaccctcaactgcgcggattgatagaccgttatatagcatttcatcgggcaaggctggatgatgcatgcgcccggcgtaaggggcaagaattaactaggctgctttgggcacttcgtgcagaccaacatcctgcgtgcgattttgtcgcgtctttgcgcaacggtctcgttgattccctgctggcaactgagccgtcgctttctgatcaggctgagcaactagatcgcatgactgctgcacttgccgaaggcggtacgttagcgatgttggatatcacgagcctaggtggtcgtgacggttcacctgagcacctcaatttgctgacacttcactcagcaaaaggttgcgaatatgacgtggtcatcatggtcggcttagatctggggaatttgccgtggcgcaatgagacgccagagaagctgcgtgaaagccgtcgtcttttctatgtagggctgacccgcgcacgggacgaggtgcatatgctgtattccggttttgttgatggtcgctacggccctatgcgtctagggcgttccccatttctggatgaactggaggagcgaatgcgaggggccggtttgcagtag

SEQ ID NO: 448970 - DNA, 1785 bp, Serratia marcescens
atgcggatttcccgaattcggttaattaatttcgccaacttctctgacgttgatgttgaaacgggtgagagtattgttattgttggtgaaaacaaggttggcaagagcaattttattcgcggcctgcagctgattcttgacccagggttgtctgagcgtgaccgtcaactgggttttgaacatttttgggatggattgggcgaagaaaaattgggggagaccatcgaaatttcagtggatcttactgattttactgacgatccccgattgatggcccacctgaatgactgtgtccttaatccggggcctccgatggtggcccgtcttacctatcgctttcagcccaaaaccgggttaaatcgagctcctgagtcgttaaaagattatgagtatgtgatcttcggtggcgctgatcctgacatgcatattggtggtgcgtttcgccgtatgttacccatcgatgttcaaggcgcgttgcgtgatgccgagaaggatctttcaagctggcgtaattcacccttaagaccacttattgaagaactatccgcatctctggacgacgagactcgtgaggagattcaaacccaggttgatgaggctcagcgggaactggctaatcatgatgaggtggcagcaacagccgaacgaattagcgaacggttggttgctatcgcaggtgagcaacatgccgttccgctatcgttaggacttgcaccgactcgcgttgatgcgctactacgtagcctgcgcttactgcttgacagtggcattcgtggcattggcgatgccagtctggggacggctaatctgatttttctggccctgaaaagcctcgaacttgatcgtcttgttgatgatggagaacgagaccatacgtttttcgtagttgaggagccggaagcgcacctgcatccgcacgtacagcgtctggtgtaccgttatttcctgggtactgatggggggaatgatgatgaagggacgccactgacaacgatcctgaccacccactccccacatattgccagcgtcacgcctgtcagatctatcgttctgctgcgttatgactcagaggacgagaagacaattgctgtttcaactgcgaacgcaccgttttcgcggcgggacgaagatgatttgcagcgctatattgacgtcacccgtggtgaaatattcttttcacgtggtgtaatcctggtggaaggagatgccgaacgttatcttgtcccggcattcgccgatgctcttgatattcccctcgatatgcttgggatcacggtgtgctccatcggtggaacaaatttcactccgtatgtgaagctattggggccacacgggctcaatattccgcatgtgattctgacagatcgcgatcctatagcgggtagagagcctctggttcgtagaagacttatcaatatgttaggcgtacttgagggagatgttgaccatgatgatatggataccgatgaggtgattgcacgtgctggggagtatggatgcttcgtcaatgagatcacactggagcctgagctgtttaccggtggattggccgaagccatgcagtcggtaattgagcgggaattgtcgctggcgcaagttaccctagatcggatacaggcatgggtggatgacacggaccagcttgatatcgtccggttgttgaaactaattgagcgaattggcaaagggcggttcgcccaggcgctggcaccttcggtgtcggaggataattgcccgaattacattcgtgaagcactggagtatatctgcgatgccgtcacgtag

SEQ ID NO: 448971 - DNA, 1281 bp, Serratia marcescens
atgcagtcccattgcgtcatggttaatggtggcagtggtgtattggtcaatgcaatgacactggattacacttatgtactgactgcataccatgttattcgtgacaccctcgataatatcgaagttaccgatcacaatggcaataaacttaaagtattggctgtgctcctatatccagatattaaaaaggtgaacgaatcccattatgacttcgcaattttaaaaattgaatatcaaccagaagttacacaaagttgttttactgcttcgacgttgcctcctcgggctgagcttgcattagtaggatttccaaatactgaaagaaggagttcggatcctataaaatattatgatgggcatatgactagcgtggtcgatgagcttgtcattttcactattgatggtgtacctggcttagccacgataaaggggatgtcaggtggaggtgtatatcacatagttggtagaaatacatttcttgttggtgttgagttcaggatggatggcactgaagaggaacaacagtttggccgagtgcaatgccatagcttagcaaagtttgatgaaataataagagcatacaatagtgcaccgatgattcctgcccatttggaatgcttttctcgaatacaagacaaaatatttaaatttaatgttattgatcaaaataatgttcgtaatcttaaagacgcgttagaaaccctttccgcatcgcttatagctagtgggatgtctccgccttataaaattatggggcaatatggattgcagcttttgatggagcctaaaactcctaatgagctcagcaacaaagagttatggatttcttattttgaatttttagttatttgctctgtgatagataatgtaggtattgtggatgatgtatatctaaaaaggttggagagaaagcggcggctgttatataccagtgatggtgcgaactggattagccgtttggaagaactactcaaaacggcacgaaaacttttagataaggatggaactttaatcgttgcatcacctgatgctgctgcaagtgtcttgcctccgaactttcgacttaaaaatgtaataagtaatatagcggtagtgccaaaccaggggccatttgctatcgatgaagttgaaagttctatttatacaagcttcaaattaactcatctggagggactccgcaaaagctgcgtaatagacagtgaggatgaatatctagtagttccagcaggtgtaccacaattgcagttatttaaggagaagcttaatgaaattattaagtaa

SEQ ID NO: 448972 - DNA, 1053 bp, Serratia marcescens
atggggatcatcgtacgaattcttaaagctaaccatggcgattgcattttggtgagtcatgaaagcagttcaggcactctcaacttgctcattgatggggggcctgcgacgacattcaggtatggcattaggcagcgctattctggagcattgagtaatgctcttgatgatctgaaaggaaaggggcaaaacattgatcttgctatcctgacccacattgatgatgatcacataaatggttttatcaaggcattcgagagtccaaactatctgcgtcagatggttaaatcgatctggttcaattcttcgaggttaatcacacatcattttaatgtgcctgaaatttgtgaaaataatattttcttgcaggaagtttcctctgaaactagcgttaagcaggggcaagaatttgaggcattacttgatgaaatcggttgtgcgcgagcaccgctcattatggcagggcaaatctataaagtaggcccgattacattaacagcactgtcacctgaacgaagacaactcgaacagcttttgcataagtggccaacggaagtaagttcagctgatacttcttcacatgagaatgattatcactattcattgggcgaaatttgggcagatgatagatttgaatctgacccatctatttataatggaagctcaattgcatttttactggaagcagatgacaaaaaaatgctttttttaggagacgccagtgaccaagttgttacaaaaaatttaagagcattgggatatagcgaaatgaacaagttgaagctggatctggttaaagtttcgcatcatggtagccaatacaacacaagcaacgaatttctttcaatactagattctccatgttttgttatttcaaccaatggtttgaagcatggtcttcctaataaaagaactattgcgaggatcttaaaggaaacagatggtgatgtttattttaattacagcaatgtgattgctccgctgcttttagcgcatgaaactgagagctattcttctcgtctaaaagtgctaggtgatgagattaaattctaa

SEQ ID NO: 448973 - DNA, 891 bp, Serratia marcescens
atggattgctatactctagatcctaattttatcgatgctatctctagtgattttttacccacaattgcagcaatgcataaaaactcagcattagaatctaatctaacaatttttgaaaaccaaaccaacattgtatttaagaaaaactatcattatcttttgcaattttttgctcaggagtttgttaatcagttgggccaattaacctacaaagatgtgtatataacttgctttacaaaaaattatcccgactccgatatgtggggttattatggagataatcataaaggctgctgcttgatatttgaaactactactcccgaatatcttgattcctatacacggaacccagaagataacgtaataaagattacacgaacaggtggaacgaaaccaatagacatgaaaattgaacctgttaattattcaggcaattacccagagataaatttcttcaattctgtaggaaatatccagcgtggaatttatcaaaactgctggttaagtgatggtgaagaacgaagccattattatgatcatcgctatgttaatcatcataggtggctcgacgaatacaatcacaacatgcattcattttttttctgcaagacagaacattggagtaaagaaaatgaagccagggcaattataacaactttctctggcgaaaataatatcgctaatagaaaagtacgatatgaattccagtttcttaagggtatagtttttggcattaagacgtcgtactctgacaaatgtgagattgttaatatattggtaaataaatgcgataaataccatattttcgactttaaattctaccaggcattttataatcacaaggagaataaaatggataaagttgagattgacattaaacatcgccgataa

SEQ ID NO: 448974 - DNA, 1272 bp, Serratia marcescens
gtggatttgtatactaatcgagtttcaaagaatgacttcatcagacacggtatcatcaaccatattgaagatggtatggatctatttattgcatcagcattttttacagaatctgatgttatagatgaattccttgctagagggtgtcatttgagaatcgttgttcgccttggttttccaacctcacctgcggcacttgaaaaacttctaagtcacggtaacgtagaagctagattcttcacaagtaattctttccacccaaagctatacatttttggcgataaaacaatcttattgggttccgctaacctaactcgatctgctactttatctaaccaagaggttatggtagggctagacgctgaagatcatcgattcgctgaacttcaagagctttttgccgattattgggatgaagcagaagttctaacaaaagatgctataaaaaaataccgcagcatttataataaattctcgcaagtaaacagatctttgtcagaaatgggaaatgctattaccgatataataggtgatgtaaacttctcgaatatctaccgcggtagcaataaaaaaaccaataaatccatattcttaggtgcttatcagaaatcttatcaagaagctgtcacggcatttcgccgtattgaaaatgtatataaaaatcatgaaagaaaggtggatggagaattaattccattacggctagaaattgattcatttttcagctttgttcgggatttttatgcaacgcaagacacttggaaagaccagcctcttggatgggatgaacaacaaaaatatagagctaaaattcttattaatgaatggttaacaacgaagtgggagcattttgaggaccgaattgtgccaattaattaccctttaattaaagggctttttggttcaaaagagtcaataaaatcagcatcaatggataatgttgttgatgctctatgtgtgttacattcattccatgacaggttccgattttacaaaggcggcctcgaaacattgaaatcttcattcattgagtacaatgacgaaaaacaagtcaaacatactctgacgtatcttctatacggcgcaggtgatactatatcacgcatggccgactgtatctacgatagagaatataagttgaaccattttggtaagtcgaatattcaggagcttataggttggataaataatgaagagttaccagtaatcaacggtagaacaactaaagttttgagatactttggaaatcaaattagacaaataaatgaatag

SEQ ID NO: 448975 - DNA, 1260 bp, Serratia marcescens
atggacaatccacgcagtgctatacatgcaatcaaaggttatttttatcaatttgataaaactattcttgagttattacgccgttccgataatgatatgattttgattgagggggttgaagatattgatcttaaaaccgccaatgacaatacggcgatacaatgtaaatattatgagagtacagaatataattcatctgtcatagcaaaacctattcgcttaatgttaaaggatttcgctgagagaacgtttaatcaaaaggaatcttataggtatacattgtatggatactattctaaagggcacgataaactgactcttccattgacggttgaatatctcaaagataattttttgatatataatgaatatgaaaaaaaagacaaaaataaagaaggtgataaagaaagaaaaaagaaaatcatcgaaactcatactgagttaggtcttaccgatcagcatttatcagatttcataaaattattgactattgatatccatgcaccgtcttatgatgaacaaataagtaaagtgtttgaagagattcagaaggtttattcatgttctatttttgaagcggaattttattattacaataatgcagtttcacttataaagaaatatgcctccttgaaaggagtggagaatagaaggatctatccggttgaatttaaaaaacatatagatactaagagagtcttatttgatatttggttttctatatttaagtcagaggctgtttactgtagggcgttaagagagaaatatttcccttcggtaatgaataccaataattttgaccgtttttttattattgaagataacggatacaaaatcaatgaagtgattgagttaattggtgttattttaaaaagatggtctgccactaaaataaaaataaaaaaagaggatagattttgtccatacttttacattcatggaatgtcttcttcagatttattggaattgaagctggcattaagaagagctggctatcctccgatggatggacatgattttcaaggtgcaacttttaattgtgattcattaatgagagatgttaatgatatttctttttataaagttaggtttataaatgatattaaagtaattgacgaagtattagcaaggtcaactaaaacaaaagaaatctatcaattctatgtaaatgagcctgtttacaattatgaaagtaaacaagataaggttgttaaaatacaagttaaatcattagatatgtgtaaaaggatattaaaatga

SEQ ID NO: 448976 - DNA, 1791 bp, Serratia marcescens
atgactaatgaaaaatcaaacaacgttaacgctgaggttatatcggtttatccaaataatattaagatacttgtaactgatcttaatgattttaaagatggtcaaaatttgaaagttggctcatatatcaaggtgccctctgatgatgggactatgatgctcataggcattattgaaaacttctcaattgaagctaaggatactggagaaagaaagtatcttatacaagctaacccattgggaattattaaagatgggaggtttgagcgtgggggtgattcaatagcattacctccaaaagaggctgcgcctgcaacatatgaagatattagtaatatctacaaagattctgttgaaaaaaacaagcattttgagttttgctctctttcatataacgaaggtataagaattcccttggatgggaataaattctttaacaaacatatttctataataggatcaacaggttctggaaagtcgcatactgtttcaaaagtaatacaaacagcaatcaatgggaagagtggtgattttaatttaaataactctcatgtgattatttttgatattcattcagagtatcgttcagcctttcctgatgctaactttttagatgtcaacaacctttgtttaccatattggttgctaaacagtgaagaactagaggaaattctattagatactggggaaagagataattacaatcagtctgcagtatttagaatgctggtaacagcaaacaagaaaaagcacaataagtcattatcaaaagttttttatgatagccctgttttctttaatatagatgaaattgaaaatgctttaaaaaacctgagagatgaaacaaaaaactcaaaggcaaatgataggtatatgattgttggcgagtctggtgcggcagacgaaaagggagatagctcaacaacccaagattgcggctgcaagcttgatgataaagaacgtattgaaaagtacttcgagaagaaattcagtttttacaattctaaaaattcgaatgtaacaaaaggattttacgctgatggaacgctagataaattcatttcaagattttcagaaaaaataaatcaagatagactatcttttcttttttctgaggaatctaggagccagcagtttgaagatgttataaaaaatttactaggagcaaaaggagaaccgggaggcaataaaaatgtaacaatcatagatcttagtggtataccattcgaagtgttgagtattacggtttccttgatatcaagacttgtttttgagtatggttatgtatataaaaagctgaaggagtctaagggggaagacactgactttcctattcttttggtttatgaagaggcgcataaatatgttccgaatagcgaccttgcgagatatcgttcttcaaagaaatcaatcgagcgtatcgctaaggaagggcgaaaatatggagttacattacttttagctagtcaaaggccatccgagatatctgagactatcttctctcagtgcaataattttattgccatgagattaacaaaccctgtagatcaaaattatgttaagagattactgccagatacactaggatccattattgatactttgccatcccttaaagcaggtgaggccttagtaataggggagtcgattgttctaccttctatagtatcgattgatctatgtcctgaagataggcagccatcttcaaacgatattcgatactgggaagtctggaaagagcaatggcatgacgcagatttttcaggtgttaaagatcattggcttaaataa

SEQ ID NO: 448977 - DNA, 156 bp, Serratia marcescens
atgctggcgaagatcaccgtaatcgtgcgtcatctgatacagcgcttcgccaacccgaacgaggcccgcgcactgctccaggcgcagcagagttcggcggaagccctagaaatcaaacggcatgccgtccgcttattgatttttgtggttacctga

SEQ ID NO: 448978 - DNA, 2421 bp, Serratia marcescens
atgaatcgggatttacttgcgcgggtacacatactaaaaccagtggacccaaccctacttgaagaacacgatgatctattcctacacgttattgtggcggcggtactaagcgataaccaagtacaacaggctaaacatgacgatcccaattaccgctcgatgttaagatcactggaggagctggctggcggacttgaaagtgttgatgctcaaaaggatgagcgtggattagataagttacgcagttttattggcaaccgacagctcaatagtaaggtacatgctttcttccgaagtgtgttaacacttctgggtagggatttgctagtgctccccatagacgatgtagatactgcactcgatcgagcatacgaaaacctagaaattgttcgccgctatctaaatactccattattgctgcccataattagtggtgatatgaatttgtactacgaggtgatctggcgcgaatttcatggaaaaattgtcaaacctacaccaaaatataaagaagaacaggcaaatcaatgggccatccaactagcaacagaataccagcgtaaaattctaccagtgcctaaccgtatgcgcatgcccgatattacggattacctgagtgattttaagattgaagtacgtattcctggcacagatcaatatgaaggaacgattacctctctaggtgccttccatgcctggttagagggttttatttccggcccagtcaattcgctggaaaatagtcagttaactttacctatcccttcaatccgagctctgactcaattgattcgacgctgtgggcaagatcacttgttggaaaaactgccaagggagttgagacaggcacagaatagtcttgccgccaagcgagccggacaactggctccagaaatccacagtgaaatggtcgaccgctttaataccaattacgtagaagctgcgctggcaaaggatcgtgactacaggcccgtctataagtcttttgctgatgcagcccgacaggcggaaaatacacgcagtgaagacaccataaaagaaatgcaggcgaacgatgcagtgcaactgagtaaacggttacgtgagcaatttggcagcgagcaggaggctggtccaacttgcttggtactggaagctatacaacattggtatggtaggaacgaactcggcagcagcatcttggatactcctttattccaaccgctgaaccatactgaagcatcctacaaagatttcaataaacgggacacattggcaagttggtcgaaggggcttgaaaaacaacttcctcgctattggttagaagaaattggcaaacgagaagtattactgccctacccattaccagaaagtgggatgtggggccagcttagttggaatgtcactcaatcggccaaaagcgctcaagggcggttattgctaagactattgactcatcacaactattatagcgagtctagccgaggcaccaaaatgaatatcggccgcctatttgagctactggtgaccagcttagttcgtgacgtaacggcttcggatgtggccagtcttctggatcgcgcaccattctactccaccagtatgttagcccctactaaaactcaagccttcatgtcgagtgataatgatgaatatgaggaagttacagaatcagatttagatccaaagtcaatcgatgccatcaatgccctcgttaaggaagttagtgtttggcgtaataaccatcagctaagactggtacgtttttctccgtggttgatatacaacgtgttcaataaggttttcaatcaagctttattctttaatagtaatcagcgaattgataagcatgaaaattatgctaaaaaggtcttcgatactggcttgcatgctttttactgcatctggtcagcttgcggaagttttgaaaaaggccccctattcggtttgcccgccagtatttctacggttaatttgatcaaaaccacttcttttgagaaaaaccccttatttcggcagaacatactcccatttttccctcaaggtggagggttcgatagtgatgttgcctactatggcaaggcaatgcgcgcaatgacttattacttagggagccatccattacggaagtggttagaaactgcagatcaacctcaagaagatattgatgcaccagtctcaaaagtaactaaaggagtaaataccgaagtagccaagggtgaacatgctaatctccatttgcgtgaattactcgaaatcaccccccgtcgtaaagacaacatatctgcagggatcctagatagggaacttaagaagttgagcccggaaaaagtccgatttattctcatggagatgcataaacaatttccagagacagaagccttactccgattagaaaaagcatatagtaaaatttccaatgaacagtcgagagattcctaa

SEQ ID NO: 448979 - DNA, 2796 bp, Serratia marcescens
atgctagagcgctctctcctcgaactcatcggcgggcaatgcttttctagtcatgagctggcaaaaaatctgctgcagtatctacgcaacaagccacctagcaacggtacaaataattctctggctatgctgcagtcggactgtcgcgaagctctattgcgctgtatggaacaggagcgaccccgtcagttccgtcgcaatgatatgcaccggctgattgatatcatcatccagaaggacctgtttatcagcggccaactacctttattggagaagctctcaaataacctactgattcggcatggtgactatcttcattatcgcgaaactcaagtgcaggtttactgccgactggctgtcgatctggaccctacgcttttagctgcatggcatttcagtggttggatggatgaattacaagctcccagtgctgagagtcttcgtagagtactcgaccatcagaaaccattttttgccccacttcccaatccagaccttccatatgcagagggtcatgtgcacttaggcggtattagcgcagcaaaattaattttgggcggacagctgcttggtaagttacacacaactaaacacatggctgaagaaaaaaccgtattgcaacgactacgaagagttctagtcgagctactaaagtggtcgcccgcgcataatggcgagaacttcgactatcaagttatccttaagaaagcttgcagtgatgaaccagatctgtccggtaaaaaggattcgtttcccgattgggatatcttaggaaaatatcatgcacaagcactggtaggctcgccagaatggttactagccgaaatcgcacagcgcgctaacaggcctgatgggataggtaattgttggttatggctgatggttttcttacttcggcgttaccgtcatcccgaaagcccgccgacactacgcgtagcgatcttgtatctgctgactgaaaccatgaacctccgccgccaactcattatggatgatctaggtctgagtcgttttacccaagattattttgctaacaaattacgaaaaacagccacaaaccaacatactcgccttcccaatctgcatcacctaatggccagcccaaacgacctgctggaagccaaaggcggcccaagttttttcaacccgaaggaaatagctaaatttgtacgtgcgttaggggatacgctgggtcaatctcttcctcccgttctccctcatatgcaggcgataacacataccaagcccctgaatacagccgagctaagctatatcagagtattagaacaatggcacttttgcgcccatttttcccgctcagcaaaggatggcaaggatggtcagaaatcgacgcccgatatggcgaaattatggaagcacgccgaagaactgcacaaaagcctgcgaagcacttctgattggaatcaagacgaatttcttggcggccgaaagaacccgaatttttcttttgagccgtcacggtggttgcgtgggttagatgtagcaggcaatgaaaatgacttgcgaatcgaatggtttgcccccctacttcgctggctacgcttgggttctcatccttatagtccagattcacaagcatgtagtggttttcaccttagcattcatgctggcgaagattatgcccacccactctcaggcctgcggcatgtggatgaaaccgtacgttttgccgagatgcgcgatggtgatcgactgggtcacgcactcgctctaggcatcaaacctaagcactgggttgaaaaacatggcgatatgattctaccagtggacgaacatttggataatctggtatgggcatggcaccacgcctgccttctcagtccaagattaccattagccggacaggtgctaccgttattagaacggcgtatacgtcgcatatgccgttatggcgcttggttgcattatccggaaattaatgctggaccaggttcaagacctgcagaagcatttgaacatcaggtcgggaatacaatttctcgcgagaaattgcggtactgggttggccagtacgatgagaacattactccagagttactgttccaagcgtggcttctacgccgcaattgttattttcaattccgtagaattggtgatggtcaaattttgagtgccaaggaaaaatgctcggtacctgatctagctcggctacaacgggttgatactaatgatgggaggctaacacctgaggcattatatcaccaacgccaccaacacctggccctcggtaatgcttcaccatttttgatagtggtacgcatgcaacacagaaatcaataccatagtgaattaaatcatgccccagaagagacagatgaagctcttctgcacgatagcgaaagcccagaagaactgcgctttatgcatgctttgcaggattatttattgcatgaatatgatcgcaagggcctgataattgaaactaaccccacctcgaatgtgtacatttcccgagtcggtaagcacagtgagcatcccatctttcgttggagtcctccagatgaatccaccttggccaacggcgctaagcataaccgttacggcctccgctgcggcccaatccgtgtgctggtaaatactgacgatccaggtatcatgccgactacacttcgtaccgaatttgcgctactacgtgacgctgccattgaacgcggtatttctcgtacggtagccgaagattggctggaacgcttacgtcgctatggtgtagagcaattccatcgtcatcaccaaccagtattcacgctgaatgcagccaatcatttattcacataa

SEQ ID NO: 448980 - DNA, 336 bp, Serratia marcescens
atgaaagctgtaactacaggtaaacattcttgttataaagcattagatatgggatatgaaaaaactcccgatattaatgcttacagcggtgcttactacattaaagatggtaagaaatggatctttaatatcattgggttaaagaaggatcttggggtaacatctgatgatgatctgcgccaggaaaactatgatgttgatgtttattggatgatagaaaaagatccggttaattcagggatgatagcgttatacgaggatttgacggttgaatctggtgcttctgcttacttagaaggcgggatgtatctccacccggatggttcaatagactaa

SEQ ID NO: 448981 - DNA, 1269 bp, Serratia marcescens
atggtgcgtaaaaccatcgctggcgctcttctggatgaatggaaaggaaccctaattaaaaatatatgcagggtcgttcgtggtagttctcctaggccagcaggtagtcccttatttttcgacggaaattttttaccgtgggctactgtcgctgatctgacaaattcagatgatatgtatctcacatcaaccaaatccatgcttacggaagcaggagcagaacgaactcgaatcacagatccgggaacactaatgttgaccaatagtggagcgactctgggtgttcccaaaatctcttcaataagatgtggggcaaacgatggaattgcgatgctgttagaacttgatggtatcgtaactgaatatgcttattactatttggcgtcgaaaactcaatattttcgagatgtgattgctcctggagtgggccaaccaaacttaaatacagatctgattggtgattttccaataccaatacctccactcgccgagcaaaaaaaaattgtccaaatactttctacttgggataaggcgatcgctaccactgaacaactgcttatcaatagccagcagcagaaaaaatcacttatgcagcaaatgcttattggtaagagacgttttcttaaaaaaaacaaggattgcacatacaaaaatactaagtatgggaaacttccatccgattgggattacgttgcactcaaagatatctgctaccaagtttcagagaggaatgactccgctaatgattatcctgtactatcttgctcaaaatacgatggttttgtcgattcattaagatattttaagaaaaaagtatatagcgacgacacatctggctatcgcgtaattccttttggggcttttggattcccatctaatcatatagaagaaggttcaatcggtctccaaacattatatgacttcggactagttagtcctatatacgtggtgtttagggttaatgataaaaaagtgaatagtgaatatttgtacgctttgttgaaaacagaacattatcgtcaaatatttagcgcggcaaccaacgcttcagtcgataggcgaggtagcctacgttggaaagagttcagtattattcatgtaccacttcctccatcagaggaacaagacagaatcgccttaactatcaaagttgcaaactcagaaattgctgcaattcagaagaaactagaatatttaaaacaagaaaaaaaagccctgatgcagcaactgctcaccggaaaacgccgggttaaggtggacgccgaatga

SEQ ID NO: 448982 - DNA, 762 bp, Serratia marcescens
  misc_feature (374)..(383): n is a, c, g, or t
atgaagacattgttgaaaaatacaggtttgatttttaatcttactaagcgggatgttgagagccgctatcgtgggaccagtcttggtatagtatggtcactgctaaatcctgtgattatgctttctatctatagctttatttttggttttgtgtttaaagccaagtgggggctgacaacgacagagaattacacgttgattatgtttaccggtctactgacgcatggttttattgctgagtgtcttggcaaggcgacaacgatatatgtatataatgtcagctatgtaaaaaaagttttattccctcttgagtccttgtgctgggtgtctgtttttggcgcattattccaattctttatgggatgtattgtttnnnnnnnnnnacctgttagtctaatggcattattggtccctattgtcattctgccattggttttattatcatatagcatttcattattcttgtcatcgctaggtgtttatattcgtgatatggggcaggttgtctcagttatcattgccttaatgttatttatgtcacctatattttatcctatcactgctgttccagaacaatatcgcatgctgatttatattaatccgttaacgtttattgtcgaagctttacgcgatgttgtattgtacggaaaattattcagtcttgaagggtatgcactctattggggcatcagtattatgctgtacgtattagctataacttggttcaaaaaggtaaagaggggctttgctgatgtcctctaa

SEQ ID NO: 448983 - DNA, 882 bp, Serratia marcescens; identical to SEQ ID NO: 431705

SEQ ID NO: 448984 - DNA, 243 bp, Serratia marcescens
atgagccggcggttactgcccggccgtgaggccggctggttgctgttgctggcggcggcgctgccgatggccctgctgagcgccaccttgtcggggcctgcgccgatcgcgtggcacgacgcctggcgcatcgtatgcggcgtcagcggcggtgcggcgaccgatgccgaggtgtatcagcgcatcatctggtcgctgcggatgcctgtctcttatacacatctccgagcccacgagacgtag

SEQ ID NO: 448985 - DNA, 570 bp, Serratia marcescens
atgaaaaaaatgataatgatgtttaccctgttggtcagtgctctgttgagccaggccgcatgcgcagcggcttatgatcccaagccaatagaataccggaatgtggtggctgacagcgtacaggttgagcatgaccgtattatggatggtgttgatgaatttatcatcacggggaagaaggggaaggtcactgagaaattcaggcttacctgcaactctgatgaagcgcgtttgaatatcctgtattacctggaagatatctatggtgataaggctgatggggcaacgggaatgactctgcagtattatccggcaggggctcatcaaatgaatatcagtatcgatcatcccgatacgctgatggatagtctgctgacagccaatttggcacaggctgtttcaaaaatgctggatcacaagaccggaacctttgtttttcacttctaccataatgacagcagcttcgatcatgtccctctggcgtacagcttccaataccccgcgaaattgctggccccagcactagggaaggcattggttgatgctaatggactgaccccacgaccgtag

SEQ ID NO: 448986 - DNA, 513 bp, Serratia marcescens
atgaaaacacgacactacctcgtggcactaagtacgctattgctggcggggtgctgcctgccgacggcgaaggcgggaaccatagaggcagttaaccacaccaaatgggcgatcaaccatttcagcgtcgacggtcagtcggggatagacattattgggccctatcagggcggcggtggcggctgctgctatggcgtgccggcgaaatggcggccgggtatgacggtaaaaatcgactgggaaaccggggttggtggctcaaagggatttccaggctttgctgattgggaaaagtacttggcctgggaaaaaaaaatgaaggcccagaataagcagcacagcacggtggtgccggtgccggactatacgggccaggaaacctgcgggatcacggtgcatttcatgccgtgcgatgaggtgaaggtgacgaccagctgtgccaactacggccatccggaacatccgatcaaagaacctcttaagatgccggagccaaaagtatgtccgaaataa

SEQ ID NO: 448987 - DNA, 513 bp, Serratia marcescens
atgaaaacacgacactacctcgtggcactaagtacgctattgctggcggggtgctgcctgccgacggcgaaggcgggaaccatagaggcagttaaccacaccaaatgggcgatcaaccatttcagcgtcgacggtcagtcggggatagacattattgggccctatcagggcggcggtggcggctgctgctatggcgtgccggcgaaatggcgaccgggtatgacggtaaaaatcgattgggaaacgggggtgggtgatacggatggatttccggggtttgcggatagggagaaataccgtgcttggcgaaataaaatgaaggcccagaataagcagcacagcaaggtggtgccagtgccggactatacggggcagaaaacctgcgggatcacggtgcattttatgccgtgcgatgaggtgaaggtgacgaccagctgtgccaactacggccatccggaacacccgatcaaagaacctcttaagatgccggagccaaaagtatgtccgaaataa

SEQ ID NO: 448988 - DNA, 534 bp, Serratia marcescens
atgaaaacacgacactacctcgtggcactgggtgcgctgttgctggcgggctgcagtcagccgacggcgaaagccaaaacccgaagcggtggcggtgggattattgtcgccatcaaccacaccaaatgggcgatcaaccatttcagcgtcgacggtcagtcggggatagacattatcgggccctatcagggcggcggtggcggctgctgctatggcgtgccggcgaaatggcggccgggtatgacggtaaaaatcgactgggaaacgggagtgggtgatacggatggatttccagggtttggtgatgatgcgaaatatctggcctgggaaaaaaaaatgaaggctcagaataagcagcacagcaaggtggtgccggtgccggactatacggggcaaaagacctgcgggatcacggtgcattttatgccctgcgatgaggtgaaagtgacgaccagctgtgtgagccccggccgaccgggctatccgatcaacgagccgctacagatgccggagccaaaagtatgtccgaaataa

SEQ ID NO: 448989 - DNA, 513 bp, Serratia marcescens
atgaaaacacgacactacctcgtggcactaagtacgctattgctggcggggtgctgcctgccgacggcgaaggcgggaaccatagaggcagttaaccacaccaaatgggcgatcaaccatttcagcgtcgacggtcagtcggggatagacattatcgggccctatcagggcggcggtggcggctgctgctatggcgtgccggcgaaatggcggccgggtatgacggtaaaaatcgattgggaaacgggggtgggtgatacggatggatttccggggtttgcggatagggagaaataccgtgcttggcgaaataaaatgaaggcccagaataagcagcacagcaaggtggtgccagtgccggactatacggggcagaaaacctgcgggatcacggtgcattttatgccgtgcgatgaggtgaaggtgacgaccagctgcgccaactatggccatccggaacacccgatcaaagaacctcttaagatgccggagccaaaagtatgtccgaaataa

SEQ ID NO: 448990 - DNA, 294 bp, Serratia marcescens
atgacggtaaaaatcgattgggaaacgggggtgggtgatacggatggatttccggggtttgcggatagggagaaataccgtgcttggcgaaataaaatgaaggcccagaataagcagcacagcaaggtggtgccagtgccggactatacggggcagaaaacctgcgggatcacggtgcattttatgccgtgcgatgaggtgaaggtgacgaccagctgcgccaactatggccatccggaacacccgatcaaagaacctcttaagatgccggagccaaaagtatgtccgaaataa

SEQ ID NO: 448991 - DNA, 375 bp, Serratia marcescens; identical to SEQ ID NO: 431707

SEQ ID NO: 448992 - DNA, 810 bp, Serratia marcescens
atgacgatgtgtcgggtactgcatgtcgcccgggccgggttctacgcgtggctgcacaacccggtctcggcgcgtgataaagataaccagcgtctgctgacgcttatccgtgattcatattcactgagcggaggcgtatacggttaccggcgggttcatggcgatctgaacgaaatcggggaaacctgcggcaaaaaccgggtgggccgtattatgcaactgaaccggattaaagccatgcggggctataaagcaccaaggcgtatcgccggccgaccttcggtggttgctcctaatcgcgtacagcggcagtttaccgttgtccgggccaatcaggtctgggtcaccgacatcacttatatccggacctggcagggatggttgtatctggcggtggtcatcgacctctttgcccgtaacgtggtgggttggtcgatgaagccgaccctctcacgcgaactggcactggatgcgctgatgatggcggtctggcgacgtaaaccggacagcgaggtcatcgtgcactcagaccagggcagccagtacggcagcgacgactggcaacggttctgtcgggccaataacctggcacccagtatgagccggcgtggcaactgttgggataatgcggtggccgaatcgttcttcagttcactgaaaaaagaacgcatcaggaagagaatatacaaaacccgggatctggcccgggcggatatcttcgattacattgaagtgttctacaaccgggcccggcgtcacagtcaccttggcggcgtcagtccggaggcctttgaacgggcctcgtcgtga

SEQ ID NO: 448993 - DNA, 885 bp, Serratia marcescens
atgagtgaattctctttttctgatactgaccaggcgttatggatttttcattacgatgccaacggtgttttcattggcagtgggttaactatcattcctaaaaataccggcttacccgctaataccaccacgattaaatgtgagccacaggaaggttttaccggcgtttggaatggtgcctcatgggattatgttcgtgataatcgtggcgttcgctattggaataaatacggcgttggctctgtcgtggttgcgttaagtgaggttattccaacggatgccattttcgttgagccgccgcgaaaagaaagcggatttgtcttgctgtatcaagacggtgaatggttgaaactggcggataataccgggcgaaaatattacgctcaacttggcgagccatttattgttcctgacgcctatttcacgctgccccccatgtgtacgttcattgaaccaccggcccccaaaccaggcatggccgttttctggaacagcgttgaatgggggtacatagaagaccatcgagggaagaccgcctacgcgaaagactccgggcaacgcattattgtctctgatgttggcccgttggcggagcaatacacctttttgccaccgacgacaccattcgataagtggaatggcgacgcctgggtaaccgatgacgatgccaggcataaaggggaagtagaacaagccaggagtaaaaaaaacgcgctgagagttgaagcagacagcgaaatagccgtgttagctgatgccatcaaatatggtattgccactgcggctgaaaaagaggccttcgatgcatggagtcaataccgggtgttattggtacgcatcgacccagagatggctcctgatattgtgtggccggtaaaaccgtag

SEQ ID NO: 448994 - DNA, 2178 bp, Serratia marcescens
atgtatcatatcgacaataaaagcggcgttcctgatatgccgccgttgaaagacgtgctgagtgaaacaccgctgttttttaccgaacagaaagatgttgcgagttggccaggtgctgactggtttaatatcgtccagtctgaactgttcaacattttaaagctggcgaatatgacgccgcagaaaaataagttgaatcagattgccatggccatcatgaaaatgctggacaacggcaaggtttatgagacgcctgaagctggggtaacccccccggacggtgtggctgatggtcagtttttcaatgttatttccgcctccagtctggacgtctatgacgtttatcagaacgttggcggcgtcgcccgtcgggtgattgttgacggtgtgccaaaaacgatgccgagcggcgaggcattaaaatcggttttaaacatcattaaaaactcatcgttagatgatgacgttattttaaaactaaaggatgcctacgggtttgtgtttggcaaattaacccagacgctgttgtctactcccggatttgatatcggcaccgagacactgcgcgccagtggactaacatttaatgttgctgacgatggtaccgcacgactgattgaccagtatcggttcatcaaatatgcgctgtcgccggatggtgtgctcaaaacccccatgtttgagtttatcccgaacgcgctgggacgcgtcagagtgagagacaaatacgggtttattttttgtgatatcaatgccagcgggatattgaaccttcccggcaaggaggagcctgcgccatcaacgacggaagacgacgtgattgcgcgtttgaacgccgataacctgctggcgaccatcaatgccaaccacccaactgataccggtgttcagctcccgaccgccgattttaatgtgatcctggttgtggggcagtcactcagtaacggcacgcgctcccaggttgcattacctacagagtttgcgtacctgggtaacctgatgctgggaggctctccgcgcggtggtgacctgagcggcagttcgacctcattcgcgccgattggtgggaatgtcttgcagccgctacaggaagttgcccagggcgtagatggcgctatcaacaccacgggcgggccatacggtgaaacgatttcctctggggtggccaactacctgaaaatgctgcacaacagcgatgtgtggacagtgaacgacgagggccgtcagttcgtcgtggtttgtcctggcgttggcggaaaaaatctggcccagctgtcaaaaggcgctgaaccgaacctatacggtcgtgtaattacggccctacagggcattaaagaagcagccgatgcccagggtaaaactgtggtgtgtgctggcgtgatattccagcagggagaaaacaaccccaatacgccctacgaggtttatgcgcctcaacttgacaagtattacagcgatatcaatggggatattttcgacatcttcccgatgcagacgaaaaaaccggcctggtcgttgtaccaagttggtgggatgtatgcgacggacggcgggagactggctatcgcccgtgcgcacatcgactttatcgtgaaaacatccggagcggtcttcggcggcccttatttcccgttccccgatccgggcgaccacatctatgccaactcgtaccgctggcatggttgccatcatgcgaaagcgctctataaagcgtttcgctataaaagcgtcgtattcaggatgaagtccgccattttcaagggcaaccgcgtgttggcgaactttgaggtgccagtgccgcccctgtcgtttggacggccctatgagctgtctacggcgaaagactatgcggacaagggatttaccgtcgaagatgccatcgggcagctttttggcgatgaccttcaagtcaccatcgctgccccgacagtcatcaaaatactggcgtcgcggccactggttccgcctgtccgcgtgacgctgggcgacctggctcatcacaacggcaaccattgcattatcgacagcgacagcagcgtggccccgtataaatgggtttataccggcgagaacggccaacccgctggagaaaatatcccagagctgattaacaagccgtatccgctctataactgggctggctcctactcattaatcgcaaacgaagaagaggtttaa

SEQ ID NO: 448995 - DNA, 783 bp, Serratia marcescens
atgaaaggtcttgatatttacattaacgggttcacatttgaccaaaaccacacggcgtttgatctccccgtttcgcgcggagcgctgggtttttatctgttcggtgatatggctggtcagaaccttgttgcgggcggtgttcagcctgctgtgattggtgcgccggtgcgtcaaactgcgtatagcacgcggtttacagcgaacgatttcatcgacacgctgctcgcagaaaccccggatatttcatattttgccgtcgggaaggtatacgcagacccaaatggcttggaatggcgttccgagtgggtgggtaactatgccgccacaatcggcaatatcaatttacctggcagcggactggtgctggaggcaaaaacagcgcaggcgcagattgtcggcgcgtcgtttacgggggttcctggtgcgtcaagcaaccctaacgttgcggtgttgcctagagaggccaatttgccaactaacatcgagacgggggtttggcgtgccatgtatggctctgtcagtgccacaggggataaaaagcgcattattaaagacttcacccgcaacgtcaccgctcaaaaagacctggttgagggtaatgttcgcgacatgcgcaatacaacgacgctgcgtattggacgtggaggtgttgattcgaatgctaaaatggatacggaattaatgctggttgcggtgtttaaaaccgttctatcggatgcagaacaggtcacaatgtggaactacgcgcagctttgggcgtctcgtttcggccttacgctgtaa

SEQ ID NO: 448996 - DNA, 834 bp, Serratia marcescens
atgcagagcgaaatcaagcacccggcgatcaggtatcacggtgctaaatttcgtttagcaccgtggattctaagttttttcccgcagcacatctgttacgttgaaccgttcggcggcgcggccggggttctgcttcaaaaacaacgcagctatgccgaggtttacaacgatctggatggagaagtcgttaaccttttccgtgttcttcgggagccatcgagtaatcaacggctacgcgaactgtgcgcacttaccccgtatagccgagacgagtttttacaggctggccagcatgacgaggaccctgtagaacgcgcgcgccgcatggtgattcgagcaagtatgggttttggatcggctgcggcaatcggcggaaactcaggattccgcagcgacagcaaacgaaaatacgccacagcttcccacctttgggctagctacccagacaacctacgagcagtaggggaacgtttttcgggcgtcattatcgaaaacaaaaccgctatcgacgttctgcgtgcacacgatgcggaatccaccttacatttctgcgacccgccatatctgcctgaaacccgtgttgcaggtaatcgctactaccttcatgaaatgacgccagaggatcataccagtcttctgacggtgctaaagcaactcaagggcatggtagttctgagtggttatgacagcgagctgtataacggcatgctgacgggctggtacaaagccgagaaaagcgcgcggatctccgccggtaggggcacaaaagtgcgtacagaatgcgtttggataaaccctttatgcctggaaaaactttgcaatgagttcatctaa

SEQ ID NO: 448997 - DNA, 519 bp, Serratia marcescens
atgcaaataacgattaaagctgcccattttttagcggcattcaaaacaatggcagtaaaggatgttcgctattacctgaatggcatgttcttcgatgcgaaagataaaaaactggtcgcaacagatggccaccgaatgtttgtaggcgagcactccggggtaaaggacagcgtgatcgtgtcgttcaaaggcaagccccctgctcgatttgatttcgcggagatcgatacggatgccggacacaccctttgttacctcaaaggcgatattgttggcttattgccctgcaatatcgtcgacgggcgttaccctgattggcgacgcgtcgcggagggattcaagaccgcgaaaatcgactctatcggctttaacgcagattatgtcaaagacgcgcttacccttgcgaaactgttcaacacgcataaagcctgcaaatttgaattccaaggtgtaacaggcgcaacgcgcatcacgtatagcgaaagcgcctacctaatgttaatgcccgcccgggtgtaa

SEQ ID NO: 448998 - DNA, 2205 bp, Serratia marcescens
atggctgacaccattatcccgaacgtcgttgtttcgatgccatcacaactgtttacgctcgcgcgctcattcaaggcggcggcgaacggccggatctacatcggcaaaatcgacaccgatccgacaatccccgagaaccagatccaagtctatctcgaaaacgaggatggctcgttggttccgatggcgcagccaatcatcatcaacactggcggatacccggtttatagcggccagatcgccaagtttgtgactgtccagggccattcaatggccgtttatgacgcgttcggtgtgcagcagttctacttccctaatgtgctgaaatacgaccccgatcagttcgctaaccggcttaaagaaccgtatggcgctggctatattagcaacgtatacaaccattacgacacaacatcagagataaaatccattcaggtctctgctctgactaatgcaattcacacacgcaaatatcaggcatcatcttcagcgctgagtgaaaacgtattgttgcgagacgcggcagaggatagcgtagccaaagcagggactgactggaaaacaaacggcgtaattaacggaaaggctctggtgtttgataacaaaggcaaggcttttaggttaatgccgacatatggttatgtgacgattgaaggacttggcggcggagagggtacagacgatgcattcttgatggacatcgctcagcaggtttcctcagcccctgtgcgcgtcgttcctaataaaacctacatgttcagccgacctgttaaacactctgcaggatgcggttggattgggagaaatacgacgtttatcggcccctctaccggtaacagagttcctttcatatcatcaattaagacatcaaccggtgcgaataacgacacggtaaacggtacatcaggagttaacaatgtcagggtcgaggggatcataattgatactaattaccttgatgccacaggtgcgctaggatttagcttcgcagaaaataccctggacaactggactgattgcatttttgagaatgttactttcaaaaacagcaaattcgataaccttgcgctacagaataactgcgctcgcgtttacttccatcgatgcatctttgagcatgcgggtgaagacgcagtcacgctgagaaaaacgtgtgaaaacattggattctttgagtcagttgtcagcaacacggctcaagttgctaaaagcggcgtttcattcggtgacggcattgttgttaaagctaaatttgtaatcatcgatgggtgccgatttattaatgttggcaatcatattaagggcgctggcattgcaaacaatgctgaagatgtagacaacgtattccaggcaagctatggaacattcgttaataacaggtttgagcggtgttatggtggtgtcggtatcggcaccatgaaccaagattttatcaatgctgggcagctgattgaagggattacgttagacaataatacctatgtaggtactgatgccaatgctgtcggtattcgctatgttagagatttaaaccatggaaaatgtaaaattattggccagaatttggcgggttactacgcagtagagctaattaacgttatcaacctgaacggagaatatgacgtaaggacggccagcggcggtgccgcacttataaataactgcaatgggcgggcgactattacagcatttgatgtgagtaaaggagaaaacttaaattctctgacaattactacatgcgacaaacttcgtgttgacgcgaagattgatacttctgcacgaaatggccttgcagtaactacgttctcaaacggcagaattgatttttctgcaaacaatattttgctgcagggggcatcgtttaccgggctgtctcgttcgcgtgttaaatgcgaggtaacacaatgcggaaataatggtgtaactgtggtatctgcaaacgactgtcccgaaatcgaccttggggcgtacgactgcggtaccgccacgaacgacacctatgcgtccctgcgcttgatagcgggcagtcgaaacagggtccgcctggtatcatcgtcaggtcaaaccaataaacctaaatacgatcttatcgttgagggtagtgttgcgggcacttcgctctattacatcgtaagcgccggggtgaccgccaaaacattaatctcccctagcgcctccgtgacgaaaatagaggctatcgagtag

SEQ ID NO: 448999 - DNA, 516 bp, Serratia marcescens
atgggcaaggataaaccaatgaaaatagcaaaggcgctagtcgtgctggtgactgtatctgccatggctgggtgcgataaaggcaaaaacactgattatgacgcacagaagtatgctcaagggaagattttagagctaattaagaagcaggcagcaagtaatcaagaggcttgtgaaacagggcggggcctagttgccaatgtgaagaagctagatcaagatacaaacgtttttgaatggtcaactgctaactgtagagaacgcattgatcctgtcagcgggattacgctttcagatgtaaccgtgttaagaaataagaacggggaaataaaaagtatttgcagtaatgttaccggaaaaaactacgacaaaagcaatgtgacagttcctgctatagtgaacgaggacggagcatttattcagtttgaagatagctacctcaaagagtcaaaccctgaaaaatacaattctttgcaagaggcattctcaatgttaagcaaagcatcttgtaagtaa

SEQ ID NO: 449000 - DNA, 3297 bp, Serratia marcescens
atgtcagaaggaaccagtttaggtacgatttacatcgaagttgatatggaaacaaaaaagttactcgacgctaacaaacttgtgaataaatcattggatgatgttggcaaaggcaccgaaaagctcacaactaaaatagatggtgctgataaatcattaggcggattaagcaagagtgctagcgcggtatccacggcgcttaagatgccggaaattaaccgtctatcaaccgaactagctcaactctccgggaaaatcggagcttcatcggatgcggccatttctggcgcagttgctcaaaatcgcttctcaggagccttaagcaccgtagctgggcaactaggcgcaggttatgtgtctaatatcggtgaagccacaacagcattaatacggcatacaaaagaggccattgccgccacatctgcacaacttgaaaactcagtggccgctcaaaaggaagctatctcactgcaaggcgcagcttcacaactggtgatcaacgccgccgcggagaaaaagacagcagaggcggcgctacaaacagcagaatcagaacttcaggtagctgaagctatctttagcagaaaagagtctgatattgcctctcttgaagccctgctggccaggcagaaagaatcgttgaaacagtctgaagccaacctgcagataactaactctgaaaaagccgttaaagacgccattcaagccagaaatgccgtagaagcaacgcagaataaaatcctcaagcaatccaaccaagcggtaaaagaagttactgccgctgaggataaagccagggcggccaaggttgctatcactaccgccagcgaaaagctatccgcagctagtgcgctagaagttgctgccgcatcaactgtagaaaaagccaatgaggctgtcgcaatatccagcacgaaagtcacgctggcagctaaagcgcaggccgccgcggtaactggtgcgagaaccgcccttgctttacttggtggccctgctggtgtgctcctgcttgctgccgcgggggtgtatgccctttatcaggcaatgggcgataatacttcaatcgacgactaccgagcgaaggttaaagaggcagcgaaggcgcttgatgaacttacggcaaatcaggcaaaagccgccgccatacaggctgggattgtcattaaagctgactctaagaacattgaagaagctaagcaacagatagacgacctcgaggggaagattgccgatctccaggctcgtggactgacatttggtaactatgctgacaatattaagagctataacaaccagataacgcaactacaaggcgatattgacggttattcccgatctattgctgaagcaaaaggaagccaggataaatttaaccaatctgtaatcaccggcactaaaaatccccctgaaattattaagtctgggcgcattctttcagatgtgtatagcgcaatggcaaaacagcgcgatattctgacggaagccaccagcaaaggcgctcaggcagctgaattgctcgctttccggcaagagttagaaaatagatactcgcaacaaggtatcgtaattactgacaccatcgctaaatcaatagatcaagcggtggaagcaaagcgccaactaacggcagatacgtctcaggccgctttctccgcgcagcttaaagcgattcaaggcaatgtcgaagcgttaaaaatcgaaatgaaccagggagcggaagccgcagccgtctaccgtgctcagctcgcattaaaggatgccggcgttaccgatcccaaagcggccaaagcatatacggacgcaattcgtgagcagtttaaacttcaaaagcaaatcgctgacagtcgtaagagcactggtggttctggtcgggtaggtaaagccgataaaggactagagcgacaacagagccaggccgcttcattgcggcgagagtatgaacttcttaccactggtgtaagcgatgtagcacgcgaaatggctatattcaatgccgtgcaatcactcggcaccaaagccacgcaacaacagaaagaagcagccgcggctgatgcggctacggtttatgatttaaagcagaaagttgaagacttccacaaggcggcggagatcacgccagagctgaagatatcgaaggcctttgctgacgagtccgagcagctccgcagactattcgcagagggggtgattgacgagaatacattccgtgaaatgggcgcaaaagcgaaagaatcattcatggccggtatggctgaggccaagtctgacgcggttgtatcccctatgcaagaagcggtcggaaaggttgatcctgtacaggcattagccaacgagaatgccaagaaaatcgcattgataaatcagtttgaacaacagaaattagccaccctgcagcaaagcaatatgcaagggattatcaccgaccagcaatacgaacagcaaaagttatctgttgaaaagcaatccttagcactacgtaatgccgcgaacactcagtacgaaaaagctagggcagaagcgcagtgggagatttggcgtaaccagagtaccggtaacgaggcactggcggcatcattcgacgccttggctggaaatgcctcaaacgctttcactggcatccttactggaagcatgagcacttcagacgctatgcggtcgcttggttctactgttttgaatagcttggtaaatacgttcgtacaaatgggcattgaatgggttaaatctgccgttatgggctccgctgctcagcaggcgggaatagcagccaccacggccgcgcaagttgcgggaacggcgacgacgacagcagcgagcacaactgctgctgctgcgaccacaacagcctggacgccggcggctatcgttgcctctatcggttcatttggtggcgctgctgcgattggtatcggcgctgttgtcgcggctatggcgctatctagcagtctggcagggaagcgcaagaatggcggcccagtcaggtcgggcagcatgtaccaagttggcgagggcggtctacctgaaatttaccaagccagcacaggcaagcagtacatgatccccggtgacaacggcaaggtgatcagcaataaggacatgcagggaggtggctcacctaatatcaccctcattgttcagaacatgtcatctggtgcaggtgtacaagactaccaagttaatcgtgattctgatgggggtagcgtcatacagcttgcgatagctgatatacagcaaggtggcccattgagtggggcgatttcaaaatttcatcaggcccctcgtcgcgccactgaataa

SEQ ID NO: 449001 - DNA, 1014 bp, Serratia marcescens
atggctaaagatctcaccacctcagtacatgacagacagaacattctcaacaacagctatgcattgactcatgcagaaaaacacatgtccttgggaggcattgatttcaatggtgaaaggcttttcacaaaaaatcaattaatggaaatttttggcatcagtgatgccacggtagagcgatatatagcgagccatagtagtgagttgaagaacaacggctatcgactcataaagggaaaggagttaagagaattcaaagggttagaccatgtctccttcatcaatgagggtaacaaggcaccaaccattggagtgttcaattaccgagctgttctaaactttgccatgattttggttgagagcgaacaagctaaaatcattcgcgcacgcttgcttgatatcgtcattgatacattagcagagagagccggagggcatactaaatacataaatcaacgcgatgaaaactacttattggcttcgttccaagaagaaagctaccgcaagcaattcacagatgctctagatgagtgcgtggatggcaatgcctggaaatatgcaaaatttaccaaccttgtatatcaaagtatcttccacgaagacgcagcagagtatcgtaaggtattgaaactagcgcaaaaagataagatacgagatactatgtattcagaggtcttaactcttattgctggtttcgagtcaggaattgctcatgaattaaaacaagaattttctcgtttaggcagaaggcttacacaaccagaggccgaaaccctttttaaacaatttgagtctcacccactgtttaagccaatgatgcttgacgccagaacaaaaatggcgagtagagatctatgtttcagggatgcgctgcacgaaaagcttgaggcatacgtgagggctgtgccagagggcgattttgaacgtttccttggcgagaaaagtaagtctcttgaagaacgcttaaacgatccagaaaccctagaagtgtttaaaagattgaaagaccgctag

SEQ ID NO: 449002 - DNA, 468 bp, Serratia marcescens
atggacgacatacagtttaattattttgacattgctcacgccattcgggttcatgactggattattgaacaatccggtggtttgcacggaataagagacctgggagtattggaaagcgttcttgagcacattcaaaacgattggtactatcctggatttatagagaagctaagtcacttattcttttcaatcaacaagtttcatgcattcagtgacggaaacaaacgctcaggtatcgtcctttcgacgtactttcttgagataaatggttttggtcattgcgtaaagctttttgtgcatgagatggaaaacattgctgtatgggtagctgatggcgcaatagacaaagaactacttaataccatcatccatgatttggtgttgtgtgaggaattactcgagagcaccaagctagaaattgccatgacagtctctgcttatgaagcccaaaaaacggccaattcctga

SEQ ID NO: 449003 - DNA, 642 bp, Serratia marcescens
atgacactaacgactgagcagctgaacgatatggccgatggcaattggcccgacagtgggttctacgacacgataaaggcgatggcccgcgagtgtactgaattaagagctgttgtagaacgcctgaacggcagcggttacgaatgcagtgatggcccagtcactgcgcttaacgccgctgctgtagtcgatattctactgcaacaacttgatgacgcagtgcaggaacaagtcgccccgccagcgccatcagtgccggatgactaccaacatctgaaaaacgttcgggagctgtatcacaaacaggaagaacgcttgttcgcgctcgcacagcgcatcaaaggagcatcgttcgacaaatactcccataccacggcgcaggccattgacgtgctggagcgtgaaattttcggcgaagatggtgacacctgccgcgccgcaatgctggctcaacctgtaagcagcagttacaggttgaactctccggtaattccggatggttggaagctggttcctatagatgcgacacgggctatgattgacgcggctcagagggtggaagaagacggctacgacgccatgcacaaagcaatgctggcagccgcgccggagagtgggaatgatcacgatacccgacgataa

SEQ ID NO: 449004 - DNA, 252 bp, Serratia marcescens
atgtttttgtctcgacttatttttctgggtgctcttattgtagcggttccctggatatggtacacgttctggcgtgaaagctttaacatgtacgcagctatgtttatcgcttacttgattttgacgctagaagccatcatttatagagatgtatatgatgagcctccgatctattggatctctttatatgggtttatgttcggagtcacggcgatttatgtttttggtgtaaactatttgtttgcttcctaa

SEQ ID NO: 449005 - DNA, 171 bp, Serratia marcescens
atgagctatacggcactgatttttttactttttatgttcttgttaatgacacttcgtgcattctacttatctgaaccttataatttttttattgctggtcttgggattgtttcagttatattgattgtttgcatgatcattatgaaaacactcgtctctaagttaaaatga

SEQ ID NO: 449006 - DNA, 252 bp, Serratia marcescens
atgagttttacaacgactatcttcctggataagatgatgaatattggaaatggtattaacacggttgtgtttaatggtgaagttaagcacataaccgatctcgatgatataacgttatgttccgaatgggaaaagctcataaaagaacgaaataaactttataaaataaaccagcaggctaacaaagggtggcgtggctttatccttcgcctgattggtgtctcactcccctcacagggcgatcccttttga

SEQ ID NO: 449007 - DNA, 939 bp, Serratia marcescens
atgaaattagctaacgtaacaccaaagactaaaattcggcatcgtaatgaaataaacacaacattttcaatgttgcctttatctgctcgacgaattctttttatggcgattgctcagcttgattcaaaaaaaatgttggaacaaggccaaacatttcggatatcggctaaagaatattctcttgttgctgatgtagatatctctgtggcttataagcaactgaaagaaggtgctaatgaacttcagactagtataatcagtattcccaaaagtcagcttttggagcctttcgcgagagctggtgatcccttgctaccaaagaaagggaagaaatctccggttgatactatacgctctttaaatttgactgaatattgtgattatgcagacagtgaatcaaccatagagcttagtttctctcgtcatgtggaaccttatatctgtaggttaaaagataactatactacccaagtgcttctatcaacagtaagattaacggagtcgaacgcaagcgccctttaccaactgataagaaaaaacattagcgctggtaagataaactattttgacatatccgttgatgaactaaaagatgagatgaatctatataaaatgattgatggggagaaagtgtactcatatcctgagtttaaaatatttaatcgtgactttataaagaaaaatgtagacatgattaacaagatgactgagatccaacaactaaaatatgaagtaattgagaaagtggctcgaaaagcatctaaactccgttttacttactcggtcagcaaagacagtgaagctgaggaagatttttcggatgaagtggtagaggctgtaaccaaagaagaagtaaaatctaaacgtcaacatacaaaacgtgacattaatgaaatttccgaaccggatactcagatccctccggggtttagaggttaa

SEQ ID NO: 449008 - DNA, 660 bp, Serratia marcescens
ttgcaaaggatcacaactcgatgcaagataggcaaattagccacatatgacgtcatttcattccgtatatgtagccattttccatgctgccggaggctctcgatgaaagatgaaagcaaaaaaatacaaatacggttagaccgcgatgacgacgcaattttaaaattagaggcggctaaggctggattaaccccagcatcattattaaaaaaaatagccatgacaattataaccaataacgaagggtttagctatgaagcaaaggattttgactttgctgataactctgaaaaattgaatataaaggttagccaggaacttaaagagaaattgcagagtgaagccattaaaaatggttggtctttgtcaaaggaatcaaggtttaggttggcttcatcattaagtagcgatccggcgctttacccggatgaggttgcagaactccggcgtgcgcgaaatgctgtagatgtagtagggaggaaccttcactatattatttcaaaaaagcaaatgttaactatcaatgatgatggttttttagaggatgtgcagcggcttaatgaaaatattgaagcgctaaaagcgcaggttgataagctaaccacacttgggattaatagaagcaattaccgcaagagaggtacacgaaatgggcgttag

SEQ ID NO: 449009 - DNA, 246 bp, Serratia marcescens
atgagtaaatggattgcgatttttttatccggtgtagcattcttacttgccggttgtgaagataaggctaagagtgttgactggtatatggaacatccaaccgaattagccgtagtctttaaagactgcaaagcgtccggtgatgacacgcaaaattgccgaaacgccaaagatgctaattttcgtttaaaacagcgcgacgctaaactccctacgttcggtgatttatcctcggataaaaaatga

SEQ ID NO: 449010 - DNA, 1041 bp, Serratia marcescens
atggattctgactttttccaatccactcacagatatatagagcaaattctccaatcagcaacttcgggtaaaatggctacttacgcaagtatgatatctgtaatcatacaatcgtcagtggcgctctatatgttagtgcgtggttatcagattatggccggtaaaaatcaacgtccagtagaggacttggcgtatgatgttgtgaaaatggccatgattatcgtttttgttaataacggtggcggttatttagacttaagtattagtgcaatcgaggggttgaaaacagggttcagtggcgagggagatatttgggcttatttggacaagatttgggctagcgctcaaaaaatcgcttctacgttaatggaacttgatccatctagttacgttaaagtagatggagggttgggggcgttatttacgttggtcggtgttgcctttgcattgatcataacgtctttcgtgttcatgtctgcggaaattggattgttgcttttaactacaacagctccaatttttattttttgcctgatgttcgggttcttaaggacaatgttcaataactggctgcaatcagtcttctcttcaattctcacgatactttttgcaacgcttgctttaggtgctgcaatcacttatttaacaaaaatgctagataagatgacgcttctagctgctgattctaacttgatgactcttggattaatggctggccttgcgggagcattttgtggcctagtagttttaatatcagccaaggttgcatctcagatagccggtgttggtgttgaaggggcagtacaaggtgcgatggctatgggcattatgggtgggacgttcggtgccgctaaagccgctggcggtgttatgcggggaacggtcaacgctgggcgcggaaccatcgaaggggctaaaggtacttcctggaagcaaagagagtcctccggcctttctgccggtacgggttatggtgctggccgcgttggtcgtgctgtcgtacaaaaggttattgcgcggaacaactcacgcgcgtcttga

SEQ ID NO: 449011 - DNA, 366 bp, Serratia marcescens
atgcaatatgaaaacgtaaattttaacggtaagtgttatgtgagtttgttgatcggtgaatatggagaggtaggcgggatggctttcaccgataaagattctctttcaattctcgctggtcttttcaaaaactctcatgatttccagtcaatatttaatgatcgcgacacttcttatcttacagggtttgttgacccaggggataaggtattccagaagtttatgctggacaacgtaaagatcaccagggagcgggatgaggaactttacgcgatcgacggattttacaatcagtcgagtgatttttgggacgtgtgggaagataacgatattgaagaagtaagagtttcattccctgtcatttaa

SEQ ID NO: 449012 - DNA, 1476 bp, Serratia marcescens; identical to SEQ ID NO: 440447

SEQ ID NO: 449013 - DNA, 633 bp, Serratia marcescens
atgttaacgactgaactgttgaacgacatggccgatggcaattggcccgacagtgggttctacgacacgataaaggcgatggcccgcgagtgtactgaattaagagctgttgtagaacgcctgaacggcagcggttacgaatgcagtgatggcccagtcactgcgcttaacgccgctgctgtagtcgatattctactgcaacaacttgatgacgcagtgcaggaacaagtcgccccgccagcgccatcagtgccggatgactaccaacatctgaaaaacgttcgggagctgtatcacaaacaggaagaacgcttgttcgcgctcgcacagcgcatcaaaggagcatcgttcgacaaatactcccataccacggcgcaggccattgacgtgctggagcgtgaaattttcggcgaagatggtgacacctgccgcgccgcaatgctggctcagcctttaccagcagatctggagaagtacactcaaggcatcaaggatggattggagtgggcggccagaacagtagaggccaatcaccctgatacctgcgattggctttacgacgaccgcgatgatttggctaaagccattcggaaggggccagatatgctggcagtagcgccggggggctcatga

SEQ ID NO: 449014 - DNA, 387 bp, Serratia marcescens
atggataaattcagcgaactgaaagcggccgcaatggctgcaactccggggccatgggaatggttcacaagcaacagcatggctcgattgagcagcataccaagcggtaaggatggtgatgtgctgagtgcctttcgcgcatccgatggagtgccatgtgtgagcgttagccaacccgacatggcatttatcgcagcagctaaccctgccgtcgttctcgccctgctggcgcgcatcgccgatctggaagccaagctggctacgccggtgcggttgcctaaatatgatgattacaacgacgcgggcgctgcatcagctgccatttccgactgcgaaatagcaatccgcgctgccgggttcaaagccgagggtgaagaaaaatgttaa

SEQ ID NO: 449015 - DNA, 303 bp, Serratia marcescens
atgagcaagctgttttttgcgctaattgccatggcggtactggccagctgcgacaacaaaccgagatgcgattcaaataatccaaaatgcatgttctacacgccaccggctgaagttcagcaacgctatttttcggagtgcatgcagttagttgcattgaataccggattcaccagcaatgattcgggcgtcaattcgtgcaaaagctatgcattcagtatggccagccaagaggctttggacacaatcagattcaccaataaaaactaccaagaaaataatgaggttggttatggacaataa

SEQ ID NO: 449016 - DNA, 1230 bp, Serratia marcescens
atgcttgctgaaaaaagtgcggcctccgcgcagccgggcgtcgccgtgaccgccaatctgcgctgggcctttatcctggtcaccagcctgttcttcatgtgggggctgtcctatggcctgctggacgtattaaacaaacattttcaggagacgttgcacgtcacaaaggcgcagtcggggctgctgcaggcggcctatttcggcgcctatttcctggtggcgctgcccgccgggtactttatggaccgcaagggctataaggcgggcattctggtcgggctgtgcctgtatgcgctgggggcgctgctgttcgtgccggcggcatcggccaacagcttcggcgtgttcctgttcgcgctgttcgttatcgccagcggcctgggctgcctggaaacggccgccaacccgtacgccacggtgctgggcgacgcgcagggcgccgaacggcggctcaacctggcccagtcgttcaacggcctcgggcagtttatcggcccgctgatcggcggcacgctgtttttctccgccagccagtccgccggcggcggcgatcagagcgcggtgaagatgacctatgtggcgatcgccgtgctggtgctgctgatcgcgctgttgttcagccgcacccggctgccggcgatccgcgaagaggagaaaccggtgcacggcgtgatagcgcagggcttatggcagcatccgcattttgtcggcggggtgatcacgcagttcttctacgtggcggcgcaggtgggcgtgggggcgttcttcatcaactacgccaccgaacactggcgcgaggtgtctaaccagagcgcctcttacctgctgtcgatcgccatgatctgctttatggtcgggcgcttcttcagcacctggctgatggggcgagtcaaaccggcgacgctgctggcggcctatgcgctgatcaacatcgcgctgtgcggcgtggtgatgctgagcgtcgacggggtgtcggtggtggcgctgatcgcggtattcttctttatgtcgatcatgttcccgaccattttcgccctgggggtgaaaaatctgggtaaacacaccaagcgcgccagctcctttatgatcatggcgatcgtcggcggcgccatcatgccgtactttatgggggcgctggccgaccgttacagcaccgcgctctcttatctgctgccgctgctgtgcttcgcggtggtgctggtttacggcctgcggcagcgccgcgcctga

SEQ ID NO: 449017 - DNA, 567 bp, Serratia marcescens
atgacaggtgagcaggaacaggtgctcctcatccgccaggcggatcagcgcggcgcgcaccagcggcccctgcgtcaaatcaaaaggcgcctccgtcaggcgctgcgccagttgccgcgcctggctctgagcatcctgccgcccacgcagatcgtgcaccgtcaacggcagcgcgtctgccggcagaatgtgcgcctgcgactgcccctcgacggtgacaaaccggctgcgcaacgcttcgtggcgggcatagagcgcatccaggctctgccgccaggcgggcagatccagctcgccgcgcaggctcagcgccaggggaatatggtaagtttcactcaggccttccaactgcgtcaggaaccacaaacgctgctgagcaaacgacagcggcaacgcggtgccacgtggcatagcctcgatcggcggcagcgcctcatcggttctccgcagttgctgcgccaatgccagcagcgtcgggttggcgaacaggacctgcaacggcagctgccattccatctgctgcagacggttggtcagacgtaccgccagcagcgagtgccctcctag

SEQ ID NO: 449018 - DNA, 504 bp, Serratia marcescens
gtgcggctcgcgctttgctgcggcggattatgggcgtgcagcctgttggcgctggccgacagtaaaacggcgaccctcggcgtcagcgcgaccttactcagcgcctgtgaagccggcagcagctcaggtggcaacgtcagcttcggcacgctgaatttcggcacgctgtattttctcagcaccgccaccagcgtcgccgggcagcaaaacgccggcgccattcgggtgaaatgcaccaacggcaccagctacagcgttctgcttggcggcgggcaaagcggcaataccgcggcccgctacctgcaaagcgcggccggccaacgggtgaattacaacctgtacaccaacgccgcccacagcaccatttgggacaatctgacgggcgtgtcacaaaccgccaacggttcggacaactggctgccggtctatggcatgattccggcgcagtccacgcccccgacaggcagctacaccgatacggtacaggtcacgatcaattggtaa

SEQ ID NO: 449019 - DNA, 183 bp, Serratia marcescens
atgcattttttcaagaaaatttttgatgtcaaaaacaaaatcattcaaatcatcataacttatatttataacatcaccatcgatcgtctttccatctcgatgaactatatcatggcgcagcgaaatgattttggtgatattttcaatattgatgtgagtaggtttctcaatgccaagtattga

SEQ ID NO: 449020 - DNA, 138 bp, Serratia marcescens
atgtcaaattatcattttttcctgctggtgtcatctgggtttggtcatcgcagcgaaaatgatgcggcggccaaaaaagtgttatatgatattggttatcattatcacttgagggggttgtcatgctcactgccatga

SEQ ID NO: 449021 - DNA, 954 bp, Serratia marcescens; identical to SEQ ID NO: 221983

SEQ ID NO: 449022 - DNA, 183 bp, Serratia marcescens
  misc_feature (162)..(171): n is a, c, g, or t
atgcccgttgactttctgaccactgagcagactgaaagctatggcagattcaccggtgaaccggatgagcttcagctggcacgatattttcaccttgatgaagcagacaaggaatttatcggaaaaagcagaggtgatcacaaccgtctgggcattgccctnnnnnnnnnnaactggcactga

SEQ ID NO: 449023 - DNA, 291 bp, Serratia marcescens
atggctgtctttgtgagagaagcggtttctcataatcatttcaaattattgcaggagctttatggcagagatttgggcggggagcgtttcctgcactggaagcatttgctcgatccgcattgtggggcgccgatggaaaaaacgggcatattttacaaggatcaagaacgttatctcgggatgtttgtatccagtttttatccttttaaaatcaatgaattatactttaatgtcaatatgcttggcgatcttgggatccgatgtggcggcggatatctgcttttccgatga

SEQ ID NO: 449024 - DNA, 156 bp, Serratia marcescens; identical to SEQ ID NO: 439881

SEQ ID NO: 449025 - DNA, 720 bp, Serratia marcescens
atgtcatctgaaattgatccgagaattttagaagcggtcaaaaatataacggcaaaaaggcctcatactgtcatacagcatataattaaacatggttatgtaaccactgaagaactgaaagagctttacgggtataaccatgctccaagagctgctcgcgatgttagagaggccgggattcccttagagacatttaaactgccttcatctacaggccgagctatcgcaggctatagatttggtgatcccgacaagatagaagcgcataaattagatggtaggcaagttttctcgaaagcattcaagaatacgcttatcgatatgtatggttctagatgtgcaattactggtgaagaatatcctccactctatttacaaatagaccaccgaattccttatgaagttgcaggcgataatattgcacaagagaatgaacctgaaaactttatgttattgaccgggactactcaaagacaaaagtcatggtcatgtgagcattgtgaaaacttcaaaacactcaaaagagattctatttgtaaaaattgttattgggcttggcctgaaagttatactcatatcgcaatgatgcccattaggaggatagctattgatttcataggtgattctgatatggatatttatcagaaaataaatgatcattgcgtaaaacacggtatagctattcaggactttatcaaaaaagtcctgagtgagtgttaa

SEQ ID NO: 449026 - DNA, 1428 bp, Serratia marcescens
atgagttttgaagaacagcgtctcgaggagctttgcgaattagttattgattgcccccactccacgccaaaatggacggatgagggttttattgttcttcgaaatcaaaatattcgtaatggtgtattagatctctcaacaccgagttttacagatgaagatggctacaagaacagaattaagcgggcaaaacctaaggcgaatgatatcgtttttactcgcgaagccccaatgggcgaggtttgcttaattcctgaaggtattgagtgttgccttggccagcgccaagtattattaagagctaatagtaaagttgatccttactatttattttgggccttacaatctccctatgtgcaacatcaaatttcttggaatgaaggtacgggaacaacagtaagcaatgtgcgaattcctgtactcaaggatttgaaaattcctcgattgggagtagctgagtcttggattgcaaaaacaatgacttctttagcattgaaatctcagataaataaaaaaatcaaccaaaccctcgagcaaatggcgcaagccctgttcaaaagctggtttgtcgattttgaacctgtaaaagcaaaaatcgcagcgctggaagcgggtggttctcaggaagacgcgacgctggcggccatgacggcgatttccgggaaagatgctgatgcgctggtggtttttgagcgtgaacatcctgaacaatatgccgagttaaaagccacagcagagctgtttccgtctgcgatgcaggactgtgagttgggggtgattcctgaagggtgggaaacacctgctgttcaggatgtagcgaacacggtaaaagggaaatcgtataaaagtacagaactcgattgttccaagactgcattggttaccttaaagtcttttaatcgaggtggtggatataggcttgatggtcttaaggaatatacgggtaaatataaacccgaccaggaagtttttgcgggtgatttgatcatcgcttataccgatgtgacacaggcagcagatgtgataggtaagcctgcaatggtaataagtgatatcagatacgaacatctcgttatatcgctcgatgtagcagtagtcaggccttttaaggatagcttaaaatactatctctatggggtagctagaactgaacaatttcaaaatcatacaaagtcacattcgactggaaccactgtattgcacctaagtaaaaatgcggttccaggttataaatttattttagctaatgaaggcttggttaatatttacgctcagtacgccaaatcgattttttctaaagtcaatacagcgattgaggaaaataattttctctctgagcttagagacacccttctccccaaactcctctccggtgaaattaccctgcctgaagctgagcaggcggtaagcgaggtggaaaatgtataa

SEQ ID NO: 449027 - DNA, 978 bp, Serratia marcescens
ttgggaggggtagctattgatggcttacctgagggtgtaagtctttcattaaaggtcgatagagagaaggccgaaacttttggcgtatcatttaatgaaattggcgaagcgctctctgcggcttctggatcttactatgtcaatgattacactgataacggccgtgttcagcaggtcattattcaagctgacatcgcttaccggatgcaactcgcggatttactcaaaatctctatcaaaaataaaatgggagagatggtgcccctttcaacattcgtgtcttcatcatggactttgtcaccgcagcaattgaatcgctatcaagggtatcccgcactcagagtgacaggtagtgccgctaatgggcattctagtggaactgccatggcagagatggagagactggcgagccatctccccgaaggctttaaagctgaatgggcaggtagttcgctccaggaaaaagagtcagcttcacaacttccattgcttattttgctctctattcttgttgtgttcatggtgctggcagccctttatgaaagttgggcaaccccttttgccgtgatgttggttgtgccgttggggcttatcggtgcggtttgcgcagtcttcattgctgacatgtcaaatgatgtgttttttcgagtcggaatgataacgatcatcgggctttctactaaaaacgccattttgattattgagttcgccagacaactacgaatgcaaggcatggatattatttccgcaatattgctggcatcccggcagcgattgcgccctattatgatgacttcactcgcctttacgctcggtgttgtaccgttaatactcgctaccggcgccagtgataagacccagcactccatcggcactggcgtttttggcggtatgataagtggaacattattagccatattctttgttcctgtcttctatctattcgtcatgcgtatgctggaaaaagcaaagctataa

SEQ ID NO: 449028 - DNA, 168 bp, Serratia marcescens
ttgccagcaatacgcattacgattcaggacgggaatgaaacacgggaagttaccgagcgctggctgatggaatataacaacgagcggcctcatgaacccttgaataagctgacgccggaagagtaccgacttatggctgaaaacccggaactctcaaaaagtgcatag

SEQ ID NO: 449029 - DNA, 1275 bp, Serratia marcescens
atgaagcgcagcgtactcgatgagatcaaccggggcggcttgctggcgattgataagggaatgggcgcctggtcaccgacaaaatacgctttttacgtcgatgcggaaggccgattgcagcgctatcccggcagctctcttcccgccttttatcctaccgggcgcgtgatagcccgctatgaagaaatggtcagccgctatggtcaccgggcaaaaccgacggtgctgccgccgaggcagaatacgacccgcaatccccctctgcagcaagccatcgcgaccgcagtggcaaccgttgccgccacggtgcaggccatccgtccgatgaccaaggcagaacgctggcaagaacgccagtatctgatagggcgaggcaaccgcagcatttatccggatgcgcgcatggcggcacagcgcctggcagagaacaacgttgcggtcgaaaaggcgaagctggctgagaatgtttacaagaccactaacccactcaaggacacgatagacatccctgaaggctggaaggacatcagtaacaacgatggagcgctgggtaaactcggtttaagcaaagatatgctctatgacgatgaggatacaccgggctttctggctcgggtttatcagccagatgaaaacgtctttggtaaagcgatgaatccgacggtggtgttccgcggatcgcgtgcgcctcagttcccggagggaataagcaaggctgcccagaaagcgttactgaacggtgatttgtcaggcattaaaaacctgagtgactggtcaaataatggcgctcaagggttggggtttaattcggaatactacaaaaaagcggtcaatatcggtaaaacaattaaaggcgatgttgggatatctggccattctctgggtggaggcatggcatctgcggcctctatggccagcggtaaaccggcatggacgtttaatgcagcaggcctgaatgcgggaaccgtaaaaaaatacggcggctctataataggcagcgccgataatattcaggcgtatcgcgtaaaaggagagctgttgaccaagctgcaggaggttgacttgtgggaggacgccaaagacctcaaattttatccgcctgcggtgatggcgaaagaacggttgtccatgttggcgcctgacgccgtgggagtaaagcacacgcttcccggtggaacaggttcactgctggataagcacggtatagaccaggcgatacaatgcattgaaaatgagaaagacgatgacattgccacaatcaagggacgaatatga

SEQ ID NO: 449030 - DNA, 546 bp, Serratia marcescens
atgataatctacgcttctgagtttaatgaaatacctaatgctttgggcaacaacattgaactcaaagacaaaatgttatccctcattgccagtaaaaagattgcaggtaaagcgacagaaggggcaggcagagtagaagagttcagagcaattttatctcagcttacaagaggagaattacgcttagatgatgctatcagggctgttgaggctaaccttccacgctatacatcaatccattcgggggataatagagtctttgctagtggctgggcagaacgtttaaccagaacacagtttagtcggttctacaaccaagccgtattagaaatagagatagcaaagggacacaacgaatgctttgttcccccatcttcacaggagcaagcatcatcgtcgtgctcacaagttcttgcaggccgttctcatgacgtcagccatctactcaaattacttgttacttcttatgaggatggcaactgggacaaaacaccaaagattcctgatcatcctcattgcacccatgtgattaaaccggtgtcttaa

SEQ ID NO: 449031 - DNA, 129 bp, Serratia marcescens
atgaaattagggctgagcaagggattgaagcaggggccgcaggcggtcgatgcgtattggctcgataaggaaaaatggcgtccccgactggaatcgaatttaaatgataagaatttgattttgttgtaa

SEQ ID NO: 449032 - DNA, 630 bp, Serratia marcescens
atgtattctatctttgcttggcgaaatgtcgcatttaccttattgagtgtcaatcttgagcgttcggataaaaacggcttgcacgttgctgggccagcacggtatagttttcccgttgtcgcaaaatcgacaaccgggcgtggaaacccgtgtaatctaacggcgataccagacgccctatgcgtctttttttgtatcgtagctttgacacacctaaagtttttggtgtggtgctcacaggtctgtatgggcgtcattctggcctgtgtgcatcattaccacggcgttatggtagtccaggcggggcagctttcgggctggccggtatccgttagagccggtatttccaccctcgtctgggctgccaccaattatgagcgtggaaactctggtggtagctgtttcagctatctaacggagattgccgctatggccactaccccaatctacacacatctcaaatttacctatctgtttttgggcgttcgtcgcgccgatctcaaggctattccttgccgcttacaaattactgctgattcgcaacaggccgcgcaccgtgcattggtcaaagagtatgtattggcgtttgctggtcgcctgccgtcacgtcctgcaactgaatggcgttaa

SEQ ID NO: 449033 - DNA, 255 bp, Serratia marcescens
atgaacaacaataaactttcctcgaagtattccttgagtgagcaaggcggtgagcaattaattcgcgccacattagtgtgtgaactgatggccgatttgatgaatcacgaaggtggtagtaagcaaaaaatggtttcagcactgggtgttgctgccctgtttgaatgtctggccggacaactggatggcgcgattgataacagtattttattgagcgtaaccaaaataaaaggggaagataatgctatcaattaa

SEQ ID NO: 449034 - DNA, 1689 bp, Serratia marcescens
atggtagcgcactcagcaacattagtgtctgcgctttcccacggtttacttcactggcacgatattgattggtgtcatgttgaacaaacggtgagagcactacagatccggattgcgaaagcatgtaaggccaataactggcgcaaggtgaaagcgttgcaacggatgttggttcgctcccgaacagccaaaatgctggctattcggcgagtgacagaaaatcgaggtaagcaaacccccggcgtagacgggaaattatggtcgacaccggaatcgaaatggaaggcagtccagacgttaaaacgtcggggctatcatgcctgtcctcttcgtcgggttttcataccaaaatcaaatggtaaaaaacgtcctctgggcattcctacgatgcaagatcgtgctatgcaggcgctgtatctgctggccttgtctcctgttgcagaaacaactggtgatccaaacagttatggcttcagggctgaacgctcgacagcagatgcaatggcacaattattctgttgtctgtcgaaaaagcactctccccaatgggtattggaagctgacattaaagggtgttttgatcatatcaaccatgaatggctgcttaatcatatcccagtggataaggatgtgttgcgtaaatggctgaaagcaggcgttgtgcatcaggggagtctggcagcaacagaggaaggaactccacagggcggaattatttcccccacactggccaacatggctttggatggattagaggttttgctcaagaaacaaattggcaagaatcgctcccggttaaacaaaatcaatgtggtgcggtatgcagatgacttcgtgatcaccagcagttcgaaagagatgctggaagaatgggttaaaccctggattgaaggctttctatccaaacggggattgactctttcgaaggagaaaacacagatcacacatatcaataccggttttgattttctggggtggaattttcgcaaatacggcggaaagcttctgatcaaaccagcccaaaagaatgtgcaggcattctgtcgaaaagtgaaagagacaatccaatcaaatcaggcggcgaagcaggtgaatctcatccgcattctgaatcgtctcctgaaaggctgggcacagtaccatcaacccgttgtagccaaatcgacgcttcacaaagtgaatgctcagatctggtttatgctctggcaatgggccagacggcgacaccagaagaaaggggctcaatgggtgaaagatcgttattttcacatggtgggtaaccgggactgggttttcgcctccggccctgaacgggagacaacggagttagcattgtacgatatctcaagtatcccgatacgacgccatttaaaagtgaaggggcaatacaatccatttgatccggcatgggaacaagaaggtgaaatgctgcggacgaaacggatgatgaacaagcttcgatatcgtcggcaaatattcattctgtatcgcgaacaacagggacgttgtgcgctatgtgaaacgccgatcacccaagatacaggctggcaggaacataatctgcttcctcgtcatcgaggtgggcgggatgttatcggaaacagagtgttacttcatccatcttgccatcatgaggttcatgaacgcgaactttctgtcaacaagctggcctgcaaagcaggtttataa

SEQ ID NO: 449035 - DNA, 144 bp, Serratia marcescens
atgtgcatttatctggacgcatcactgaactggcactggagcgcaggcgttttgcgctaccgtcgcatctggcagttgctgcaccgcgaaggcttcatgctaatcacaaacgcgcgaaccggctttatcatttttttggtctag

SEQ ID NO: 449036 - DNA, 384 bp, Serratia marcescens
atgccacagaaagaggccgcgatttgcgcaggctacgcgccgacgaatgccgaatcgcaagcctcaatcctgatgagccggccggacgtaaaagcccgtgtgcaggagctgcgcaataacgccgcgctgttggtttccttcaacgccggccacctggcggagctgtcgtataaatctgcgcagttggcgctggcgaataaaaaatttggtcaggttgcgccgaacgtgaaaaacgccgcgcagctgaccggcatcgacatgagcacgaataaaaccgaggtgaatgtcgagctggccggactcagttacggcaaagtttgcatcgtgacaccggcgaactgcccggcggacgtgtgggctgctcatatggaaaagctgcactag

SEQ ID NO: 449037 - DNA, 282 bp, Serratia marcescens
atggcaaaacaggattggggagccattcaaaagctgttcctcgccgaatacgccaaaaccaaaatctccccgaaagaatggtgtgaggctaacgactacaactatgccacagcacgccggcacataaagatccccgcgcaaggtaaagaaaaaaaagcgcagaaaaaatgcgcagtgcgcaagatgcgcaaattcccgaaaatcccgcgcccgttacgcccggtgtttcagctgctggtggtgatgaggaggggaagggcaaagaaagcccaagccttttaa

SEQ ID NO: 449038 - DNA, 255 bp, Serratia marcescens
atgaggcgtgccggtcacttcattattcaatgtcaccccgccccctctttgcgtatgcccggccccagcgggtttagcgggtttatgtccatcatgaatatgattgttcacaatcaagatgtcataagcatctcggttcacgcccgttttcagcaagatcccgtcaccctggtgattcgtcagttcgttattctggattgtaatatggcgtccgccacgaacggcgataggttcttcacccagatctttaagtaa

SEQ ID NO: 449039 - DNA, 552 bp, Serratia marcescens
atgttaacgaccctgtattttgacaagccgccgacccaagatgcctggattgacctgacgctggcggtgacagaagtgttttggctgttgccggcaacggcccgacctgcagatatcgaacaggccggccatctttttaacgccgcggggcttgatgtggcgggattgcagttttcccgactgccggcatcgatggtgcctgttcagcagacttgttgggttgagttccggacgagctttttcggccggctgctgctgattttgatacacaacctgtgccctggctcgctgcggatagcgcgcgaggcaccggcggcaggatgtggctgggagcagccgcttatctggttgcgccatcatctgcagcggcctgagcttatggctcctggtactgtagatgagcaggtgctgaaggacgattctgtccggcttcacctggtgcagttcagggacagcattgattgccgcgacattccctatcactggcgcatcatccagtggatggatgaggtgctacctcatcgcatccccttcaccgaacgcatggcctga

SEQ ID NO: 449040 - DNA, 150 bp, Serratia marcescens
atgaagagcttaaatctcaaaattggtatgaaaaagacaatgaatactctgagctttttgaaagtttatatgatcaaccaacgcaacggcgagagtacattgaaagctgtattactgaggccaatccttcttgggggtatgtgtatttag

SEQ ID NO: 449041 - DNA, 357 bp, Serratia marcescens
atgaaattggacatatacgaagtgctgtcccgttggggagtgtgggcgcgagaaagtagtagcattaattattcgccaatcgctgcaggttttaaggggctactacctcatccgcccaatggtaagctgccttgctgcaatgatgacgggttggtaatcgatggatgtgtggccaggctgaagaggtataaacctgaagagtatgtcccggtgattgcgtaccatgtttatgatgtctcgttgcgccggatagccaagaaacgcaaatgctcagagggaactattaggaaggaaatgaagacggctggaggttttatcggcgggtgcctctctatgcttagtatcgatatgagttag

SEQ ID NO: 449042 - DNA, 255 bp, Serratia marcescens
atgatgcgctgcccgctgtgcacccatgcgtcctatacccgcaccagtcgctatatcacggaacggacaaaagaggcgtattaccaatgtcagagcctgacctgttcttgcacattcaagacggtggaaagcgtcgataaaatcctgtgccagccgatacaggcgcaaccggtcgatgagaacaccttgccaccacccgagaaacggacgctgaaccgttatcgccgctacaacagcaatcataccctgcactaa

SEQ ID NO: 449043 - DNA, 222 bp, Serratia marcescens
atgagacctaacattacaattatcatccctgaaccctacataccgttggatgagtattgccgccgtaccgggaccaacagagaaacagctaagaacctgattgaatacggtaaattgcctatcaaaccaaagggcaagcagaagaacggtctgattgaagtaaacatggcagctttgaccgtgtgggccttgagtgaatgtaacgtttctcttcagggttaa

SEQ ID NO: 449044 - DNA, 1299 bp, Serratia marcescens
atgaaagctcatctgttacccccaagagaaaactataatggcaatcttatttggcgaaaagaagattttatcgacaaagtagataaaatatcaacctcccttgaacaattaagatctttaggatattgggctagcccattcccggaaggcgacggcattacgtttagttataaaaatgataatcatcagaaaaacaatctcgatattatagaagacttccgaaaatgcttcgaatgggtggatatagaactagctaagtcggttagctcaaacgttgaattagctgaattagaggatgagaggaaaatgatgaagtgtactgtcattgtaccgattgagaagatttttattcaggaaacaatatcgattgggaagtatactctttattgtgaaaaacaatttgacgaaaatccagatgagcgtttgtcaaagcaagaaggttcctacatacagtttgattgtcaattaccctatatagatctattacggcttaatacaaatattgatcataatagtcatgttattaacaagtgcctttccattgcagaatatgcacttgatctagtcagattttctcatagctcatttacgcgcaaagaattcacacctaatccagcaggtcaacgagctagcggattctatgatgtggaaattatccctcttgagaagactcatcttggacctcttatactaagtggaatatcaagacctctttccgtgagtaataactggctaggcccccaagtcgatagtatttcttatccaggaattcaatacttatcttctgtttatgataaagtcattgaaaatgagctttcaacagtagttacttttgcaatgagatcatgtagacaatctttttactcaattggagatgaatcacagtttttaaatcttatcttctcactcgatggactttctaatattgattctggatggaagggatggaagcaacgaacttacattgcagcacttacatgtaacaactcatcaattaactttaaggaaaatttagaagtttatgacaacctatacactaatgtcagaaataaacttgtacatgatggtaaagatttctaccaacttcaagttgactcaaacgaatcttctgaacaagtttttacttacattaaaaaaattatagccctcatagagagaaataatttctctacgttaaatgagttacgagggcatgcggttaatttattaaaccaagaggaatataaaatggcttttagggaagtaattgaccgtatttctatattaagaggcattgctcctaaatatccattatggtga

SEQ ID NO: 449045 - DNA, 801 bp, Serratia marcescens
atggacgtcagaaaagattttgaagatgtgtcatctcatatttcaaggctgttgtcattctctcagcaatttcatgagaatgactctttttggagtcatcttaaaaataatgaagatttcagatttatatctaaaataccacacgacaagcgttataaagttgagtcattatatagcacgggtagagatgtggctatatatatggccggagcacttgccgaaataaattatgattttagtaaatttccgacattaacctcagttgttgaagggtttgatgattcatgggtttttggtaattaccctgaagatatacctgatttagctattcaaacatgtaaagaaaacgatgttaatctatggtccgttgaccaaatgtatcatttatttagaaagcaagagaaattactctcagctatacgagttacactagatatactcaagcgtagtaacttatataaattagaaaatgggattgaaattatgagtgaaaaaaatcaaataataaatgtttctggggtgtcgtcatcaagtgttaatataaactcaaataatgcagtagcatctgtaagtcagacttataatgaaccatcaattttcagtgagatggtgaatgcaataaaagatgcagaacttgatagtgaaacagagaaaaaattaattgataatacacaaactctagtagtggctcatgagaatggggacttttcaaaagcttataaagattttatgcaaaacatatctgcgcacattaccgtttttacaccttttttatctggtttagcagccttattgtcttaa

SEQ ID NO: 449046 - DNA, 294 bp, Serratia marcescens
atgattactatcctcgtagcctgcggaagcggcgtagcaacctctacgttagcagctgatgaagttaaatcagtttgtgcggaatacaatattgctaacgttaaaatcaacaaatgcagcatgtcagaattagcttctgagatgcaaagtgctgatatcgttttaaccaccaataactataaaggtgatattgggaagcctcatatgagcgtttccggttttatcactggtatcaatgaagcggcccttcgaagaaaattaggcgaattattaatcgagacagccaaaaaataa

SEQ ID NO: 449047 - DNA, 783 bp, Serratia marcescens
atgttacttcgacatgcccaagcttatcgtgatgctggagcaatggcaggcataagaaaaaatccaccaataaaacagcagcggtacacgctacatcaaagcttacaaagcaaagagaatataaatgttataaagcaaaccttatctgtaaaagggcggccagataaaaatacatatttatttacgccagtcataaagaataaatctgggtttgttcaaatattcagccggaggtttccaaatttaaatattgataaatacgattacagagaaagccaaaaaataaaagaggagtgcttagatgattttgatgcgagtaaatctatgcttttcctttctgtattcgttggcgcacctgaagtggaagtgccggaagatgaatatcatgctaatatacatagcattgtcatcggtggttttagggttttgttcgtatggtgttatatgatgttaccatctcatacttcagggtttttagctcataaaataactcaaaaagaaccagatggatctatagttggtcaggttccggggtttggcacaagctctgccgtagctatcgcattacatgattttcttttttttatcaaagagctcggtaatacattgtatacaactgacaacttgcctatagactttgctgaaaattcaataaagttgacttggtttgttaaagaccctcggagtaaaagtctagagattaaaaaaatcaaagatgctatgcgtgagtctctcgatatacgtcatctttacgagatatacacatctatccggatgcattaa

SEQ ID NO: 449048 - DNA, 909 bp, Serratia marcescens
atgagtgtgatcgacctttcgcaactgccaccaccccaggtggttgaaaccctaagctttgaagacctgcttgaggacagaaaggcgcgcttgcttgagctctatcctgaggagcagcgcgaggccatagcacgcactctggagctggaatctgagccgatcgtgatgttgctgcaggaaaatgcctatcgggaaatgctattgcgccagcgcatcaacgaggccgcaaaagccatcatggtggcatatgccatcgatagcgatctcgatcaacttggtgccaataacaatacacagcgcctgactatcaccccagcagacagcgaagccataccaccggtagaggcggtgatggaatcggacgcagattttcgccaacgcatccctgcagcattcgagggaatgagtgtcgccgggcctacgggggcctatgagttccatgcgcttagtgcagatggaaaggtttccgacgcatctgcgatcagtcctgcgccggcagaagtcaccattagcgtgctatcccgcgacggcgacggcacagcatcgccggagctgcttgccgccgtcagcgccgcgctgaatgacgaggaagtccgcccggtggccgaccgcctgaccgtgcagtctgcaaaaattgttaactatcagattgatgccacgctctacgtttaccccggcccggcgattgagccgatcatggccgatgccgagctgcgtctaaaaaactacatcaacgagcagcgccggctgggccgagacattcggctatcagccatttatgccgcactgcatacccagggcgtgcagcgtgttgaactggccgcgccactcgctgacgtggtgcttgatcgtacccaggccgccaactgcaccgattaccacatcaggatcggcggttcagatgaatag

SEQ ID NO: 449049 - DNA, 606 bp, Serratia marcescens
atgaatagcctgttgccacctggttcatcaccgcttgagcggcgcgcggcggaagcttgcgccggcatcagcgatctgaacgtcccgctgcgtgacctgtggaacccagcgcgctgcccggtaaagtttttgccctatctggcctgggcattttctgtagaccgctgggacgagaaatggacggcggcagagaagcgcaaggccgtgacggatgccttttacatacatcgccgaaagggaacagttgccgcaatccggcgcgtcattgaagcaatggggttttcaatgtcgatcgctgagtggtgggaggtcgcagggccacgcggcacgttcagtttaactgtcgatattaatgaagtcggcgtcaccgacgatttactgaatgagttagagcgactgatcggcgatgccagaccggtcagccgccatttggccggcgtgaccatatcgaccacgacgcgcggcgaatactacgccgctgcgaccatgctcactggcgatgaaatgacgatttaccccaactatgtcagcaccatgcgtgccggtgccggtgtgctcagcggcgctgcaatacatgtcattgataaagtgcgagttacatcatga

SEQ ID NO: 449050 - DNA, 2343 bp, Serratia marcescens
atgaccaataaatataccgttattctcaccgatatcggcatcaacgccctggctgaggccaccgcaaccggcaataagctggcggtgactcaaatggccgtcggcgacggtggtggaaccctgcccgtgccagacccagcgcaaacgcggctcgccaacgaaacctaccgggacggattgaccgggctcataatcgacccggaaaacgggcaacagattattgccgaaatggtgatccccgaagccgtcggcggttggtgggtgcgcgaaatgggcttattcgatgatgccggccagctcattgccgtcggcaactgcccggacttttataagccgctgctggctgagggggccgggcgaacccccattgtcagcatgatgctgaaagtgggtaacgccgatatcgttaatctcgaccttgaccccaatcgcgtacttgcgacccgcgattatgccgaagggcaagccgctatcgtgcgtgatgaaattagaagtccgaccggtgcgcgtgaaatcgggcagttggccagtatagacgcactgagggcggtgacgccggaacaatcgggacagcgcgtccagttgcggggcttccatgccgggaaaacgctcggcaacggtgagttctatcgccgccagtctgctgccgctaccgatgatggtggtgtgaacgtgttgaccgccgccggcgaacattatgagcgccagctggagcgccctggcgaggtcacaccgcagatgttcggcgctatcggcgatggcatcgccgacgacagcgatgccatccagcgcgccgttgattatgcgcacagccgggcagtggtcaacgagtcccgccaggtgatgatgtcgggggtgttccgctgcccgcagggaacctacctcattacaaagcccctggtgttcccgaccaaaaccgtcgattacgatttcaccggctcactgctcaaattcagcatcagcgcccaggagggagagcgcgcgacggcgatcacctggatgaatatgcgcggctacacggccggcaacatgtccgtctataacctgcgcgccatcgggccgggcatggcgtcaaacatcgacttcatgacgttccttgacgaattcagctacccctatgcccgaaattccatgtcatttattggtggcagtgcggaaaacttcgcgcgcggcatcaccgtcggggacaatacctattatctgaaatattacgattatcactttaatcacctcgacgcttgcttcttctaccccaaaggcaagcgaaatgccggtgagcaaattaatttcatcacctgtgtatttgcgcagagtaataactttctggtactgcgtggcgggcacacggtatttaccaattgctcctttgactatccctataaggaatacgtcattgttgacgctggcggcggtggccgcgctgatttcagtgattgctggtttgaggggtacgggccgaattattacgtcattaccgtcgctaacgactgcacggtcgcaatgaatttctatcgcacaaaatttacattcaaagccggcaatacactggcgacgcaccacccgttcttgttcggcaatatgtcccgcgtcacgttcgatcgttgcatcatggagcggttcggtgcatcgacggacagcccggacattaaggggtggatagacggcaccgggcacgtatcaatgataaatacccaggtcacatcgggttggccgaacatgctgaccacggtcagaaccgagtcgaacgataactttctggacggcggcaattacgcgctgggcaatggctcaaaatggacggttgaagcctgggttatccccccagagggaacgaaaaccccggtcagaaaaagccggtggggctatggcacggatgattccacgcattttagcctgacccgcgcggcaagctatgtatcactcgcgacatcatcagatgagagcggcggtaaatatgctgctgtggtgggcgtgatcccattgcgcggcgacggcacggttgtttttaactcaacgtttaaaacgtatgtcggcgatggctatcagctgcggttcacgctgttttgggcgcagctggaaatgtacggcgccaacaacagcattgagcccacggtaatacgaaaccaatcggctattgattataaaatgtcgctgccgggcgtcacggacagcacgctgaaaaaatacaccgcgccggtcaaccttcagggctacgccgggcaatcccccacgattgaacgaaagcctgactgggcaacccacgcctatttggtcatggatattaccgggctaccgcgcgggacagatatacgcattgaaaatgtctatatgaggcaaatatga

SEQ ID NO: 449051 - DNA, 270 bp, Serratia marcescens
atgaacgattacgcattcaccgctgaaaacatcaccgacgttattatgacgttggtgagtctgagtctcctgaaaattaatctcggtgaagacagcatgccgtttgtctatgcgcccaaaggctcggcatttcaattaatcagcaccgatcgcccttacctgttattgcgtcggaatcagccactgtctgaaaacattctgacgcagttaaccccctttatcaccgatgatgcgccgccatttgccggcggcgatcgggtgccggagtga

SEQ ID NO: 449052 - DNA, 1353 bp, Serratia marcescens
atggccgcaaaatactacaccacgctgaccacatacggcgcgcagagcctggccgaagcggcaatgacaggcgaaaaattgcagctcacccacatggcagtgggggacggcggcggctttctgcccgtgccagaccctgagcaaacggcgctgatccgtgaaacctaccgggcggtcgtcaatcgtgttgaaattgatccgcataatccaggtcaaataatcaccgagttgctgatcccggaaaacacgggcggatggtggctgcgagaagtcgggctatacgatgccggcggtaagctgtttgccgttgccaactgcccggagacgtataaacccgtgctggcagagggctcaggtcgtaatcagctggtcaggctaatcctgattgtcagtgaaactgccagcgtggagttgaaaaccgatccggcggtggtgctcgctacccgacagtatgttgatgatgcgattattgtcgccagtaaacagacggcgcagcgtctggctgagcatgagcagtcgcgcaatcatcccgacgccaccctgagcgccaaagggtttacgcagttgagtagcgcaacggacagcgcagcggaaaatatggccgcaacccccagggcggtcaaggcggtgcgcgatgaggccaggaacacctacgcctaccgttcaattaccatcaacgggcagtccctcgccagcaatgtcaatatcaccgccagcgacgtgaacgcctggagtaagacggaagcagatgcccgatacctgttaaaaaccggcggctcagtgacctggctgagcgtctatcagacgttgagcgtcggaaccgacgccacggtaggtaatcagctgacggtcaagggctcgggattcatcacaaaatcggggtggtttcagcgcgacgacaccatgaacgtcacgaacggctttcaactacagggaaagaacagcaaatgggtgaacggctacttcgaggagctgatcggccaatttgcgcagatggtatttgaagtttattccgatggcgcaaagagttacaccctcttcaggactgacggcaccctgcaaataatgggatcggcaccaaaactcatggcgggcagtgccaccctgttcggcgacggcaatatcacgggctcaaaatggggtggctatctgagtgattacattaagaacaattttatttcagatattcgtctgggggctaatcagagcttcggcggcggcgatggtacgcaatatgcaccacccggctatgtcgtcaccgcaattggtgactttggtgcagatgatggatacggtgaatgcgcccctattcagtatctgcgcggcggtgtatgggttactgtgggggtatga

SEQ ID NO: 449053 - DNA, 513 bp, Serratia marcescens
atgatgaaactggataatttgaagcgttaccaacctgaagagccgccatttggcgagaataccctgtacctgatcgatgagcatgggcgggactggtatgaggcgcaatccgaattcacaaaggccattaagttggcgatagatgaccgcggcatcatcaggagtatcgcaaccgatgtttcgaccttgttcccggagaatctgtccgtcgttgaggttgacagtattccggacgcctgcaatatcagtgggaactggttatatgccaatggcgaagtgaaagaaagagaacccagccgcgacgaagtgatagcccaggccgaaaagctgaaggccaaaaagctcagcgatgccgcgatatccatcgccccactgcaggatgcagtcgatcttggtattgcgacagaagcagagagcgcattactgagagaatggaaaacatatcgcgtggccctaaaccgtgtggctctcgatgatggtacgggtattgaatggccgagcccgccgcaataa

SEQ ID NO: 449054 - DNA, 561 bp, Serratia marcescens
atgaaaaagataattataatcggccagtgtcattttatgcgcttggggctcaaggctgtttttgagaataattcaggctataaggttgaatgtcacagtgtttattgttttgttgatgagtggtgtgacgatgaagttatttttcttcatgtaacagatggtaactattctgagttattggttttgatggataataggtgtttttcttggcttagaaaagccatcattattacgcaaaagcatttggcgtccctaatgagttattcatggatgagttcattgaagtttatcgatgagggcgaaagtgttgctacgtttgaacgagcaattgtcgagggagatggtacttgccattatgcagaaagaggtgaacggttatcggaagccgaatacaccgtactgcggctcgcagcatcagggttgcgtttgacggcgatcgcatccataaccggtaaaaatgtcaaaacgattagcggtcacaagataaacggtttgaggaagctggggttagagaatacgcctcactcattgcttaatctatttaatttattttactgctaa

SEQ ID NO: 449055 - DNA, 804 bp, Serratia marcescens
atgaaaacttaccacctcttgtggctgtgcgccgtgaccctcgcgacgctccccccgcgtgctgaagcctttttcgtcactgtgacgtccgcccccaccgcccccggtggcccgtttttcgtacgcacgaccggagacaccaacgaccctcgaccaaatccatgcgctggcatagagtggtgcttaatccaaatttttgcgatcgacgagtcgtggcttccggacgggcgcgagggaaccgcctcgggctccggctcctaccctctacccaagggcaaacacgaatgggactaccgaacattgggagaatggtggaccgccgtaactgacaaaaacgccaccatgggcgacaggcttcccttgtccgacggcagaaatccgtgccttgttctggcgacgtcgcaatacaactcgatgaataaaggggggttactatcgaattgcgcacgcggcttggttcctgcgcctacctgttccgtccgcccaccgcagatagacgttcgcctaacgacgcatgtgggcgaagatcttcagccccagcctgtcccaggtgtgtcgctgacatgcaccgagggggccactgtccgcatcgagacaaacacaggcgaaaaaataccattggggggctccgatcgggcttatgctctactagattgggggcggggatggggagtgccaggtctctaccgtatcgcggccgggaatccgatccctgtgcccctgaagatcaaaacagtgggactaggcagcctagaggctggaactgtgtctggggcatccatcatcaatgtggtgtacgactag

SEQ ID NO: 449056 - DNA, 495 bp, Serratia marcescens
atgacggcagtgttcaggcggtattggcccggttgcggactggcggcgttgatgttgttcggctcgccggtgcaggcggtaacgaccatcaaagtggtggtgaccatcgtcgtcccaccgccctgcgtgattaacaacaataacctgatcgaagtgaatttcggcaacgatgtcatgacttcccgcatcgacggcaactataagaaacagccggtggtgtactcggtggagtgtaaaaatgcgccaaataacgcgatgaaactgcaagttcagggcaccggcgccgattttgacagtaaggtgctgaaaaccaacaagggcgggttgggggtggcactgctgcgcaacggtacccggcagcctatcaacagttgggtgaactttacctacccgaatctgccgacgctggaagcggtgccggtgaaacaggccggagcatcgttgagcggcggagcattctccgccggggcgactatgcaggtggaataccagtga

SEQ ID NO: 449057 - DNA, 654 bp, Serratia marcescens
atgcaaacaaaaacccggcgatggaacgatggttatcaccgttatgaatggctgtatgccttggtgattacgttggcggcgctgatggtgccgctgtgcctgatggtgatgttgtggctactgccctcggcgcaggcggcggacaactggcaggtagacggcgcccacggcgtgctgcacgtgcacggtgaacttaccgaaagcgcctgccgtttggagatggcctccgcgtaccagtcggtctcattagggactaccgccacggcgcagctggcacaggccggagaccgcggcgtgccggtgaacgtgcagttgcagctgcgtgattgcctgcgcactgcgtcgaacaaccgcgatgtgcgtaccggcaatcgggtgtggagcacgcagcagccggcggtgtcggtcagttttatcgcgccggcggatgccgataatccggcactggtgaaggtacgtggcgccgcaggactggcattacgcatcaccgacgagcgcggaaacgacgttcaccttggtggccgcggggcgccgctggcgttggcggtgggacagcatactctgaattacgctgttacaccggaacgaacccgcgcgccattacagcccggcacctatgcggctgtggtggattttcagctcagctatgactaa

SEQ ID NO: 449058 - DNA, 546 bp, Serratia marcescens
atgcgtttattacaaggcaaaggtgttttactgggagccgtattgattcatacttcgctgtattcgcacccggcagcatccattaatcaggggcgcggtgaagtatccgtgaatggccgaattatagcctcggcctgtgcgattagcactgaaaatatcgaccaatctatcagaatgaaaacagtgcccatcaacaaaattatgcgtgacggccaaagcgaacggcaaattttcagcattactttagtaaattgcgaattggaaagactcaacccggcgttgggcgactggcgctattttgacgtaacttttgatggcagaaacgatgcgggctattttggagtgaatggcagtgccagaggcattgccctgcaaatttccgatgggagcggaaatgttgccgtaccgggaatgccgatggcgagaattaaaattaaatcgagtggtatgactttcaaatatggtctgagactggtggggaatcaacaggtattaaaagcgggtaattattcgtctgctgtgcgattcaaaatggactattactga

SEQ ID NO: 449059 - DNA, 525 bp, Serratia marcescens
atgaaactgaataaaatcatgctggctgtagtaatgaccctgggcactatctccatggctaatgcagcaaatcaagggatgggttctgtgacctttaaaggtactattactgatgcaccgtgctctatcgagcctgagagcctggatcaaaccgttaaattgggtgacatcgcttctgctcaattgaaagatggtggaaaatccactccgcaagacttcctcatcaagttggtgggatgtgatgttgaaacggcaaaaacgctaaccacgaccttcactggcaccgagtctgaatcggctccaggcctgttggctatgaaggggactgcgcgtggtgccagcatcgccatcaatgatgtggatggtaaactgctgccgctgacccaagctagcaaagcccaaaaaattgaaaacgggcaggccactttgcgctttagcgcgaacctgcagggcgacggaaaatctggtgtcatcgttcctggtgaattcagctctgttgccgattttacgttggcttaccagtaa

SEQ ID NO: 449060 - DNA, 951 bp, Serratia marcescens
atgataaaaaagataatttttcaatctccccccccaacctccttgaaagaagagctcccccttgaaaacttcaaaaaaaaagataggatgtatcctagtaaatacaccagaagaaagcctaaaacctataaaatgatatatataataaataatcacattgttttcgactcagataacctgacgctatccctgtataataacaagcagatagcgaccctattaaccaagcccgccacccgtcttttactggagttaattcagaaaaacaaaaccaatactaccagacatgatttattagaaaatgtctggatttcctatggtttctcagcttcaaatgcaggattaaataattacattagcgagttgcgcaaagcatttttgtcattgggatataataaagaaataattattacgctgcctaagttgggatttcgatttgaagctgacattaatattattgattcaaaaatcgttacaccttgtgtcgcttcccctgaagaaaatgcaatattaaaaaacaccaaaaaagagagcaaaacagcgcaggaagaaccaacctccttcgaaaaatctgtgccaccacattcacgtaaaaaaaaattttcattcttatctttctgcatcctttcagtcattatattttgtgccatcacatttatatcgaccaaaaacacaagttataacatcaagaaaatcacaatgatcgacaactgtgatatttatattctgggaaaaacacgccaaaccaatattcttacagctagaattaacaccatattgaaaaatgaggatattgattgtaaaaacatccttggagatgtgttttacctggaagatcgcctgagtaaaaacatggtgctggatgaactaatcaccgtttgcaggagaaaaggggataatcactatgagaactgtttcaacatcagaaatcagagaagcataacaaaatga

SEQ ID NO: 449061 - DNA, 465 bp, Serratia marcescens
atgaaaaagatacgcatcgccttaagggctctatttttcttactgctctcttcattcaatacatatgcagaaaagccgataaaatgcacctcacactataaaacctttatagaaaaaaccaacaactccatactttttgagggccgcataactctatttatgaaaagcgaaaaagaagggttatttaaactatttgggaaagtagaaaccaataatgaaaattatctcctttcccgaacaggatatttctccctcgagcctcttgataccaatcagatcaaacaagcaagaataacaaaagtaatcaaacacacttgggacaacactcctgatgcaatttggaaaaatgacatcttaccggaagtaccaggtatcgatttccaaattgaaatgtggaaattgaaagacaacctgatattagtgaaatctcttaacgctggctttctaatatgtgccactgagtaa

SEQ ID NO: 449062 - DNA, 291 bp, Serratia marcescens
atgagatgcgtggccaatcccggggaggtcatgttccatagtgatcaaggaagccaatataccggccttaaatatcaaggagttctctggcgttacaggataaagcaaagcgccagtcggctagggaactgctggtataacagcccaatggaacgctttttccgtagtctgaaaacagaatgggttccgacaaatggttacgcagagagtgatgaggctctgcgccaaatcggcggttatatcctgaattactacaattgcgtcagactttatcagtacaacgggggctga

SEQ ID NO: 449063 - DNA, 651 bp, Serratia marcescens
atggggttcataaaaaaatggtggaataaccatgataaatctaataattttttatcaggtatccattacatagtcatttcgctagcaatcataattggtggcgtatgggctttgtatacctttaacgcattgcaaatggctagcaatgcggaactccaactgaaaaaagctaacgaagaattaaaacaaataaaagaacaaattaaggggactgactctagtagtattgctattaatgctacccctttaaaaactcaactaggagtaattattaatgtaactataaaaaacaatggtaagcgcccattatcttttgaaacatctaaaggggctttaactgtatataaagtgagtgcgaatggcgataaggttgagcaatcccaatcttttacacctaatctctataccgttttgagagataaagaaaacgctccagaatctaaaagtaaatcattacctaaagctcatgtgttaatcggagcagaaaaaacccttagttatattgtcgggttaaataagccaggggtttattacattacattcaggtcaactccagacgataattttgatggagatgacttaaaaaacaaaaagcctatagaatggtttgcctcttcgtatgttgaaattacatcgcaaaaatttagataa

SEQ ID NO: 449064 - DNA, 1104 bp, Serratia marcescens
atgtacattcaagatattcctaaagattcaaaattttgggtcgttcgatctggcgatggtggtatgttttatgaccactttgttcataattctatagcagctattggccatattgatgttatagattttaacgatcaaatcctcagcaataaagatgaagtgattaaactcgttcttaattacaaaaacgttttgcttgaaaaaaaggaaagtctagcttctgcatctaataaagctggtcaagttctacgtttcattaatgaaatgtcagtcggtgatataattatcactctcgatacgaagagaataattgtcggtaaaatcacatctgatccttataaagacatagaaaatgtaacattactcaatgctgatggcacaacagatgaaaaactgcttaaatttagtcttagacgaaaagttgaatggggaaaaacgcagttccgtgacaaactcccattagccataaataatagcttcagagctaatcaaactgtgttctctgcgaacgaacactggaaagaacttaaccactggttatctgttgcatttatttcagataatgaagcttatatttcctcacgtattgagcaaacagaagggattaacaatcttgacattgcccaatattccataatcataaataagattgaagctatagctcaaacgatcgccgacaatgccaacgttgatatcgatgatgaagagctattagccctttttgaagatacatataaagagctacgcagaagtagaacatttactgtgacgacacagcaggtatttctttcccctggcgatctttgggcaaaaacatctggaagtcgtataaaaagccttttagttgtttgctcatttcttatcatgttcagcatcgagccatctttcgcagatgacaatgacaaactatttttcgatagcaattacgaatcaatatcattgttaattaataaagtaaaacatgatgaaaactttgaggaagttaaaagtggattagcattgaaagtccctgcgcagaagctaaatgagaaaaataaacccgcaaatcctcaggaaaaacgctatgatgatgatgtagaacctgatgacttcgaaggcatttga

SEQ ID NO: 449065 - DNA, 594 bp, Serratia marcescens
atgatttatgccgtaaacactggcctgattgatgctaatccagcatcaggtgttgggatggcctttgagaagcccaaaaaacaaaacatgccaacgctacggccagaagaattgccaaaactgatgcgttctttaatcatgtcaaatctgtctgttccgactcgctgtctcattgaatggcaactactgacgcttgtgcgcccttcagaggcctcgggtgctcggtgggcagagatcgatctcgatacaaaactctggacgattccagccggacggatgaaagccaagcgtgagcacattgttcccctctcatcaaaagcactagatgttttgcatgtcatgaagccaatttgtagccaccgagaattcatttttcccagcagatgtgacccgaagcaagctatgaacagtcaaacggcgaatgctgctttgaaacgtataggttatgggggtaaacttgttatgcattcaatagccagcacggcaatgaatgaatttggattcaacccagatgtgattgaagctgcacttgctcatactgataagaatgaagttcgacgcgcgtacaaccgttcagtttatctctcagcgtga

SEQ ID NO: 449066 - DNA, 525 bp, Serratia marcescens
atgaacgatgatttatttgcatggaaaaaattcgcgaaaataggttttttaggcattatgccattggttttgatttttgttttttttaaagcatctcccaataactcagtcttttatgatgtgttaatcctgacgcaaaacatgaaagttaatatatcatcaaataacataccattaagcaaatctttgggcttatatattgtatttggtattttctttgccatttactttgtaatcaagtatggaagtctaattaagttaaaagaaaatataattacatcaatatttattttgacaaggttcattcctttcgcggttatatgttttgtatatatatacttcatgacattttccgacctggatataacaaaagggaataggttgctgaaaattgtatcatcaaacgattatctactcctatcttattatctggtttcttttgttggtgtgtattgtttttcaatgctattcattttgattgcaatcaaaattcctgcagccatcaaaaacaaaagccagccttaa

SEQ ID NO: 449067 - DNA, 1104 bp, Serratia marcescens
atgtatagctatattccatttttaaaacttaaagtaagcgagattggtgctctgaaggaattaaaagaaagtaagaaaaaagagctagttcctttttttgactttccgcggaagaaacctaaaaaaagccgatatgacgaggcggcgaagaaagataaaaatgagttgttttataatgatttaaataggctggagtcaaaattcagaacgaatttaggttggctaaatgagttttatttggacaactatgacgttgaagacggtatatctataagtaaaagatataattactttgatattattgagaaattctccaagtttggaatgataccagtaatagccttagatcgacatcctgaacatataaactctatatatgaagggtttaagaacggtgtctttgtaagaaaaaatgtggcaatgaggttaacgagggattttttctgtaattatatactttttaaagatgaattaattgatgttattgatgggttactaccttttattgataatgtggactttatttttgattgtcgggtctgtaaagaagatgattcaaagttagtatcaaagcaaataatagactttattaataatttaataaaagacaagtcagaaatacctttgggtagagtaataacaacaggatcaatgattcccgcatcgataagtgagctaattgaaactcaatctgagatggatgttctacgggaagagataaggatatatagtgaggtgcataaggcatttcaaaatgaaacaaatattcactttggtgattatggagctgtaagccctgattactcggatatagagctttttgatgaagatatgcagaatgttactacagctaaaatcatatatccttatgatgatcgcatatacataaggaggggcggtagggttaaaggcgacaaatatcaatataatgtttttgcagaatatattgtaagtaaatccggcttctatcgcggggtggattattcaagtggagatctatatttgcatcagaaggcaaattatgagggtaagtctgtaacagcagcttcaattgttaaacctttggtaaatcttcatttgtcatatatgattcttgaacgatga

SEQ ID NO: 449068 - DNA, 882 bp, Serratia marcescens
atgaaagatgacattgaagatttggatttttctttcggcaagtattcctctacgtctatgcatgaggagtatgaaaattttgtgacatttaatgcgtatattgaatcgttacctgtagaagcaaagagggccaaggggataattggtaggaaaaagaattttaataatatatcagatcttttttcagcattctgccaaaaaacagaaaaaagccatgcattgtttagacgagggtcatcatctgatgatgtacttgttaatacatggctatcattcgtatatgagaaagaaaaaattgtttcggccattgcaaatgttccaacttactctcctatcagtagagaatttctggttgactttgttaaaaatagtgttgacgaagcattccctctgcttgcaccaaaagcactaatggcattgggtattattcttatttacgaagaggcaataccctctgctaaagttgacggtgtcgtttatattaacgataatggaaatcctgtaattgccatgagtctacgatatagtagaattgataattattggtttacattaatgcatgagctatcccatgttcttttacattatgaaaacctaggttctcctataatagacaacatggatgttattgctgaaccagaaaatttaattgaatctcaggcagataggatggctttagataccctaattccccgtggattatggcgcgggtgctcagcgaaacaaactcttagagaagatgacttgtttgcattttcaaaagaaattggaattcatccggcaattgtcgctggtagaatcagaaatgaaaaacggtcgtataaattcttttcaagaatagttaatgctgtgaatctgagggaggttatatttaatgtatag

SEQ ID NO: 449069 - DNA, 681 bp, Serratia marcescens
atgagtgttgatatagatcaattagttaaattaggtttgattgctgcgccagataatgaagtagtaattgatcagggttttattaataaaagtgatgctacaacagaggcctatacagtatcatatggttggaatgtgctaaatgcactgtcgtgtgataaagattggaaagagtaccgcacacgaattttaactcatttaaaagaaaactgtgatgatgctgaaagaaatgagattctcccaaaaatacaaacaggagactatcattggagttggtttagtaaatcattaaattatcatgatgatgaatataaatggtttttcttaagaacagatagtgcagttgaagcagcctgccttatttatttccccaaaaaaagcgtttttagtgatggaaatattttttatgtggagtttatagctgttgccccatggaatagattttccccgttggaggataaaaggtttaagggggttggaaaaatgcttttacaggctgtcattaaatatggaacgaaaagcttgggttatcagcacggattctgtttacattcgttgcctcaagctcaagggttttatgagcatataggtatgaagcattttgatgcgttagataaagaacggttgttttattatgaaattgataacgtcagtgcaatgaaatttgtgggggaagcatga

SEQ ID NO: 449070 - DNA, 576 bp, Serratia marcescens
atgccggaggtggcgcgtttgcgccccgacatcgccttcacgctggcgttggcgccggcgatcaactggctgcggcaagggcgttataacacccgggcagcgatggtggcggcaggggacaatgaagcgtcgatcgccgcgcgcgaggcgcactggcgccacattcaaacgctgctcgaacaaccggacggctacgcgcagtaccgccgcgagtctggcgccaccgccgcattgagcgccgaccgctggcgctttattcgcgccaacatggccagcgatgcgacggcgggattacgaaatttcaacacgccggtacacctgatactgggcgggcgcgacgtcaacgtggacgcggacgaaaccgagcgcgtttatcggcaaacggtcccggcctcgctgttgacggtgacgcgcatcgacgaagccgaccacgtgatgatcaaaccgctgttcgcgcgccatccgtggctgatcaacgtggtgggcctgtttgcgccgcgctcggtgcaatacgatgcctaccgacaggacgtggcggccttcctggccgctcagccctgcgggcgcgggcgctaa

SEQ ID NO: 449071 - DNA, 2217 bp, Serratia marcescens
atgccgccaaatgcagactcccgacgaggttctcatctgcgagaacacctgcttttcctgctgctgttgaccctgagcgtcttcgcaccaccggcgctggcgcaaaacgcgccgcctgcgcccgccgacaagagcgagcagcagaaagccgcctacgccgcgctagccgatctgctgcaagacgaccaagcgcgcgcggaactcatcgaccacctgaaacagaccgccggcgacgctgcggccgccgcgccggcaacgccggaggaatcgacgccagccacgctgagcgacagcctgaactcgctggctcaggaaggcatcggcacctttaaccagaagctcggcgcgctgcaaaagctgatcgactccggcccgaagcgcgttttcaatcccgccggctttttccgcgcgctgggctactttctgctgacggtggcggtcacctttgcgctgttccacctgatccggcggttgatcgcgccgctgtacaaacgcatgggcagttgggggcacaatgcgcggctgcagcgcggcccgtggtataagcgccccgccgccattctcggcgctttcgccgtcgatctgctggtgctgctgctggcgctggcggcgggcaatctgttcgcccgccacgtccacgccgacagcgccaccattctgcggctgcagaccctgtttctcagcgccttcgcggtgattgaatttttcaaggcggtgctgcggctgattttcgcccctaacttcgactacctgcgtcccttccccttcagcgaccggagcgcacgctactggaacacgcgcctcgcctggctcagcggcctgatcggctatggcctgatggtggtggtgccggtggtggcggtacaaataagctacccggccgccgccgccgtcaacctggtggtgatgctggcgctgacgctgtacgccatttggctgatcctgcacaaccgcaaaccgatacagcaacagatcaacctgctggccgaacggtcgatggcgtttttcagcgtgatcctgcgcggcctggggcatatctggcacctgctggcgatcgcctattttctggtgttgttcgtgctgtcccagttcgacatcggcaacagcctacgctttatgatgagcgccacggtgaaaagcctgctggtggtcggcgtcggcgccctgctgtccggcatgctgacccgctggattttccgccgcatttcgctgccgaccgacgtcaatctgcgctatccgatgctcgagcggcgcatcaactcctacatccccaacgggttgaagatactgcgggtgatggtggtgctggcggtgacgctgtttctgctcgacgcctggcacctgatcaacctgtaccagtgggcgggcagcgaaaatggccagcggacgctcggcgggctggtgcatatcctgctgatcctgctgatcgccgtcttcagttggacgctgatggccagcatcatcgaacaccgcctggcgctggaactgagcaacggcgtgcggccgagcgcgcgtgaacgcacgttgctgacgctgtttcgcaacgtgctggctatcgttatcagcaccattaccgtgatgatcgtactgtcgcaggtcgggctgaacatcgcgccgctgctggcgggcgccggtgcgctggggctggccatcagcttcggcgcccagacgctggtgaaagacgtgatcaccggcgtgttcatccagttcgaaaatggcatgaacaccggcgaatacgtcaccgtcagcggcatcaccggcaccgtggagcgcatgaccatccgctcgatcggcctgcgcgacgactacggcgtctatcacatcgtgccgtactcttcgatcaccacgctggccaactatgcgcgtgagtttggggtataccgcgccaattacaccgtcagccgcgacgaggacatcgatcgggtcaatgaggtgctgcatcaggccatcgcggcgctgaagcaggatgaacaggtgaagcatttcctgattggcgagccggtcttcaacggcgtggtggcgctgggcgatcgctcgttcaccacccgcgtgacggtgcgcacgcaggcgctgaaacagtgggtggtgcaatacgccctcgaccggctggtgaaaatccatttcgatcgggccggcatcggcatgccgcagcaggcgatgcagatctcccgcgcgccgcagccgcacgaagaacaggcgccgcccgcggcgatctga

SEQ ID NO: 449072 - DNA, 795 bp, Serratia marcescens
atggaaaacgctgaagcgatggatgatgaagtatttggaagtctaaataaactgaattcttatttagatagccttgatgaaagagggttgatattatcattatcagctttctctgaagattctttaggggtaatactctctaattttatgctagacaataaagtatcaaaacaattacttgaaggcttcaactctccattaggtactttttcctctagaatcaaagcttgttattctcttgggttaataacggaaaaacaatatttcgatttggaaatactcagaaaaataaggaacaaattctctcatacttgggaaaaagtatctttttctgataaagatatatcgcaacagatatcaaagcttaattatagcaacttagattttgaattccctgattctgagttaaaaaaagtaagatcatccattagctcattactgattgagttgagagttatttcttctcaaattgtggaaaagaatcaaaaggtaaaattgataggcacaagtcttgttcctggattcagtagtagagattacccatctcagattgaatatatacggaaaaatattttagatataaaaagagatctgctatcagataatcatgagctaagaaggtttacaatatataaagctcaatcattatgtaatagaagggtgttggttaattttagtgatgaaaattcagagtctttcaataaggaattattagaaagcattaagataaagcaagaaatagagagcattatagagcaagcagagcttattgaaaaaaaagatagaacaaaataa

SEQ ID NO: 449073 - DNA, 711 bp, Serratia marcescens
atgaaagactatctgcaaatttctttcctgattataccgttgattgcatcctacttaatttataagtcacaaggtaataagctaattaaaattgttgaactattggctgttattgtactgtctttcttgagtattggcgcggctgaacatggtagcttttggtttgtgtggatatccttagctatcatttgtgtgctcatgatacgaaggatctacaggactgacaagcctgagcctaataaatcaccaattactacaccgctcaatgagaaggtggattataggaagcgggtaaaagaaaacattaaaaatttaaaatcaattaaaaaaaatacatttagtgaactggataaacagttggctaaccgtaatgataatgtaagtaaatccaaaaaaaagcatataactataaaagatggaagaaaaagaagagaaaacctaattcctaatggccttagcaataatagtgattttagatacatggcattcgattatgaagacagcaaaggtgtgcgctcctatcgagaggtcgatgttagatctttcgatggtgatcgcattcaggcatactgccacctggctcaagcgatgcgaaccttcatcaccagcaggattataggtgacataattattcgaccaacaggtgaagttaaatccctgtctgattggattaaagagatgaaatctttaagttataaaagagggaaataa

SEQ ID NO: 449074 - DNA, 858 bp, Serratia marcescens
atggtaaagaataagcgtcttgaagattcggttgcgggcgaggtccttgaaaggatcctttcgtcatatggctttaagatgcaaaaagagcttagtgataggcttggcattgcaaaaagtaacgttgggagctggctgcagcgcggacaagttccaggaaatgtgattgtgcaatgcgctcttgataccggtgcagatgttggatggttggtaactggaaagtttgcaaattcgaattttgagagcggaaaatcatcggtatcaggaaaggccctttacgaacaaattcaagcatctgggggtaaaccagttctccgcaggatgttggatgcatatggatttcgcacacagaaagagcttggcgattttctggacatttccactgcaaccataagcacttgggttcgccgcgaatacttccccggtgacgcagtagttgcttgtgccttagataccggggtctcattgctttggttgtcgaccgggcagggaagtcctggcaatactgactcggtttcatatgaaacaacttttttaacccttaaccgctggtccatttcctctggagcgttgattaaaaatggctcctgggtttgtgacccctccttcattcccgcctcaccagagaacatagggtatgttgaaaaagatttatcatcgtggttagttgattttgacattaacatgttaggcaatgggtcttggcttttaaatatagatggaattcatgacgtatattcagttgcgcgcatacctggcaataaagttaaaatttctggcttatcagagagctttgagtgctcagtggatgatgtttcttgtgtagggaaagttttaaaaaaaatagagaaattgtga

SEQ ID NO: 449075 - DNA, 927 bp, Serratia marcescens
atgaaaggaattgacttgttcgcggggctcggtggctcatcaaccggcgcgcgtaaagcaggtgtagacatcgtttgggcggccaatcactggcaggaagctgttagcgcacacacgatgaaccaccctaacactgttcacgcatgccaagacttacaccaagctaatttcgcagccgtactggctttagtgccaaagctggatcttttactggcatcaccatgttgccaaggtcatagcaaggcgcggggcaaagccaacggcaacccacagcacgacgcgagccgctcaactgcctgggcggtgcccgccgctgctgaagtattactacctgaaggaatcatcgttgagaacgtgcctgagtttcttcaatggtcgctattccctgcatgggagtatgcgatgcaacggcttggttattctctggcgtcgcacatcgtggactgcgcagacctgggagtgcctcagaaccgcgtccgtatgttcatcatctgtacccgtagcaaaaacccactgaagctgaatctgccgaaactgccgcatgtctctgctgaatcattcattgatttcgaagccgggcgctggtcagcggtcaataaaccaggacgcgcggcggcgacactcgacagagttgcaagtgggcgctctcgattcggtgaccggttcctaatttcatattacggcaacaccaaatcaggccgctccctgcagcgtccgatcggcactatcacgacgcgtgaccgctgggcagtagttgacggcgaccgcatgcgcattctgaccaaggaagaaaacatgctggccatgtcattccctgccgactacatcacaccgccgtcacacaagttgactgttcatatggcggggaatgcagttccgccagaggcgatgtatcaaataatcagcgctctcaagtcgcaggtatga

SEQ ID NO: 449076 - DNA, 684 bp, Serratia marcescens
atgggagctaagacggtagtaaaaaaatgggaacaggtgggatacactggtgaagtttataggttttttgataaagaagagtatgcgaatgctctctgtaatggggacattcgcattagtacattagatatatgtcgaaagtatgagaatgccgaacaaggcgatgcaggcgaaggaagttggacgcaagagataaaaaatttagttgtagatggtggggaccctaggaatggtgccctacgatatgctggtatatatgtgcatccatctgctgttgctacttcaattggctatgctagagccgatatatcattggcagatgcatatttaatttgcactacaaagaaatatgatccaacagttttcaaggaatcttttggtgaatactgtgtaaaaatcagtgacgcccaaagatttgcggctattattggtaaggcaatatcagagctacatgatggaatggatattacagcactatataatgacgtcacatatttagaaaaaagaacaggcatgaattattcagtgcctaatactcatataggctttattaagccagaacatccttataaggaacaaaatgaattcagatttctatggttgccaaaagatagaaatatgaaattaaaaacattagatttaaattgtcatgagttgtcttgcatttgctcaagggtctactaa

SEQ ID NO: 449077 - DNA, 186 bp, Serratia marcescens
atggaaccacttgaaaagcaaaaacaaactttaacgcgtgttagatttattgcggagttggcacttatcgccccgcgccatgcatcagatcttaaattggcactagggatgataattgacctgacaaccgatgtgctgccagaccataactacgccggtattttttacaacgcagacgagggctaa

SEQ ID NO: 449078 - DNA, 231 bp, Serratia marcescens
atggtacgccgcggcgatgaagactgggcttttgaactggctaaaacaagaaagccaaccggaagatggacgataacggttgtagattttttgagggagctgcagaaggtcgggtttgattggtcgccgagccaagctaacgattatatccgatattatcagcctacctggcgcctccaagatgaaggcgattatggactaaatacctattacaaattcaatatgtactga

SEQ ID NO: 449079 - DNA, 546 bp, Serratia marcescens
atgacacttaaatcaaagcgttttcgtattgccgtagagggtgcgacaaccgacggccgcaacattagccgcgaatggctgacgcagatggccaagaactacaacccatccgtatatggcgcgcgggtaaatctggaacacatcaagggatatcaccccgatagctccttccgtcgtttcggtgatgtaaccggcctgacagcagaggaaattaccgaaggtccactggccgggaagatggcgctttatggcgacatcgcaccaaccgcggacctagtcgaaatggttaagcaagcgcaaaaggtttacacctcgatcgaggtaaaccccaaatttgccgataccggcgaagcctacttgatcggcctggccgtaaccgacgacccagccagcctggggaccgaatatctggccttcagtgcatccgcatccgcaaacccactggctaaccgcaagcagcataaagacaacctctttactgcagcagaagaagccgcgatcgaatttgtggagcaggatgtgtattccgatgatttcgatcagtga

SEQ ID NO: 449080 - DNA, 345 bp, Serratia marcescens
atgggggccatggcaaaaaagtggtgcagccctcccagtgaaagcagctggtacttggatcgaggtccgaagccgacgcgtcaacatacattttgcctgccagtcggatttgacagaaaatgctgctatcgctaccaacctgagttgaatgaagaacatgtcgctattgccgatttgatgattcgtatcactgacaggcagctctactgggagcttggtctgtgttttttgtatcctcgtaacgtgaaaagctttaagttcaaccacgaaacggtgtaccggatttactgcgagttatcgctgaacatgcgaataaaacccaaaaaactgctgaaaagggattag

SEQ ID NO: 449081 - DNA, 879 bp, Serratia marcescens
atgagaaaaatacgaaatccgcggatcatggtagtcttgttagcactctcggcctacaacgcatcgtgggcgggcgtggtggaagggggcttcgcggtaccccctcttccttatgtgaccgtataccctggcggggtgactggggggggggctctcaactccgtgcccggcccatgcactgtgtacgcacaagtgtatgataggccagggcctggcagacggtcttccctttacagaaaggattttaatgaagtcggagggtcctgggagaaaagatactgcatgggagtgcagatatctgggagtggggtaggggatcaacgggaaacagccgaactcgtgttcgatcgtatgaaggcgggtatgaaggtgccctactggacggctggtgacactggtagttggagtaacgttgacgaaactctttgtatgtatgccgttgtcgtcggtataacttcatatccgcagggagtgactaagtattatcacaagcacgggttcacaatgccgggatggcctgatcattgtacatcgagtgtcgcgcccaaacccgttttatgctcgatcgtagggcgtggtgaaatcgtccaccagactgcctctgttggtacggtctaccgtcggaataaggttactctcggagtggaatgtgatggtactgcgactgtggtcctggatgtaccccgcaaccccacggtacttcggagcgagaataaacaaatcgaatccggtatttatttaaatcgagatggagtttattccgcgacggttaccgcggctccccatggatctgtggacgtaataagtgtagtggacacagatgttaaatttgcagggacgtataacggatcggtagtggtgactgccacgtgggattag

SEQ ID NO: 449082 - DNA, 798 bp, Serratia marcescens
atgaaatatataataaatctaactatgattttcgatccggacagtcagttattaatgctcaggaacgatagcctattaactgtagggttatctaatccggctacgcgattgttaagcgagctgataaggaataataaaattgaactgacgcgtgaaacgctgattaagcacgtctgggaggattatggattctctccgtccagcgccacgttgagcaaccacatcagtgagctgagaaaagcctttgaagcgcttggggtaagcaaagacatactgatcacggtgccacggattggctttaaaatggaagcagaaatccacccggagaccaaacccccaaaagagtcgataccggctgaacaggctgaaactctgccgccagtgagtcagcaggcggcagagggaaacgtggtagcgggcagtgtggctgtaagttcgaaaaaaccatcacacaaaataaaaatagcggcattgtctctcctgctcatcctaggcgtcaccgctgcgatggcggcatgggtaacactgagctggaatgaacaaccctcactcatcgggactcaggataaatgtcatatctatactctggatgaagggaagcctgaacccgatcaagcaggtcgagcaaaaaaaatgctggccgatgaagggatcgattgcactcagaccgatcgggatatttactatatggaagcgcgccctgccaacaatttgcttaagatatcttttatggcagcttgcaacaaaaacagcgatatgagctatacaaactgtaacaacttcaaacaggttgagtaa

SEQ ID NO: 449083 - DNA, 285 bp, Serratia marcescens
atgggcacaccacgatttacacctgaatttaaggaagaagccgtccgtcagataacggaacgcggttattccgttgccgaagtatctgaccgtctgggtgtttctgcacacagcctctacaagtggctacgggctatcaaacctgataacagcgaacagcatgctagggatttactggaagccaaaagcgagatcctgaaactacgggcacagctaaaacgtaccgaagaagaacgggatatcctgaaaaaggccgcgcggtactttgcaagggagcccgactga

SEQ ID NO: 449084 - DNA, 828 bp, Serratia marcescens
gtgaaaatattgcatgtcgccgaaacaataaagggtggtgttgcgacaatcatgcgacaactggttatggaacagcaagatactgaagatgaggtatcatgcattgttccgagacaacagttatctgaactggttggtgttagagaacatgtgctttctccattcaatagaactggaagaaataccatgtcattatttttgcttctgttttgttttctgcgagtggttttaaataaaaaaccggatgtaattcatttacacagtagttttgctggctttttatgccgtttggctttgcctataatatttgttttttatcaccccaaagtgatttactgtccgcatgcctttgctttcttaatggatattcctgtttataaaaagcgagtctacgcatttattgagcgcatgctagagaaagtgacggataaaactatttgtgtcagtgaatatgaatatagggaagccataaaatgggggcttaatccagagcgtttagtcattatctataatggtgttcaagatcctttggtagtaacgcaaaaaagcccttataaatacgcgaataaaaagaatattctctttgttggacggacggatcaccagaaaggttttgatcacgttctaaatataaccaatttgctttctcagaatgaggatatacatatcactgtgatcggagactatgttatagagtacaagagtcttcctgtatatggtgaaaaaataacgtacataggctggttgaagtatgaagatattgcaccttattttttccatgcaacagtcttactgatgccaagtcgttgggaggccttcggtctataa

SEQ ID NO: 449085 - DNA, 1320 bp, Serratia marcescens
  misc_feature (1111)..(1120): n is a, c, g, or t
atgaacacatcaacctcaaagatatttatattttttattctgacgtacctggcattagcttcattaaatgggctggttacaatttttgcttataatactactcgtttgatcttgctctataaagatttcttctcgatagtatttccgttgttgatgattttcttttttgttgcaaatggatataaggcaggtaggcagttcaccacattgatgctaacgcttttagcgatttgtttttttatcctttcatatattttggcgaccttactcttttcaaaatttgatatgacaaggattgctatacagtttcgagttgaactcttcgcaatttcggcaatattgatcgcagcgttagctagtatgtttagcactgaagagaaaaaagaaatagtatctgtttttattaagttttatattattttttgttcgattaatgcgttagccactattgctgagttcttctcggcagagcttattttccaggttctggggttcaatcctggcccgatgttaaccgcgtttggtaaagacaatggccttgttttacgcactacagatggttatttaagagctctgggtttattgacaacacctttcagcctcagtgaatatcttttctttggcctcgctcttgcctcatttgtttcagccaagaggagaacgctatttacattcttaatgatcgcaggcattctttgctctacatcaaaaacagctttcgtgatgatggtaatttatgttctttatatgattattaatagacttgtctcgaatcagagagcgttgagattcattacttggattactgttgttgtttccattgtttttttcctttccgttactaacacatttatatatgaagtgttttcttcaaaggaaaatacatacgccgaaaacagtattttcttgcgtattctttatattgagcaagtgttagattcagcctactcaatttactttggctctggttatgctgtgaacggtagtggtatggttggggttgaagataatacaacggcgattccgctagacagtttgtacatttaccttctctcaaattatggatttgttggtgtactggtatttgtttgcggtgcttttttactgttgnnnnnnnnnncatctaccgtattaccacacggtgtctatttgtactggttgatatcattgctaacaaactttgcctataataatccatttaccaactatcctggttatatattcccgataataataactgcgcttttagtttcacttaaaccggaagaatactccgatgaggagggcagtgctaatccagtttatacaaaagtgagttaa

SEQ ID NO: 449086 - DNA, 741 bp, Serratia marcescens
atggcagtagaaaacgtaagttcattagatacagcaataacaatcataggatttattgccacgatatcatcgctcgtactcgccattggtgcgatttggctatcttttgtcttttacagaatgtcaaacgaagcatcaaaagaaacgactacagcagcaaaagatatacaagccagtgttgtacgattagaaaaaatatttgacaagttatattcagatacgttctcaatgatgaaagacactgttactgacatgcgacatcacatatggagaaaacctcccacctcaagtgatgatagcgtcaccaacaatgaagaaaaaatgaacaatttaaaagaaagcattagcaatgaaataataagccttgtagatgaaaaacttaaatcaagtgagaacaacgagataaaaataaaagaacttgaaaacaaaattaaggaagctctagatagtgggatacaaaaaaccatccgagagcaagcggttcccacagcaagagttcgtcgtagattattgagcttgattaggagacatgggaaaattagtgttgagagattactctcaagaatgaacgctttgtccaatgaagattataacttcaaagacgttgcgtttatgaacacgttattcgaattgcgtgagaatggtttaatctcatgggatggccctccgactaggatatcatcagatgatatcttggtatatttaaatgatggcgatgataataacaagttgaatagttaa

SEQ ID NO: 449087 - DNA, 225 bp, Serratia marcescens
atgtcacaagagcaagtatgggagcaagcagttcatgcggttctcggcgcagcgattgaacttggttatgatgttgacgaaattgctattagagcaaaaaaagtaatggctagtaatgaagtttatcggtttgtcgaccacgccaacaaagatgtgaccagaacaattctggcgattgataaagtggttgatgaaataaagacaatgtatgccagtaaaccttaa

SEQ ID NO: 449088 - DNA, 879 bp, Serratia marcescens
atgggcgagatggcagttctcgcccagaaaagcccgcttgacacagtaagaagcaagtatatcaaagagatgtcgcaaatgactggacgtaatgtcattgcgtattactctggttttttacagaaaaactctcatctagtagcaatgacagacgatgataaaaatggctttatgacagccattcatggtcttgatgttactaaaggtctggatctgattcttcacactcctggtggggatattgcagctctcgagtctatagggtactacctacgagcgaaatttggtaataatatcagagcgttcgtgccaatgatatcaatgtctgctggaacgatgctggcttgctgcgctaaagaaatcgttatgggcaagcaatctaatattggtccattcgatcctcaggtcggtggtgttcctgctcatggtgtgattgaagaagctcaaaatgcaatgagagatatcgcgcagaacccggcgactgcagcgttttggcaatttacgatgtctaagctaaatcctacatttattggtgagtgtgagaaggccatacaatgggcatcgaccattgttagtgactggcttataacgggcatgtttgaaggagaacacgatgctcaagcaaaagctgatgcaatctgttcgagcttgaataaccatagctccactttcgctcatgcgcgccatatacacagtgataaagctagccaaattggtttgaaaataactccgatggaagatgaccaacagttgcaagacattgttttaactattcatcatagttatatgcacacttttggcgggtgcacagcagctaaaattattgagaatcacgaggatggccgtcgcgtatggcatgttcctcctggaaatctctaa

SEQ ID NO: 449089 - DNA, 225 bp, Serratia marcescens
atgcaggattttgaaagaaaaatttatgacgttctcgcaaaatcggaggccacggtagggatcggctcttctgaaacagcgaataaactgatcgacgcagcacgcccattttataagaaagccgatagcacaggaaaatccagtatcatcaatagattcaatgcgatgagaaatgagccgggtgttccattcccaaaaaacctggccgagctgctcgaaaaataa

SEQ ID NO: 449090 - DNA, 303 bp, Serratia marcescens
atgggcttggcaaaaaaagtttggattgaaaatgacaggggtgataaattcattgaaactgataacgaaatgccttatcagtttgtgcagagttgttatttaataagaaagtttttagataaatactttatcagtgttgattttgaaacattcaacttattaaataggcacgcatttgcccatggaagacaacaatactatgcctcccaagtggatgtcgtgaaattgattttcatcattacaaacattataagtatgtattacgaaattgaattcatttattccgagggaaatgataaatga

SEQ ID NO: 449091 - DNA, 402 bp, Serratia marcescens
atgactcaacggcgtgatttacaagcactgatcgacgcagcccctatcggcaagacgcagtggcgcgtcattctctgctgctttttggtggtgatgctcgatggttttgacaccgccgccattggtttcatcgcgcccgacatccgcgcccaatggcaactgtccgccggtgagctggcgccgctgtttggcgcggggttgctgggattgacggcgggcgcgctgctttgcggcccgctttctgaccgctttggccgcaagcgcgttatcgaactttgcgtggcgctgtttggcgcgctgagcctgatttcggccttctcccccgatctgcaaacgctggtcgttttgcgttttctcaccggcctgggcctgggggcgcgatgccgaacaccatcacgatga

SEQ ID NO: 449092 - DNA, 975 bp, Serratia marcescens
atgagaattttatattaccctaaaaataatggcgtcaatgaatacagtaacagatttaaaatcctcctgtctaaatttggcagtatcgaagggcatacatcaaaagagctattgctgagtcttgcaaagtttaaatttagaaagtttgattatgcttttgttaattggctcgagtctgggttaattaataaaaagggaaggattagcttctattgtctcactaagtgttacctcaaaacgtggctatttaaacttgtttcgaggagggttgtttatgtgaggcataatttttatccgcatgctgcagttgagtctgatattaaacgtgccagacagtatacagattttctggagtctttatatgattcagttatcatgcactctccggtggctagtcaggataataaacgttatatccctcatcctttgtatcaatccgttattccggtcgtagctgttgaaccaccattactttcttatgttttttttggaagaatcacgaaatataagaagctggatcagcttatcgctgctgtgcccaaaaatgttaaactaacgattgctggaagttgcgatgacactgagtacttaagttatttaactggaatagccggagataacattgatattcgtgctggcttcctaagtgataatgaggctcatttgctcattaataattcccagggacttattatcgcccatgctgatagtgacatgattgtcagcgggagttttttctattcactcagtgctggtgtaagagttataagcgttgaaagcgattttcttttatgggcagaaaaggaattaggtcacgatgttatcgtttgttttaaagatatcgcatcattgggtgaggggcttagtgcgctgaaaccaagagttcacttcgatgggaaattaaatgaagtcattagtatgaactttagcgatgaaaccatctgcaatgcattgaaaaataaaatttttgattga

SEQ ID NO: 449093 - DNA, 816 bp, Serratia marcescens
atgactaattcagtggtgacgaataaaaaaggaaaaggaatttttaaacgagatgaatggatcaaggaatccaaaagtctttatttgtctgcaaaattgctacgtagccaaggtgatgagagtaaaaaagcattctctaatgtaaacaaaacagaaagctattcctatgatttaattgatatttctgtcgcaacggataaaagtagccgtcttttattaggatatgcttttgaattgctattgaaatcagcagtgttacttatgaactacggcgctacaaaaaatacaatcgcacaaaaattcaagttctatggccatgatttgcaatcaatgattcaggatttagagttgtctttgtctgattacgatttgaatctattgggtcttttgtctcaagatatagtacagcaagctaggtatccgataggggtgataaaagatgaactttacgtaaaagcaataaatgaaagaaatgctaacttggcaaataatggattgtttaatgaaatgatttgtctatatgataagctaaagggaatagtggttaaattagataatgatgtggaaaattgtgctcatttcaattcgttaacgtttaaagatctatcactcttcatgagaggtggcggagggataaatgcacgttgtatcgtaatttataattctgattaccctcaagataaaaaaacaaaatcatatttaaaaagtattcttgatcgaaaaccaaatggtataatgcgattatatacagtctattgggatgaatacagattttttgaagatacagggaagaaattaattccgttgaaagattga

SEQ ID NO: 449094 - DNA, 1272 bp, Serratia marcescens
atgagccatcagatattgggtgtggatttatcaaagatagaaaagccatccgttccaaatatcttgcactttatatggattggtgacttaaatgaagtaaatactcattatgtcgatatatggaaaaagacgaataaagataagcagatattcttttggtatgacaaagacgcttcactgtgtcatttgctaaacaatgccatacgcgatttcgtcaacgccgaaaaaaataaatttaaggttgaattgaaaataaaaaatcacgcctttaattatatatacccaaagataatggagggcttttcttttgatgaactggttgttgaattcttaattaaaaatgaaattccttatcagaaaccgccaaaagcgattgaagacgcatggtttgaaagtagaggttttacaaaaaaatgtataacggagcttttttgcaatggtttcgatgatttcatgagatattattattatgagattatattaaggtgtaatcttgccagtgcaagcgacatagtccggcttttaattatctaccaatatggcgggacttatgtagatgttgatacactcccatatactgacagcatatatcatggattaaataaacatatagaagatgagggcattatcgagagtaactcgtttctattatttaagaccgtgtgttttttaaaaaagacaaattcagaagagctatggcctgcagcagtgatcggctgcgatgaaaatgagttaggagtagatgctgttggatttgaaaaaataaaacagcttgtcgaacaggacctctctggtttttctttggagatgatactgccattgggtgaaacatacgttcataaaaatttattggcgttaggatcactcagaagatttaaaggtgtttattttaataatttcatgtcttctcatcaaaaatcaaaagcgataaggatcatccttagaaccatgaagaaaaggtatcgctttttggaaaaaagcaattgcatatttgattgctacgttgatgacaagcccaagtgttatctgaccagacttttaacatggagaaccgagttaacaacaagggactattgtgtgactcaggtcttaactggtccgggattgattgtcgaggttttattggggttggcttataaagtattcaatattgaatattcagttgagccacatgttatagccgagtacatgcaaaatgctgattttggaattgcattatttcaacacaacatagatacacctgatggcgtctattccacatggagaaaataa

SEQ ID NO: 449095 - DNA, 201 bp, Serratia marcescens
atggcgctgttgcagcaaaacgagcacgtcagctactgcccttataagggcgactgcagttatttctccctcacgctgaacggaccactgggggacaatgtggcctggagctatgaaatgccttacaacgccgtggtggcgatcaaggatcatctggcattttatcccgacaaagtcacggcgatccgtaccgaagcctga

SEQ ID NO: 449096 - DNA, 1455 bp, Serratia marcescens
atggatgcgctgctcgggttcgccgcaaccaccggacgaaacgttgctaaaatcgtctttcctcgtggaacagtgcaattcaagaaaccgatcattctggattatcgcaagaactggttcttggaggggcaaggtgggcacggcgcttccggcagcgtactcgatttcaatattcctcgcagtgccggctatggtgaatacggcgcgattcactgttggggagagcctttcggatttcagcagctcacgctgcgtggcctgatggtgcaaggcatcggcacccgcatcgttgatcctgctcaggatgaagccagccgggcctactgtcacggcgtttattgccgcaccacgggcactttgtgggaggacgtcgccattcaaaacttccgcggtgcagcactgtacctagacaacgcgttcgacaataacttcaaccgggtctcgatgtttgcttccggccgaatgaaagaaggttacagttactcgaatctggatgatgtggccaatcctgaggcaaccgcttatccacccttgctgatcaccagtactcgcccgggcgatcaaagcaatttcaaccgcttctttgacggctccatcgagctgaacaacgtaacgccgtttgtcgaggttaaaggcggtattcagatgcattttacgcgcctgcacgcggaacgccctggcggtagtctggctgaaggacactggccgctaggtaccttcatgaaagtgggtggcgaggtttggctcactgaatgcggcatcagcaacttcacccgcgccatcgcctatggcccttacgcccaaatggtgatcaacggctgcaatcgcctttcaggagatattcatccttacgctcccaacgccaccggtaatgcgcgcctaaaactcgataacagcatctgtaatggcgtctatatttcagacagcattcagggtgactatcaaatcagcaattgcgtgctgcaatacctcagaacggccatcatttcaggctcgacattggttaccaactgccgaatcaacggcgatctgaacgttgccgctgcggcacatgcgccgctaggctctgcgggaggactcaaaataagcaacagtcaggttatgggcagcattatcgccgcagcaacggcgcaaaggatcagcgttgccggctgccatatttttggcgatctgatattacccggcgccaactgcagtgctgtacataacgtagtgctcggtacagaatccatcgcggtaacgggcaataacatcagcatcggcaagacgtccccagccgtcatttatgtcgacaacagctataacgaaatcacaggagctgttcaaaggggaacgttaattctcaaacgttcttcgttagcagcgcaatctccaggctggatctgcaccttcggcggcgcagcaggcgcaggtctaaaagtggctccactagcagcattaggcgccgaagaatga

SEQ ID NO: 449097 - DNA, 189 bp, Serratia marcescens
atgcaggacgtggcgctgttcagaagcggtgaggtttcacatgccgcgacctacggttttcatttcccgcgcgtgttacacgacttgcaagagatcgcctggcaaacgttgaatctggcgctctgtcgtattgccgaccccgagatcaagccgggcaaggtggtggtgcggggagaactcgtcgcgtaa

SEQ ID NO: 449098 - DNA, 264 bp, Serratia marcescens
atgcccagagagatctggttattacagccaacgaaaaagtccggggcgcggttattggccagccgacggctcgtctcttaccaggcaacatccatacagaaactgttgttcggcagcgattttccgtaccagccgggcgaactgtttcaaaccacggtcgacgacatccggcgagcgggtttgccggaggaagacgtgaacgccattttggttcgcaatgcggctgcgctgtttgggctgcaggatgtgaagcggcccacatag

SEQ ID NO: 449099 - DNA, 1701 bp, Serratia marcescens
atgcatttagtcacaaaatcttacttcgacacattttgcagagcattcgctgctccttatcacgagacaaaaaattttgaagcatttgtaaactattgtgccttttcaaaatactcaggagacaaagttgaggccagtgatcttgtgtatgaaggcccggatcctggtatagatggagcgtttttatttttagacgacagggctattttttcaactgaagaacttcaggagattctcaataattcacgtcgagagtttcaagtttcattaatattcactcaagccaagtcatcggaaaagtggagtaagcaggaaatagattcttacatatcttcaataagagattatctttcgccagagccacaacaaccccatagcgaatatctagcagacttcaaaaagatgttcaatttgatatttgccaatattggcagagttaaaaatggtctcccagacttatacgcatatttttttagcgcggcacaaaacacagaagccagagaaataaaggctgcatttgtatcaggtgagaaaagcttaaaggcactcggattttcacatgaaacatcattcattatggctcataaagacatgattcatgagctttggcttgctgcggaaggtccaatagaagcaaaacttcctacaataggctatgctccatttccaacggcccctaatattaataacgcctatgtagctactgttaaggctcgtagctttattgattctatacttaaagacaagaatgggaatcctcgaaagaaacttttcgaagaaaatgttagagatttccttggaattgatggcgacgtgaattcagaaattgcaggaacacttgatactgatgggaaaaaggcaagatttggtttaatgaataatggagtaacaatagttgcgtcaagtgtaaggcctgcaggacaagaaatctttatccgggactttcaaattgttaacggatgtcaaacttctaatgttcttatatcaaaagataaccaagtggatgaatcagttagtttgatgattaaattaattgaaaccgatgaggctgccatccttgatgacattgtacgagctactaataggcaatctaaagttgaagatgcacagttcatttcaacgctaaaaaaattaagagagctagagcattacttcaatgcgaaaggtgctattgaaggtaacaagatttactttgagagaaggaaaggacagtatagctctgaaggtatagctccagtacgcatatttgatgtcagagaagtagcacgggcatatgcggcagttgttatgatgagaccagattattctagccgttaccctaatagattaacgggagacttactaaatgaggttttctcttctggtgctcgtgaagatgattactatatatcttgctattgcttgtataggttaaaggcgcttatttcaaacaaaagatttgatgggaaatattcaaagttacgctggcatattctaactgccgcatcaaaatactgcggtgataattataagggttgggggttaaataataaaaatgacgctcttcatagtttattcttaatgaatgacggagagtggtttgaaaagcttgaaagtttagtaaaaacagccatttcagacccggatatctctcgcgatctacttaaatcacagcctttaacatcaacaatcctcaaaattgttgatagcgtacctaaataa

SEQ ID NO: 449100 - DNA, 246 bp, Serratia marcescens; identical to SEQ ID NO: 435836

SEQ ID NO: 449101 - DNA, 270 bp, Serratia marcescens
atggctgacactcagtctacccaaactcgcactaaatttacattcctattcctggccacacctgaccacacaccggaatgcacacctgttgtgctgcgctttgatgctgacactgaggcggccgctcgagcagcgttccctggctgggagctggtgtttgcagcgaaaatccgcactcaagctccttgccgagtcgcattcttcgattacgccacccgtaagggctgggagttcgacagtgcaatggttcaggaggtgcgtaatgtttaa

SEQ ID NO: 449102 - DNA, 1356 bp, Serratia marcescens
atgcgtatcactgcacctgtgaagtcatttgataacggatttacgagagatgacgatatttttgagcgaaaaatattgcatgataaaataattagagttgcaattaatgcacctgataaaagtttggtgttagccttagatgacaaatggggtaatgggaaaacatcttttgtgaaaatgatgtcttctgaaattaaaaaaaaccacagcaatgaattagatgttatctattttgatgcttttgaaagtgattatcagtctgatccatttgtagcgctgtcgtcaaaaatttattcactactaaaaaatgatgatgggaaaatgaaagccttaggtaataagttcctatcgttaagtaagaaattaggtgcctcatttgcaatgaatggtgctaagtttgcagtaagtactttaactggcggcctggtaactggtacatctttagaaaaagctagcgatgctatagctgaatccttatcctctccaatagagaagtttatagaagaaaagataaaatctggagaagaagaagttgcaacaattgaacactttagaggaatcctttcggatatacatcgagaaagtggccgtaaggttgtttttattgtcgatgaacttgatcgtgcaagaccagatttttctctagatttattggagaaaataaaacatattttttctgttgaggggttcattttccttcttgttatcaatcgtcagcagtttgaaaagagtattgagtgcagatatggaaatattaattcaagattatatttaaataagtttatacactactggtttacactccccaaaataaaccatatctcagatgactcgcttgctggttataatacttcgacaatattaaggtatctgttatcactggattttggcaataaactgctatcccgaggtgctaacgtaattaaatctatatcttacttgcttgaagctaataaatgttctttgcgtgagactgagcgatgttattcggttttttgtatcatggataggcctgataagataactggtttttcaagtgaggtttttaaagttgcaattggaattattgccttcctaaaggttcataatcaggagttgcttagtgatattgtaaacaaaaggatagggcttgatacttctttggaaaagttaaatgttaacaaggagcatatagggaaagctacggagttgtatttgatttttcatgctcttgagtatcactttatcacagatgaggctctggtagataggcggcgggaaaaacactttagtgatatagaaagtttttatgggcagagggttagaatatttgaagacttaattgaaactgtagaaggtttctctatatcatactag

SEQ ID NO: 449103 - DNA, 2592 bp, Serratia marcescens
gtgacgaataactcacgcggacgacgccagccatccccgcagctaccctatccgggcagcggcgcggttgaccctaatttttccttctcctggaacgcaccgcgtccagccgtgaacccttatctggatgaaccttctcagtcctccctaaatccgcaatcgctagccgctatcatctcgctatacgctaacgagaaccgccgcctggtcgaacacaaagaggctttggcagaagctgcctggcaaaagtttttcaataccgaaggtcgtgatccggaacttcgcgaattcaaacaggacaaacgcctgagccaaaccaaacttgccaaggaaatgcagcgccatgatcgggcgctggctgccctggcagacctgaacgcgcaacctaaatttatccgccaaccgctgcaacagcgagtcgactatctgcgccgggaacacggcgacgatcgggccaatgcgtttttacacgatatcgtcaaaaacgaattggcacgattggaggcagtacgtaatcgccagcaaagtatcggttttcgctacatggcaggccgcaacggcctggacgccctgctaaatttaccagagttgtatcaggacgatgtaaaagggctggccgtcaaggtcgctgcccatatggatatgcgctttatcgaactgtacgacaacatgattagcgaagaagagaacgtgttgccggacgacctcctgcatctttaccgcttggtcgctaacgaagccgccaggctatcgatacaaccaccgagctaccacgcattactacatgagggcccgcgccgcgcggaaataccctatcaccttattcccagcgcattggcccgactgcgttgtgctgactggtggtatcgcaaattatggcggctgcgctgcgaatggcgcgaagcccagctccgctctgtctgcctggtaagcaaacacgcatccgtttacatcagccacgacgccttgctgcataagcgcgaacagcgccgcaaagccatggagtttttcaaggcgcacgaactggtcaacgacgacggcgtcaccctgtcgatggaagacgtgatagccgccagcaacagcaacccgaaacaccgccgtaacgaaatgatggcctgtgccaaaggattagaactgttggcagaaatgcgcggcgactgcgctgttttctatacgatcacctgcccgtcgaaatatcacgcgacgctgtcgagcggaaagcctaacccgaagtggaaccacaccaccccacgggaaaccagcgactacctggtgaatctgttcgccggtatccgcaaggctatgcaccgcaaggggctgcgctggtacggcgtgcgcgtcgctgaaccgcaccacgacggaacagttcactggcatcttctgtgctttatgcgcaagaaagaccgcaaggcgatcaccaccttgatgcgcaatttcgccattcgtgaagaccgcgccgagctggggccaggcctgggcaagaacatcaagccgcgttttgacgcagagctgatcaccaagcgaaaaggcactccgacgtcctatctggcgaaatacatcagtaagaacgtggacggccgcgggctgaaagacaccatcagcaaagagaccggaaaatcgctgaaagacacggtggaaaacgtcaccgcctgggcatcgctgcaccgcgtgcaacagtttcgcttctttggcattccatcacgccaggcttaccgtgaattgcgtttgctggccggacagctcaaccggaagcaagatccacaacaacccagaaaacccggtagtcaactgctggccgataaacaaatggacgcagtgttggccgctgcagacgtcggctgcttcgctacctacataaacaaacagggcggcgtattggttccacgcaaataccatgttgtccgtaccgcttacaccctggcagacaagcccaatacctacggcgatcacggtacgcaaatctatggtatctggtcgccgcgcctaggcgatgactcccgcatctgcacccataccagcgactggcaaatggtgcgcaagacggccagcgccctcccgaacacagcgagcggcgccaccggtggcgaacatgtcgggtttgactttgaccttcagggcggcccctccgccccttggactcgtggcaataactgtcccattgagcaaaatacgagcaacctgaaggcaggaattgcaacacatggagagcctaaaggtatcaattttgaacagttgggatacaaggaacggcgcgagttactgaagcgcttacaagactccgctcataaaacacttgctggtcgacaccagaaccggccaccaacttctggggagcgcgcaatatcttccctgcagggtgcattgatcgaaaaactggatgattacgcctttactctaggaatagatatcagccggacagcacttaggcggttggttatggggcaaactatcaatattgatggtgagtgctaccgcgcaggtcatgatggtgtcatgtatatggtgaaagatataaggaaaatagcaaccgacgaccttgtggctagatttaagaatgcgatccaacaattaagtaataaaaatcatcaataa

SEQ ID NO: 449104 - DNA, 642 bp, Serratia marcescens
atgaaaattgagttaatcggctcattgtttatctatatggcctgcatcgtttataaaagaagcaagtggcaatcattgtctctgttcctgctggcgtcattggctatcgtaccttttagtatccccattgcgttagggatgatctgtttcttctttggatttgtttactcggcctttaatattacctataagaataattacgttggccttgtgctccttatcattggattgtattttgccggcgttcacaatgatagcgcaagctatacatgggtaaccaaactcctcggctatcgttcgtatatgttcctcaatttcctctccggcatatttattgtctacggcgtgttaaccagccattccctcagtcggatgttggaaaataaagggttggtttatttgggcaagctctcgttcccagtttatatcatccacattcccgtgatcattttgacgatctacttgacccaaggttttgcgacggcgtccgtcgccagtatgctgagcgtttcggctatcgcgatcgccgccactttgctgctcgcgaggtttgtcgtaccggtcgatgatttttccatcagcttctcgaagcgcgtgtataacaaaatcaccgggctacggatgatcaggagaacggagtaa

SEQ ID NO: 449105 - DNA, 1287 bp, Serratia marcescens
  misc_feature (1203)..(1212): n is a, c, g, or t
atgttccagatgattggtggaataacggatttttaccgttcatggcgaggtgtccgcattggtgtagaattacgtgttatcttgcaaaactggacgttaagcgttctcctgaccttaggtgtgttatctgtaattagtatatctgataatgatgtggctctgtatgcccgatggtttgttattgttggtatagggtttataatctcacggttaattattcgtttggcaattggttatcttcgaaatcttggttttaatacccgaaatgtggctatcatgggcgcagtccctgttggcatcaggttggcagaaacgctgcgagatgcacattggatggggttccgtgtattggggatctacgatgataatgccatgcctgacggttccagcatcaataaatgtggcgatctgaagaaaatgatcgctgatgcaaaggaagggaaaattgatcgagtatatatcgctttacccatgtcacaggagaaacttattaaggatgttgtgactgagttgtctgactccacgtgctccgtaatgctcatcccggatattttcacctttaacctcttgcattctcgcagtgaagaaataaatggtgttccagtcgtttctctttttgatacgccaatgagtggggttaacaaggtcattaaacgtttagaagatattattctctctattcttattttggcttttatctcccccgtattaatcttgatctccctttttgtgaaattgagttcaccaggacccgttatttttaagcagaagcggtacggtattgacgggaagggcattgcagtatggaagtttcgctctatggttgtaatggagaacgacgataaagtcgttcaggcgaagaaaggcgatgcgcgcgttacaaccttaggcggttttttacgacgtacctctcttgatgagttgccccaatttatcaacgtgttgaagggggatatgtcaattgttggtccaaggcctcatgcggttgtccataatgagcagtatcgaaagatgattagcggctacatgctgcggcacaaaatgaagccggggattactggctgggctcagataaacggctggcgtggagaaaccgatacgttggaaaaaatggaaaaacgtgttgagtttgatttagagtatatccataactggactctttggttagatataaagataattttccttacaatcttcaaaggnnnnnnnnnncctattaataaaatggccgcattagcggccttatttatatctgatttgcaatttttgtgtttggatagtttttaa

SEQ ID NO: 449106 - DNA, 1011 bp, Serratia marcescens
atgcgttggttcaataatgcaagggttattgccatacttgctgttgttttattgcatgtatcatcgcgtgtcgtaatgtggagtgagcttggttcaaacgattggtggtatgctaatctctacgattccctggttcgctggtgtgtcccggtctttgtgatgatttcaggtgctcttttgctttcaccagagaaagcagagcctttaggtctcttctataaaaaacgcgcatcccgaatactttttcctctcgtgttttggtcacttttctacatgctttgggattttttaagaaattttttaaaaggtgaatctaaatctattcaggagattttttttgctttgttatcgggaaaaccctattttcatatgtggttcctctttatgattttgggtctctattttgtaacgccttttatcagacagatcgtggcggcatctggtcggaaagagctatggttgctaagttttgcattactggcaatgtcctgtctaaattcgtatttcagcaatccacatgatatggttaatagctctattttcattgtatggtttataccttacgttccctactttatcctcggctatctcttgaaagatcagatgctattctcttcttttgtctggttatttttattcattgtgtcggttgccgtaacagctttatggtattactactgcgccatcaacgtaggtaatgtgccagggctatacccctacacttatctatcgatcactgtgattattatgtcgatttctactttccaactgttaaagaaaattaatataccacttctcagtgacagccagcttaaaacggtggctaacctgactcttggcgtttacttgattcacccgattctcttggatatctcaaacgcattgggtctgaaaccggtatcctacttaccgttgatcactattcctctagcgacaatcgttgttttcttcctctctttaggatgcgcttttgtctgcagtaagctccccctcttgaagcgaactatctga

SEQ ID NO: 449107 - DNA, 636 bp, Serratia marcescens
atggaactaggttcattaacagattggctattagtttttgcgaacttcattatggcattatctgctggttatgctgcttacaaagcgaaagactggttgaaagcacaaacgaaaactaaaggactagaggctgccattgaaaaattttctaaactcgatgaacagtatagtgatgcaatggatagtaaaaaacgtatagctaatttttcatctagaatagaacaattaaatgagtttcatggtaaagtagttgaattctatattgaccaaacaaaaactgaatatgctgaaattaaaaaggcaagaaccttagctattagattaaaacgagaaatattttctattgaaaggctcggtatcgagattattgaaagagaacaacttgaaaatatatgcaactgtttgattagatctcatactgtctcagcgattttcatccttacagcacagcaattcttaaagtccaagcatccagatgataagtacttgaagtataaaattcaattcgaagatatagattcattttcaaagaacacgttggctgatatctacactcttaaagacgaagcctcaataaaactagattcatattacgatgagcttatgatggtaaaagtacacgaatttttcagatag

SEQ ID NO: 449108 - DNA, 765 bp, Serratia marcescens
atgcatggcatccaaaaaatgccaaccttaaaaagaaacgttttcaaatggttaatgagactcgcttatctgcgagcgaataaagtcatttccaactcgtatgatacggaaagcgatctggttaataataagatcatcagcaagaacagcaaaaaaagtgttgtcataggtaatcccgtattaccggataatgtttcggcactggcgagtgagtcaatcgatcacgaatggttcaatgatgcgaatttaaaagtcgtattgagcgtggggcgactgcatgagttgaaaaactttcccatgttgatcaaggcattttctatccttcaaaaggagcagagcaatacacgtttggtgatactcggtgcgggtgaagactctgctaaagagaaattgatgacattggccgattctttacaaatatcttcgttcgtacaaattcttgggtttgaaaaaaatccctatcctttctatcagaaagccagcgtattcgctttgtgttcagagtgggaaggattcggcaatgtgctggttgaggccttgagctgtggtacgccggtcgtcagcactaattgccctggtggcccaaaggagatcctggaaaatggcaaatttggccgtctggtaacgccgggtgatgtcaccatgctggctaaagaattggattatgttctgagcgagaatgtgtattcagaacaagcgctaaagtccagggcggcggattttgaaattggaaagatagcggaacagtatataaggcaaatttga

SEQ ID NO: 449109 - DNA, 903 bp, Serratia marcescens
atgtataaacgaatgaaagcagtaattccggtagctggtttgggaactcgaatgcttccagcgactaaggccattccaaaagaaatgttgcctgttgtcgataaaccgttgattcaatacattgttaatgaatgcgtactggcgggcatcaaagatatcattttggtcactcattcttcaaagaatgcgatagagaaccatttcgatacctcatttgaactggaagccgtgcttgaagcgcgtgtgaagcgtcagctactcgctgaagttaagggcatttgcccaccagatgtcactattatgcaagtgcggcaggggcaggcaaaagggttgggtcatgctgtcctttgtgcagaaccgatggtgggcgatgaaccgtttgtcgtgatcttgcctgacgttttgctcgacgaagaatctgcggatctcaccgccgataatttggcatcgatgcaacgccggtttgctgaaacgggatgtagccaaattatggtcgaacctgtgccagaacaagatgtttcaaagtatggcgtcgttgattgtggcggtgtcatcatcgaggccggtgaaagcgcgcgaatgaatgcgatagtagaaaaaccgtcgcgtgaagaggcaccgtctaatttagcagtcgtaggacgctacgtgctttcctcttccatttgggatcttttgcgaaaaacgccggcaggtgcgggcggtgaaattcagctcacagatgcgattgcaatgctaatggaaaaagaaaatgttgaagctttccatatgagcgggaagtcgcatgactgcggtgataagttaggttatatgaaagccttcgttaaatatgctgtccgccacccatctgaggggaaagcatttaaagaattattgaataaaatgctcaagcaaggcgagtaa

SEQ ID NO: 449110 - DNA, 903 bp, Serratia marcescens
atgagcaagttgaaggcgattatcccggtggcaggactgggtatgcgaatgttaccggcgaccaaagccatccctaaagaaatgctgcccattgtcgataaacctgtcattcaattcattgttaatgaatgtgcccaggcaggtattgaagaaattatcctcgttacccactcatcaaagaatgcgatagagaatcattttgatacctcgttcgagcttgaagcaatgctcgaatctcgagtaaaacgccagctattggatgaagttcagtccatctgcccgaaaggcgtcaagttgatgcatgttcgtcaaggtcagcccaaggggctgggacatgcggtactctgcgctaaaccgattgtcggcaactcgccgtttgttgtgttgttgccagatgtgattatcgatgactcgttggccgatccacgccaggataacctcgcaaaaatgataaccagatttaatgactccggggtcagccaggtattgatcaagcaaggtgatgctgaaatgttgcataattattctgcagtagaatgcgataggcagtgcctgaaacccggtgaaagtgcggccatcctgtccctgatcgaaaaaccggaaaaagaagctatctcgcaggccaattatgccgccgtcggtcgatacgtgctctcttccgccatctggcctattcttgagaaaacggaacctggcgcctgggggcggatacagctgacggatgcaattgccaagctgcttgatgaacattctgtcgaagccctttgcttaaagggtgagtcttacaactgcggtgagaaaatcggctatatgcaggcctttttaacttatgctatgcgacaccccaatcagggagaagagttcagccattggctgaaacaatggtcttctggcgctgggtga

SEQ ID NO: 449111 - DNA, 1089 bp, Serratia marcescens
atgctcagcggctgtaccattattccgggtacacatctttccacttcaggaaaaaatgttgtaaaacaagatgatgctgattacaaaatcgatgacctggtcaatatctacccactaacccccaaactaatcgagaaaatgcggccgattcccgtcgtcgctcaacctaactcctctctcgataacgctctacgcagttacgaatacaaaattggtgttggcgatgtcctcaacgtaacagtttgggatcacccagagctcacaacgcctgccggccaatatcgcagtgccagcgatacagggaactgggtgcattcagacggcacgattttctatccttatataggtaaagtcagggttgtcggcaaaacagtgacgcaaatccgcactgaaatatctaaccgcctggcgcaatatatcgagagcccgcaagtggatgtcagcatcgctgccttccgttcgcaaaaagcctacgtgaccggcgaggtcgctaaatcaggccagcagcctatcactaacgtgccactaacgattctcgacgcgatcaataatgcagaaggcctgaccgagaatgccgactggcgtaacgttattctcacccacaatggcaaagaagaacgaatctctctgcaacagctcatgcagaatggcgatctaatgcaaaaccggttgctatatccgggcgatattctctacatcccgcgcaacgatgatcttaaggtcttcgtgatgggtgaagtgaaaaatcaatcgacgctgaagatggatcgcagcggtatgaccttgaccgaagccttaggcaacggcaacggcttggagcaaaatatcgctgacgccaccggcatctttgtcatccgccctcttcgcggaacgcaagggaaaaagctggcggatatctatcagttgaacctgtctgatgcaaccgcctttgtgatgggcgccgaattccgtctacagccttatgacgtggtctatgtgacagccgcacctatcgcaagatggaaccgtctgattggccagctctacccaaccatagaaagcttcaacaacctgagcgaaggttcgttgcgtattcgtaactggccgtag

SEQ ID NO: 449112 - DNA, 2166 bp, Serratia marcescens
atgacagacaatattcgtagccgaagcacagataatagaagtgaagagatcgacctcggtcgtttgttcggtacattgatagataatcgctggcttattattgcaatcacggcattattttctgtagccagtattatttatgtactattttcaacaccggtctaccaggccgatgcattggttcaggtggaacagaatgctggcaattccattctgaacaacttgtctgaaatgcttcctaacagtcagccgatgtccagcactgaaatcgagttgatcaaatctcgactggtaacaggcaaaacggttgacgatctcgatctggaaacggtgatagaacaaaaatattttccggtctttggccgaggctgggctcgactgacaaatgaagaacctgcgcagatcgccttgtctcgtttcactgtaccagaatatatgctggataagcctctggaacttaccgttgtcaacgacaaagaatatgtgctggatttcgatggcaccgaggttctaaaaggccagatcgggcagtttgcgcaagcccatggcgtcacactgctggtcagttcctatctcggtaaacctggcaccgtattcactgtaacgcgggtaccacagctttccgccatcaacgctctgctgaaatcactggttgttgaagataaaggcaaggataccggcgtgttggccctcagctttacaggggaaaatgcgtcttcggtaagaaaaattctcgacagcatcaccaagaattacttgctgcaaaacgtcgagcgtaagtctgaggaagcgggtaaaagcctgcagttcctcgaaaaacagcttcccgatgttcgcagttcactcgatgcggcagaaagtaagctcaaccaattccgccaagccaacgactctgttgacttgtctttggaagccaagtcggttctcgatactatcgtttccgttgaatcccagctgaatgagttgaccttcaaagaagcggagatttccaagctctatacgaaggaacaccctgcctatcgtgcactaatggaaaaacgcaagacactgcaaaacgagaaagagaaactgaacaaacgcgtttcaggcatgcctaaaacgcagcaagagattctgaaattaacccgcgatgttcaggctggacaagagatctacatgcagctgctgaacaaacagcaggagctcggcatcaccaaagcgagcactgtgggcaacgtccgcattgttgactcggcagtgacccaattacgccctgtcgcgcctaagaaaacgctgattgtcttgttggtgacgatcgtcggttttattatctcttcagcactcgttctcttgaaaaatatgctgcatcgcggggtagaaaactcagaagagctggaagagcgcgggatcaacgtgtatgccagtattcctctctctgagtggcaacagaagtcagaccgtgaaacattactacggggcggcaaaaagaagaacacgcgttcagattctctgttggcaataggcaaccctgcagatctggccattgaagcgattcgtagcctgcgaaccagccttcacttcgccatgctcgagtcaaaaaacaatatcttaatgatttccggtgctagccctaatattggtaaaacatttgtcagcataaacctggcagccgttattgctcaatcaggacagcgtatactggtgatcgacgccgacatgcgtaaaggctactcacacgccctgcttaacgtcaattggaataatggtctctctgatatcctgtctgggcagacaaccgttgaaaaagccgtgcgaaaaaccagtgttgataatatggactttattccacgtggccagatcccgccaaacccatcagaattgttgatgaacgatcgttgcagtgcgttattaaaatgggctagtgaacattatgatatcgtgctgatcgatacgcctccagtgctcgccgtaaccgactcttcgattatcgggcgcatggcgggtactgtcctgatggtagcgcgctttggcgtcaataccgctaaagaaattgaagtcagtatcaaccgtttccaacagaatggaatcgatactcgcggcgtcattctcaatgccatcgaaaagcgcgccagcagctattacggcggctacggatactataactacagttacaaaaacaatagctga

SEQ ID NO: 449113 - DNA, 1164 bp, Serratia marcescens
atgaaaagatatactgttttggatagttttaggggaatatgcgcgctttgtgtggctctacatcatctgaatgtcacgggcagcattactgaatgggctatattcagaaattccacctatatagttgaattcttctttatccttagcggttttgtattaactcacagttattttaaccgagatttcaacaaagtcactctgactaaattcgtcatcagccgcagttttagacttttcccgctgcacataattatgctactcatattccttcttttcgagttcgggaaactagcagctcaaaactatgggttttactttaataagccggcatttacggaacttagtgcgccaacagaactcattcctaatctgttgctgctgcagtcctggattccttctgccgaaagtctctcctttaattacccgtcgtggagtatcagtgtagagtattacctttatcttgtttttggtgggttcatcttcttcagcaatgacagaaaaattatcgcaatcgcgctattcgcactgctgtcaatatggggtttttactctttgctgagtcataacctgttgcttaaagatgatgcattccgcggtatttcttgtttcttctttggctcgctcatttattttattcattcaaaaatagccaacataaatatcaacaaatatgttgcatctctattggaaatggccatcatccttgcctgtttcttctgtatgactttacctgtcgaaaacaaaggtgttaccgtcagtgtactgtatggtctggctattattattttctctggtgaatttggcattttctcgtcattattaaagtcgacgttcttccaaaatttggggaagcactcattttccatttacatgactcatgcagcgatcatttccctgatggtcagtagcgcgataatattatcaaaactattgggtgttgaactaagctactctcatgcaagcccgtacggaaacccaataagatatataaccttaggcaatactacgattaacaatatccttgttctttgttctctcgccattattctattcgtatcgaaactgtcttacgatagcatcgaaaaaagattcatacgatatggaaagaaataccaaacaaatcgcacagtgcaaaatgaaactaaccagcagtccactcagtaa

SEQ ID NO: 449114 - DNA, 1194 bp, Serratia marcescens
atggccttaatgttggccgttgccatttgctactccggcggcaaaattagcgtcaaatcaatcataccaacaataatacttctagctattctcatctttgcgattctcactattgcgacaaattttaacagtaaaaattttattgttttttatcagttgaagtttgatgtactgccaatgctttttttaatcgcagtattgatcattttatctaaacaatccctacaggatcttgaagcgctttgcataagcgttgccaagatgatgtttttcctgggcgggctcaatgccattgcgattatccttcaacaacttttcccagattcttttatggggttgctgggtttgaatgcaagtgaatggggcagtgacagcggagttcgtttaaactcgactgaaggcaatatccgggccatcggattccagctttctttcaccatgtcaggcgtgcttatgtttttctgcctggtcgtgtcattcgaagcacggaagttattcgcaggtaagcgttggccattgttcttctcgccgctatttatggttgctatcatctgcacaacatataaaacagccattttagctgcattggtatatttgctgactaaagtgattgagtttctattcagaaaaatgtcgggcattatcgtgttcttcatgggtctcgttatattctcgatgttctgttactcaacgcatagctatgatgtctatgaaattgtcagaaaatacaatgagtatgcggcatacaactcaatttacctgcgcgtctgggaacatttaaagatcctctcagatctggactcaacaggaaaaattcttttcggtgcaggcttggggctgaatggtaccttcggtctggataaatcattatatggggtacaagccatccctctcgatagcgcctatatctatatggtcagtaactatggatttgttggcttcttcacttatcttgctctgatggtctacttgcaattcaaattgtacaagatcaagcgttttgacattttcggcgccaggtattttgtgttctttacgctgactattgagctgttctataaccttggacttggtaacttcccgaacaacatcctgttaatactgttcgtcgccattccatttgtacttcatagaaagtctttggacgagcaacgtacccataattccgcagatacggaacatctatcctattga

SEQ ID NO: 449115 - DNA, 873 bp, Serratia marcescens
atgcttcatttcgatcataactggcgttttgaccctcccgggaccgtagaaaaaagtattgtaaatgatttagtcaaaaacgtaatacatcgcattgcttctgactgcagtaaaaaatatattatggaaacgttcaaacgccggtttgcgcaagttgttggagacactgccggagagagctcctcagaaagttgggctgaaactgatcttcactcttatatgatggatgctggaaaacaaaatgccgccttattctgtgaggcactttatgatgggcttatggacatcagttccatttcggttaataacgtgatccccccttgggattacgtcaataaatttctctctccttgtggattcagcatttcgccacctaatctagttttagctgagaattataaaccgataccagtaccttcgagtattcctacgttaacggtgcgcgccaacgaaatgatacaaaaatctttaagcgactctgaaacgcatctcgtcgctggtagaaaccgtgcagccgttcaggaaatactttggctgttagagactatttctacagtttttagaggattagacattgatgagaaaaatattacggggaaatatttctctaaaattataggtgacttgagacgaatgcataataactcgactctggataaggtcttccagtggctcgaaaacatttatggctatctgtctgccccagacggcggaggtgtccgccacggagcagctctgaatcagcatatagaaatgacatctggtgaagcgagactgttttgcgatctttcaagaagctatataaattatcttttacatgaacatgccagattgagtggtgcaaaccttgatggtaaaagttgtgatatgtaa

SEQ ID NO: 449116 - DNA, 1344 bp, Serratia marcescens
atgtttaatctcattatgggcggggaacctgatatatttgatagatggccatgtatggatcctagcattaaggatgggaaagatagtttctctctttctcgaatgctggaaggtacaccatcctcactttataaagcattaattcctatacgtcccaaaactttacttgccctctctcgattgcctgttattttcatgactgagatatatttcaagaatgaacacaacgatgacaacaatagatacttgagagtaagactaggagagattagcaatttacataaaaacaaagaggatattaattatgcttttaaaatcacgcatgactttggggagattaaaaatcctaaaactgaaaaatataaggagacattagacttaggtacttttggtcttagtagaactcactgggctgtgaaggataaagatttaaatgaagttttactgaaccttagcttggaaaacgtagatagtaaaaaaaacaagaacattcgacttaaaaataaaaacaatgaaattactaaaattaatgatttgaaaggatatcttgattttattaagaaatctaacaataaaaatcaggaggcattttatcgtggacactccagaagtgaatacgaactggttccatctcttttcagaaaacatgataacgggactcataaacatttggattcggagtcatttatggttcgtgaaattctgacagcgaggcctaatgaatttaaatctgatagcttcacaattgataaactagtcaggatgcagcactatggtttaccaacaaggttacttgatatcacatctaacccgcttatagctttatatttttcatgttgtgagaatctagatgatagcgggcaggttatttcattttcgacagagaggaagaatataaaatactttgattctgatactgttagctgtatagcaaatttggcatttatgcctcatgaaatgttaatgactctatcaagcagtctagaaaaaaatgatgactctcatgcagctacacttttaagcaaacttgtagatcacattcaagctgaaaaatcatatttcaaaaaaaatataaaactggaagaccttaggaaaatactatttatgcgaggtaggataaataacgagcgtattcagtcacagtcaggtgcattcctgttatttggacacgatgctgttcttcctgaaacaactgaggactttcctcttgatagagttgaggtaattaataagaggaatattcttaaagagctggctcaattaaatattacagagagcacagtttatcctagtatggaaaagacggcttctgagattgcaaggaaatacatttcggaatgctaa

SEQ ID NO: 449117 - DNA, 330 bp, Serratia marcescens
atgggggacaggtttaacctctatcaagtaaaaagtaagatcgtaggtggtaaagtctgcgtcttttttaatgagagggatatcgtaaaaaacgaatccatactgagtatcgccatctggagacagggagggaatgactatgtttatgaaaagtcatatgcctacaatccggtaacgttggaggccaacaagtgtgttccaggtatcggtgaatttagttttattgctggtgaaggatacaccgtgttggtaagaacaccgctgaattcatatcggactagctttatcgttcagaaaataggaggtgtggtgatgttgaaaattaattag

SEQ ID NO: 449118 - DNA, 1077 bp, Serratia marcescens
gtgtatcgcctgctacgctacggcgtaaaggataaagaaggtgcaggtgagcagaatcaaaccgtgtggttggtagattggaaaaatccagaagccaatgattttgctatagctgaagaagtaacctacaacggcgaaaataaaaagcgcccggatttggtgctgtatgttaactatggtgtaattgaaacgccggagaaatattaccttcaatggaaagaagccgctgaatccccccacgccaacatgcttgatcgtcacctggctcagatatgtaataaacagcgcctgctggaattgatccacgactttatcgttttcgatgctggagtgaaaaaaacctgccgtcataaccaatattttggcgtcactgcaacgaaaccgtttattcaacgcaatgaaggcgggattatctggcatacccagggcagtggtaaaagtctgactatggtttggctagcaaaatggatcagagaaaatattaccgacagccgagttttgatcattaccgaccgtacagaacttgatgaacagatcgagaaagtgtttaacggtgtggaagaagaaatccttcgcaccagaagcggcgcagatctggtgactcgcctgaatcaaaccaagccctggcttatatgctcgttagtgcataagtttggtcgtcaggaggaggaagacagagatgctgacacggacgattttatcgaacaaatgaaacgaaatatccctgccgattttagcccgaagggaaaattattcgtgtttgtggatgagtgccaccgaacccaatccggcaaattgcattcggcgatgacaagcattctgccagatgcacaatttatcggtttcaccggcaccccactgatgaagaaagataagaagaagtcagtggaggtctttgggccttatatccacacgtataaatttgatgaagcggtcaatgatggggttgttctggacctgcgctacgaagctcgtgacatcgatcaacgggtcaaatctcagaaaaaagtcgaccagtggtttgatgctatgagatgtttagtgaagctggttttgccggtaaatgtgcgattgtga

SEQ ID NO: 449119 - DNA, 381 bp, Serratia marcescens
atgcgccatacgccgggagaaatgttcgccaacggcatcctggccggctggatcatcgccaccatggtatggatgttcccggccgccggcgcggcgaaaatctgggtgatcgtgttgatgacttacctggtggcgatttgcgatttgacgcatatcgtggtcggctcggtggagatcctgtatctggtgttcaacggcgcgatgggatggcaagcattcgtttatccgttcgccctgccgacgctggcgggcaacatcatcggcggcacctttatctttgcgctgataagccacgcacaaatccgcaacgatttgagcgccaaaaataaggcggcgcgcctgcaagaggaaaaacggcgccacggcggggaaaaaccgtga

SEQ ID NO: 449120 - DNA, 801 bp, Serratia marcescens
atgcttagtacattacccgatttacatagaagttttgcagagcaactcaagcttaaatttcaggctgactcgcggattcactcccttctcgctggcggctcgattatccatggcggatttgataaatactccgatttggattttgtcgttgtggtagaacctctctattatgacgaaatcatggcacagcgtatggtgttcgccggatcactgggccatctgctgcatgctttcacaggcgaacatgttggagagcctcgcctgcttatatgcctgtatggacctgaactcctccatgtcgacctgaaatttgtcacaatggaaatgctcactcaacgtgttgaggagccagcagtgttatttacccgtgataacactgctctggagagacaactggcaaaatttagcgctcactggcctaacatgacgccggagtggtttgagtcccgagcctggatctggcttcattatgcgggggctaaactgggaaggggggaactctttgaagcgattggcatgctgtcatttttccgggagcaagtgctgggacctatgctgagccgtcgtgcaaatctacctcaacgtggggttcggcgcattgaattccacggcattgatcctgatggcctgctgacatccacgctggcaacgcacgaccatgactctgtcagcattgccatcagaatggctgttgacgcctatatcaatctgcgagctgatgctctgcctgaaaatattgcagacgatgcggcacggcgggcgctccttgccatgctggaagggtattctgacagaggttaa

SEQ ID NO: 449121 - DNA, 171 bp, Serratia marcescens
atgctcctggcttttccctttctctcagactggattattggccacgttgagggcgaggatcagatgtcggctcacttcaagtggctggcgattggcctgatgttgtgctgtttcatgggcagtgcactcggtaatctggcctattcaaaatcaaataactccctcaaataa

SEQ ID NO: 449122 - DNA, 291 bp, Serratia marcescens
atggctcaacaaaacgtcaaaggcgcgacatcgaagcctacagcagcatccgcacagaccaacagtgctctgaccatcccgcaggtgtatgacctgttttgctatgtgaaggcggtgtgcggtcgttcgaccggcaccattgaacccccggttgtaccggcaggggcggaagaggtgttcgctgactttggggatttcgacaccatttcggtgtggatcgtcgggggctggccggtggctgccagcgatcagatgacgatgacccactggcgcatgaattcagggcaataa

SEQ ID NO: 449123 - DNA, 2058 bp, Serratia marcescens
atgtctatgactgagtctaaagcacccaccaagggcaagacaacccgtccggccaaatctacggccaagaaaaacgcgcttacggaaaaaatcgaggcggcgctggccaaggccatacgcaaaaccgccacgctcggccagctggtgctgaccgacctgaacgtgcgcaagaaaaagtcctcgcagacgtcgatcgaggggctggccgcttccatccgttcggccggtctgctgatgaatctggtcgtgttcgaaatggacgatggctgctacggcgttgccgccggtgagcgccgcacgctggcgctgcgctggttgatgtcacttgagaacgacgccgacaagaccaccccgggcggcatcgtgaccgacgattacccggttgaagtgctggtcgtcagcaaggcgatggcgcgtgtggtgtcgatgatggagaacagccagcgcgagcagatgcacccggccgatcaggtaacggcgttccgcgacctgtcggcagacgggcaaaccccggcacagatcggcgatctgctggggttcagcacgcgccacgttcagcgatgcctgcgtctggcaacgatggcgccggtactgctcaatgcgctggccgacgaccagatcaccctcgaccagctgcaggcgttgtcggccaccgaagatcatcaacgtcagtgtgacgtgtgggaaaacgcgcacggctgggcggctgcgccgcagcacctgcgcgaggcggtgctgaaaggcgaagtctcggccagagacaacaaccagctggcgttcgtcgggcgcgaggtctacgaggcggcgggcggcaccttcaaattcgacctgtttaccgacgagggctttttgaccgaaccggcgatgctggagcgccttgcccgtgaaaaattacacacgctggcgcagcaggtggccgagaacgagggctggagctgggcggaagggcgcatttcggccattaaaacgtggggggaggatgcggagatttaccgcgagctggccgaacctcagccggaatttaccgctgacgaacaggccgagatcgcccgtctgaaagcgcggtttagtgagctggaagcggcattcgaggcggcggatgccgataccgatacccacgcgctgaacgtcgaaagcgacgcggtacaggccgatattgagcggttaacggcacaggtgatcgtccgttcatggcctccggcgatgcgcagcagcggcggggtagtggcgtccctgcgtgacggggaggtggtttaccagcgtgggatcgtgctgcgggcgagtgaagcaacgaccgggaatggcgctgatgacaacggcgagggcacggcgacctccgaaacggcagcaccgaaaaccaaggagaaagggctgtcgtcggcgctgatcaccagcctgtcggcggagcgcacgctggcggtgatgggcgcgctggtcgagaacccgaccgtcgcgctggcgctgcacacccacacgctggccgtgaaggtgttcggttcgcgctacgccggatcgctgctccaaaccagcctgaccccaaaacgtggggagctgctgagcaaagccccgacggcggaaggcagccgcgccgatcgccagctgggcgagctgcacgcgcagtgggaggcgaaattgccgccggagtggaataccgatttctcatggttgctgacgtgggaacaggccgaggtcgtggcgctgctggcgtactgcgtcggcctgtcgctcgatgccgtgcaccagtggcctgccggtaatggcaaggttggtgatgccctgacgccgctcgagcacgcgctggatttcacgctgcgcgactggtggcaaccgaccaaggccaattacttcgggcgcatcagcaaggagctgatgagcgatgcactacttgatgccgggaaggtggcacaggcggcctcggtgctcaagatgaagaagggcgacgccgcgcagctggccgaggatgaactgaccgccagcggctgggtgccggagtgcctgctgccggtggccgatgacaccacctctttacaggacgctgacaacagcgccgccgcgtaa

SEQ ID NO: 449124 - DNA, 726 bp, Serratia marcescens
gtgatcccgaaccatcttgctctggtgccgtggcacccgtaccggcaggccgtctggcaagccatcgcacaggtcgaagcccgccgtgaagctggcaggcggttatccgcctacccgtatgccacggcgtttttccgccagttaaccgggcggctcacactttcagccagggatatccgcatgatagacgtggcctaccggcccggcgatcgtcgccgcgccacgcgcaaggaagactatattgacgcgctcgacacgctgattgccagccggggggagcactgttattccccgttgccgggcgacacccgtgacacgctgttcccggaagtgaaccgtcgccgccgtcagcgcttcgagcaccggctgacgatgaaacacacccgtcaggcgcgcatcgacgccacactccggcggcacaagcggcgacgctatcaggtgcggctggcgcaggcggaaatcgagctggcgttcatcacgccgggcgagcttgaccgctgggtgcgacgtgcgcagcagcagggagttgccgaggatgatttgagcgggctggtgatggcgtggacggcgcggtttccgtgccttgccgaattggatcgttatctttgggctgacatgccgttctgggaggcgcgtcttcaggtcagtctgatcagtgctgagttatccgctgaaacgcatatcgataacgcggcgcggctgccgaatcgcctggtaggccgctaa

SEQ ID NO: 449125 - DNA, 387 bp, Serratia marcescens
atgactgggcgaaaaatgacggggttatatgtctttttattgctggcctggtggggcgggtggcttgtactcgatatgtggcgcattgagcacctgttgaccgatgccgacaagtgggccgcttttcggcgtgacattctctggtgtgcggggtcggcggcgctttccgtgatttttgcgatggtaaccaccgagaaaaagctcgccgtttacacactgctgctctgcctggctatgccagtgggcatcttagtcgcatacgtcctcggtgatgcttttattcactggagatttgatatgcaactgttctctgatgcgatttgggtggttggggtagcgacgatggggatgttgccgtttgcggcatttttcactgcaaggatttaa

SEQ ID NO: 449126 - DNA, 315 bp, Serratia marcescens
atgcgtaaattcaaatttccccaggttgacgttgccggcatgtggatggtcgggctgggtttgtggtgcaacatgatagctggctgcgtctggtctttgccggattttgcctgggggctggcaaagctgttggccgtcagcctgatggttatcggcggctatcgtattctggatgcgatagcgacccgcgtggcggatgagcgcctggcccccgagaaggcggcctatcttgcgcagcatggtgaaggcgagcgagctgaggccacggatgcgagtgaaccggaacaggaggagcctcatgcgcctacgctctga

SEQ ID NO: 449127 - DNA, 534 bp, Serratia marcescens
atgactattacacacaaaacagtgaaagaagaaactgagattttgaaatcaattgtagacagcggtgatataagaatccccgatttttgggcctgtgcttggccaggattcgcttttgtactgtggttggctgtttggccggcgttcacttttggctttttcactacaccaagtgaaggtactttaatagcaatggggtttggggtattttttggatttattatcagtatcgctatttttaatgttcgcagcctttatttgtcgttgccagagacatttcgaaaaagttcgaagatagttgcaatgatcaacaataaaattgtgatatatctttctgtttttattgtaataaatgtgctggccggactggtgtcagaaaatagcaaggcgggtgctttgcaatacctttttcccacggttttttctttttgtatattggcttttatcttttctgccgacatcggccgctaccgtctatccgcctttacttcgatgctggaactccttaaatcccgtaagcagggaggggagtaa

SEQ ID NO: 449128 - DNA, 810 bp, Serratia marcescens
gtgacgctacgacgacttcagcaaattttacgggaagaaaaccgcgtcaccgttgccaaatcgttgtcggtggagaaaagcagcatcaaactggccacgctgatttctgcattgttttacgatctggtgcaggataaggcggtccagatcccgaaacaaggcgagcggcgtgagcgtgaattacaggaactggtgaaaaaagggaaaaggccggttgcgttatttgtagatgaagcccatgacctcaacggccatacgcttatcgggctgaagcgtctgatggaagtggtggaagacggcggtggcaggttatcagtgattctggctggtcatccgaaactgcgcaacgatctgcgcaggccaacaatggaggaaatcggttaccgcacagaaatttttacccttgacggcattgccggcagtcagcgggaatatattcagtggctgcttacggtctgttcagtacagggggagggtgacacgtccattctgacggaagaagccatcgaccttctggcgacaaaactacgcacgccattgcaggtacaacaacatattaccttggcccttgaagcgggctatcttaccggagaacgccccatcactgccgaacttgttgacagtatactgtcacgtaaacttgatgacctggagccaacactcacgcgtcatggctatcgtctgaaagatatggtcgagccgtttgatgccaaaccggcagaaatcagggcgctgttcaatcaccagttggacccgacgcgtatagccgaactgcgggatcgtattctggcagcgggtttacctatttaa

SEQ ID NO: 449129 - DNA, 714 bp, Serratia marcescens
atgatgaagattaatatttataacccaagcacacgtttattaaaaagctttatttttagcatggcactgtgtatgagtgtgccagcctttgctgacggcattacactgggcggcagccggattgtttacccggctgatgcttcgcatgcaacgatttctctgaaaaataattctgaaacagccacctacctgattcagtcctggatagccacgccggacggaaataaaacccgcgatttaattgtcacgccaccgctttataccagcgcccccggtaatgaaaacctgctgcggataatggccaccgaagtgcgaccggcaaaagacaaagagacactttattactttcatgccaaagcgattccgtctgtggctaaaaaagacctggaagaaaacggtaagggcgttgtcattgccaccgtcgcgaagattaagttgtttgttcgccctgcgggcctaaagccggtgcgcacagaggcggaaaaaatgctggcgttttcccgtcagggggcacagttgcgtattcataatccttcaccctactacctgacgctgaccagcatcaaagcaggcgcacagccggtggcagatgtcatggtgccccccggcgagagcgtactgacggcactaccgtccggcagcggcaacaccctgacctggaattcggttaacgactatggtggcctggacaaaggcaccgccccccttcactga

SEQ ID NO: 449130 - DNA, 2568 bp, Serratia marcescens
atgaaattgctgcgcaggtctgccgtcgcgagcgggctgctgtttgccggagttccctgcttggcctctgatgagctgtggtttccgccggaactggtgtcggattcgggtgagatcgccgatctttcgcattttaaccgtggcggccaactgcccggtacctacagagttcagatatacctgaaccaggagctgatggaggaacgggagctggcgtttattgctgccgataccgaagagaaacgtgccggtatcaccgacaaaacaggactgatggcgagcctcagccgcaatgatttcctggcagccggggttatcccgcaggccttcggcgacactctggccgataaaacctcagccgatgtaccgctgtcgcccggcagcatcatacctcaggctacgacacactttaatttccagcagatgcgtctggatatcagcattccgcagaagtgggtaaaaaagcgtccacgtgactgggtctcccctgagctttgggatgacggtattacggccggcctgctgaactggtctttcaatggcacacgtaatgacgggcgctatggcagcagcgacagctattacctgcgcctgaacagcgggtttaataccggcccgtggcggcttcgcaatgagctcaccctgacagagaatcgctcctcattctcgcgcagccgggagtggcagcgcgggcgcacctggcttgagcgaggcattacgccctggcgcagccagcttgtagtcggtgatacaacgaccgaaggcgacatttttgaatccgtggcaatgcgcggcgtcaacctgatgaccagtgaggccatgtcgccggacagggagcgcggttatgccccggttatccgtggcgtagcgcggtccaatgcccgggtcagtatccgccagaacaactatctggtgtatgagactaatgtcgcgccgggggaatttgccattgacgacctcagcccgatgtactccagcggcgatatgcaggtcactgtgaccgaagccgacggcagtgtcagcacctttacggtgccctatgccaccctgccagtgctgctgcgtgaggggaaaacgcgttacgcgctcagtgccggaaaacttaatgcaaccggccagcagaacgggaaaactccgctgatggcgcagggtaccctggcctgggggctgccgggcggcattacagcctatggcgggctgcagggagccggtgactatcgcgcggcggtactgggcgctggtgtcaacatggggttatggggcgctttctctgcggacgtcacccatgctgacagcatgctggccgaccgcagtcgccacagcgggcagtctctgcgctttctgtacagccgcggattcgtcagtaccggaaccacctttcagctggccggttaccgctattccaccagggggttttacactctggaggagagccagcgcacccgcatgagtgggtggcagagtgagcagcagcgtgatgcgtccggaaagcttatcccccgcagggcaagtgactggtacgacctgcgcaccgggcgcagggaaaatatgcagctgaatatcggacagcagctcggcgattatggctccttgtatttgtcgggcagccgtcagacctactgggaccagtcgggggtaagctcctccctgcaaggcggctacagcaatttgctggggccggtcagctacagcctgggctacagcgagagcaaaagtccctatttcggcaacaccgaccgggcgattaatctttcactttcggtgccgctggacaggctgttctccggggccggaaaatcgatgcatgcctcgttcagtactgtcagcaccaatagtggcgtgacacagcaatccacgctcagcggcagcgcactggcgcgtaagaatctgaactggagtgtgtctcagggccattcccgcagcggcggcaacaacagcagcctgaacctcggatattcgggcgggtacggggatgtgtccgcaggctacagccagggccgagactaccgccagataagcgccagtgccagcggcggtgtcatcgtgcaccgcgggggcatcactgccggtcagtcgccgggggacaccgcggtgctggtcgccaccccgggggcgcccggggtaccgctggacggcgggaacggtgtgaaaactgacggacgcggctatgccattgtgccttacgccagtgaataccagaggacgcgcgtggcggttgacacgcatcacctgaatgctcggaccgaggtcgaaaacccggtggtccaggtggtgccgaccagaggggccattgtgcgggcagaatttgcggcaaatcagggcctgcgggttctgataacgctgcaccgcgaccgcaggccgctggcattcggcaccaccgttagcgcaggaaaaagccacggtatcgtcggcgatgatgggcaggtttacctgaccggcctggctgagcgcggcaccctgagcgcgcagtggggtaaggaggccggccagtcctgccgggcggaatggaaaatcaccccggccgatgtacgcgggccgctggccagcattacggctgaatgtaagtaa

SEQ ID NO: 449131 - DNA, 507 bp, Serratia marcescens
atgaagagtattacccgtaacaatcttgtcgccgttctggttctgggcgcactgggcgcgccattaagcgcgtatgcatcggatagagcggttgtaactattacagccaccgtgtcagaaaagttctcagtggtagtcgacaaaactactgtcgattttgctgatggaggcagcgctgatgtaaaaatcacgaccacttccaatgcagcaaggcatggtgcgggtgcaactctcaccattgaatcaaatgtgccagccagtggcaagacaatgcagcttcagcatgtaactgcgacaatacctgagacatatccagttgatgtcaagattggcaatgcggatgcagcctttgataccacgactaaaaaaacgacccacactgttgcaggcaacaataatgccaatacacaggaaacagtgctgaaattaacttcaaacagagcagcgcaaaccttacccgcaggcgaatacaagggcatactgacaatttttgtcagccctgcatag

SEQ ID NO: 449132 - DNA, 726 bp, Serratia marcescens
atgaatattcctgtatcctgtgcggcaaaatccgtgtgccgggtctgctttcgcggcctgttagccattgccggcctgatgttctgttctatggcactggctgacggtattacacttggtgccaaccggattatttttcctgccggtgcggcgcagtctacgtttccgattggcaacagctcagagacgtcggcgtatctggtgcagtcccgggttgtgaccgccaccggcgacaaaaccggagatttcattgctacgccgccgctttataccagcacaccgggcagtgaaaatgtgctgcgcattgtctcctccggtgcggcacatccacaggacagggaaagcctctattttctgaacgttaaatttattccttctgcagataaaaaggccgcgccggaaacggaaggggccagccttacggtggcaacgcaggtgcagataaagctctttgtgcgcccgaccggtctgacaccgctccgtgacgaggcagagcgccggctgacgttcacccgtaaggataacgctctacaaatacacaatcccacgccctactatctgacgttaacaaacatgaaagtgggggataaaactctgaccgatgtcatggtgccgccatggcaaagtgtaacctcgccacttccggcaggcagtggcagtacgctgagctggagcagtatcggagatgacggcgcgccgcagaaaggacagggggttattcgctga

SEQ ID NO: 449133 - DNA, 705 bp, Serratia marcescens
atgaacataaatttgcaaaccttaagcttttacagccttttagtttattgtgtttactctggcttacctaaggctcatgctattgaaatagaggctgtttctaattcttatgtatacaccgtagaattggaccgtggcccttttaatgacataagtaatgcggagtggattacctttggtattacgaattgtgacgtaacggttggtaaggtagaggcatattggtcaaattgggctaatagttattggtatgatgtggacgttcagagggttgaccgttcctcattcagggtgtttataagtaaatctttctcggggggggtttcaaaattgaggggagagatccgaggtgttaactgtgcacttggatctatgtcatatataaaaacaagtcgagaacttagagacattggagtattgaatttttcacccgcacattcctcaaaatataagctcaccaataatataaattttgaaaaccttgtgccatacgtgacttcagaacccaagcgtttatttcaacacattgatggaccttcaggaaatttaactgtgcaaggaatcagtctggatccagctggaacaattgttttagacgataatgaactaaaagttacagtcgatagttcagggtttatccgtttaatggggaaaaaacccggggcttacagtaaacaattgttagtatcactcacgcttgactga

SEQ ID NO: 449134 - DNA, 1548 bp, Serratia marcescens
atgagcaatactcgtatcaccggtagctttatcacccagaaaaagatgctgattgttttaacctcgctgatcatcagcccgatgacgttgtcagagactttaactcgtgataatggcgccccagtgggtgataaccaaaattcgcaaactgccggtgccgggggcccggtgctgttgcaggatgtacaactcctgcaaaagctacagcgcttcgatcgcgaacgtatccctgagcgcgtggtgcacgctcgcggcacaggggcacatggagagttcaccgccacggcggacatttccgacttaactatggcgaaggtgtttaccgctggcagcaaaaccccggtgtttgtccgtttttccagcgtggtacacggtaaccattctccggaaactctgcgcgatccgcgcgggttcgccaccaagttctataccaccgaaggcaactgggatctggtcggcaataacttccccactttctttattcgcgatgccataaagttcccggatatggtgcatgcgttcaagcctgatccccgtaccaatttggataatgattcacgtcgttttgatttcttttctcacgtgccggagtcgatccgcaccctaacgttgctctactccaacgaagggacgccagcttcctaccggaatatggatggcaacagcgttcatgcctataagctggtgaatggtaaaggtgaagtgcattatgtcaagttccactggaagacgctgcaggggataaaaaatctggatccgcagcaggttgagcaggtgcagggcagagattacagtcacatgacgcacgatctggtggcggcaattaatcgtggcgattatcccaaatgggatctctatattcaggtgctgaagccggatgatctgaagacgtttgattttgatccactggacgccaccaagatttggccaggcgtgcctgagcgaaaaataggtcagatgatgctgaataaaaatccggacaacgtattccaggaaaccgaacaggtagcaatggcaccttccaacctggtgcctgggattgaaccttcggaagataaactgttgcaaggacgcctgttcgcttacgccgatactcagttctaccgtatcgggactaacgcactgaacctgccgattaaccggccacataatccagttaacaacggcaatcaggacggcagcctcaacagcgaacatacgcaggaaaagggcgtgaattaccagccaagtcgcctctacccgcgcgaagaactgacctccgcccgctatagccacacacagctgaaaggcactacgcagcaaagcagaattcagcgtgaacagaattataaacagaccggcgagctgtaccgatcttacagcaagaaagagcaggacgatctggtgaacagcttgggtacatcgctggccggcaccgatacggaaagcaagaacatcatgctgtcctatttctacaaggcggataaggattacggtacgcgtctgaccagcgtggcaaaaggggatttaggcacagtacgaaaattggcggataagctatccgactga

SEQ ID NO: 449135 - DNA, 561 bp, Serratia marcescens
atgaaagcactttatctatatctactatttttcctgttggccgcaccggtggcggccatacaggcgccgaatgatgctaacgagaaacagatcaaacagcagctgaacaattacctatgggatgctgcgcggacaggaaatatcggcatgatcgacaactttatcgccgcaaaatacaatcttaacgcgcaggatgaacgtggctatactgctgtgatcctggctgcctaccatggtcatcaaacgacagtggaaaacttgctgaacgctggggcagacccttgcctgcgtgataaacgcggcaataccgcgctgatgggggctattttcaaaggcgaggtgaaaatagcacgccagttgataaccgccaaatgcaatccggatatgcgcaacaatgctggccaaactgcagccatgtatgctgcattatttcagcgacatacgttgttggagcaacttaaggccaaaggggccgatatgaacgttaccgacgtcaacggcaacaatgtcgccgctctagcgcgtggggaaattaacggccatgtaaccagctcccgttag

SEQ ID NO: 449136 - DNA, 522 bp, Serratia marcescens
atgaaacgttattgttatgcggcggttggcctgatggcctgcggggccgctcaggcggcgacggtcgacgttgagatgaacttggtgaccgggcagggtatcggtcaggatatcggcaaagtggtcatcagcgaaacgccatacggcttactgttcacttcgaggctgaaagctttgcctgccggggtgcacggtttccacgtgcatgagaaaggcagctgcgagccgggcatgaaggacggtaaggtggaggcggcggtggcagccggcgggcattttgatccgcaaaaaaccgggaagcatctcgggccgtatgccgacgggcatctgggcgatttgccgcccatctatgtgaacgccgaccgcatggcgaacgatcaggtgctggcgccgcggctgaaaaaaatcagcgaaattaaaggtaaggcgctgatggtccacgccggcggagataatcactcggatcatccgctgccgctcggcggcggcggtgagcgcttcgcctgcggcgtgatcaagtga

SEQ ID NO: 449137 - DNA, 741 bp, Serratia marcescens
atgggacaagatccgttagctctacgttcacgccgaacaatcctgaaacaaacactcgctatctccgccctttcgttcaccggtctgggggccttatcgatgccttctatctcttttgcggcatcacttagtaaagaagagcgtgatggcatgagccccctggctgtgatagaacactttaagctaggtaatctacgtttccgggaaaatcgtccggtgaaacatgattacctagcacagaagcgcaacagtattgcgggtcaatatcctgctgcggttatccttagctgtattgattcacgtgtaccggcagaaattgttttggatgcaggaataggtgaaacctttaattccagggttgctggtaatatcataaaccgggatatactaggtagtatggagtttgcttgtgctattgctggcgcgaaagtagttctagtcatgggacatacgcgttgtggtgcagttcgtggggcgattgataatgttgaaatggggaaccttactagcttgttagatgaaattaaacctgcaatagagaaaactgagtatagcggagaacgtaaagggagtaattatgatttcgttgatgcagtagcacgggtaaatgttgatatgaccattaaaaaaatccgtaaaaacagctcaatcttaaaaaaaatggaagaccagcagaaaattaaaattgttgggagcatgtatcatcttactggcggtaaagttgagtttttcaacgtttaa

SEQ ID NO: 449138 - DNA, 1017 bp, Serratia marcescens
atgatttccaataaagatctattcactcaattttcattagactcatttatggccttgagcactgagagaaatatctcggataacatatctaaattggaggactttttctacaaacaaagcaaggcaaatcaattaaatgcactgatattgcgtgatttctttaagggattttttaagagagtcgcaatatcaaattataatgacaatggtgaagcatttaactttatgctaaattacccctaccatcgtttagaaaaagaagatttcaacacataccttcaccaattaaataattcatttggttatatcgtaacaatgtccaagcataataaaataaaccttggacgatatttatcatggttgacaaaaatgattaccaaccgtgattatgaattcttcctaattgcatccaaacactttacaattaaacaattcggattttcaatcgctgaagacaggaaagtaaaagaaagccatcatatgatagtaatggcgatgaaatgttatttttcattattgctaaatagactagattatatatcttcaaattacaataatgaagaagaaatgaaaagtgagaaaaaagaaatcattaaatgcattcaggcatggttcaatcctaaagcaataagtggcatttattatattaaagatgctgacgtaaatcttttctcgtcgcgtcttgattatgtaacaccattcgatgatataaatataagagagcaggaatccggaatttcatatatatcagaactgtacgcatttgctgattatgctgttgcacttattttgattttaaataataaaatcagccctagcagtcaatatgcaaaagataatatatctaaagatagtgaggacgatacaatcctcttcctcaagagtgtcaagagtaaattgcgtgatgtttttttagaagaaatttccgtagatatcattgctaatgaagaagaagtacaacatagaatcaacagaagagagaaattaattgattcaataattgcaaaaataggctaa

SEQ ID NO: 449139 - DNA, 609 bp, Serratia marcescens
atgaataacaccctgctccccccgtccgccggtgcctggatgcgccacaccgaaacggtcactgcgcggttgtcggcgatcaccgtcgcgctgcgcacgctgtggacgccgaccgcctgcccggttgagttgttgccgtatctcgcctgggcgctgtcggtcgaccgctgggacaagaactggccggcagagaaaaagatagcggcgatccagcaatcctactggcagcaccgccgcaagggcacccgcgccgcggtgaggagggtgattgagagcatggggttttcggccacctttgccgaatggttcgacaccggcgatcggccgggcaccttccggcttgaggtcgacgtcaacgacgtggggatcaccatcaagacgctgagtgaactggaaagagttgtcggcgacgccaaacccgtcagccgacaccttgccaatctcacgatcgccaccagaacaacaggcatcatcgcgatcggtgcgacagtcactcacggcgacatcatcacgatttatccgcaggacgtagaagcggacgacgcaattatttatgacggcgcacaacgatataacggcaacgcctattattccggggttatgaaatga

SEQ ID NO: 449140 - DNA, 1890 bp, Serratia marcescens
atgacaaaaatcacagagatcgaacgctgggaagacgaagttcacttgatcgcgcgcagcgaacgcgtggccggcggtcgtgacggcgccgtcaataaacaggctgggcaactggctaaccgtaccctactcctaaagcgcgaggtatctgccgtcagtgatttggctctcgccgatatgggggtttatgcctcagcaactgacgcccaaaatgccattaataccggcgttgaaaagcgtcgatttttccccgttaagggcagcggtaatatttgggcatggcgctatgaaaatgtagccggcgcagccacacgaacccatgactatctgcgcaatggcaaatccatcctgaatattgagcagtggttgggtgtccggttgtacgaccaaacaagtgagacaaacaattattttgtcagggctaccggaccagatacaggaaaaatccaaacctcaccgggtacagcggtcgcctgcttcccggtttatgccggccagacctataatgtcacggccaccgattaccggtctgattattttgctatcgcgctgaaaacggatagctcactgaccggtgatacgttgggattagtttcaattacagacggcggtgttcgcaagtcgtttactgttccacctgacagcccggcgaaattcgcctttattaataccgttatcccaaatggtaaatttgatattcgggataatctcgccgttgaagtagaccaaatcaatcaggttaacggcattcccattgtcgatgcctgggcgcgtgaatcgctgatcgaaagcagtcttgcatttgttgaagaggatggcgggcagctgtacgcaccggaaaatgaccaggtgaattattttgtcagggcgctcggcgctgacgcggggaaaatacagacgtctccgggcgcaatgctgacgtatttccccgtcacccccggtaaaaaatacacggtctatgcatcagactttactccggatttctttgtcgtcgcattgaaaactgacagcacattaacggggagcacgctggggctgattgagctggagaacggcgggagctacaaatcgttctccgtaccggcagacagcacggcgcgatttgcgtttatgaacgtcgtgctgccactgcaaaaatgggatattcgcgctggattgacagtaacaggccccgcgctgaaagcgaaaagtatcaacggccatgaggtatacgacgccaaagcccgcgatatgattgcaagtttgggcgagtcgtcgattttaacgggtaaagaagcggtctattttggcgacagcattacagccaaaaatccccgcacaaagaaaaactatcacgaatacatcgccgaggctgttggcgggatgcagatcagaaactatgggatcagcggcagcggattttataaccgctacgcggatacagccaccattaaagaaaaccctgattatgtcgtgatatttttgggtacaaacgatttcggcgaagtaggaggccgaaaaccgctgggcgcacttttcgacgagggaacggcgacggtgtcgggatgcataaatagattgctccgggacattatcaccaaattttacgacaaaaagatcgcaatattgacgccgatcccgcgcctgacaagctacggcagcaatgcgagcaataacgcgtcaggatttacgcttgagcagcttgcggagttaattcagcaatacgcggcgcattactctatcccctgcctcgatctttaccatgagagtaatttgccggtgtatatccccgcaggcaacgcgcactattttacgcagccgggcggcacgcagccggacggactgcaccctaatgatgccgggcatatggtgctggcgaggaaaatacgcgtctttatggagtccctttaa

SEQ ID NO: 449141 - DNA, 1080 bp, Serratia marcescens
atgatgaaaaaatattactctgttatcacaaacatcggcgcggccaggctggccgacgctgtcgccaccggcactctgttggacattaccgagatggctgtcggcgacggcggcggcgtattgccacggccaaacccagaacaaacagcgctgatcaatgaagtctttcgcgagccattaaatcgcctgtccattaccagtgctgccgctaatgtcgttgaagctgaaatgattatccccgcccaggctggcgggtggtggctgcgcgaggtagcgttgttcgcgtccgctggtgcatgtatcgctgtcggtaacatgccggaaagttacaaacctctgacgactgacggctcaagccgcaccgcggctgtgcgtatgcaactgacggtcagcaacactgacaatattgagctgattatcgatccggccgtcgtcatcgctacccagcaagacgttaccgccgtaaaaaacgaggccaaagactacacggacgaggaattgagcaagctggacgaaagcataaaaaatgccatcgccgacgctgtgaaaggagctatccgggacgcatgggagcaagacaaccctgtcggctcgtcgcgcctgttcaatcagaacgtgaaccctaacaccaaatggccgtggtcaaaatgggagtacgccggcgaacacctgacaataagaacggcgaaggcggacggcactgacgtcggcgaactgggtggcagcgacacggtgacaatcgcgcgcgccaatctgccacagtcggtgctgaatgtgtcaggttcaaccagtgagcaaggagcgcaaacgctgaaaacaacgccggcgggtagacacaagcatcagggaggaatgtccgcgccaggcgaagcgtgggatggcgattatattgtcggctccgacaacgacagccacagaacgcgcaactacaccagcgaggctgaagaccatatccacgaggtcaccgtgccggcgcacgctcacaccgtttgggcgcaaaccgaagcgctcggccagggccaggcaatcagcgttgtcgagcgccataagctgcaaatgctgtggcaccgtgtggcctga

SEQ ID NO: 449142 - DNA, 1221 bp, Serratia marcescens
atggacgaaaagtccctctacgctcatattctcaacctgtcagccccgtggcaggtaaagaccctttcactcgatgaaaatgcctgttcagttactgtcactgtcgaaatcgctgtaaacacccggttaacctgcccgacctgcggtaaaacttgttctgttcacgatcaccgtcatcgtaaatggcgccatcttgatacctgccagttcatgacagttgttgaggcgaatgttccccgggtcatgtgcccaaaccatggatgtcagacgttacccgttccgtgggccggacccggcagccggtacacgttgttgttcgagtcattcgttctttcctggctgaaaatcagcactgttgatgcggtaagaaagcagctgaaacttagctggaatgcggttgacggcattatgacccgggcggttaaacgtggtcttgctcgaataaaaagaccgctatcagcccggcatatgaatgtggacgaagttgccttcaaaaaaggacaccggtacatcaccgtgatatccgaccgtgatgggcgcgcactggcgttaacagatgatcggggaacagaaagccttgccagctatcttcgcactctcaccaacagccagctggaggccgtcaaaacgttctcaatggatatgaatgccgggtatatcagagctgcgcgcatccatcttccgggagcagtcggaaaaatcgcctttgaccgcttccatgtggcaaagcaactgggtgaaatcgttgataagactcggcaaaacgagcatccccggcttccggtggacagccgccgccaggcaaaaggaacccgcttcctgtggcaatacagcgaaaaatggatgacagagccccggcaggaaaaactggcatggctgagagaacaaatgcaactgaccagccagtgctgggtactgaaagagctggcgaaagatatctggaaccgcccctggagtgacaagcgccgcgcagactggcagcaatggatagcgctggcgagaagttgcgatgtgccggtaatgaggaacatggcaggaaccatcacaaaaaggttatacggaatacttaacgcaatgcggtacagcgtctcaaatggtaatgccgaagcgctgaacagcaaaataaggctgctgaggatcaaggccagaggctatcgaaaccgggagcgatttaaactgggggtgatgttccattacgggaagctggatatgacgttctga

SEQ ID NO: 449143 - DNA, 711 bp, Serratia marcescens
atgactcagcacgaccatgtagaggcatggtggtttgaaatcagagggatggctgaatacctttctaaaggaaacgaaatgcttataaactttgatccattacgagatttggaaaaagacagacggtctcatccgtgggggaaaacggcttacaacgaaagatctgggttttactcaaactttattgaacacccagagcttataactgaagtacttgaagactttaaaccccatgaggataaggaagcagttcaaacattctataaatttctaaaatggataaatggctctgaatcagcttttgaaaccaatgattgtgcattaagagaaaacgtcatagctaacacagattcattatttaaattcacacacaaaattgatggtcgtgtagagttttttctgagagaacatcagtataactgtcgcaaggatatctctacctggttgatgagaatgtcatcgctttatttgcaggtagaaaggcccgacttcctcaatgcccttgtcgatatccaactcgcgccgacagacttcatcacattgcctactgaccaaagtaacggctacagaatcaggttggtctttaatgcttatgggaatggtgatgttgaagtatgggaggctctgaacactacgctcaacaacatctttaaatccacaaaaaggttgaacaacgccctctctgaaggagctagccccacattcccttaa

SEQ ID NO: 449144 - DNA, 579 bp, Serratia marcescens
atgccctatatcgatataaatcagagtggtgatattaacctgtgtgcttttctcgacatgaccgcctggtctgaaggaaccgaggctacggttcatcctcttacgtgtatggacggttacgatgtcatcgtcacgggcagctcgggtccagaaatattttatgatttcagtacgcatccgtttggcaatggccgccccccaaagcatgttaccggttcactttactcgagtgcttccggtcgctatcagtttttgagaacccactgggttcattaccgggaccaacttaacctccctgactttggccccctttcgcaggatttatgggctatacagcttatccgtgaacgcaatgcccttaccgacattcgtcaacaccggatccgtgaggcgattttccgctgtgccaatatttgggcttccttcccgggggccgggtatggtcagcctgaacacaggctagatcaattaataatggttttcgaatctgcgttacataaattgcaatttcctccgcagatgcctgatgaaaatattaccgctccatctgaatctatcgacattctaacagaactttga

SEQ ID NO: 449145 - DNA, 252 bp, Serratia marcescens
atgatgaatgcagtcaagaaaaccgcctgtgccctcgcggtgctggccacctcaaccgccgttatggtcgagagcattgatgtgaaggtcatcggtaccatcactccggcggcctgcaaacccaccctgaccggggacggcgtcgttgattacggcaccattgcgccggcatccttaaataaggatgcatttaatcaacttgacaataaaaaactggactttgtcattacctgtgatgcaccggcaaaatga

SEQ ID NO: 449146 - DNA, 159 bp, Serratia marcescens
atggggcgctggctggccggtaaactgatgaaagatttggatatcgccagtttccaggtaccggcgcacaaatacaaacgcggcggaaacgaacacgttaaaatgctgaaccatctcgaccgccagttcacggttaccgcgccggatcaggtgcggtga

SEQ ID NO: 449147 - DNA, 6153 bp, Serratia marcescens
atgtacagtacagccgaaattttaacgaagttaaatgctcccgcgtcagaatcaggtaattatgccggtgtgccgcaacagcccgccacgctggcggatatcatgatgctgtctcttcctgaagtcagcgcactgagcggtgagcggataacccgggaagaacagcgctatctgtgggagcaggcacagcaggaagaaaaggccaaccgcatgctggagtcccgggtgctgagccgggcaaatcctcagcttgctcacgctgtgcgtctgggtattcatcaatcacgctcgctctacgctttcgacgacatgttcggccggcgggcggcacatttcgtgaaaccggggtcagtggcttccatgttttcgccggcggcttatctggcccggctgtataatgaagcctgcaggctgtatgaaaaagattcgacgcaccatctggacagccgccgtcccgatttgcagtcactgacactgtcgcaggaaaacctggacaaggaagtttccacactgaaggtagctaacgaagtccttgatgcagcaatcaataaaagcgatacaaaaacactcaatttgtataacccggattatgacagcgtactacaggccattcagctgcaggacccggatttttccgccttccggtggcgcagaaacagcactgctgagctggaaaccgacagcaaatcgttacggttcatggaagcaaatatatcaataaatctaaaaaatctcttgctgcaggacaataagtctgctcacgaaaaactgaatatgctcagccaggcaaccggactgccggtatccgatattgtcaagattacagaaaaaccagacgcaaacgatacgctggctattgacggccccatgctggacaaactcacacatatctgtcggtatattcgtcgttaccgcatgcatttttctgacgcacaaatactggttaacgcaccgccagaaccgtttaccaattctgtggtcgccggtgttctgaaacgcgtcttccggcttgatgccgacgaacttgttctgatgacagccatcatctccgatctgaataaaccggcctggcctgacaacccggcagttgtgccggtctttgttgactatctcagccagcttgtgcagtggctggaggcaaaaagcctgcggccggtggatttgtttatgatgctgaccgttaattacagcggcaaaaactccccatttgatggtaaaaactcaccgaaaaatcgcgatttattaaccacgctgaggcacggactgcgcggtaatcacacgctgacagggactgagggccgtcagtccctgactgacgccgccgcgccactggtggccgccgtgtacaatctggactcagcgcagaagggcgcagcccttctgcagtggcttgataaacagcaggaagtggatgggaaaaaagagggcgttcagacatttcttcagtcactactggacgcgccggaaaagcaggatgacgacatattgactgaagaacaggtcgttttcgtccagcggctgggtcagctggcgttgattacgcaggcactgcagctgacgacggccgaactttcctttgcggttaaacatcctgagaaactgtctgccaggatgacaacgctgtctcacaacctggcgaccatcctgtcactggacagcctgcaccacgggttacagcgctgcggcactcagggttcagacattctgagcgcactgcaaaacggcaccctgacggcacatcagctgtcactggtcaccggagtgtcacaggacctgatggcagccgtgctgacagagggagcggcactgagctgggaggacgctgaccacgccctgcagtggaccgacctcgccggccgactggggatttcctgtgagatggcaaaaaagttgctgcatttgccttacgataacgacagtgctgccgaatggaaggcattggcggatgcgctgctggctgctctgaccccgacaaaggcgatgcagctggaaggcgtgctggaggaagcccgcagtgccatactgagcactcatgcggtcgcctgttttacgcaaatctggaaaccgaaggccgaagacgcagtatcggtaaaagacagaaacgacttgtttaactggctgctgctggataatcaggtctcagcgcaggtaaaaaccacccagataggggaggcgattgccagtatccagctttacgtcagtcaggcgctggccgggcagtacgggaaggccgatgccgccgtcctgtcacgccccttcttcactgaatgggaccggtacaataaagactacagcagctgggccggccttgctcagcttgtttactatccggaaaacaccattgacccgacgctgcgtatcggtcagaccggcatgatggatgagatgctgcagacactgagccaggggcagctcaatgacgacacagtggagagcgcgtttaaaacctacctgacccgttttgaggaaattgccaacctgaatgtgattaatgcctatcacgacagtctggttgaaacgtcaggcaaaacgtatctgctcagtcgttccagcgccgggcagtattactggcgctcggcagacgtcagtctgatgaaagacggcaggctgccggccaatgcttggagcgagtggaagaaaattgatatcggcattaatgccaccggtgacttaattcgcccggtaatttttcaggaccgcctgtatcttttctggctggaaagccagcgctatagtcccgggaaaaccgcgagtccggacgccagtgataagcagccggatgtggtggaatacaccctgaaatatgcccatattaagcatgatggttcatggagtgcaccggtcagcgtagtcactaaatcagcattaaaggggagtttatttgaggctaccgagccgaaactgcctgaggcattaaaaaataatgcggggactgtcggcatcttttgtgcccgtcacaatacccgggatgcggtatatctctctatatatgatatatataaaaaaagtgaaaaatctttctttatcctgaaagtctcgccggatggcgcgactgactacctgccaggtggcgaaaaaaagctgacatcaatcatagaatatcatctcgacagtgagataaataaaaaaggcgtaaatacattatttaccgatggcacacaaaccattgaagtggttaccccgaccattaccagttttcaggattttaaagcactggaatcacccattgaatcaagacattcgttattcgattacccacaatcaaatatgatctcatttgattttgattcgcatttttctgatgacaaagaatgcgcattaaatattaatatcagtcctgaattttcaggtccgggtttcgaatacgcgtcctttttcgttccaacactaacatgctcgtcagaaagtaacggtataaaatcagacgcattgagagttaaatttaatgaatttaaaagactcaactttagcggcttcgataggaacccagtaaccgtgaagagaaatggtcgggaattcacacttttttataggaaagttaaaattacgctgccgaccttgtcaataagattttctaaagacgattttaccgctgacagggccgattttaatgtaacttacaagcttacccttgaaaaagtagcaatgggtgcaaaccaaaaaaacgtatatcaggattcatttactgtctctttagtgaaaaaagtgaacagtaaactggcaaaaatctccctgatacacaacgatgcctctggcgtaaaaaccctgcaatacggtaaaaacccacccatcagaattaacacgctgtttgccagacaactggtttcactggcaaaccagggaacgggtgccgtgttgtcctggaatgcccagaccgcactggaccatcaggagccggacattttcaacagtgccaacgcgctctatttctgggagatgttttactatatcccgatgatggtatctcaccgcctgctgcaggaggcgcgctttaccgaagccacacagtggataaaatatgtctggcgccctgaaggctatatcgtcgacggcaagtctgcgtcccggcactggaacgtgaagccgctggaagataacaccggctggaacaccagtccgctggactcggtcgacccggatgcggtggcgcaggccgaccccatgcactacaaagtggccaccttcatgagttatcttgacctgcttatcgcccgcggagatgcggcctatcgccggcttgagcgcgacacgctgaatgaggccaagatgtggtatgtgcaggcgcaggagctactgggcgaggagccgtcagcgtctgaggataaaccgtggaacgatccgtctctcggcgaggctggcgcagaccgccagtacgtggcagtgcagcagtatctgctggctgtccgcgcgcaggcggccggggaagaggaggcgacattgccgggcgcggcgtcacccgacgcgctgtttctgccccagcagaacgaaaaactgcagggatactggaccaccctgcgccggcgtctgtataacctgcgccacaatctgtccattgacggccagccgctgtccctgccggtgtatgcctccccggccgatccgcaggcgctgctgaccgctgcggtgaacgcgtcatcgcagagcagctccctgccgaccctcaccgaaacgccggtgtaccgctttccggttattctggatagtgcaaagaatatcaccactcagctgattcagttcggtagttctctgctgagcctgatgcagctgcaggatgcggaaaagctgtcgctgatgctgcagactcagggggcggaactgatggcgcagagtattcttatccagaaagacgtgatagacgaaacgcagtccgacatgaatgcgctgaaagaaagcattaaaggggccgagtcgcgcagggataaatacaaggccatgcttgaagaaggtgtcagccgggctgaaacggttgcactggggctgtcgggtgggtcgactgccctgaatggtaccgccggcgtcgcctttaccgcggccggcgtaatggatatggcgcccaacacttttggtctggcgaatggcggcagtaagtgggggggcgcggtacggggcgcaggctatacagctgagcttgccgcgacagccctgcgcgtgacggcggatacgatgtttcagaatgaattttaccgcaggcgcacagaggaatgggagatacagtacagcgctgccgcgtctgaatacagtcaactggacaagcagaaagaggctctggaaaaacgtaacgcggcagccagtaagcagctggattatctgaccacccagcagcagcaaatccggatgcagatgacgtttttgcagaataaatttaccagtcaggcgctgtacagctggctgcgcggcaaactggcgtcggtgtactaccagttttatgacctggcggtgtcacgctgcctgatggcgcagaaagcgtatcagtggtcgacgggagcaaaatctgaaaactttattcgcccgggcgcctggcaggataactatgccggcctgatggccggggaaacactgatgctgaacctgacgcagatggagcagcgttacctgcaggagagcgggcgggaaaaagaggtgacgcgcaccgtctgtctctccggggtttatgccgggctgggctccggcgcctttacgcttgcggacaaagtagcagaactcctcaccgatgccacgaaaagcggcggaacagagagcaacggtctgaaagttgatggtaaccagctgcaggccaccctgaagctcagcgacctgaatattaaggcggattatccggattcgctgggtaacacacggcgcatcaaacacatcagcgttaccctgcctgcgctggtcgggccgtatcaggacgtgcgggcggtactgagctatggcggctcagtgaccatgccacggggctgtgaggcactggcggtgtcgcacggtatgaatgacagcggccagtttcagctggatttcaatgacgcccgctggctggcgtttgagggaataccggtcgatgataccggtaccctgacactgagctttccggatgcgatggacagacaaaaagccctgttaaagagtctgacggacatcatcctgcatatccgttacaccatcgcccgctaa

SEQ ID NO: 449148 - DNA, 4311 bp, Serratia marcescens
atgccagagaacgattttttacaacttactcctcccacgctgccctccggcggaggcagcatcagcggcctgcgcagcgaggcgggcagtgccgggccggacggggccgccacgctcagcatcccgctgcccgtcagcgccgggcggggttatgcgccttcgctttcgctcaactatcacagccgggccggtaacggcccgctgggcatgggctggagcctcagcctgccggctgtgcgcctgcgcacggctaaaggcgtacctgcttttgacggcaccgatgaatataccggcccggatggcgaggtgctggtcccgctgccgggtaccgggggcaagcccgatatccgcacggcaggcacacttttgggcagtgactcagcagcgctgtatcacgttcatgcttaccggccccgtgtggaaaaagacttcagccgtctggagcgctgggtatcagaaagcgacagtgcagacttctgggttatgtacagccctgacggccaggtgcatttgctggggcggcacgccggtgcccgcatctgttcagcgcaaaatccggcacacaccgctgtctggcttctggaagcctccgtatcggcatccggggagcagattttttatcagtaccgcgctgaaggcgaggacggatgcagcgccgacgaagccgcattccatcctgccgccaccactcagcgctatctgtgcgccgtatggtatggcaataaaaaggccagtctgtcgctcccggacataacgacggcacccgccgccgctgactggctgttcgcgctggtattcgactacggggagcgtcaggccgtgaaagaggcgcccccggattggctggcgcccggtaccggtaaccggccctgccggccggatgccttttcctcccgcgagtacggctttgaactgcgcacccgtcgcctctgccgtcagatactgatgtaccacgatacagacgcactggcaggaaaggaagacggcgggacgccccggctggttgccgggctgcagctgacgtatcaggaaaccccgtcagtttctgttctgaaagcggtacagcagattgcccgcgaagcggacggtacgctgctgacgctgccgccgctcgagctgagctggcagtctttctcaccgccaccggaaaaaggagagtggcaggtccgggaagatttgggtaactttgcgcctcagcaaccgtaccagctcgttgacctgaacggtgaaggtatcgccggtatcctgtatcaggatgcgggtgcctggtggtatcgcgcaccggtgcgcgacgcgcagggcggtcaggatgcggtcacctgggcggcaccttcgccacttccggcccttcccgcgctgcgggatggcgggctgctgacggacctgaacgcagacggctatctggagtgggtagtgaccgcgcccggggtcgccggacgttacgaacgcacggccgggcgggaatggcagcgctttgcccccctgtctgcactgccggtggagtaccggcattcacgcatgctgatggccgatgtgagcggtgccgggcgaccggagctgatccttatcgggcccagaagcctgcgcctgtacagcggcgatggcgatggctggacaacggtaagaaacgtgatgcagtcagcgggggtcgtactgccggtgccgggtaccgatgcgcaggtaatggtggccttcagtgacatggcaggcagcggacagcagcatctggtggaagtccgtgcctgcggggtgcgctactggccgaatgccggacacgggaaatttgatgcgcctgtcagcatgcctggcttcagcctcccggcgcagacgttcagtccgcagcagttatttctggcagacgttgacgggtcaggcaccacagacctgatttacgctgaaagcaactgcctgcgggtctggcgcaaccagagcggtaactgtttcgctgaaccttttcagataacgctgccggcaggggtacgctatgacaacacctgcctcttacaggtggcggatattcagggctcaggcatggccagtctggtgctgacggtaacccgtccgtcgctgcgtcactgggtgtgtcacctgtccacgttaaaaccctggctgctcagtggcactgataacaatatgggagccgttcaccggctgcactatcgcagttctgcgcagttctggctggatgaaaaagcggacgctgcagcggccgggagaaaagcgcccgtctgttatctgccgtttgccctgcacaccctgagctgtactgaggttatcgacgacattacgcaaaacaggatggccagcacagcccgctaccggcacggcgtgtgggacagccgggagcgggagttccgcggatttggtatggtcgaggtcagtgacagcgacggacagccgccgcatgcagacagtgatgtcgtcagcatgccggctgttgtacgcagctggtatgcgaccggctgcccggtagtggacgcgcagctgaaagcagagtactggcagggagactgcgaggcttacgccgccttcagcccgcagtttacacagggttgtgctgaacaggaaaaaccctgcagggcggatgatgaaacggctttctggctgaaccggggactgaaggggataatgttacgcagcgagctctacggccaggatggcactgaccaggctgcggtgccttacaccgtcacggaatacggtgcgcaggtgcgcctggtcgatgagcacggtccctgccctgtggtctggccatctgtgacagaaagccgtcagtatacctatgaacgtatcagcaacgacccgcagtgcagccagcagattacgctcagtagtgatgcgtacggtcgcccgctgcgcacggcaacccttcattacccgcgccgcaggccaccggaaacgaacccgtatccggacaccttcccggatacgctgtttcacagcagctacgatgcacagcagcaggtgctgacactgagcgtgacgcagcaccgctggcacacgattaaagaggataacggtatcgggtttaccgggcttcatgatgcatcgcgcaccgatatcttccgtcatcccggtgccgacatgccggcggcgggcctgacggcggcggaactgaaacacaacgcagccacctggcttcctgcagcagaatatagccattttgccggtcagcagcaggtctggtatctggatgaagaggcacgagccacgacaatccgtccggcttttccgccccgcgttgcgtttactgaaacggcggtgctggatgacactctggtcgctgccctgtcacaggatatctcaccggcgcagctggcgcaggccggataccaccaggctgagtctctgttccgggctgacggtgaaaacgccaccacgttatggaccgtgcgccggggttataccacctacggaaacgcggcgcatttctggctaccggttactcagcgggacactctgctgacgggggaggtaagcgtcatacgcgataagtatgactgcgtgataaccgaagtgcgtgatgccgccgggttagccaccacagcagaatacgactggcgcttcctggtcccggtgcgtattactgacgccaatgacaacgtccacgcctgtacgctggatgcgttcggacgggtgacctccgtgcgattcaggggaacggaagacgggaggccttccggctacagcgatacggtgttctccctgccggcggatgcggatgcggcgctgaagaaaacggacaagccactgcccgtcagccagtgcattatttatgcagcagacagctggcagcgcgacaggcagccccctcacgtggttaccctgacgactgaccgctatgacagtgatgcggaccagcaggttcgtcagcaggtatcattcaacgatggttttggccggatgctacaggtggcaatccgccatgaggcaggcccggcatggcagcgtagcgacgagggagccctgaaaacagggccggataagacgttgctgtctgtgcacaccgattttcgctgggcggtgtcagggcggaccgagtatgacaacaagggtcagcctgtacggacctatcagccctattttctggacagctggcgatatgttagtgatgacagcgcccgtcaggatctgtatgccgatacgcacggctacgaccctgttggtcgcgaggtgcaggttctgacggcaaaaggttaccggcgccgggtacagtttacgccgtggtgtgtggtcaatgacgatgagaacgacatgcacgaagatacggtgcgcgtgcaggcgggcggaacagacgaggagaaaccgtaa

SEQ ID NO: 449149 - DNA, 2943 bp, Serratia marcescens
atgaatcatcacaaaaccccttcagtcacggtcctcgacaaccgcagcctgaccgtgcgagatatcgcgtactgccgccatcccggctccccggacgttaccagtgagcgcattacacgccatcagtacgatgcccgcggctttctgacgcagagcgctgacccgcgcctgcatgaggccggactggtgaatttcacatatcttacggacctggccggcagcgttctgcgcaccgtcagcgtcgatgccggcaccactgtggctcttaacgatgccgcaggccgcccatttatggcgctcaataatatcagcaccaccgacgacggcaaggaggaccgaagccaggcggtaacccgcacctggcagtatgaggatgcagaactgccggggcgtctggtgagcgtgaccgagcaggccaccggtgaagccgctcgtgtcacggagcgcttcatgtatgctgccaatactgccgcagagaaggcgctgaacctggccggtgcgtgcgtctgccattacgacacggcaggcctgacccagacggacagcgtggcactgaccggcgtgccgctctcggttacccgccgtctgctgaaggacgcggaaaatcccgatgtggtgaccgactggcagggcaccgacgcttctgcctggaacgacctgctggctggcgaaacgtacaccaccctgaccacggcggacgccatcggcgcagtgttgaccaccaccgacgcaagaggcaatacgcagcgggtggcgtatgacgtgtcgggccttctgtcgcgcagctggctgacggtgaaaggtggcacggagcaggttatcgtcgcctccctgacgtactccgccgctgggcagaagctgcgcgaggtacacggcaacggcgtggtgaccacgtacacgtatgaagccgaaacgcagcgacttaccggcattaaaacggcgcgtccggacggtcacacctcgggggcgaaggtgctgcaggacctgcgctatgagtacgacccggtgggcaacgtattaaaaattactaacgatgcggaagagacccgcttctggcgcaaccggaaagtggtaccggaaaacacgtacgtctacgacagcctgtaccagctggtcagcgccaccgggcgcgagatggcaaatgccggacagcagggcagccatcttgcctctgccaccgtcccccttcccaccgacagctctgcgtttacaaactatacccgcacttacagctatgacagcgccggcaacctgacgcaggtcaggcacagcgcaccggcgacagacaaccgttacaccacaaacatcaccgtctccgataaaagcaaccggggcgtgctgcgtaccctgacggaaaagccatcagacgtggacgcgctgttcacggccggggggcagcagacgcagctgctgccggggcagcagacgcagctgctgccggggcagcctctcatctggacggcgcgtaacgcgctgctgaaggtcaccccggtggtgcgtgacggcggagcagacgacagcgagagctaccgctacggcacgggcagccagcgtatcctgaaggtcagcatacagcagacaaaaacccgcaggcagacgcagcgggtgctgtacctgccggggctggagctgcgcacgtcaaaagcggacagtactgaaacgcagagcctgcaggttattaccgtgggagaagcgggccgggcgcaggtgcgggtgctgcactggacaacgggcaggccggaggatatccgcaatgaccagccccgatacagttacgataacctgacgggcagcagccagctggagctggacggtgaggggaatatcatcagcctggaggagtactatccgtacggcggcacggcggtatggacggcgcgcacccagacggaagcggatcacaaaaccatcagatactcaggcaaggagcgtgacgcgacggggctgtactactacggttaccggtactaccagccgtgggcggggcgctggctgagcagtgacccggcgggcacggtggacgggctgaacctgttcaggatgtgccgcaataatccagtgacatttaaagacaatgacgggttagcgccgaataagcagggctatatttatctctcatttattgcgccagatatggtagaacaaacattaggatataatcttccacgcgctgaaaaaggaaagcctttgtatccggtaattgttcctgatgacagggcaaaagagcaaattgaacagctaagaagtgataaagtggaagaattaaaggcgagctacaaaaattctgacggagcgcttaaacaactcaggaacatgggattatctgaagatgatataattcaacaactagggcctgaactacaccaaaccttaacaaaaggaatggctaacaatttgcgcgaccttaatgtacttacctctataagataccaaagcaaccaaggaggcagggcgttaagccagctgcgtgcgcctgccgataaattgtatgttatgggccatgggggggctggtatggatatactggcagcagaccaagcggttacacaaggaaaagtcacctcacgagagttagccagacagcttgcccgtggggggctgccgaaagcgttttcggatattcgcgttaccgcctgttttagtgcagacagaattgaacctcagtcttttgctccggaagagctggaaagaacatcattattatatgaagttaaaacaggaggttttctggggatagttaagaagaacacaatacaatcctttgctcagtcattaagtaacgccctcggtaaagaaggtttctcacaggctgttgtgtcaggttatcacggagctggtgtcacgttcactcaacaggaaaatcactcacgcagacttaagggaggtggtaaggaggatgtacgttcttcaaccgtcagacgacaatttacggcgagccgctga

SEQ ID NO: 449150 - DNA, 1332 bp, Serratia marcescens
atgaatgacacctcttctgacgacatccttctgctaaaacagcgccaggccgaacagggagcgttgaaccgcgtcctgcaggaaaagctgagtaaccgggagcgtgaaatagaccatctgcaggcgcagttggataaactccgcagaatgaacttcggcagtcgttccgaaaaggtatctcgccgtatcgcacagatggaagctgacctgaaccggcttcagaaagaaagcgatacgctgactggtcgggtggatgatcctgcagtgcagcgcccgctgcgtcagacccgcacccgcagaccgttccccgaatcacttccccgcgatgaaaaccggttattacccgcagaaccttgctgcccggactgtggtggcttgctgagttatctgggtgaggacgccgccgaacagctggagctgatgcgcagcgccttccgggttatccggactgtacgcgaaaaacacgcctgtactcagtgcgatgccatcgtgcaggcccccgtgccttcgcggcccatcgagcggggtatagcaggaccggggttgctggcccgcgtactgacctctaagtatgcagagcacaccccgctgtatcgccagtctgaaatatacagccgccagggtgttgagctgagtcgctcactgctgtcgggctgggtggatgcatgttgtcggctgctatcaccactggaagaggcgcttcggaactatgtgcttactgatggcaagctccacgccgatgacacgcccgtcccggtgctgttgcccggtaataagaggacgaagaccgggcggttgtggacgtatgttcgtgatgaccgcaacgccgggtcagagctggcaccggccgtgtggttcgcttacagcccggacagaaaaggcatccatccgcagacccatctagccggcttcagcggtgtgctgcaggcggatgcgtacgccgggttcaacgagctgtaccacaatggccggataacggaagccgcctgctgggctcatgcccgccgaaagatccacgatgtgcacgtccgtaccccgtcagccctgacggaagaagccctgaggcagatcggtcagttgtacgccatagaggcggatataaggggaatgccgacagagcagcggcttgctgaacgtcagcgaaaaacgaaaccgctgttgaaatccctggaaagctggctgcgtgaaaagatgaaaacccagtcgcgacactcggagctgacaaaagcgttcgcgtacgcacttaaccagtggccggcattaacgtactatgcggacgatggctgggtcgaggcagacacaacatcgctgaaaatgccctgcggacggtaa

SEQ ID NO: 449151 - DNA, 2886 bp, Serratia marcescens
atgagcacatcgttgttcagcaaaaccccttcggtcactgtcctcgataaccgcggcctgaccgtgcgcgatatcgcgtaccaccgccatcccggctccccggacgtgaccagtgaacgcatcacccgccatcagtacgatgccagcggctttctcacgcagagcgttgacccgcgcctgaatgaggccggactggcgaacttcacgtatctcacggacctgaccggcaacgtgctgcgcactcagggcgtggataacggcacaaccgtggcactcagcgacgccgcgggacggccctttatcgcggtcagcaatatccgcaccgctgatgacggtacggaagacagaagccaggcggtaatccgcacctggcagtatgaggacgcaaccctgcccggacggccgttaagtattacggagcaggtgaacggtgaaaccgtccgcatcacggaacgctttgtgtatgccggtaacggtgacgcggagaaagccctgaacctggctggtgtatgtgtcagtcactacgatacggcaggcctgacgcagacggacagcgtggcactgtccggcaccccgctctccgtcacccgccgcttgctgaaggacgtggacaccccggacgcggtggccgactggcagggtaccgacgcctcagcctggaatgacctgctggccgcagagacatttaccaccctgaccactgccgacgccacaggcgcggtgttgaccaccacagatgcggccggaaatgagcagcgagtggcgtacgacgtggcgggcctgctgtcgggcagctggctgaccctgaagggcggcacggaacaggttatcgtgaggtccctgacgtactcggccgccggacagaagctgcgcgaggagcacggtaacggcgtggtgtccacatacacgtatgaagccgaaacgcagcgtctgaccgggattaaaacggagcggcctgccggtcatgtctcaggcgcgaaggtgctgcaggacctgcgctacgcctatgacccggtgggcaacgtgctccgcgtcagtaacgacgccgaagagactcgcttctggcggaaccagaaagtggtgccggagaacacgtacgtctacgacagcctgtaccagctggtcagcgccaccgggcgcgagatggccagtgccggccggcaggtcagcagtcctcccgctgccggcgtcctccttcctgcagacagcacctcgtacacgaactacaccagaacttatacatatgataatgccggcaacctgacgctgatacgccacagcgcccctgccaccgccaacaactacaccacacacatcacagtgagtgaccgcagcaaccggggcgtactgagtaccctgaccgaaaacgcctcaggcgtggacgggctgttcactgcaggcgggcagcaaaaacagcttcagttgggacagaacctggtctggacgccgcgcaacgaactgttgaaggtaacgccggtggtgcgcgacggcggaactgatgactgggagagctaccgctacggcggcggcggccggcgcatcctgaaggtcagcgtgcagaaaaccagcagcaacatgcagaggcagcgggcgctttacctgccgggactggagctgcgcagcacaaaagcgggcgatacggaaacggagagtctgcaggtcatcacggtgggcgaagcgggccgtgcgcaggtgcgggtgctgcattgggagagcggcaggccgacagaaatcaccggcgaccaggtacgttacagttacgataacctgacgggcagcagcgggctggagctggacggtgacgggagcatcatcagcatggaggagtactacccatacggcggcacagcagtatgggctgcacgtagcgcgctggaagtggactacaaaacgttgcactactcgggcaaggagcgcgacgcgacggggctgtattactacggctaccggtactaccagccgtgggtgggaagatggctgagcgcggacccggcgggtacggtggacgggctgaacctgttcaggatggtgcggaataatccgacatcttttgttgacaatgatggatgtgtttctgccaaattaacagattcagattttcagtcgtctctaccagaaccagctataatttatcgtcgagggcaagaatacagactgacaagaagcgtaagtgtgccaaatatatgggctgcgattcagaaaaatgatggtgaaaaaaaattcatcggatatcatggtacaaatgaactatctgcaaaaaatattcttgagaaagggttggatattgatatgattccccatgggcaaatagggcaaggattttatatttcgaaagacagatacctagctgagggctcctcagatccttcaggatctttaaagaaattcgagattgacaaaaatattccattttataggaaaatacagaatatcaccctcaatttacttggttctaattttgctcaatataaattcaaaccaaattatccagatgatattacccccgtattattgaaggtttatcagcgtcagcaagttgttcactcccaatggaacagcatgctttccgatgacctagacataataaaatattctaaaccagaagaaagaaagagagtagcaaacgatacgatagaaaatatgaggaaaaatcttcagatggttataccttctgaagaattcaataagctatcgatatacagagacgatggtctaaacgagacgggggcatggtatccggcaagggaaagtcacgtcccacaattacaccgaacagatatttcaagtcaagatagtcccataaatacaaatatgatcgatataaatagcatgatcagaaaaagatttaataaaatggttggcacgtatcgtaaaaatttaacataa

SEQ ID NO: 449152 - DNA, 1269 bp, Serratia marcescens
atgggggcgggaatcttgttgccgggagtgactgatgcctctcgcagcgatgtcatcacccttacggaacgtgaagtaccgaccggggggctaacgttagaatcccttctgagcggtgacggtcaactcggggacgggaacaagtatactttcaccggacaacaacaaatctggtacctggacggtcagggtaaagtgacgaatgggacaccggcttttccgccccttcgggcctttaccgaaaccgcggtgcttgatgaggataccgtaagtttactgtctgataatcttcctgaaaatgcgcttaggtccgctggatattgccggtctggatatcttttcccacgtaccagtgagtcagaccggaccctgtggacggtccgtcgggagtatgcctcgtatgcaactgccgagcactttcggctgccggtatcgttccgtgaaaacctgctcaccggcgccgtacaggtgacccgcgatgcgtacgactgcgtgataacaaagctgcaggattcagccggactgaacactaccgcacagtatgactggcgttttctgaccccgagctgcgtgaccgatgcgaacgaaaatgtgcaggcggtcacaatggatgcgctggggagggttacctcacggcgtttcagcggcacggaaagtgaattggcagcaggctatagtgatagagcaatggaactccctgaagatgctgacgccgcgctcgcacttgttgcacctatttctctgacgcagtgtctggtgtacgtggccgacagttggacacgtgatgacgcggaaaaactgccaccacatgtagtgatgttgaccaccgaccgctacgatactgatagtacgcagcaaattcggcagcaggtgacgttcagcgacggttttggccggttactgcaggttgcgatccgtcaggcggacggagatgcatggcagcgtacagatgacggctcgctggttgccgggccagacggtgctccggcaacgtcggccacaacatttcgctgggctgtcaccggacgggtggagtatgataacaagggtctggctgtccgcacgtaccagccgtatttcctgaacagctggaaatacgtcagcgatgaccgcgctcgtcaggacctgtatgctgatatccacttttacgacccggtcggccgtgagtaccaggtgcagaccgcgaagggatggcttcgccgcaatcttcacacaccgtggtttgtgctcagtgaggacgagaacgatacccttgaagaaacacactga

SEQ ID NO: 449153 - DNA, 432 bp, Serratia marcescens
atgccggttaatggttgggggagggcacagcatacccttcaggaggcgggcattacgctccctgtgccgggcacgaatgcgcaggttctggtcgccttcagcgatatggccggcagtggccagcaacacttggtggaagtgcgtgcgacaggggggcgctactggccgaatctgggccatggtcgttttggtctgccactgagcctccccggtttcagccagccggccgccacatttaaccctgaccgactgtatctggctgacattgacggcacaggcaccactgacctgatttatgcatggagtgaccggctggaagtgtatatcaaccagagcggtagcagttttgctacaccgttcagcgtgagcctgcctgagggcgtacgctatgacggcacctgcagcctgcaccggtcgtctggccgtccatag

SEQ ID NO: 449154 - DNA, 1011 bp, Serratia marcescens
gtgtcaccctcctgtgagcagatttattggcaataccgcacggaagataaagcgggctgtgatgcgacagaaaaatctgcccacccggatgccacagcgcagcgctatcccgtcgcggcctggtacggcaacaaaaaggccggccgtacgctgcccggctttataaaggcgccggaagccacggactggttgtttattcttgtgatggattacggtgagcgacacacgagcccggtcaacgccccgcaatggttagcgcctggtagcggaaactggttatgccggcaggactgcttttccggttatgagtttggatttgaggtgcgtacacggcgcctctgccgtcaggtgttgatgtttcatcgcatccccgaactgtcaggagcggaaaaagagacgactcctccccaactcgtgtcctgtctgcggctgacgtataacgaatccccgtctgtcaccaccctgaaaagcgtgcaacagatggcgtatgaaccggatggagttgtacgcagccttccaccactgacgtttagctggcagggcgtcccccccgccgaagccaccgactggcaagtgcgggatgacctggtaaaaatgaacctgcatcaaccgtatcaactggttgatcttaacggagaaggcattgccggtattctgtatcaggacaatggtgcatggtggtaccgtgcgccggttagacaggcggaggataccaccaatgcagtgacctggggaaaagcgacggccctgccctccattccagccctgagggaaggcggtattctggccgacctgaacggcgatggttatcttgagtgggtagtcgccgcgccgggcacctccggctgttatgagcgctcccccaggcaggggtggcggcacttcaccccactttcagccctgccattggaattcgcccatccgcgcacaatgctggccgatatcactggtgcaggcctggcagacctggcgcttatcggaccgaaaagcgtgcgcttttatgccggttaa

SEQ ID NO: 449155 - DNA, 231 bp, Serratia marcescens
ttgactgataaaaccgcatccgtttccccgggaaacaccacctcagcgctcagccatctggcgttctgcgccctggcagcgcttgggctggcgcgccaggacggtatcgccggcacgccctatgccgaaaacctgttcctgatccgctggctggccaccgcccagaagcaaaaacgcttccccaggagcgtcgcgattgacatccagtggttactcgaccgctggccgtaa

SEQ ID NO: 449156 - DNA, 186 bp, Serratia marcescens
gtgcatagcccgatccaggcggcgatgaacagcgtaaacagccaggggtcgttcaggcagtggccggcgatcgccaccgaggcggcggcgcccaccaggctgccgaagatgcggccgatgcttttgctgatcacgccgccgatggtggggaagctgaccaccgcggcggaggtgagcgcccaatag

SEQ ID NO: 449157 - DNA, 159 bp, Serratia marcescens
atggtcaccaggatcgggaacaggaaggcgcagaacacccagaaatcgtcaatctggatcatcaaaccgaatttcaccacgaagcaggcgaccgagagcagcagcaccgccttgagcaaggtgctgacgctgttgatcggcgaaggcgtggaggagtag

SEQ ID NO: 449158 - DNA, 597 bp, Serratia marcescens
atgacaagaaagttaaaagtgggactatttgagtgtgaaggtttttttggcctaggggtgaaaaaaatcatgtcggaacatctgttccacctaaattttttgccaattttttcttccgataaagagcataacgatcttgatatagtggtgataatgctttcaagtaaaaaaatcatctatccatgccagtttttaatggggtttaactttgttagactgggggggatagttatttatgaatcacatgataaaaaaattcagaggtatacatcctgtttacatgaagttaatgctatgaacgtcagagatacacctgacatgctagtgtctctgctgaataaagtgctctcggaaaagcctgttgaaggtgcgttcataaaagagctttgcccatactgtaagccggtattgacagcggcagaaaggtttgtgatgcatggattggcaatggggcactcagccacctaccttgcagaaatgttaggattgtctcccaaaacgataagtgcacataaacgtaacggcatgaaaaaaatgggcttgcgccgtaataccgagctttaccactggttaaattgtggcggtttggattactaa

SEQ ID NO: 449159 - DNA, 600 bp, Serratia marcescens
  misc_feature (551)..(560): n is a, c, g, or t
atgagtgatgccaaggtaacatcctttacggtcagatcgttactgggcgatgcatctcgttatcttatccctatgtaccagcgtaactatgcctggggagagggtgaaatcactcaacttgtgcaggacatactcgactaccagcaaaaaagcctgcatagtccataccctcaaacttactacatcggcactttggtcgtattcactcgtcctgataggcagtcagagataatcgacgggcagcaacgtttcactaccctatcccttcttgctagctggttaaaaaaacatgcgggatccacgctggatatgagctggtaccaagggattaacttagggtttgagagcagacctaagtctggcgaaacctttgctcggctctggcaaggtgtggaaccgcataaactgcggagcaaagagtttaatgacaggctgatcaatggctatgaacttattggcaagatactacgcgacttgaaactggttggtgagtcattaaaccatttttgtacctatctgttcgaccatgtacaaattgcccgaatagaagnnnnnnnnnncgctcaacaagataacggaccagcaagatcgacagcgtag

SEQ ID NO: 449160 - DNA, 297 bp, Serratia marcescens
atggatggctataggacattaccagatacatcgttgcataccttcggtaatctcagcctgattagccacagcaagaattcgcgacttagtaatttccagccaaaacaaaagcaagagcacttcgaagcgagtcttgaacggaatgaaattgatagtctgaaactgctcgccatgatcgagctgatgaagaagaacaatcagtggggggaagaagaaatcgccactcacgaagcggaaatgctggcagtgttaaccggtgcaggtggtagtgatagcgtatttagggaggtgttatga

SEQ ID NO: 449161 - DNA, 1074 bp, Serratia marcescens
gtggccggcaatatcattgcgccagacatcccaagcacattccggaccggtacattgccgttccagtggcgtcccagcgtcaagcagagtaccgataccggggatgttagccacaaactgagtattggtgtacgagccgggcacgtaaaattccgcagggatatctgccggggcaaccagcattccggggccatctatggcgtctctcagattgattttcccccagccgaaacgggcatcgatacccggtgcgcccatgtcggtggcggtagttttcagcacggtacttatttgctctgccgtcatgtaggggaaacgctgcatcagcacagccgccgctccagtgacgtggggggctgccatggaggtgccactcatttcctcatagcctggtgtcacactcagctctcccctgttcagcgccgcttccgtaatgagggcgccagtgttggaaacaaagcgccctgttgtactgtaaatatccgtaccgggtgctgcaacgcagtagcttgcggtgtgcccgcaacttgtggaacttacattcaagtcgtcattgggcgtcaagttagtgacagtcaggtaacgctccagtacctctggaaaaatgtaaggcagggtagcatcactcgtcggcacattgtaattattctcgttgccggccgcgaaaacaatcagtttgccgttgcgcgcagcgcgcaacatacctgcatagccggcaatatccagatcttcatcagatatagttgtgggaataggattctgactgaacgtgtcgatacgctctcggagaggggccagaaagttaatcagagaagccggactgagccgttgatacttccaggtgccattaggaagagacaagtcgttgccggcggcatctttctctatgggaacattatcaccccagctattgttaattacccgaacgttgctctgagccatgtactcttgctgattatccttatcgggaatgcggcctgcagtgagggtagctccgaacgcaacgccatgcatgcctttaccctcgcgggcggcagccgcaataccggccacatgcacgccgtgcccttctaa

SEQ ID NO: 449162 - DNA, 294 bp, Serratia marcescens
atgcgatggcggagattcatcagcatgaacaacatcaccaatagcagtgatatgcatgcctgtaggaagacgattggcaacctgaagcaaaacatcaaatcctttttgatagtcaaaccgaccaacgtaaaggattttaatctcgtccccgtgcactgtttcattcgtctcgctatcactagcttttggcgcaggtatgccgttatagacaaccctgcacttactttctttgattccccaccttatagcttcattcatctcataatagcttgtacaaaccactcggtcagttaa

SEQ ID NO: 449163 - DNA, 201 bp, Serratia marcescens
atgccggaggttttgctggatagcgctttgtacttcgatccctataatatcgatgatatagcattgcatatgaaagagttgatcgatgatgagaacttgcgaagcgaattgagagagaaggggtatcttaatgttaaacgcttttcttggtattcctcggctagcaaagttaacgaaattatcaatgagttaattccttag

SEQ ID NO: 449164 - DNA, 522 bp, Serratia marcescens
atgatcgcattcaatgacgttattccgatacttaatctgtcggtgttcaacgtcaggcgggtatcggccttcgcgtttgagcagtgcaagcgcatggccataggtaggcgctttatccgtgttgataaaacgcgggatctgccacttcttcacgttgttgaagattttacccaggaaccggtatgcggctttgctgttacgacgtggggagagataaaaatcgacggtgcggcccctgttgtcgacggcacggtaaagataagcccagcggccattgaccttcacgtacgtttcatcaatgtgccatgggcaaaaatcggaagggatatgccaataccatcgcagtcgcttttccatttcaggcgcataacgcttaacccagcgataaagggtggagtgatcgacattcacaccacgctcggccagcatctcctgaagctcacggtagctgaagccgtatttacagtaccagcgcaccgcccacagggtgatgtcacgctgaaaatgccggcctttgaatga

SEQ ID NO: 449165 - DNA, 954 bp, Serratia marcescens
atgccagcaggcacgattacccttaaaaacaactcgtcagcggttaccggtagcggtactgcgttcagcacagaactcaaggccaacgacttcattgtggtcaccgttggccagaccgtttataccctcggtgttaagtcggtggaatcgaacacggcgctaaccctggtgcgtaatttcgatggaccatctgccagcggcttggcatggacgccaatcccctatggggcgatggtcacgattacagcgcagacgcacgcttataccgcagaggcgttgcgtgggctactgctggataagaagaactggcaacaggtattcagcggcaccggaaacattacggtaacgctgcctgacggcagcacttacaccggcccggcctggaacagcttcacgaccgcgcttaatctcaaggccgacaaaacagaagtagagaaaaaagctgataaaaccgcgctggataataaggctgccaagggtgagaacagtgatattacatcaataaagggccttacaactgcattgagcgtggctcagggcggaacgggtggtaaaacccaacaggacgcctgtaataatctcggtgttaaaataacgagaattggcgatgccatattaacgtcgattggcggaaatattgtaaagcaggaaggcattattggtgcgcaacaaccggttggagcatttaactcgcagaacataggtggcgtcacctggtacacgcatttctattcgtttagcctgcccgcagcttttccaaatgccgttgtgtcatgcgttgcaactctggtatctccgcgcggcgaccaacaagcggcgggaacaccagcattcattgcctgcacccgtgataagaatggtggaggcgcttcaagagatgcaataacagtttcaataacaacgcctgtaacaggatggtatccgtattttaatttttcagcggagggatattaa

SEQ ID NO: 449166 - DNA, 954 bp, Serratia marcescens
atgccagcaggcacgattacccttaaaaacaactcggcggccgttaccggtagcggtactgcgttcagcacagaactcaaggccaacgacttcattgtggtgacagttggccagaccgtttataccctcggtgttaagtcggtggagtcgaacacggcgcttaccttggtgcgtaatttcgatggaccatcttccggcggtctggcatggacaccaatcccctatggggcgatggtcacgattacagcgcagacgcatgcctataccacagaggcgatacgcgggctgctgctggataaaaacaactggcaacaggtattcagcggcaccggaaacatcactgtgacgttacctgacggcagcacgtttaccggccctgcatggaacagcttcatatctgaattgaatttgaaggcggataaaacagaagttgataaaaaagcagataaaaccgcgctagataacaaggcagcaaatggtgacaatagtgatattacatccatcaaaggacttaaaacgcccttgagtctgagtcagggcggaacgggtggtaaaacccaacaggacgcctgtaataatctcggcgttaaaattacgaggattggcgatgccatattaacgtcgattggcggaaatattgtaaagcaggaaggcattattggtgctcaacaaccggttggcgcatacaactcgcagaacataggcggcgttacctggtacacgcatttctattcgttcagcctgcccgcagcctttccaaacgccgtcgtgtcatgtgttgcaactctggtatctccgcgcggcgaccaacaggcagcgggaacaccggcatttattgcatgcacacgtgataagaacgggggcggtgcctcaagagatgcgataacagtttcaatcacaacacctgttacggggtggtatccctattttaatttttcagcggagggatattaa

SEQ ID NO: 449167 - DNA, 804 bp, Serratia marcescens
atgcctgataagtacggtgtagagctttttaatgatagaaattacgttgttgctaatgccagtgacgtgaattacaccctgcggagcgccggacaaattcacaactggcagttcaacccgcccaatgccaacagtattgccgcattttgcggagttgacctatcgccatacaatgcaccgataatgtttttcaagccgatgcgtagcgaacagcgcatagggtgcatgactggtgatgaaagggattggcaggtgtcagctttagggccaaccaagaagatgttcaaaataatgaagtggggaaacaaggatatcgggagcgttcagtattatatttttgacaggtggatcccgccggaaagatcttcatatggcattcagatttctgatgcagcaggtggccttatttttgacagcggctggatgtttatgaagatacggaatgtaatatggatggacccaggttatccaaaccataccggcgatgatccggaggttggaactaactggaccgttgtaggtagtgctggcgcagggaacttggcgatggcaatgccaaaccctagagggtggattcaaagaaactggaatggcgacggctggatgatgtacgagtgttttcacttttcggacgctgacaacaagataacggtttcattggttcctcgaggggagtacttatggacgccgccggatggagggtgggcgaatccaaataccaggtcgcagataatggttattgaagttgatgggctcccaactaattactttgatgcgaaaatagtccccggatttacatcttaa

SEQ ID NO: 449168 - DNA, 696 bp, Serratia marcescens
atgataaataaagaaatatccatagctactgttctactggtgatattatatatcggtgggtatatatttagtctaggttactcaggatattatggatatccttctgaggttatatcaattgatgttacctttcttttgagaacaagcttccagttttttttggttattgtttcatttgcggcaattctaaatgcaaaaattgaccataaaaaaatgaagaaatggaaagtggttgttttttatgttgttatttttgttgcggttctattcccgtttgtgagctttaataattcatcttacctgtttcaatatgggtataaagattacttgctgatggcgctggctcttgctttattggttttttatttgtttttttctttaaattctttttttgaaaataaactttcctttacgggtgcgtttcacgttatatttactgttacggctttagtatttgctttttattgctctggttggatatcagcaaacaacacaaatagtatgttcaagttaggtggtaataaggttctccttgctagctatggtgatacatacgtttggggtaagtgcttaaaagagaactcagaatattcaattacaaagcagggggaaccaatggttttgaaaaaggttagcagaattgactctgaacaattaaagatctgcttcagaagatctaagggtggtgggttataa

SEQ ID NO: 449169 - DNA, 870 bp, Serratia marcescens; identical to SEQ ID NO: 15677

SEQ ID NO: 449170 - DNA, 771 bp, Serratia marcescens
atgactgatttagtcgatctcggtatcactatcgtttccaacaactcccgagcgatctcacgcgcgaagagcgttacagcgccaatcatgcgaggcctggaatatctcaatttttattgtggtgacacaggaaacctgacgagaaacttagtgcgtggtaagcccgcagggcgggtgatcggtaagccgataccgcatggcacctataccacgtttaacagttcaactaactacatcgatagtggcgttgctcatactgattcgatgaccatgatctgtttagccaaagcaccaaacccgaaagaagaaagtgttttaatgtccaacttcaacgggatcgcacctggcggtggagtgagtcaaggcacggggatgatgtttcgccctaaccaattttattacaacaacgctgtggttaatgccgacggttcaaaatcattgttccaatcgtccttagcgtataacccaggaacgtgggcgttggccgagtcccgaagctcaccacaacttaatggtggtaacgtctggctaaatcaagatggcacctctaatgcagtcgcatatggactgcctgccggtgcccgtgtggatattggcgggaatatcatggttggatcgttgggcggccttttgggctcggtgaacggtaagccttccgatatcgctatggccgcaattttcagtgttgcattaagcgcagatgaagttgcaaagtttcgcgcgtgggtgcgggaagtactgaagtaccagtttgactggacgccattctaa

SEQ ID NO: 449171 - DNA, 564 bp, Serratia marcescens
atgaaatcattagaccaaaatgaccactttataaaattcccatataaaaaagaaattcgtgaaaatggtgatatgaacaatggagggttcgatttaataaaatctccagaacgcatatcagaaatacatgaacttgaaggcgccccttggctctataatttcattgagaagacaaattctaaagatggacatttcatgactttcgggtgtgtctatgggcggaatgaggataatggcatgatgtacggatatgtagatttttcatttcgtccagatgccccattagcacttagaaaagacgttggcttgctagagggtatgttttaccaatatcttctcgaagctatggtttcggcgggcgagaaaaacccttatcaggccattgaatatgccaagaactgttttgtttgggagcacactcctctggaaatttatgagcaaatctattcaaaattgactgtagtattccgtgctccaaatgacgatgttgctgattggtctcttggacaccttgagtattttttaaacgttgcttacccaaaactacctcacgtgagaaattga

SEQ ID NO: 449172 - DNA, 486 bp, Serratia marcescens
gtgtacagcgaaatcaagaagggcagcacctttatcgtcagcattccggtgcagatcagtgaagacgaacgcgccgacgcgcccgccgccgccaatgcctctctgcagcagaagccacagcaggtgctggtggtggatgacaacaagtcggtgggtgacgcctttgcggcgctattggacaagctgggctaccagcacgaactgtgcgactcgccggagcgcgcgctgcagaagctgctcagacgcccttacgacgcgctgttgctggatctgcagatgccgggcatcgacggcgccgccctggccaggcagctgcgcaaccgccgcggccccaaccgccatgtgccgatcatcggcatcagcgcctacacgccggagcagctgacggcggatcagcgcgccctgttcgataactacctgatgaagccggttcggctggatgcgctgtcaaacgcactggccgaggtgttccccgctaaagattaa

SEQ ID NO: 449173 - DNA, 327 bp, Serratia marcescens
atgttgctcctgctggtggcgtcaatctgcctgggtggctacagctcgctgttgtcgcaccggttggacctggcacgccagcaggctgcagaacagcagaaggcgctggcgcagcaggcaggactgatcaccacactgcgcgcggatgacgcccgcaatcgcgcaatgatggccgaacagcaacggagagagcagcagctgcgccagcagggcgaaaactaccagaggaagtatcgcgctgcactagaaaataatgcctgcgctagcgctgtcgtacctgacgaggttttgatgctgtttcaaggagtgtccgatgaaggtgaatga

SEQ ID NO: 449174 - DNA, 546 bp, Serratia marcescens
atgaaggtgaatgaggcagggttaaatcaaagtgagttgaagaaaatcctcaaatatgactgcgaaagcggtcattttttttggctcaatcgccctgagtctgattttaaaacaaggggcgcatggaagtcatggaatgctaaataccctgggactactgccggcacactgattgcctcaggctatataaaaataaatatcagagggaagattcatgcggctcatcggttggcatggctctacttatatgacgaattcccgccagaatttatagaccatatcaatggagaccgtgctgataaccgcttggtaaatctgcggttggcaacagcctgtcaaaacatgatgaatgtaccgcttaaagcctcaaatagcactggcgtgaaagggctttggtttagacaggaaacaaataggtggattatgtacgggaaagccaataggaagacatattggctgggggcattcgataacatcattgatgctgttgctgagcgccgcaggtttgagaggattcaccatggtagctttgcgaatgctgggtaa

SEQ ID NO: 449175 - DNA, 903 bp, Serratia marcescens
atggctcagctttcgacagccgtgatacactcaatatgttgcaggtttcgattaaggagtttaattgtgacgcctctagaccataagatttgcgatttggcacatccagatcgaactgtttcggaagtggctgcgttagctggttgtgaccgtagccatgtttaccgctgtatatctcggtacgggttaaccctgaaacagcgtcaaaagccagccccgcgggaaagcgcgaaagacaaaattcttgctcttgccgatggctgcagaacgtcagcagagatcgcagagaaggttggttgcacagaaaagcacgttcaaaacgttctccgagttcacaatgctgatcgcctacctcaaggtgcccgaagcggggagcaaaaccacggctttcgcggaggccgaattgttgatctggatgggtatgccattgttcaagcgccggcgaatcatccacatgcgcgccgtaccggcctgatatcagagcatcgtatgattgctgagaagaaactcgggcgttatctgctgccgacagaagtagttgaccatatcgacgggcttcatctgcataacgccccaagcaatctgcgagtttttgattcaaacgcggatcacctgcgtgcaacgatctcgggacagaggccaaactggtcagcagaaggctttgcgaagatgcaaataccttcaccgattcgtccaaactatccacagatcgatagctaccgtcagcgcaaagaatgcggtgatgtccgcttgctacaaattctcctcgctgcgtcacaactcggtatagattcgccataccttttgggtacgcaccaccacttagcgaaagctcaaatcgattattctcggccgaccacgataaaacgcgcattggccgatctatttcctgaatgggcataa

SEQ ID NO: 449176 - DNA, 1389 bp, Serratia marcescens
atgcctgatatttcaacacctaatctcgattataacgatatggtcgaagcctgggacatcaacgatgcgttgatgggcggcacgctttatatgcgcaggctgggcgaaacatatatgccccgctggccaaatgaagacaaggaggattataagaagcggctggctgttgcaacattgcttcccgcctacgaagagacgatcaagcaggatattggccgcgtgtttgcagagccgactgttttaagcgaagaaatgcccgagcagataaaagagctcacaccaaatatcgatctggaaggaaataggctcgatgtatgggcgcaggagttcttttctatcgggtttcagtatggcctggctcatgctctggtcgattttcctcgcgtgaacccggatgaggtaaaaacgaaagctgatgagagggccgccggcagtcgcccatacgtcaccatgctcaatcctcgccaggttatcggctggaagtcgaaggtggtgaagggaaaggtggtgctgaccgacttacgtatcaaagaagtgatcatcgttgatggtgatgattacggacagacaaaagttgagcagattcgccacatcatgccccgaaaggtggaaatttaccgaaaaagcaaaggcgattctggtgagagcgtttgggctattttcgaggaatgggaaaccagtcgtgatgatatccctctggtgacgttctacaccaaacgcactgggtttatgcgcggctctccaccgctgctcaatctggcgctactgaacatcaagcactggcagagccaaagtgagcaggacaacattctgcatgtcgcccgggtgccgatcctcagtgtctatggtcttgaagaagggcaagagttaaccgtgggggcatcaagcgccgcgcgttttgaagataggcaaaaacaagggatcgagtacaccgagcatacaggctcagctatcggggccggtaaaacctccattgacgatcttgaacaacaaatgcggcaggctggcgccaagttattgcgcgcagaaaatacctccacaaaatcggtcgatcagactaacgaagaaaaaatgcaggagaactcgccactattcacgatggcgagctccctcgaagatgctctcgataatatcctgcaaataatggccgaatggctgagcttaccttcgggcggtaatgttgatgtacgcactgaactggagacggaaacgcaatctgttgacgcacaatcagcgttggcgatccagtcattgcggcagggcggagacattcgctttattgatgctgtgcgcgcttaccagcggcttcgtatcattgacccggacgcgaatcctgaagaagtaatggatgtgctgataaatcggcctcctgatttaatcaaggagtag

SEQ ID NO: 449177 - DNA, 753 bp, Serratia marcescens
atgaaattgaaagttgatgcgaatggccatgtggttgtcgaaaacggcatgccggtttatgtccatgatgatgggaaagaaattgcctttgacgctgcgcaggccgtcagcaaaatcagcgagctaaatggcgaagcgaagaaacatcgggaggcaaaagaagccgcagaatccagccttgctaaattctccggtattactgacccggctaaagcgctagaggcattggaaacgctgacgaaaatcgaccagaaaaagctgatcgacgccggcgctgtggatcaagtgaaggctgaaattaccaagtcgttccaggctcaactggatgaagcagcaaatcagaacaagaccctgcaggatcagctctacaaggagatgatcggcggccgtttctctggctccaaattcatcaccgataaaatggcgatcccggctgattttgttcaggcgcgctttgggcagtccttcaaaatcgaagagggcaaggttgttgcctatgacccttccggcaataaagtttactcgcgggctaagccgggcgaactggccgatttcgacgaggcgctggagtttttggtggagcagtacccgcagaaggatcacatccttaaggcttctggtaattcgggtggcggttcgcagcaatcgcagcaccaggcagggcagaaaaccatgaagcgcgatgcattcgattcgctggatatcaccggcaagaacgcagcgctgaaagacgggatcactatcgtcgattaa

SEQ ID NO: 449178 - DNA, 1140 bp, Serratia marcescens
atggctggaaatactcttaccgggttgatcccgactatctataccgctctggacgttgtttcacgcgagcaggtcggttttattcccgcagtggcacgtaacacgaaggccgatcaggctgccaagaaccaaactgtaacagcgcccgttgcgccagtagcacagacggtagatatcaagccaggtgctggcgcgcccgacgacggcgatcagaacattgggagtgttgatgtaaaaatcactaaatccaaaatggcgccggtcaaatggaatggggaggagcaactagcacttggcccagcgggtacttacaacaccattctggccgatcagttcaaacaggcgttccgcgcgctagcaaatgaagtcgatgctgacctgggggctctctactatggtacttcgcgtgcagttggcactgcaggaaagacgccgttcggtgtgaaagaagatctatcggatgcggcgcttgctcgacaggtactgtccgataatgggtcaccaactacagatctgcaaatggttctcggttcctcagcaacagcaaatttacgcggaaaacaatcggtacttttcaaggtgaatgagtcgggtactgagcagctcctgcgtgaaggggttatcggccgtcttgaagggttcaatatccacgagtccgctggcgtagcacgagttggggctgctgccgcagcgggttatctggttaatggagccaagaaagaaggcgacattatcatcgctatcgataccggtacagggagcatttctgccggccaggtggtgaagttcgacggcgatgaaaaccagtacatggttgctgctgccacggcgacagcgatcacactggctgcgcctggcctgcgtcaggatttggcggatgatgcaaaaatcaccgttattggtgggtttaccgcgaacatggcatttgaccgtaacgcgttcctgttggcagcgcgcacgccagcaatgcctgaaggcggcgattccgcggatgatgtgatgaatgttaccgatccggtatctggaatcaccttccaggtggcgctgtaccgccagtaccgtcaggtgcgctatgaagtcggtttggcttggggcgtagcatctatcaagccggcgcatgccgtaacgctgttgggttaa

SEQ ID NO: 449179 - DNA, 264 bp, Serratia marcescens
atggctggattaacgaaagaacagcgtgcgttgcgtatcgcagaaaagcttgctgctgaacaggcgaaccaaaacaatcctgagcagcaggagcagcaggagcagcaggagcagcaggagcagcaggagcagcaggagcagcagtttgaattggtaactatggttactgattacccagctttccccggcgcaccaacggttgctgacgtacatcccgccgaggtggaaagctggaaatcatccggctggactgtccgggggtga

SEQ ID NO: 449180 - DNA, 228 bp, Serratia marcescens
atgaacaacattgcaaaagagcggattgctcttggcctaacccaagaacagttcgcaaccatttttggctggaggcagtcccgcatttcaaactatgagaatggcacacgtaaaccaggcttaaccgaatgtcggctcattgttgaaaccatgaatcgcttagggagtgagtgcactctcgacagccttttccctccagagcctgaacttaaaaatcaggaggcttaa

SEQ ID NO: 449181 - DNA, 138 bp, Serratia marcescens
atgcacgtattagatttccttgtttctcatggcgagcttattaaggaatgtattttttactggggatgcttctcgctacccatctttgcaattttcctgacattgaaagtgtcgggctacttccggtttttccggtga

SEQ ID NO: 449182 - DNA, 330 bp, Serratia marcescens
  misc_feature (317)..(326): n is a, c, g, or t
atgtcctctaatattgttatctctgcgcaaaatctgcgtaaagtttatcagatttattccagcccgatgcagcgcctgggagccttgctggggtatcggggggctaagggtagggagtttgtcgctctggattccgttaatttcgagattagaaaaggtgaaacagtcggtattattggtgtcaatggttccggtaaatcaactctgttgcaaatgatctgtggaactttggcgcctacaagcggcagcgtatttactaaagggcgtattgcaccgttgttagagcttggcgctgggtttaatccagagttcacagnnnnnnnnnngtga

SEQ ID NO: 449183 - DNA, 765 bp, Serratia marcescens
atgtttgcacgtttagcctttgccactgccattcatgtcgatcctgaaatattaatcgtagatgaaattcttgctgttggagattcacgctttcagcgaaaatgtgtaaagaagtttaatgaaatcagaaatgatggatgtacaatcctgttcgtttcgcacgatgattatcaggttcgaaatatctgtaatagtgcactataccttgaaaaaggtgtacagcgttattttggaaatgcagatgttgctgttcagcattacctttctgatatgcagaagagtgtgatggagactcaagatgccgaaaataaagctattgaaaatgaaataagtagcagattgataaaaatagctaatgtatctcttctcgatcggactgggaattcagtaaccgagctggctagcggtgacaatgttaaactgtctttcgattacaaatatgaaggaagtgacggggaattcgatgggctgacctttgtctttaatctttaccgtaaagatggggtatatatctgtgggacgactacagcaatgcgtggcttagaaccattttccctaagtcgggaaggacgagtgactattgattttcccgcattgaagttgttgtcaggtatttataactggcgagtcgctgtcaatgatcaagatggtatacagataattaacgaagctgtaccggtctgtgagttttctgtagccgataacttcagtgccgttggaatttatgatattgaacatagctggtctgtggtggccaaggggtaa

SEQ ID NO: 449184 - DNA, 222 bp, Serratia marcescens
atgagaatagagttctacaagctgttgatcgctcacacgccccaaaaactgtatgttatcgttccttgcagttccttccgtcgaaaacccaacatccgcgaaattcttgttggcggccccaatgattttcagcgtcacatcctggccgtttgccatttgagagaaagcggcaatcagaccatgaaagttcttatgataatttggagacgaaacggccaataa

SEQ ID NO: 449185 - DNA, 522 bp, Serratia marcescens
atgtgcgccaccatcccaggctttaaaaaatacatgtccacggctcacatcgacgggatccgctttgcattttttagcgggcgggaaaatatcggcatcgaagaattcgacatggccaaaggcgccaatgaattcgtgatcatgccgataatcgagggcgccaagcgtggcggtgtgctgcaggtggtgatcggcgctgtggcattggtggccgcgttcttcactgcaggtgcatcgatggcagcctggggggctgcactttccgccggcgctatgtcagcaacaactgtgctcaccgggatcggcatcagcatgatgctgggcggtgtggtgcagttgcttacgcctcagcccagcatgaacgttggcgcctcctcaagtaccgacaacaaacccaactatgctttcggcgcgccggtgaatactgtggcgatggggtacccggtaccggtgctttacggcgaacgggagatcggcggggctatcatcagcgccggcattttttcaagcgaccagcagtga

SEQ ID NO: 449186 - DNA, 477 bp, Serratia marcescens
ttgctgcagcacccacaacgcgcggtcgaggtgagctatttcggcatcgacgaggaaaccggcctcgagctgcgcgtacgtcccgatctagagattgaggccggcggcctgcgtaccggcttcgacctgaaaaccgtcagcatgggtaacgtcaagcaaagcgccctgcgcgcccgcctgcaccgtgaaatcatcgagcgcgattaccacctgagcgcgggcatgtattgcgatgttgcggcgctggatcagttcttctggatcttcgtcaacaaggatgagcactaccactggatcgccatcgttgaggcctccgctgacctgctcgagctcggccgccttgagtaccgcaaaaccctgcgggatatcaaacaggcacaggataccggcgtgtggccagaaccgatcaccgaagaaatcgtggacgacattaacgactttgaccagcgccgcatggaagcgctgcgcgtagcctaa

SEQ ID NO: 449187 - DNA, 315 bp, Serratia marcescens
atgaaatgcgatttaaagattggtgtaaacgtcgacacctcagaccttgataaagtcgaggcgcaattaaaacgtattttggaattacagaaacaagtaaatgacgccaatcaaactaatgacgcctatcaaactgtattcagggttaaaggcggagctgtgttcgtcaatggggctaatattacatctccaacacatcacgccaattctcagaacgatttattgcgaaatttaatcgaagaggcagcaaaggattttctggctaagcagcttcgccccggtggtgcactttggcaggaaattaaaaaccgctaa

SEQ ID NO: 449188 - DNA, 159 bp, Serratia marcescens
atggtggcattcatcgaggaaatcgccgccggctgggcgctgcctgacgagttcaacagcgagaacgtgctggtactgctggaaaactacccgcgcgcgttcgactccatcgccatgacctacacccgcgagctgatggcgatccgtgaaaaaaactaa

SEQ ID NO: 449189 - DNA, 5577 bp, Serratia marcescens
atgaatgataatgaagactcactgtttaagaataataatctttctcttcagcaaaaactagagcgagctcgtacagagctgcttgacttatctgcgcgcaataaactactcaatattcctcgctctaaaacaaccaaactcttagaaattattgatgagaggtctactgagatttatcgtttactggttaaagaaggaaaagtatttacttttctacctgggcgggaaggaaagaaaggggagctaattgatgatgagggcattgtatcggattcggatgatgctcttgttgatgatcggctgcttgtttttaatgatgatgttgatccaaaagcaataagtgctgagcatcaggatacaaaactacaaacaaggctaactccgcaaggtttgcaaaagagattgttggatctttaccacgattctaaaacgttagaagaagaacagggtgtaaacatactctatctgactctcggaaccttaaaatggattgatcccaataataaagaaaatattagatatgcccctttaatcttgatccccgcgtctcttgagcgtggaactgctggtgagaggtttaaactaagggcaaggcaggatgagattattgaaaacctttctctggaggcatatctacagcgaacacatgagattttattgcctaagatcaataccgatgaggagctagatctcgctgggtatatcgatgaggttgctcaggttgtacagacaaagcctgactggagcgttcaagaaaacgacattaatctggggttcttctccttcgctaaattccttatgtaccgggatttagatccagaaaactggccagagaatgacaatatcacagaacaacctcttatccagtcacttatggttgatgggtttgatgagagggatgaaaggatttcagatgatgcacctatagatccttttatttcgccgagggatatgctccacatcatggatagcgacacctctcaaacacttgctattcatgatgtgcgtaaaggaaaaagccttattattcaaggtcctccaggaacagggaaatcgcagacgattgcgaatatcattgcttctgcagtggcagatggtaaaactgtcttatttgtcgcagaaaaaatggctgctcttgaagtggtgaaacgtcgccttgaccatgcgggggtgggcgacgcctgtttagagttgcatagtaataagacgaataaaagggtcttcctggaggagttgaaaagggtctgggagttgggatctcctagaggtgagtttccagacacactggtaggaaacctaacggaggcgagggataaacttaacgagcatccggcaaggctacacaagatatatcatccttcaactttctctccctatcaggtcatggggcatcttgttcgattacgtcagttaggtcaggctccgaccgattttcatctcgaaagatttgaacattggaatgccagcgatcttgagaaacatcttgagcttgtgaaagagattgttgatcgcatccgagatattggtttgcccgctcagcatccgtggagtggtgttggtcttgagcagatattaccaacagatgtagaaaaattacttccacgtctgcaaaatcttgaaagagatgttgtacgtcttaagaacgttgttacaaatctgtctgctgatctttctgttacacccgtaccggaaacattctcttcaattcataaattagttaaggttgctgaatgtatcaataaagcacctgatctgtcagtggaagcctttagttctgctatttggtgtgatagtgcgcctgcaatcaaacgacttattgcagtgggtaagcagtatcagcaagctcgcttagatcttgagatagatatagtaactgaagaaattgaaactccagttaccgaactggaagatgagctggcaagacttcctcgtgattttcaggttaatggtttttccgcagcttgttctctggtgaaacctttatctaagttgcgtcttgatgctgctcgtttacatgaagaactcggtactcagggaggatattacaccattcaggaaatagaaaggctcatcaccttgggggaaagaattgctgccgcccctaatgccagtcccgacgcctttatcgcatccgtttgggatcatggtattgagaaagctgctgaactggttgagtcgattgcctccttcagaatcgttagcgaagctcttgattcccaaattaatgaggtggcttggaatacggatgttcaggatgccaggaatcttctggctagccatactggtattttccgatacctcaatggaaactggagaaaagcgagggggcttgttggttctttactgcgggatcgttcgctgcccgttgagcagcagatcttattgttggacaagttgattaaggcccaggcagagaggaaaaaaattcaggaaggcaatgactttggtcattcagccttcggtagcgattggcgaggtgaaagaagtgacagctcttctttaatggcattagttgaatggatgagaacgctccgtggtgtaggcgctgaggctcggctgttggccagccgacttatcgaccgcgaaggtgtgaagcttcgtgcacaacaactaagtcagttactgcagcaggttcagacccagttagatatgctatggagcgcgttcggtttttcacctgaggagtatttttccaaccaagtatctatcacccgcgtttcattagtcttcatcgaagagaaaatccaaaatctcatagcgattgatgaacaatgctttcgtgtaatggttaaccctcctgctcgtattgaggagcgttgccaactagtcactcgaatgattgcgttacaaaaactaattgcagaaatacgagcagaagccccgcttgcaaaaagcgcttttgacaaacagtggaaagagctgtcatctgattgggattatctgagtcaagcttgttcttggttagaggagaacagtgtattacgtttcgtagcggcaaaactgaaagacagagctgaaattgcccatattgcacgagaaactcacctgtttagccaaaagatagtcaatgaactggaacaaatcgcgacggaattaaaaggtactattgaaacccttttgggttcatcatctgaaaaattaatgatagcgcttgtgtgtgagaaacttcaaacatgggccgagaattcagaacagctctctaaatgggttgcgtatcagcatcgtattacgcaggctcgaaaatatggattatctgaggtagtagaaagactcgctagtggagatctttcgctagattctgctatttctgccgtagagcgaacttattttgagtcgctacttaaaatcatggctctcgaagagcccgatttagtgcgctttgatggtgagcttcattctcgtcaggtggcaggatttgcagagcttgaccttaaacgtatcaaagctgccagtcttgaggttgtgcgtgcccatcatagacaaatcccttccaagagcggcggtattggcccagtgggggttctgcgttcggaaatggtgaaaaagagggggcatttaccaattcgtcaattaatgcagaaggctggagtggcgattcaagcactcaagccagtcatgatgatgagcccgttatctgttgctcaattcctcatcccgggaaaacaaaagttcgatcttctggtcatggatgaagcgagtcagatacaaccggttgatgcaattggtgcaattgctcgctgtaagcaggttgtggtcgtcggggatgaacgtcaacttccacctacacgattcttcgctaagatgacagaatctgttgctaatgatgatggtgatgaagtatctcaggttgctgatatagagagtgtattgggcctgtttgttgccaggggattacctcaacgtatgttgcgttggcactatcgcagccgtcatcaatctttgattgctgtatccaatagtcagttctatgagaataaactcttcatcgtgccgagtccctacactcaggaagcaggcatgggtctgcaattccaccacatccctgatggtgtgttcgaatcaggcggtaagggaaccaatacgatagaagctaaagttgtcgctaaagcaatcatggagcatgcccgtaaatatccagaacagtcgctcggcgttgcaacattttctgtttcccagcgaaaggccattcaggacgaactcgagttactacgtcgtctgaatcctgatttagaagagttctttaatgcgcatccgagcgagcctttcttcgttaaaaaccttgagaacgtacaaggtgatgagcgtgatgtaattatgatctccgtcggctatgccagaaatacgcaaggatacattgcgatgcgttttggtcccctgggggcagagggaggggaaagaaggttgaatgtattaatcagccgagctaaacgtcgatgtgaggtttttgcttcgatcacagacgaagatattgatttggaaagagcaaagggaaaaggtgtatttgcctttaaactattcctgcaatatgcccgtaccggtcggatatcgttagctcaacggaatgaaagagaaatggatagtgtatttgaagagcaggttgctgatgcgcttcagaaagcaggttatcaagtccatcctcaagtgggtattgctggattctttatagatttagctattgctgatcctgatatgccagggcgatacttgattggtattgagtgcgatggccgtgcttatcattcatcacgttctgcgcgagagcgcgatcgcttgcgtcaggctgtacttgaagatcatggctggattatccatcgtatctggagtacggattggttccaccggcctgaagagcagctggaacgaacacttcaggctatagagtctgccaaaaaagagctctcagaacggactgaacaaatgaaacaaaggactcgtgcagtacctgtcgaaattgtgactgtcgatagaggacctgtagttgagattggtcttgtcgattctgatattgcaaaagaatctgagattgcctatgtggaggctactccatccgccaatatgggatatgaactgcatgaaaccccgttgggtattctcagtgaaattattgagcagatagttgagattgaatctcctgttcatgtaagcgaagttatcaccaggttgcgagctgcctggggattacaacgtgcaggggccagaattgaggccgttgtgaacagggctgttaatctggtgtgtaacaaaggtgatatccttcaggatggacaaattttaatacataagaaatcaaagattgttttacgaaaccgacagaatgttcagtcgtcgggactgcgtaaatccgaaatgttgccacctcaagagattgctgttggaatttctcaggtagtaaaaaataaccttggtgcgacagaagaagaaatagttatgtctatttctagatctcttgggtttaaagcaacaagtgggaccttacgtaaagtcatttcagaggtaatagaacaacttctatttaaaggatctcttctaaaagaagaatctctgattattgagagtaaagcaacagttacagagtga

SEQ ID NO: 449190 - DNA, 633 bp, Serratia marcescens
atgggttatatccaaagattccatgcccatattcaaaggcacccttttaattttgtcaagtatattattaattcaaacatagaaaatggtaatgtatcacaagatgtttcaatacaattaagtaagtataaatatgcccctcagtcctttacagataatcgttcacatctgactcttccatttaagcagtttaatgaggaaacactatgtgatgtcatatcaaatttggattcgagcgaagagttggcttttcattcgttaatccaagggtttgggggggggtatcattttccattagttgactttggtaaagtcgatcgggggattcttgataaaaatccgctttttgatttgtcagagcactggggtatgtcattttatatttataatagtggtaggtccttccatgcatatggtaacagattgataaaatcttctgattgggtttcctttatgggagggttgcttttattaaataaaccaagtggttttaaattaattgatgagcgttgggttgggcatcgattgatggcaggttatagtactctaaggtggagtaataatagcaaattttataaaaaatacccgacattcattggtgtgttgagttctgaaggattaaaaacagtataa

SEQ ID NO: 449191 - DNA, 1512 bp, Serratia marcescens
atggaaaaattgatctctaaatctcgccacagaatttctagcgcgagtcatgacactattctcgcctccactcaaagtgatcgtgcaagattgatatattcggcagccttcagaagactacagcaaaaagcgcaggttttttcattagagagcaattcagctgtacgttcaagactcactcactccatagaggtttcacatattggtcgttatattgttgcctcaattattgaaaaaatatctgatgattcaaacattgatggagacgttaaagatttctggctgaaaaataatttggccatatcaaatatagttgaaactgcatgcctgatgcatgatataggtaacccgccttttggtcattttggagaggccgcgattgtcaaatggagcgagtctgattcggttaaggaggcactaagaacagctctttctgaggattattcagaagaaaattgtaataaagtactttctgattttaatcattttgatgggaatccgcaaggtttaagaattataacaaaattacaaggcgatgatgggttctatgggttgaatttaacttacacacaacttgcttcatttattaaatatacgttttgcccagcggatatagataaaaacaaaccattctctaagaaagtagggtatttttcaactgaaaaagatgtaatggaaagtgcttggctaaaattaaacatgaagaagaattctcggcatccactcggctttctaatggaagcatctgatgatatttcatattgtattagtgatattgaagacgggatagagaaagagataattacagtaagtcactttagcgattttatatgtaaaagaatagaaaatttaaaagaaagctataataatgaaaaaataatctgtgataatttgataaattgtttgaaaaaggaaagtgcaattcctgtcggtaatttcatttcctttaaaacgaccctttccaacttcttggttaaaagagttgcagagatttttgttagagattattctttgtttttaaagcaggagcgtaaggaggagataatatcaaaggaaacttttgagtatgagcttttagacattttaaaggattacacctcaaattatctcttcacctcttcagaggcagaatgtatggagttatcaggttttgctattattaaaggaatccttgatgagtatacatccttgataaagctatctaaagataagtttttacatatttttctgaaagaaaacaaagaaattcgtaggaataaccttcatatagaaagaaggttgtttaacagacttccagggaaacatttgaaatcatattttacagctattattgaagagccatttaatcagactgttctagattctgagttgtttagagaaaaattcgaagtggtttctcgagaaaaggagctgtctttgaggatgcatttaattgttgactttgtttcgggtatgactgaccaattctccatggaaatgtatcaacttcttaaaggtattaaggtgaagtaa

SEQ ID NO: 449192 - DNA, 249 bp, Serratia marcescens
atgtactctcaatactggtctgatttcaatactgtgtttttgatcacaattttaggctgttttttaaacagtgcgggctgttttataacgctttttataagcaagcgacagaaagtagcccgccgtgtggcgggctttaaaatcgggtattgcaatacggtggcaggcgctcaggcgacggcgttgatgccggtcgccaaaatgacccaaaaaacgagacaagacagcagaataacggcccaaatatga

SEQ ID NO: 449193 - DNA, 462 bp, Serratia marcescens
gtggataatcagcatctgagttttgccaaagacaagtttactgtcacaaccgatcctgccttttttcagctggatgccattcacgattacctctcgcaatcgtcttgggctcctggcattgatgctgaaacggtcagaatatccgtacagaacagcctttgctttgcgcttttggatggaacaagacaaatcggcttcgctcgtctggtcacagactatgccacttttggctatttgtgcgacgtctacgtgctgaacgattatcagaaaagtggcctcggtcgttggttgattgaatgctgtcacgcccatccgttgatgtcacgcctgcgacggattatgctggtcaccgacagcgcgccctggctctaccagaaactggggtatcacccgttgaaccgaccagactttatctggcagataaatcgaccagacatttatcgtaagaccgaaggtaaatga

SEQ ID NO: 449194 - DNA, 696 bp, Serratia marcescens
gtgttaacagtatctccgtcaattgcccctgaaatttatcgcattgctcccggctttcgggcactcagtatctacgtaaaagctgccccattgcagaaccctgatattggggaaacggcgctgcgagaggcgtgtgcagcggttctggccggtgagtctgaatgggcggagtctcatctggccgcgtgggctgaggttttccaaaagtttggtgccaaacccaaacgcaccccttgttcagctgatgcgttacgtaagcgcgtattacgtgacggtacgatgcccgcgctcgaccccatcgttgatctttataacgccgttagtcttcgctatgccattccggtgggcggcgaaaatattgctgcctataagggttccccacgtctggtcattgcagagggcactgagcctttcgataccgtaaaagagggggaaaccgccgttgagtatccttcacaatacgaagtgatctggcgcgatgattcaggcgtaacctgtcgccgctggaactggcgacaggggatcagaactcgcttaagcgtggaagctcaacatatgtggtttattctggagagcctgccacagatgccactggcgaagcttcacgaagccggaaacatgctgaccgacggtctggaaagaatgatgcctggtctgtgtgttgaaattgctctcatagaagaacagcaccagtaa

SEQ ID NO: 449195 - DNA, 642 bp, Serratia marcescens
atgagttctgcaattaaaggtatcagcgttccggacagccgtatggccagagaagccactgaatttatcagggacaacgaaacagagctgctgtttaatcattcaagccgggtttattactgggcggccctagccggacagcaaagggggctgaaagtagacagtgaactgctgtatattggctgtatgtttcatgacattggactcacccatgagtattgcagctgtgacaaacgttttgaagtagacggcgcaaatgcggcacgtacctttctagaaggacatggtatcgctcctgctgatattgataaggtgtggacagccatcgcactgcataccacaccaggaatacctgagttcatggcaccagagatagcactggtcactgcaggagtggaaatggatgtgctgggaatcgattatgaaaaattctcagaagaagatattaaagctgttacgcggcagtatccccgtacgtcagcatttaaagaggatattattcaggcattctatgacggtataaaacacaagccgcaaacgacatttggtaacgtaaaggctgatgttattaaggataaggaacccgatttcacaccttttaacttctgcaacattatacggcagtcacgctggcaaggctga

SEQ ID NO: 449196 - DNA, 960 bp, Serratia marcescens
atgagtcataccatagccatactggcggtgccgggtgcgcagttgcttgatgtaggcgggcctatagatgtttttgctgaggctaacagaattttaggacgtcaattttaccgtttatatgtcgtttccgtcagcggccctgttgtgcaggcctcgtccggcgtcaggcttgaggcggatttttcgctcgcggatatctcagaacttgcacctgaaacgtttctcattgcgggtgccccaggtatgactggttatacgccagagaacaatgtcctagcgggtattaccgccttatgcgaaaaaagtgagcggtttggatctgtgtgtactggcgcgctgctgctggctcttactggaaaactcaacggtaagcaggtcaccactcactggaattgtgcggaacttctttctatcaggcatcctgaaatagtggtggaaagcgatgctctgtttatcgccgatggtaaggtgcgtactgccgccggcgttacatccggcctcgatctggcactgaggctggtagaagaagatctgggtcgtgaaattgcggccgaggttgctgatcagttagtcatgttctttcgccggcctgttaatcagtctcactttatcagacgcagccaactatccctgaatggccgctcggcgctccaggatcttcagcgttgggcaattcagaatattaaagagattggctctgtttccatgctagcgcaacacatcaagcttagtgagaggcatcttacgcgcatttttcgccaggagatcggtttgactccggctcagtggctggaacgcgagcgcgtttctaaagcgcggttgctgattgaaaaagagaagctgcccgcgaaaaaaatagccgcagaatgcggtttctcaggtccggatgttatgcggcgtgttttcagccgacttacaggtattacgcctgccgcctaccgaaagatggtaagccgataa

SEQ ID NO: 449197 - DNA, 987 bp, Serratia marcescens
atgactgaatttgaagatattaactttagcgaagaatatctagaagtatattgtgtcatggctgaacacaatggattcgtatttgttgaaggacttaaggatattgctttctgggaaggcttattaaacgataaagataaagataaagatatacgctttgatatttgcaaccctgttaataaaggaacaaaagggaaaccagtattaaaaaaattcatgagccgagctaatagatatgccatatttgcgatggatagtgatttcgattatgtatgtcctaaaaacagtacagattcagagatgatttgcagtaacaagtatattttccaaacgtttgtatattcaaaagagagtattgagctacaccatgatgttctggagcattgcctttctcaaataaagctcgctactgaaattaaattcaatttcaaagcatacattacagagtattcacggctgatctaccccgtgctgaagaagtttttgttgcttaaacagcatcaagttagacttgatgactcagctttccacgaagcgattgctccttctaaacctcaattaacgaatcaatttgttatcagaaatgctgtatttgaaacaatgctgcaatctatagcggtttttgaagaagaacttgataagctttttcaagaagaatacgatgctgataaattttatgagcagttatatgagaaaggattgaaagaagataacgcctatcaatatatcaatggtcattttttagctgatagagttgtcatgcctgtcattcaatcactgattgaacaattgaatattaatgaaactgccataatagttacgcaatgcaaggaaaagccaaccttaatctcggaaaggaagcgtgaactaaaaaatattcttgaaactgatttgaatgttaatacgctattaaattgttgcaaagaaaagttcaaaactccttgtgctattgcgatcaaagaaagtgtagctcgagttttagcatga

SEQ ID NO: 449198 - DNA, 996 bp, Serratia marcescens
atggatacgagagtggcgacgataatcaaaaatatagcaatcaaaggtctttttaaacggaaagacattgattggaatctacaagatgtgaatgtcttggtgggtaaaaatggctcaggcaagagcacaataattcaaagtattcatggccttttaaaacaagagttaaatgatagtttaagtaactctgcgttttctcaaataacattagctaatgaaggaacaataacgcacaaagttagttttcgtgaaattaactctatccagcttttaaatttacttaataaccttaagaaaaataacattaaaggtaaagtaaagggcaaggaaattaaggagttaaatgaacttatttctttgctggagtcacaaaaagaagatacggaactacaagaagttgggatggggacagttagcgtaagtgataatattaaaaatactaagcgaataaatgttgagttaatatcaactatcaatatgagtgctaactccatctatgagtttaaaaaaagtgatggcgagcgtaccactattcttgatatggaaatcgctggagaattagaaagattaaagaatactttcaaagtaagtgagtctaaagggatttctattaagaataaactggaagaagcaataaatattttatttgctgaatgtaataaagttgtttcttttgatgatggtaatatttctattaagatgaatgaatctggtgaagatattaggtataatcttctttcatcaggtgaacgtcagttattatatattctgattaaaacggctaatacttcattggaagaatctgtcttattgatggatgagccagaaatatccttgcatctaacatggcaagaaaaattaataagcactatcaaatcaattaacgataattgtcagctaattattgttactcacagccctgcaatattaatgaaaggctggatgaattcttttgtagatataaaaaatatttcaaaggaatcatctcatgactga

SEQ ID NO: 449199 - DNA, 327 bp, Serratia marcescens
atgacgtgggcggaggccgccgcgtgggtatgggggcatgacggcgggaaagagctgccggctgatattaatgctggccagcgaatagaggcagcagccgctgagctgggttttgatgttcagcacgagcccgatgaacaattgctgattctcttccggccggatgaagaaacccacagcttctatggcaaagaccgtgcagcaggcgctttactgtttcttcgttctgagctggcttacgttgccacaatgcaccccgatacgctggatgactggaacaaaactggtttaatttcattctgcctgctggacggcgaaaaactgtaa

SEQ ID NO: 449200 - DNA, 420 bp, Serratia marcescens
atgcgtgacagcgaaatgcgccaggcattcgccaggctggatcgccgcagtcaggaaaaaatgcttctgtcgatgcacagtggaaagcatcaggagctggcggacgccttactaagggcgcacgcagtgtgttcgggactcgatacggaacagctaaaacgtctcggcttctcccgtattgcatcagagaacgggcaggtgattaacgcggttgccgatctggtcgacgcggtaaggaaggacgtcgcacaaattacagctgtccgaacctggtataacaatctcgtttacgggaagaacgacgatccatcagacgttctgccccgcatgaccggccttgagcagttaagcgaacatgtcagcgcgatgctcaaaggcagccagcggcagactcattcagaagagaagcaggtcgcctga

SEQ ID NO: 449201 - DNA, 1170 bp, Serratia marcescens
atgaatcagcaaaaagataattccatcagtcttaagcatgactataacgccgtcggtaatggcattgcagatgataccttggcgctccaaaacttctttgactacctggtggaaaacggcggcactggcattatcgaaccaggagtttacttatcggagagccataagatttcggctaataaaaagtcatttcgcgtagagggtgacgcggcgggaggaacgacgataaagtgcctctctggtttcacactacttgagtttggaaactgcgatggcgtgtatatcaagaatattaatcttgactgccagtattcaaagattgctccgatcgctggcagaagaaaacacggcttggtatttgatacctgtaataactgcacggtggaaaactgccgggcggaagactttctcggcaccggttttatggctcacgcccaaacggcaccggatacgccacgcagtaataatatcgtctttaaaaactgccatactcaagcaacgcaagcattcaatgactggctgaacatggccgatcaacaggctaaaaagcagttggaatgcaacggcgtactgctggccgattgcgatcacagccaaatcattgactgcagcgcaaaagatatctctttgtttggtatagagatcaagaactatgcacgatggaatacgattgccaactgtgacgctataaactgcgtatacggctttggtatgggccaacagacaacggacgagcacggttgtgaaaataataccgtcaacaatattcgtacgcttgcctgttacatgggcggattgctgggtaaagcgaaacacaaccagctaaccgatttttccgtagatttcaccggccaggatcccgctatggtcaggaacgttttcagattccagctgaactcctacgataatctgctgcagggcttgaccgtcaaagctttgccccatggcaaatcagcgatcatgtatgagagcggcagcagggacaacaccaccaaaacggcatttatcagcggcaatggccatgacgctattgtggctgagtataaaaacacgaatggttatggcaataccgagaataaccataccctagtaattcaatccgcctctgaaaatctggatctgaaagtgacaggaaacgcgacaagcctgaacgaaacccgattcatttaa

SEQ ID NO: 449202 - DNA, 267 bp, Serratia marcescens
atgatcagcgccggcatcaggaaaaatagcccagatggctcgatccaccccgacgggctaacgaaaaaatttgtcgccgcgcggaaagcatcaggtttggaatttcaggaaagcccgccgacgttccacgagatccgaagcctgtccggccgcctgtacgaaaagcagaacgacaaggcatttgctcaaaagctgctggggcatacaacggaaatgatgacgctgaaatatcttaaaacgagggggaaagagtacgtgatgctgtaa

SEQ ID NO: 449203 - DNA, 1026 bp, Serratia marcescens
atgaaaaacaaaaacggacaattacaaaattcacaaagtgatttttttgactcattaattaacatgagagcgttagcctgttttgcagtaatactgatacatgcttcaataattaccaatccgagcgaatggtgggcaaacaacttctatggcgtgatacctagatttgccgttccttttttcttcatgatttctggtgcgttattaacaaataaaaattacgaaccaaagaccttcttaaaaaagaggttgcagagagttatcattcctcttgttgcctggtctgtaatttattacttttggaaacaggacgattacaagtccattctgaatttttttaaacagttctttgagtttccaatttattatcacttatggtttttatattccatgattggggtttatctatcagcactcctattaatacctttttataacaattcgtcaaattttgaaaagcttttctttctgttggcttggactctctcaaacctaatataccccacactaaaaggagtatttaaccataattcaaatttgattgagatttataatttatataatttctttggcatgtctggatggttttttctaggggcgtatcttcgtgattttaacaccaaagcaaacaaggtgttacttttcttggttgcgctagcaagcatattactcatgctaattttaacagaatgggactctgcgagattgtctgcagatggtaaccttttcaatgttagcgaattatttagaggattaaattcaccactaacactaacatatagcgcaagtctatttctattaatgtcaagattaaaaagcaatgtattaacacatattatttcaaacaactcacttggtatttattgcttgcacattattgttctctctttgtcgtggacgattgtcacaaggtttgaaatatcgaaatgggcaagcataccactaacatcactaattacattagtggcatgcaccgtggtaatatcttttgttagacgcgtatcatttttgagagcgttagtataa

SEQ ID NO: 449204 - DNA, 1368 bp, Serratia marcescens
atgaagtcaccatcgttcaaatttatcgacttgtttgccgggttgggcggatttcaccttgctctgaataggctcggtggagagtgcgtctttgcagctgaatggcaaaaacatttgcaagatctataccaaattaatttcaatcttcgtcctggaggggatatcactctgatatcacccagtgatgtgccgacacatgatgtcctaactgcaggttttccttgccagccattctccaaggccggggagcagcttgggtttgagtgtacgaaacaaggtgacctgtttttcaacgtagcagcaatactcgagcagaagaagccgagcttcttcattcttgaaaatgttccaaatttgctcaagcatgatggcggtcgaacttggaaagctattcaagatattttaggattaggtccaaaaggactggggtatcacattgctgccgaacgcttctcaccgcatcattttggtatcccgcagattcgagagcgtgtatatattatcggctcacgaaagcctctaaagaatttttcttggcctcaaagaaacccggcggagacatccattgacaacatcctagatgatcaccccgctaatgcaaagccactttcaacgcaggttctagattgtcttgacgtctgggatgattttttgaaacgctgtccagcagatgttgaactgccttcttacccgttatggtcgatggagtggggagctacatatccatatgaaaaggaaacgccttacgctttaaaagaggattatggtattgacggccttaagggattttctgggagtcatggacgcaagatcggctacctgcgaactctcgaagaacgttggttggcgttgccgagccatgctcgtactactcagcgtaagtttcctaagtggaaggtcgatttcattcggcagaaccgccaattctatgctgacaacaaggaatggattgatccttggatgaaaaatatcttgaagtttccctccagtcttcaaaaattagaatggaatgttaagggaggaaagcgcgatctgtgggagtacgttctgcaattccgtgcatcaggtgtaagggtgaaacgccgcaacactgctcctagcttaattgcaatgacggacacacaagtacctatcattgcatggcagcggcgttacatgactccggaggaatgtgcccgtttacagagtttagacgaattgaaggcactgccatctacgcctaccaaggcattccatgcacttgggaatgcggtgaactcgactgtcgttgagcgtgttgctcgcgctctgttgggggattacataggacaacttccggtaactggaaatacaaagttagcaatgaaaaggtcgatgcatgacggatag

SEQ ID NO: 449205 - DNA, 1599 bp, Serratia marcescens
atgacggatagtcaagagcccagtcaattatcatctattcaaattcgccccgaagtaacgatgctctcggtgctacgccacctaaattataagccatggtttgccatggctgagttcgtggacaacgcaattcagagcttgatcgccaataatgagcaattgcaagtattgcatggtggcaaatttcaattgagggtggatatcaaaatagatatatctggcccgggtatgattgttattagtgacaatgctgccggtatatcggatgttgattttcctagagcatttcgggctgctcaagttccagaggatcgtagtggactttctgagttcggtatggggatgaagagcgcggcatgctggtttgcagagaaatggagtgttcgtaccaaagctattggcgaatcaatcgagcgcacaatatatttcgatgttcgaaatatagttgaaaacaagatcgaaagtttgaatactgaagttcgtaaggtcgatccattatcgcattacactgtcgtgactcttagaggcctacatcacgtgccgcaaggacgaacggtcggcaagattcgagaccacctagccagcatttatcgaatgtttctaagggatggaagactgtcactccacttaaatggttcaccgcttacatatcaacttccgaatatactcaaagcagttgcttatacatctcccggggtacaagcgcagggtgatgacgtggtgcctgttgaatggcggaaagatatcgatctggattttggtggaaaccagcgtatcactggttttgccgcgctacgcgaagttggttcaacaccattggccggttttgctttattccgacgagatagattaatagaaggtagcttggatgagagctatcggcctagttatgtattcaaacaaactaacagttacccctatcaacgattgtttggtgaactgcatgttgaaggatttgaagttagccatacgaaagatggttttcgatgggaagagtacgaagatatttttctggaatatttgaaagctcaaatcgaagagcctccacttaacttactcgcccaagccgaaaattatcgtgcacttccttcgcgaaaaactattgagaaacgagctgttgctgctactgccgctgtagcaaactacgtcgaaaaagaagttgctccgctgttgattgaggctaatcaatatccaacagatgcaaatgcgttgccgtccgaactcgttgcaggagaactccaagcatctgagcgtattgttgaagttaatgatggcaattatcaatgggtaataactttgagaacctccgtggatcctgcaacagaggattgggtttcagtcgcaattactcagcagcccactgactcgggtgaggacatcaggcgtttgactattgatctctcattggcacatcccttttccgttgaatttttgggtgtgaacaatgagaatgttgaggtattgctacgtatctcaacagcgatatgcattgctttgatcttaacggaggatgtttcaggagaaccaccagagagttttctttatcatttcaactacttgatgagaggtgctctgttgagaacctcgttagagaaataa

SEQ ID NO: 449206 - DNA, 2259 bp, Serratia marcescens
atggcaacctctatcgaaatcctaacaactcttcaaccccctttacgttgggtgccggaaaaaaaagaaattacggaggattttcttcgaagcaaatccaatgatcctaatggtcctaaatatgaagatttaaccgatggtatgaattctgtgcttcaagaagcacaacgaattcttggtcgttgcttgcccccgacagagcccgcagggcgagaaacggggttagtagtgggttatgtacaaagcggcaaaacaatgtcgttcgaaacagtaatttctctggcgcgagataatggctatggacttgtcattgttttagcaggtacgaagaataatcttcgtgaccaatctgaaaaccgtttgaagaaagaccttggtatcgatgacggagagaactggtatcactattctaatcctacctcaaatgttaaaagacagatcgaagataagcttgttgcttggaagaaaaagcccacaaaaaaagccattttaattacagtgcttaaacacggtggccatctcgaaaatttagctaatttagttgaaaaattgtcagtttcaggtgttccatctttgattattgatgatgagagtgaccaagcaagcttaaacacgcagtcggctaagatccgtagtggaaaagttgcaccctcagaaatgagtacgacctacgaaaaaatttgtaagcttcgtgacgagcttccgcatcattcatatctgcaatacacggctacgccacaggctaatcttctactggcacaaactgatttgctgaatgcttcgtttgcagagttggtgacacctggtgaggcttatacaggtggaaagtctttcttcggaaaagatactcccctcgttagaaacattccatcagaggaagtacccggaccgaccaatatattgaaaggatcacctaaaagtttactgagtgctttacgttatttcttattagcttgtgctcatcacgcgttaacgcgtgagcgaaagaaagacagaaatcgctcaatgatgattcaccccgcgatggctactacatctcatactcattacatggagtggcttgataggtctctaaagacgctaaaatcattagtcgagaaacaatatattgataaagtcgacgttgtggcgcatctgtttcaagccgaatatgattctttgaaaaatacatatccaaaaattaaaccattgactgacttactttccgcaatggttgatgaggtattcagcgaaatgaatcacgtcatggtcaatggaactaaagatgcagagaaaaatattgactggaaagccacaccatactggattctagtgggcggcgctaagctagatcgaggctatacagttgaaggtctttgcgtgacctatatgccacgccctcttggaacttcacctgcagcagatactctgcagcagcgagcacggtttttcggctacaagaaagcatatttggggctctgtcgtgtgtttattcaggagaatgtaagtgaggctttcaccgaatatgtagaacatgaggagtttgttcgagaggccttagagaattctcggggcaaacctctttctgactggcgccgagattttgtgctcacatcgatgcttaaggctactcgtgctaacgtagtaggactcggtacgcgccgtatcccagctaatggctggatggtgcctgatgttctacaaagggatgataatgctgctttagctaaccaagagttgctttcttccgtggtaagaaaatggactactgaatatggtgatcctgtcaacgtggcagagttttcccaattcaaaggcagtaaagattcatcaccgcacttcatgtttgaccccatcccgttaaaagcggtacttgaagatttcctgcttgaggtaaaagttaaagatccctctgatgccgaggaacatagcgcgatgttgcttgccatagctgcacttctcaggaagagtccagatctcaaggctgatgtatttcttatgaataacttggttgctggttatcgaacacgatcctctggacgtggtgtagaagctaagcatcgctttgcaccaatcaaccagtatttcagccaaagtgcagacaccgttaatgacaggagttttcgttctaatgaacgtgtctctatccagttacgccgatttaacttaggtacgacgctgcgtgactctggtagtgccgatattaagaacgtaacttggtttgcattacatgtgccaagcaaattgaggacggatttactgatcgaggcgcgtcgctag

SEQ ID NO: 449207 - DNA, 975 bp, Serratia marcescens
atgagcatcttcgataatttcttaaatctgccttgtgcaacgtcagagatgagttttatggcgatccccttatccacacaccgtaaagactttctcgcaaagggttctgatggctcccctatttttttattacacgatgccagtgaagcacagtacagccctagtatgcagttcaggtatttgagcgcgcagtttcatgctacttgcaaaattaataccgatgataaggtgctacaagatcaatttgccctcgtttcttgcgatggtgctatgacggatcttcatgagatattcgtacgttgtttcagtgctgcgatagaggaacttcctattaattctggtacacgagaactgaatacttgtatccagaagctcgtggatctttttagggctctttctcagccaagtgggaaggacattttgggtctgtggggtgaactttacgtaatcgcaaatagcggcaacattgtaggtgccatggcaagttggcacgaagacccattcgatcgttttgatttttcatgggagtatggatgccttgaggtgaaggcatccatgcaatcagcccggcttcatacttttacgcttgagcagttgatgaaccctaaacaagggattggttatgttacgtcattgctattacaacctttgaccgcaggactcgggttgattgatcttgcgaatttgatagaaatggaagtgaaccattcacctgcactgaaactgaagctttggagaaatttggctaaggctttggggggggatttttctgaaaaactggataagcgatttgatatttcttatgccgatcgtaacgtcattgtgtatgctatggatgacgttccaaggcctgaaaaaccaaatgatccgcgagtgattgcaattcggttcaccgcagatcttacgacaacatcatcctctcttaagaataattcattgccagcattgtacggcatttttggatcgatattatga

SEQ ID NO: 449208 - DNA, 261 bp, Serratia marcescens
atgcagttcagcgagcgcagcggcggcatctcgcgccgccgggtgatcctgacgttcccagaggctatcgcctctgaagagcgtgacccgctgctgctagcgaagatcaccgaaaagctggcggtcatcgtgcgtcacctgatgcaacgctttgccaacccgaacgaggcccgcgcactgttccaggcgcagcagatttcggcagaagccctggaaatcaaacggcatgccgatccgcttattgattttgtggttacctga

SEQ ID NO: 449209 - DNA, 777 bp, Serratia marcescens
ttgaaaaggatcaataaaaccgaggaagatcaattctttatcaatttcaaagcacaaaatccaaatgggacttgggatgagtttaggaattacgaacaaggcgctttatataagagactcaaacaacacatttgcaatgatcaaacgtacctttgcgcgtattgcgaaatagatttagatcgtgaaaatcaacatgaaataaaagtagagcatttcaaatctaaatctggttcgcttcctggtggaagtaactggcatttagagtggtctaatcttttagctgtatgcctaggaggtacaaatacaggtgatgattttgaattaccagcaaatctaagttgtgattcatataagtcatactatgaagacaaaaataaagtaactgacaaagactggacaggtaaaatcctgctacctctcacgcttccagatgcgcacaaattttttaatttcgacaaagttacaggtaagttactacctaatgaattgtactgtaattctatcagtatagatggtaaacctactgcagaaacacttagcattgttactaaaacaattgacgttttaaatctaaattgcagtagactaaataacgctagaagaaaattgctgtttcacttcaataattgtgcacgagaaagaaacttaagaaaaattcataatctattgttacaatggaatcaaggtgaacctaaattttttcaaacgacacgagacataataattcgtgaagataaaatttgccaaggcttattgaacggaacgataaaatattaa

SEQ ID NO: 449210 - DNA, 1629 bp, Serratia marcescens
atggaaaagaacttaccgagtcgagtaactaaattaattaaaaaatcggaaggcggcgattttgcttcttcgtatcagctttataaagtatttggttcaaaagagtacggagttgagccagatgaggaaaaatctaatcacttcaaagaattatcagctaaacagattgaggggggaaaactgagagttgctgatattcatttggaaaactataaagggtttgagtccctaataatggatttttccatgaaaaaaaactctaccgtcttagtagggaacaatggttgtggcaagtcgacgattcttgatgcaatccagaaggggctgacacatctatcctcaagattatctactcgctcgcataatggcgatggtatcgaaaaacatgagttaaaaaaaggtcaaagctatgcttcgatcgcaataaattacgactatatgggaattcgttttcctatgatcatagctacgactgaacctggttatgaggataaagcaaaaagtaactatagtgggattaatgagttagggaatattttcaaaacagcccattcaatcaatccaaatgtatcatttcctttaattgcaatgtatacagttgaaagagctaatgacgtttcaacaagagatattgagaattcagaagaaattaaagaagcgcaaatctgggataaattcaaagcatataataagagtctgactggaaaggctgatttcaagttgttctttagatggtttaaagaactaatagaaattgaaaactctgacaatgcagatctaacagcattaagagcagagattcgtgctaaagaaaaagacttagacaatccattactaaaagctcttctggcagaaaataagaattctgagactactaaaaaattgttagaagatcatcaaaactctttgaaggttttaaaagagaagttgaataattattattcagtcaatagtaaaacactacacactattgaagatgcgatttattctttccttccaggttttagtaaccttaagcttcaacgggcccctcttgatctgacagtcgataaagataatgtttctttaagcgttcttcaattatctcaaggtgaaaaaagtattttagcgttaattgctgatattgctcgtagattggcattgttaaaccctaatagtgttaaccctttggatggaactggaattgtattaatcgatgaaatagacctccacttacatccatcatggcagcaaaatattattccaagacttgagaaaacttttaagaatattcagtttatagttacaactcatagtccacaggtctgtcatacaattgatagtcaaaatatatggttgttaaaaaatggccaaaagtttaaggcaccgaaaggtgtaagaggggcaatatcttcatgggtactggaaaacttgttcgaagttgctcaaaggccgccagaggataagtatacaaagctcttacaagaatataaaaatttagtattttcagaaaaatatgctagtgaagatgctagaaagctaggtactactttatcccagcatttcggtccagatgatgaaactttaatagaattaaagcttgaaattgaaaaaagaatttgggaggatgattttgaaaaggatcaataa

SEQ ID NO: 449211 - DNA, 939 bp, Serratia marcescens
atgagcatcgatattgaaacgacacttcaaaaagcttaccctgattttgacgtacttttaaaatcaagaccagcaacacactacaaagtatacaaaattccaaagcggactattggctatcgtatcatagctcaacctacgtcacgagtaaaagcaatccaaagggatataattgaaatactgagacaacatgcgcatattcacgatgcagccacagcttatgttgatgggaaaaatatactacataacgctaagatacatcagaactcagtttatttattaaaattagatttagtcaatttttttaacaaaataacaccagaaattctattcaaggcattagccagacaacatttggatatttcagatgaagataaaaatatactaaaacaattttgtttttggaatagatcaaaaagaaaaaatggtgcattagttttaagtgtaggggcaccaagctccccttttatttcgaatgttgttatgaacagcttcgatgaggagataagttgtttttgcaaaaaaaataaaatatcttactcaagatatgctgatgatttaactttttcaacaaatgaaagagatattttagggttggctcatcaaaaagtaaaaacaacattaattcgtttttttggcacgcggcttattattaataataacaagattgtatattcttctaaagcacataatcgtcatgtaacgggagtgactttaactaataataataaattgtcaattggaagggatagaaaaaggtatattacttctttagtgtttaaatttaaagaaggcaagctttcgaatgttgatattaatcatcttagaggcttgatcagttttgcaaataatattgagcctactttcattgaaagacttgagaaaaaatatggagattcaaccattaagtctatcaagaaatattctgaaggaggataa

SEQ ID NO: 449212 - DNA, 603 bp, Serratia marcescens
atgactgacaacttacatcctggctggaagcctgggtttggtattatttacacatggtttggaatggataaaaatggtaaaataggcgtttttgttaataattgctggggggggatacctgacgttatcttaaataaggacggagctgaaagcatcctagatgcaatatcagaatatgtgcatgaagaatcagatgtattcactagtttaccacctgacaagaatggtgattttgttgtcgacatgtttcctgcttggacaggcccaaaaacgaaagagaaagtaaagcagctctataaggagtctctgagtaaaataaacccattaagttacgctaatttaccagtaaataaagggttttatatctactatgctgtcgaaggaagttttccaggagaagattatcctgttggttatgatggcgaaaccgaaatgggagattactatcgctatctggtgccgacggtgtatgggagtattgatgattttcctgatgaactgaaatccgggatcgcagtatcggatactattgattttactgtcgatagattgatacccaacaagagaatcaatcagaatttcaaaaccatgtatggacagtag

SEQ ID NO: 449213 - DNA, 552 bp, Serratia marcescens
atgttaaccggggtgataagaatgaatagtattaatatcgttatcgacgatgagaaccgttatttcgctgaaggtctgcggctcagcattgaaaaatatgcgaagaaaaacaataaaaccgtctgctttttacctccgggtgttgttgagccgcctgatatggtgcttgcttcctctcggcggcgcgcccagcgttgggggagatgcgcaccgcaggtgatcaccgttaaagaaagacccattttaaaggtgaaagatgtagcacgtgtgctgtatcgcacggacgatcagatcaagctgtttgagttgctgaatgaggcattgtctggttctgtctctgtgcttaccaaacgtcagccactgactcagcgcgaacggcaggtcgtgaactatctccgctgcgggttcgatcagtcgcaaaccgccaggctgttaggcgtcagcgtaaaaaccgtgcacagccataaacgatcggtcatgagcaagttgatgttaaaccggaatcatgagtttatttattggctattgtccgaagagggagaatattcttaa

SEQ ID NO: 449214 - DNA, 840 bp, Serratia marcescens
atgggtggtattatattgagttgcctgaaacgggtggtttttttttcttcaattatgtcgatgttggtatttatgcctgctgcatattcttctccttgggagatagaaccagaaattgaaccagcgatatcaggcttttggaagataagagccaagataacgtcatgggatatttataacacgacacctaatccactttacaattgtgaaggtaacgcctgttatgtttatattatccatcgtagtatctggggactttcaactccccctcagatgtctatatatgtgcccgaagctcgggggattaaaacgctaggggagttgggcgattatctcagacgacgaggtgatcttaattggacatatgtccataatttaatgggtggtgggacctatatgtcatgtgtctttcttggatatcctaatcagggccagggaggttctgcttatattccgatgccaggaggtaaagatttttgtcaggttaaagtcagcccaaattactgcgacgtttatatgccgaacgcggaattgcggcatggttcactcagttcggataaggtcaacgggaatatcgccagaacttcattatatgtgcgatgcaccggtaatcttcaagcgcggctcatgtcggcagaccattccagcaacatttttttcaaaggggttggcggttttcgcagcgagctgaaattagacggcactggtttaggtgaggggaaagttgttaacgttacacccgcgggcgtgtcattgaccttaacctctacgctggcaggttatgacggcagtatcggtacattccaggggtcaaaaactataataattgttttaccatag

SEQ ID NO: 449215 - DNA, 525 bp, Serratia marcescens
atgaaaaagactttgctgccgctggcattattgtgtattagccatgcctgctggagcgcggcgcccacgttagccgtcaactatagcggcgaactggtagcggagccctgcgttattgctcccggggaagaaaatattgagctggattttggcacggtgatcgataaatatctctatctcaaccaacgcacgccagggaaagagtttgttctgcaactaatggaatgcgatctcagccttggcgaaacggtaagcgtctctttcagcggcacggaaagtgctgcactgccggggctgctggccatcaatagcggtggcgcgagcggaattgctattggtctggaaaatactgccggagaattgttgcccctgaataaacttaccggtaagcagcggttgcaggcgggaagcaacagaatcacgcttaaagcctatgtgcgtggtgagcctgaggcgataaaaaataatactatcagcagaggcgtttttagcgctgtggcaacgtttttactgcactatgattga

SEQ ID NO: 449216 - DNA, 486 bp, Serratia marcescens
atgaaaaagcttggcatggtttgccttatcctgttgggtatcacagctcaaggggcgacggcggacaacatgagttttaagggaacactgcgagaggatgtgccctgcgagttcaacggcgggcagccgataaacgtcaattttgagacggttggtgtcaataaaatagatggcgagcgctacaaaaagtcatttgctgttgatataacctgcccctcgggtttcgacgttccctttaaaatcagctacgtcggtaatccgagtgatttcgatgcctcagcgctggcgaccaatattaacgggttggggattaaggcacagtaccaggttaataatggattctccgatcttgctgtcggtggctatatgggcggtgttggcagcgttaagcgtcatgtgaaagtggtgccggttaagagccccaatgcggttttaacgccgggtatgtttaatgcgaatgcctcgcttcgtcttgaatattattaa

SEQ ID NO: 449217 - DNA, 510 bp, Serratia marcescens
atgacgcataaatttaaggccggttgtttcacctcttggcgtaatgcggcgatgtttctcctttgtgtggggatatcgccactgaccggcgcgaccaccgtgacggtcagcgttacggtgcaggtaccgccgccttgtgtgatcaacggcaatcgcaccatcgaagtggacttcggcgagatcctgacggttagcgtgaatggcagcaattataagaaaaaagtggattatacactggagtgttcaggcagtaagtccaatgctttgcagatgaagatccagggtaatgcgacctcctttgatcccactgcgttgcagactaacatcagtgacttcggcgtggcgttacacgccgatgggcagccgcttaatattaatagttggctgaagttcacctattcggataatcaaacgccattattagaggcggtaccggtaaaaaaaacgggtaagacgttgcccggcggcgcctttactgccggcgccactctgctggtggcttatcaatga

SEQ ID NO: 449218 - DNA, 759 bp, Serratia marcescens
atgaaaaagaactttaccatgaataaaccgaatctgatgaccatcgcactgttgggcgcgttgctggcgccgcaggtgcaggccgctatcgcgctggatcgcacccgggtgatcttcgacggtagcgaaaaatccgtcagcctaaacatcagcaaccagaataagcagttgccgtacctggcgcagggctggctggaagacgagcagggcaacaaaatccagagcccgttggcggtgctgccgccggtgcagcgcgtcgagccaggcaagccgagccaggtgaaaatccaggcgctgccggcggccaaacagctgccgcaggacagagagtcattgtactacttcaacctgcgcgagatcccgccgaagagtgacaagccgaacacgctgcagattgcgttgcagacgcgtatcaagctgttctatcgcccggcggcgattgcgccgaagcagaatgccgcgccctggcaggaacagctgacgctgaccaagcagggcgacaagtacgtggtgaataacccgacgccttactacgtaactatcgtggacgcgggcgccaaaaagggcatagcgggtgtgaaagactttgagccgctgatggtgccgccgaagggcagtgcggcattgggtgccagcgccgccgcattgggcgccggtccggtgctgacttacatcaacgactacggtggccggccgcaactgacgttcaactgcagtagcgccacttgccaggtagtaccggaaaagagcaagtcgtaa

SEQ ID NO: 449219 - DNA, 309 bp, Serratia marcescens
atggcgttctttgcctgcctggtgccgtttgccgctatcgtgctttatcagaatgccacccgcatcagcatgtatcctttaggcgattaccagcgttgccagatttacagcatgagttcaggcagcggcaacctgcctcaaatcaggcagtttatccagcgcgccggttttaactgccgaagtaaagcagacgtgtattactacgacaacatccgcgacgaagcttcacagaaagacaccgagttactgaccttctgcccacgggaaggcgacagcccgtgcatttataattatatcgataaaaactag

SEQ ID NO: 449220 - DNA, 1188 bp, Serratia marcescens
atgtttaaacagattgcaccttccgccgccgatcctattatgtcgctgatggaagcctatttgcaggatcccaatccgaaaaaagtgaatttaggcattgggctgtattacgatcggcaggggaatattccgctgatgcaggcggttgaggccgccgagcagcggctgctggcgctgcgtcgcccgcacggttatccgccgatcgaaggttcgccgcagttcgctcgccaggtgcagtcgctgctgttcggtgagcaacaggcggccgagatcgccacggtgcagaccgtcggcggttccggcgcgttgaagctggcggcggattttctgcgccactttctgacgcgcggtgaaatttgggtgtccgatcccacctgggccaatcactgggcgattttcgaaggggcggggctgcgggtgaaaacctatccctactttgacgaagcggcgggcggcctgcgtttcgccgccatgctcgatgcgctggacagcctgccgccgggcagcgtggtcttgctgcacccttgttgccataacccgaccggcaccgatctgacgccggagcaatggcgcgccacgctcgccgtgctgcagcggcgtaacctgctgccgctgttcgacatcgcctatcagggcttcggcgacgggctggaggaggactgctttgcattgcgccaagcgctgaaaaccgatctgccgtttttggtctgcaattcgttttccaaaaacgtcgcgctgtacggccagcgtctgggcgcgctgtcggtgcgctgcgccgacgcggaaaatgccgccaacgtcaaaggggcgttaaaaacgctgatccgccgcagctactcctgcccgccgacgcacggcagccagatcgtggaaaccctgctcggcgacgccgaactcggcgagctttggcgcaatgagctggcggaaatgcgctcgcgcatcaagcaaatgcgtgaacagctggccgccgggctggcgcagggcggctcttcgctggatcaccggcgcattctcgagcagcgcggcatgttcagctataccggcctgaacgaagcgcagctgcagaccctgcggcagcgctacgccatctatctggtctcgcccggccgcatgtgtctgccggggcttaaccccggcaacatcgactatgtgaccgccgcgatcctcgacgtcactcgcaccccctaa

SEQ ID NO: 449221 - DNA, 543 bp, Serratia marcescens
atgaaactaattgacatcgactcagccaaccactccgataagaatagtgtacgtggtgaacaacaagatgaattattaaggaatgccaataacttatatcattcaatgcgaattaccattgacgcaagattccaggcaggtaaacgattagaatcattgaacacatatacatttataacatctataattatttcccttgcattgatttttttgccactaattcaattttctgatataaaattacactatagcaacaacgtgttaagtacgttgcagatattctttgctgtcgcaatccttgtatactcagttctcatttcaaccgcgaaatactccattagagcgaaagaaatgacagtctgtgctgatttagtgaaagatctctccagagaacttaaggacattatcgcccttagccagagagatggtgaaaacatcacgaagaatgtactaaacgattacaacaaaagatatcgtgaatgcctgagaaacagcgaaaaccatagcgatcaggattaccatttcgttaaaaacacaatataa

SEQ ID NO: 449222 - DNA, 1800 bp, Serratia marcescens
atggccaagcccgttgaccagataagcgccgcggttccattgcgcgctttgttgcggatcgggttgatattccccctggcgcaggaacagcgcgttccagccggccatcagcggccgcaggttaaacgggaaacgcatctgattggccgggttgctctggcgcaccgccggttgcgacatcagataagcgtacagcgcctgcatgtcgccgtcggtcattttgctgaaggcggtgtaaggaaatgccggatagaggtggcggccgtcgcgggcgataccctggcgcatcgcccgatcgaacgcagtaaacgaccagttgccgatgccggttgccacgtccggggtaatattggtgctgtagagcgtgccgaacggcgtcgccatcgccagcccgccggcgttggtcgccccttccgatgcggtatggcaaaccgcgcagtctccggcggcggccagctgacggccgcgctccagcgtggcggccgaccaggtgccggcgccgggcgtcgccaccggcgcgatctccgcccgccacggcaaggcgctgccggcgatgcccagcacggcgccgaacagccccgccgcgccgccgaaccaccatttgccgcgcttctttttcttgggcggcgcggcctgccgttcggcatccggcccgttcagcgcctcacgcagcttgtccgaggtgatcggcagctcgcgaaaacgaatgccggtggcgtcgaacaccgcgttggcgatggccgccgcgctgggcaccgacgccgactccccggcgcccagcggcggatcgtaagggcgcggcatcatcaccacgtccacctccggcacctccgggaaggtcaggatcgggtaggccccccattctttggcggagaccgtcgattcctcaaaggtcacgcgctctttcaatacccggctggtcgattgcaatacattgccgtgaatttggtggcgcacgccgtccgggttaaccatcatgcccgcgtcgtggccgaccacgatgcgcgtcaccgccacttcgccgctggctttgtcgatcgccacgtcggccacccaggcggcccaggccgcgccaaagccgggaaacttgctgtggatgtaacgggcataggcaaagccgcgcccgcgcagcacgccgtcttccgccggggtctgcatcggttcggtatgcggcgtccagccggcgcgttctgcggtgctgcgcatcagttcactggcgcgttcatcattgatgtagcgcagccgatactccagcggatcgacgccggcggcgtgggccagctcatcgatataagactcgtgggcgaaggtgttgggcaaggcggaaacgccgcgcatccaggaggcacgcacgatcggcgccatgtcctcgatgctgacgcgcagcgccggatactcataaggcggcaccgaagtgcgatcgcccatttcataggccaccggcagcggctcgacccggccggtcagcagcagcgccagcgtcggcgcgccgttggaaggataataggtgcgaaaatcgtaggcgaccgggtgcccggcggcgtccagcccgccgtccacctccatcagttgcgccgtgcccttcggttcccacacatgttcttgttcgcgggtcagttgcacccgcaccggcctgcccaccgcgcgcgacagcagcgccgcgtcggcgcagacgtcatcagcgcaattgcggccatagcagccggccgcctccatgcgaacgatctcgatctgcgcttccgggtactccagcagccaggccagatcggcgcgcagcaggtgcgggttctggctgcctga

SEQ ID NO: 449223 - DNA, 1773 bp, Serratia marcescens
atggctcaaacgacagttaccaaggcttttgaagcctggttagtggataaaaccgtcaacggtgaaccggctcggcctgaccagatggtttttgccctcatccctggccaggatgaaaacgcggagatagaccgtgacgagggaatgcccgaggctgggaagattaagcacacggcggagattacccagtttggcgcgctgaacgaaaacgccgtggtgtattccgtggtgctggacactacgatcggtaactgggaatacaactgggtggggctggtcgacagcgccagcggcacggtgctgatgattgtgcatctggctacccaaacgaaagtcaagacagagagcggccagcagggtaacagtctgatccgcaatctggtgatggagtttgacggggcggcagaggcgacgcagattaccgtcacgccggaaacctggcagatcgactacagcgcccggctgcagagcatggacgagtaccgccgcctggcgaacgtcgattattacggtgacgctgctttccgtggcgacggttttaaggtcagcgtgaccggtaccacggccaccgtggcccctggtctggggtatgtggctggcctgcgcgccgtgctggaaaaagcccaggtgctcgatgtgacgtcgaaaacaggggtgtgggttgatatcagttggcaaggcacggtaaccggagcctgggccaatggtttcaccctgcgcgcggccgacacgctggaaaactacgttgatgcccaggggtaccagcaccatgtcacccgcattgcgcgacgtgacagcaccaccgtgaccgacgagcggaagccgttcccgttggatgcgctggaaaaagaagtggaagagctggacgtttacaccaaagacgaagccgacacccgattcctgcaggtggacaataatctgtctgaaattgcggctgcaggcgttgaggcgcaggatgccgcccgcaaaaatttggacattcgcagtaacgaagagtcggatcagcatttcttgcaaaaaaagggtgacacggccaccggtcaacttattgccccatcgtttgccagtacgcccgaggcgatgccgaccggcgcgggctcttatgctgaccagctaagcactcaggccccatttttccagcctaattggcaatggccggtgaatatcggcggtatttttgttcctgttgccaagggaacgtcaacccgcaaggcgcaaggctacccgacggcggtcagctacggttacctgatgcctgcaaataacgaacacgcgcacccgactatccatgctcgtggtgatagcgatgtagactgcgtatgggactttaacccttataacggccgtatcagcagcaaagcgggcacgttcgcaacgcaagaatgggtaaaagtctactgcccgttcccggtggggtttgtgatgctgctgggcaataacgccgatccgcgcgaggattaccccggcactgattggcaggatattaccggcacgtttgatgggcgtgtactggcgttgggttatgaccctatgggcaccggcggtaacaacgaggtgactctgggggcgcagcatatcccccctcatgagcatggcctgaaggcatacccgtctaacaccgccctggatggcggcacatcgaaccgctatagcgttgacgccagccagggggttatcagccagggattggtgacggggagagacggcggcactgaggcgttttctgttcaaaacgcctatgtccatgtgcgtggctggatgcgggttgcctga

SEQ ID NO: 449224 - DNA, 690 bp, Serratia marcescens
atggggtatttgggaagcaaagcggcatcgggagcgtatcaggtcattatcagccaaatgccgccgcatgatacttacatcgaaacgcacctcggcggcggcaccatcatgttacgtaaaccaccggcggcccgctcgattgggtgggatatcgatcctgaaactatcgaggcattttgccaaggcaacccggactatctggatgaacaggccgagcgccttatgattgaaatcggtgacgcggtgaagctgctgcgtgccgttccttttgaaaaatatggccgcacgctgatatacgtcgatccgccctatctcccagaaacgcgcaccagccgcgcgaggtaccgctatgagtacacggttgacgaccatcgccacctgatcgccgtcctgcgtgctatgcctgccagcgtgatgatttcggggtatccgtcgcagctgtatgacgagctgctgggcgactggcgcagcctggaattccaggtgatgacgcgcggcgggccgcgtaccgaaaagttatggatgaattacgcccaggatgcggcctatagcgccgcctttgccggtacggattatattgaccggcaacgcatcaagcgcaaggcggaacgctgggcggcgaaatatcgggacttaccgccgggggagcagttgacgatcctgacggagatgttgaaagagagctcttaa

SEQ ID NO: 449225 - DNA, 363 bp, Serratia marcescens
atgagccaagttgagaaagttaacattatcaaaatttattgcgataaaacctataaagaagaaatatcagccctctttacagagtcggatcttgaagttggcgttattcactgcttttcagaaaatgcccccgaccttctcgcaatctcattcaagattggtagtatggcagtagaaaggttgaaaaaggtgcttactatgtttgtaaaaaaagacaaagaagtgcatatcgcagtggttaacaatgatggttctagcctcaccgtaaactttaaaaatgttccagaacctgaacaggcggcactgttagaacgcgctcacgcaatggcaatcaacaccctcaaaacggaacaagctgattaa

SEQ ID NO: 449226 - DNA, 630 bp, Serratia marcescens
atgccaggaaaattggtaaatgctattaaggttaacgaagttttcgctcatttgaacgaaagccaggataaccgcgccctttattctgtgctagccaatgggcaagagatcagcatcgagggcatcactgtttcgcctggttatcgaatcgtacgtgttgacgatcgtctaaaagacaagatcaatcaagcacacttcgagctggcgctgattaacgatgtttccgaagatgtcgcatactacaaccgggtggtgatccaacctgattgtttcctcaattgccgtccggtaacacaggttctggtatggagaactcaaaagcgtgagcacaggaaagagctgcatgattttgctggctccattttcttaagttatctgcttgaaaaatatgatgttattgtgtcagatatgaatcaaacacatgatggtatgtctttctggcaagcccgcatgtatgacgctttagcttttgggcttaaagtttatgcatatgacatgatgacatgcgatttgcatgaaattaaaacggatgatgacgttggtcgctatgagcaatggctctggggcgagccagagcactatcagaatagattagcaatcatctccaaacaggctttgccgttaagttaa

SEQ ID NO: 449227 - DNA, 744 bp, Serratia marcescens
  misc_feature (643)..(652): n is a, c, g, or t
gtggagtttgaatcggtaacgtcatcgcaattgatctccgccgtttcctcgatcaaatgtcgtgaagagccttcggataacgatctgcggtcaaccgctgaggcgatggatagaaatgccaaaagactcgagttgcaaggcattgcgctagagtctctctcttggcgcgttgaaggaccttttgacagctcctatagcctggctttggtaaatcgagaattcgcgcgagcactcagtcgcgacaatgttgacgttctgctgcattcaacggaagggcctggcgactttgctccaaatgaaaccttcctgagtgatgaaagtaatgcggatttgaaggcattccattcgcgtttgcagcagcggagtgagcagcaagttaatgtattgagccgcaatatctatccgccacgtgtcagcaacatggctgcggatgtgaagcttttgcattgctatgcatgggaagaaagtggctttccacaaggttggatcaataatttcaaccgtgaattggatgcgatcctttgcacttcagaacatgtgcgcaaagtattgattgataatggtactaaagttcccgtttttaatgtcgggaatggttgcgagcactgggagcggattcagtcagccaatcctccgcaactgnnnnnnnnnnttcaaattcctgcatgtttcttcgtgcttcccgcggaagggggttcaggcgatgctggcggcctatggcgccgcttttaccggagaggatga

SEQ ID NO: 449228 - DNA, 234 bp, Serratia marcescens
atgaacaagatcacacactcccaaatcaacgaccttatcagcggtttccgtggcatctacatttctgactccgcgttagccaagcagtacaacggaaaagttcgccatctgcgcagtgggaaacacaaagttgaaggcgtggttactcaggttcaggcaatagcacttgatgagcttgggaacctgataacaattcaaaacgatggaatttggcgtcaacacgataaccattaa

SEQ ID NO: 449229 - DNA, 756 bp, Serratia marcescens
atgagtaacgaagatttattaacatacatatggatttctttagaaaactttaataactccatactcaaacaagaacctttactaaaatcgctgttacctattgcaactgcatttgcaggtgttttgttaggtttatttttcaacactcttaaagaatgcatagttaaaataaaaaaagataagtccaacaaaaaactattcattgacgaaataaatataataaaaagcgatatggagtcaatattacctaagctttactcattcatggatggcgtaataaaaaatagagagttaaagaacttgatttactcgccaaagataaacaagttaggatatgagaaattttatccagaggtggtccatttatttagtctcgatgaaaaacaactaatcagaaaaatatataatgatgcagatattattaacgatgggattgatgaattttcaatttccaaggtcagccccgatactttctccagaaaagaggcaagtagagatgaatatatggttcacataagaaaatccagcaatctttgcataaactgtgtaatcatgtacattagctgcaagaaactgattagcggggaagtaaataaggaaatttctgaatccgacgttctacgtgaattgaatataaagagcacctattttgaaaaatacaaagagcatattaaaaacgaggctaacaaagataatccagaagatactgaatctaagataaattttaacgcgcggaaatttgagactaaatattag

SEQ ID NO: 449230 - DNA, 177 bp, Serratia marcescens
atggatataaaacaagatgttgcttatgttttgcctgataatggtcgggcgctggtttacacagcccaaggcgcgataactgcggttttaccactgaaggagagccagatcgtcgccgatgctgagctcatgattgtgctgctccgacgtatgggctacgacgtccggagaaagtga

SEQ ID NO: 449231 - DNA, 384 bp, Serratia marcescens
atgagcggctggatctcaaaactggccggcgggggaatgttgctcctgctggtgacggccatatgcctgagcggttacagctcgctgttgtcgcaccggttggagctggcacgccagcaggcggcggaactgcaaaaaagcctggcgcagcaggcggggctgatagccaccttgcagacacaggacgcgcaaaatcgcgcgctgatggcggcgcagcagcggcaggaacagcagctgcgccagcaacacgaggcttatcagaggaaataccgtgaagcgattaaaaatgatccctgcgccgctcggcctctgcctggcgctgtgcttgagctcctgcgcccggccgccgccggcgccgcaggccgtgccgctgttaccccctga

SEQ ID NO: 449232 - DNA, 150 bp, Serratia marcescens
gtgagattccccttcaaaaacaagaccatcgccacccatttggccgacgtgtatatcactaacaacgttattattagcaccttcagtgaatctgactacagcgggttttttattttccatttctttacctactttaccgggttggtttaa

SEQ ID NO: 449233 - DNA, 987 bp, Serratia marcescens
atggcgaagaatgaatttaaaccgtttgccatcggtgaatatgcaaacgttttgacccaagaagaatatgaggcgcttccagctgttggtgctgggtatacggcaggtatagcgaaaagcgaacagcttaataaaacatggcgacaagcctcagtaatggcgtctgttttaggtgatttcatcgcagagcaatcaggtgatgatgttctcgatgatggaaaactagatgaattaaaggcctctcttgaaattgctttgtttaattactcttctgaaaaattagatctcaggtatgtaaaaaaatctggtgatactatgcagggtgggctgcacattaacagtggtcttgaggtggatcaagatgcacttattgttggtgaggcaagggccgggtcattgaattcaatttcagacaccactattgggcgagccctgtatgtgaatggtcaggatttcattatgaaaagaggcctgcaagacccaataaataatgaaaggcaaacgaacggcattcgcttaatgggggctggtgacttatttgttgatttataccagcatgaacgtattggaatgcaccacttctttggtgttcatgtgtccaatggtggcgctgatggctggttcgagtttagaaatgatggctccgtgcgggcaaatggtggtttttttgagggcgagcagcgcgtttatagttcaaacaacaagccagatgagttgcatgttgatggggatagttggtggtctcgagattcttcggggaaaatcacgcagggcggaatagtaaatcgttcggcaaactcaaatcccgtatctttcccaatttcattcccaaataaattattaggtatcaagttgacattaagacgtgtaagtgaaagtggcggttctaccgacaatattattgcccaaggggaaaataattcagggttctttgtatggatgaacgctaacgaattatcagcgtattgggaagccaccgggtattaa

SEQ ID NO: 449234 - DNA, 804 bp, Serratia marcescens
atgtttggaatagagcagacgttcccagaaacattcagatttttcttttcattaatttgcgctgcaattatcatttggcgctgtggtggggtttccgcactattccgaattttattaagaattgccggattgaatttcaaaaaaggagtcttaggcagggctgacgatgagatattctacactcagaagttcatgttattaaatggcgttaaagttgcaaacaccaaggatgcaaagttattatctaatggattacttactggcgagatttcaaaaaaaaatttttacttcacctctttcttcggaaccgtaggaaaaagcaagtcatctcctcatgataccgccctcttagttgccataatcatcatcataatagcattctccatatcactattaagtagcttcccaaaatcgggttatacaaacttcaactataaagacacatcacttttagtttcccaaaatgatgtaatcatcccgacagggatattcaagaaaaacaaaacattaaacattagcgcttgcacgagaatcattaaaacacatccatatgatgcatatcgtgcagcatgcgaatacattgcattaaaggatgagaaaaaaaaccaagagttaattgatgcaataaactcttgggatgacatgagaaaaatatcatttattacattcatgtccctattgattttttccgcatgcttaatctggggaataaccaaccataaaaaactaaatgaacacatatttaaatgtagagagcaagaacataagtttagtatcaattcaaatcaagaaggtggtaaataa

SEQ ID NO: 449235 - DNA, 513 bp, Serratia marcescens
atgttcactttagacgaaataaaagaagcaatattaaaaatttcggatgctgagatattgagtaatgatgaggatgagcgggagtctcgggttagatttaaaaaaaatggggacatttttattattacaactttggctaaggatatggcatccaatacaatattaaagttatctagattagttaagttaccaaaaaattgtaatgtaaaaaaagaagatgccgagctgatatgctcaatggtaaatattttaaataacacaccatgtaaagttgtttatatttataatgaaaaaaatggagtgctagataacaggttttatataaccaatatatatactgataaattagaccagttcgaaaaaatgggttctaaagatgttgtagctgcaaacctagttgttctgattcttgggatgatacttgaggtaatgataacaacgcaaaatattataaccgagtctgaaaagacagggaaggcaaaccagtctgaaggtgatgccaatggaaagtaa

SEQ ID NO: 449236 - DNA, 1041 bp, Serratia marcescens
atgaaagtgataaacattgtaagcgggaaaggcgggacaggtaaaacgttactcaccgcagttcttgctgaaacactaggtaacgcaggttacaatgtattagttatagacctagatgtatttgtcagagggctaacctcgcttctttactatcataaaaatgaaaaaataaaattgtgtgagccatgggagatgtctgttgcagacttttttataaataaaggtgagccttgtttattcgaaggtcgtagaaaaaaattcgcaatcgctcgatacagatctttcgatgtaattccatcagtaagtagagtggatgagttactccaattctctgatttgatgccagatacaaaaaatgatgcactaaactacattcaagggttattgcgtgcaataaaaaatgaaaaatcatatgattttattttcttcgatagccgcgcaggatatgatgaattaatatcagcctcacaccgatgcagcgatattaccatctgtgtagaagaagaggataatatttcaaaaataacgactgataatctgatcaatcagatgcagaatgacacaagcaaccctatattcaggttaattaacaagactacatcagacaaggaatatacaaccaactctgtaacacacattggcaacatccctttcgatatggatatcatgcaaacatttggacaaagtaacttctgggatgatttgaaatcaacaatatacttggatgcacttataaaatcctggaataatctttctaacaagatggatttatcttgtattattgaatcaaaaagacaatcacctttcagaaacaggtctctcgagaaaaaactacaattttactcgttaaaagatagagtaatgatcctttatggaattttaattggattcatgggtgtactttatccttttttccaaggtggtttgtttagtgatctcttaaataatagagagttgttgcttaaaatcatttctagttttgttgggatttttggtttcgcattaacatttatgattatactaagaaatagaagaaaataa

SEQ ID NO: 449237 - DNA, 213 bp, Serratia marcescens
atgcagttaaccctcggtcgacaccgttttaccctgagcggcaacgacgccttgtttgtggccgaagccatcttggtgcagcgcaagcacccggatatcgtcttgcctgaacatcgcagtgaaaaacacggtgtgatttgcctgacgaaccggcagacggagttgcgtcgtatctgtgctgacgaagtggttgatcacaatgcgatcgattga

SEQ ID NO: 449238 - DNA, 519 bp, Serratia marcescens
atgaacacgctttcgcactcgcgtaaaattcatatccggttgtgccggtgcctggaaatcattttgttgtttctaatgggcacgctccccgttacgtgtagctatttgctgctttattccggggaagataatccctccttccctccagatgcagatataatagaatggacgctcggggataacctctcgttcatcattgataatctggtcattttttttgttctcctccaaatgcttatgttctccaaaggcgtgcgcaagggagagttgtttacaaaatcgcgaatcagaaatataaaaggcatcggtttggctctcgttcttgggtatgctcttaatctttttgctcgtgtattttttgacttcgctactgatgaatggaacaccgattttctatcgttcgccaatacggagttatacagtttacaacagttactattgggagggggagtgctttctttaagctttatatttgaaaagggaaggaggttggaagaggaaagcgagttggtgatttaa

SEQ ID NO: 449239 - DNA, 528 bp, Serratia marcescens
atgaaacaaagcaatactggcaaccggtgtttacgaataaaagaaagtaacgacatccatgagcaaacagtgcgagttaaggctcgccaacgcaaccatgaggattatcgcttaccggccgctctgacgcacttcccctcgatgcctctccatttggcagtggcgcattatgtcttaatgatgcatgcgccggtatcgcgtcaaaccatcagtgctgagtttcgcatcagcacacggcgtgcacttgaagtgatgcgctacttgttcaatgtcaaagtgggggtgatgtgtacgcgtttgccaccgttgcccggggcgagtgaacaagggtatcgcattcaggtgcacgcaatatcctctagggtgggccttcctggcaatgagggtggatctgtcttcaatccaatatccagtgaagcagcgcacatgcacaaagacaggattgataacctcctatctcctcacgaaagagggcgcacatatcaggatatgcgccgctggtttttgcaacgaccaaacgtggaatga

SEQ ID NO: 449240 - DNA, 708 bp, Serratia marcescens
atggaagtgtatctgcagaccccagaagataaaacggaaataccgcgtaattacgttaagacgagcgatgaagaggcattccctggcgcctgctggcaggtgacgatagttgatgcgtgttactttggccgcgaaggaatgaaggaagccatgcacaatcaccctgccgtggcgcgagtggtagctaaagagacgctgacagaggtgttatcgatgctggtagcccatcccgggatgatttcaccgccctcgagtctggtgctccgcttgcccaagccagcgcaggaggcactgcaggtgttactgcaattaggaagatgccgcatggcacggtttacccgtgtggtggtggtatcgaatgcagcacttaatattgtacgccaggcgctggcacatatcgagatgtgcagctcagtgcgggtaatagggccgagatgttcgttgtcgatgttgtaccagactgccatacccacaatgagtgagataggcaacatagatgaggttttatatcgtgagccgcacaatgtattgtctcaacgagaacgcgatgtgttgagcaatactctgcatgggatgccaatttacatacaggctcgccaggcgcgggtcagtgccaaaaccatttattcgcaacgtactcgtgcattattgaaattgggtgttcccgatgtcctgactttattacgccagtttaagccggtgttctga

SEQ ID NO: 449241 - DNA, 924 bp, Serratia marcescens
atgagccgtcgtacacggtgggtcaatcttggcatcatcgtttgggttatgttggcggcgaaagaggctcaggctgtcgaaagcgcgcttgccgggacttacgccaagctggcgttgctgtcggtcagtgatgatatcaatgctgcctcgtttcgcagtgaagaaataagatacacgcgatactccttgccctggcagtttggcgcattgccgcttacagacaatctgtcttgggttagtcagatgcgagtgaactggttggatgtgcgcagcgtggaggcgattgattatagcgatgacggtcagtcgctactgacccctcgttggtcggtgagttcgctggttggcagtggttatttctcgcaagcaatcaatgcgtcgctgacgctgaattacggtgggagcattggtttacttaagtttgagaaccgctcccatttatcaggggcgttgagtcaggaggcttattctcaacttaaaaactcgggaatagtgggggcgacaagcaacattttgcaggtctcaccttcaaccggggtgacataccaatatcggcggatgaacggggatacgttgacactggatggtcgcttgtcctggcatgcgctgtttccggtcggtggcgagcggggtagtgtaaaggccggggcggataccggtacctggtctttacgtgcggaataccgtttcgctcaggtttttaaggtggcggcaacccctgtcgacatactgctgtcagagcaaccgggtggattttggggtaaaggctatcgtgacattgattttggctttatttcggaaacggcgttggcggcagaagcaccggtcagggtcttcgggtctgcctaccgagttcgggttggcgcgggctggctgaaaaacgacaaaggtaccggcatgtctattattgtcaatcttcgataa

SEQ ID NO: 449242 - DNA, 567 bp, Serratia marcescens
atgttatctattgacctcatgaataattcctcctgccggagatgtgtgaggtttattcgtctgttcatcctcgcgctgggagtaagtaatttgacgtctgcttgggctgatttgggggtgattaacctctatatgcgagcgaccttgataaaaccagcctgttcactcagcacggactcgatggacaaaacggtaaaccttggtatttggtcggccaagcagtttgtggaaactccgtccgtattaccgctaacgcgtttcactatcaatctcgaggattgcggacccactccaggagtcaaagtcagttggagtggaacaccacatgccagtaatagtggattgttcgctctgacggctggtagtaccgcaacaaatgtaggagtggaattgctggattggaatcgaaaacgcattgcaccgggttataccacgcctgcttatggctttgatgtaaatgcccccagcgtgtcgatcccgttttatgctcgctatgtcagggctggcggcactgtcacggcgggaacagccaattcaatggcaacttttacactggactatttgtaa

SEQ ID NO: 449243 - DNA, 1008 bp, Serratia marcescens
atgtttaaatttccaattttaaaggcaactgcactgtttttctttataaatagttctgtctatgcggtttcatgcgtatccggttgtggtgactcatccgtatccattaatcgcaatttatcctctggcgataattcaattggtgtgactttagatagtaataccataactttgccagcaaaacagatccagcattctgctggaggggagcagtcttgggggcgttatgcaggtggggaaattcctcctgcagggagttttcggacagattggacgtactccagaattgatgactatgtgtctatagcactcagttcaatatctgattgtttggggcgtcgctattatccgatgaatggtcgagttttaagtagttctgattgtagtgacagggtttttactcagggtgaagttacaaataatgtgcctagacaggttgaagcaaggttgagaattgataagaagatagttactggggtgtacagtaaaaatatacttttggttgaggagggtcgatgtcagccaattggttgtgcgtctccccagttaatcactgatcgggtttttgttaatgtcagcattacagttccacagtcgtgtgagataaatgcggggcaggtgattgatattaattttggtaatatttcctctggtgcctttaaaactgcaggggtgagtgctcagggtgttcaaccccaatctagaaatattggtgtcaagtgcgataacattgctggtaatgcgcaactaacccttcgtctgcaggcggataaggccaatggcaatattgtggtctcggatgagaataatgatgttgggttccgtgtgaccaataatagcggagtgccactaatacccaataacttatctagtgttattccgtttgtcctggatggtaatgctcgtcagaatgttacgattcaggctgtgcctgttagtgtgacagggaatcaaccgactgaaggggttgtgacatcacgggcatatttgcgcgtggacttcccttga

SEQ ID NO: 449244 - DNA, 441 bp, Serratia marcescens
atgggaactcgttacgataccgacgtggtcgcctgggcgaatgaacaggcggcgttactgcgtgccggtaaacttagccaactggatattgaaaacattgccgaggagattgaggacgtgggcaagagtgaaaagcgcgaactggccagccggatggcggttttactggctcaccttctgaagtggcaatttcaacctactcaccgtggtacaagttgggaactgacgatcaaggggcaacgcggtttgatagagcgccgtttaaagaaaacccccagtctgaaagttgctatggtcgatcgggagtggttggaagatacctggtttgatgctttggctatagcatcaaaagaaacggggatcggtctggataaattacccgcttcttgcatttggactacagaacagatcctgaaccaggattattacccagagccctaa

SEQ ID NO: 449245 - DNA, 534 bp, Serratia marcescens
atgatagcaaaagtaaaaaaaacgatgccgttgctggcattattcagcgcagcaatgttatccccaccgttatacgcagcggatggcaatattaacgtcactggccgcatcatcgagcaggggtgtaatctggcggttgaaagccaggcgctgtccgtattgatgggcacgataccgcgccaatattttgaacggccgggaatgagtagcgatccgacaccttttactctctatgccaccggttgccctaaagatcgcggtgtggcgttaaaatttgacggtgctgctgcaggagaaaaccccggccttttcgccctggataaagattcgcttgccggcggtatcgcggtcagaattctgggggattacggcgctcatctccaggtggtgcccggcggtctgggatatacctattaccccgaaccagacggctcgctgaaaatcagcggggcggcttcctatgttgtctctgaacaaaaggtcacccccggcagcgccaacctgaccacgcagattagtctggtttatccataa

SEQ ID NO: 449246 - DNA, 549 bp, Serratia marcescens
atgatagcaacagtaaaaaaagtgcctctgctggccttattcagtgcggcaatgctggcgccaccgctccacgcagcggacggcaatattaacgtgaccggccgggtggtggagaacgcctgtttggtggccgccgagtctaagaatatggtagtggattttggtgagcttgcaggccagcagaactcacagtttctaggtcttgggttatttaaaccgataacacttttggattgtccatcaggggctaatcaggtgaaagttagatttgaaggtactgccattagtgaagaaggttttttcgggaaggattacatttttgcccccgatgctggctcagtcagtaatgtgggttttcgggttatagaaagagagtcttgggactctgttaaagttaatggtgataccaaaccttataatttgatgaccggcgccggtagcaaaaatgatattatgtttataatagaggtggttaaagttgatatggataagcctattgccttggggcaggctaccgggaatatacaattttccattctgtataattga

SEQ ID NO: 449247 - DNA, 564 bp, Serratia marcescens
atgaatagaaaaatcaaaagagcacttcaaggggtattgttctgtctaggcgggggcgtgttttctgcacaggcgacggatggtgcgattagaactaaagcgaaatttattcagttcacttgtgatctgagtgcggatagcaaaaatatgattgtacctttggggaatattaaccgtagtcaactgttaaaaaaaggagatgccagttctcctgtggcatttaaaataaaggcgacagattgttcaaaaataattgatgaagatttggttagagtaaatgtttcattgcgtttagctggtaccgcaccgccagaagattggcagctttttgccctggatgaaagttctacagcgacaggagtggctgtcgggataaatcagggaacccatgttaatggggagccttcttatatttcgccaaatggtattttatcgtttagtgattattcaaaagaaaagccagaagtggagttctggttatatgcacgatatgttgctctgagcgataaagtgacacccggtacggccaacctgacgacccaagttgacttgtattactattga

SEQ ID NO: 449248 - DNA, 228 bp, Serratia marcescens
atgaacaaagttaactttaacaatgcgcctttgtggattactgcgaaggcgctggaaaaattaaaacagttccgcgccggtcgattacctcccaaaagaacctatgacaaaaaacacctgacctttcgtgtgaataaacgctggcgcttattttccatagacgacggccataattgggaattactaacccaaaatgattgcatcgtcactgtcgaaaaaaacacttag

SEQ ID NO: 449249 - DNA, 684 bp, Serratia marcescens
gtgattaaaaaagaaatttcaatcgtatcggtgattattgcattattatactcaagtagttttattttcagtcaaggtatatccacatattatggcaccccaactgaaataatagctatagataccagtcaacttttaaattcaagttatgaatttgcattcatatccatatctttttcagccctttttcatcttagattcaaaagcgattctttaactcttcgagttaaattacttctaggtgcgctggctgtgtttataacaacagtgccattctttatttccagttcgaatgattacttaatgagaaatggatataaggggttgttattgaacgtaatacttcttcaggctgctatagtttatcttgttaactctacctctgattttatagataacaattgttcatttaagaataatttacaactattgttaacgcttatttgcattttaatagcatttcaaagtgctggatggatttatgcaaacaacaaaaaaactttattcatggatagtgataataaagttttactggcttcatatggagataaatacatatggggcacctgtttcaaagagtcagctaaattttatgtagcaaaatcagatgaagccattgaactaaagaaaataactaataaggacgttgaagagttaaaagtctgttttaggcgtgcaaaataa

SEQ ID NO: 449250 - DNA, 945 bp, Serratia marcescens
atgaaaatgttttttaatttgaatggaaagaaggtaccgcttcaatccttgaagtacaaaagaaaagatgatcaacttgacgtaatgagaaattggtttttagaaaactacgaaaatccagtacacgcttgcccttataacggtcgtgaagatggatatgcttacatttatggcggaccatttgatgctcatgaagagctggaaatgatgttcggccaacacgtaaaagatgactatattgaggagctagtaggcgaattgcaggaggagtgctatgattggtcaggtaactctaatgatattgatgactggtacgatgatgacctatatagtgcaataacctcttcagacgaaccaaaggttaagtttgatgaaaacatcaatataataagatcgctggggaagggtaaataccaagaggatcaaaaaaggcacttgcttaatattttatacaccaacgtcattactgctctagagacactctatgttgaattattcataaaatcattagataaaaaccagtcttatattttggatttaatagaaaatggcaagtctgagttcaaatggagtaaggaaactttatctttgccttttaaaagtgagtccattgaacaactaaggatggaattaataaagtcaatcaaggaaaacttggttagtgcaagttggcacaatatcgatcaggttataaaacggtacaaggctgcctttaacatccaaacgagaaatgactggccgacgcaagagattgaggccgcaactctcattcgcaatcacttagtgcatcgcggtgggaaagataaaggcggcaagacagtaaatatcacagaacaaaaactagaagagctactcgattctgctacgtcacttgcagaaaaactttgcgacagcttatataatgccttgcaggataaatctaatggagaagaatgcgagttttga

SEQ ID NO: 449251 - DNA, 906 bp, Serratia marcescens
atgattctcatcataacctccagcttcgataaaaccgttgactatatcgaaaaaaaacataatgttaaaaatttatttagatttaatataaatgatttttctagctatcaagtaagttatgatagcgatggttttaaaattgttgacaggaactttaaatcattaaaagaaaaagactgtacatctatatactatcgaaagccaacaccagaagatttattatcgtccggtattgcaaaagagtatcaccctcacatatacagagaggtcttcactctcattgatggaattgttgattcctttgaaggtatttgtttatcaaaaccatcaattattagaagggctgataataaaattagccaagcaaaattggcaaagaaaattggattcactctccctgaacttgtgataacaaatcactttccatttattgagcaaaaattaacccaccctataattaaacctctgtcatcgggagtcgtagagacaagtagccgaaaagagtttgtgcaaacaaaccttgttgatagaaaaaaagaaacaacaaatttaaaatactccccctcttattttcaggagtatcaagataaagattttgaagtgcgagtcacaatagttaaaaactcattcttccctgtcagaatagactccaaagataaaattgattggcgtaagagtgacaatcaaattctgtattccaacactgacatccctgatgaaatcaaagataagtgtctcatgttcatgctggcgttcggtatagagtatggttgttttgactttattgtacataatgaaacatggtattttttagaaatgaatgctaacggccaatgggcttggctagatgctgagttaaacatgaatatctctggtgcaatattggaatatctcaatcatgaataa

SEQ ID NO: 449252 - DNA, 897 bp, Serratia marcescens
atgaataaactaaaaatagtctcagctaagcttttaaatttctccctatttctacacgtgtctgatgacgaaaactacgacactattgaacaatgcaaaatagatagtgacactcattttagatttagctttttgtacatcccattaggggataagttattatattttttcacatttaaaagagaaatcaaatcatctaagagtaatttatcattcaaacttattcacggaattaaatttgacgaaaagcaaaccagagaaactcaaagtactattgagagtgccgtaataaaatatgaagaggacacattaaaaaaagtcaccaaacatagacttcgtcagcaagaagaattcatgaagctcaggattgcagagcgtgagaactcaatgtctacaatgtacaataaaataaattatcatataagcatcatgttagccttttcagcagcacttgtttttatttactctaaaatacaagaaattgccagcatagactatctatggtgtttaatatattatcttctactaataaacttttttgacactttaagtttggggatttttttacgtaagagcattcaagtaaaaggtttctatcgttctagttttaaagagttaagaacatcagaaaaggattatgcactcgctaaatcactttacagggattggtatgctggaaacagtgacgcatcttatttttctggcatgacaagaaactcagaaaaacttctattcagagtaattctgaatggattgattattttactatttgttctacttttcacgggaaaacatgataaaataaataaaaacacaccatccattatacaatactctgacaattacatattatacagacaaggaaataccaatgaaaccatatatcatgctttatag

SEQ ID NO: 449253 - DNA, 201 bp, Serratia marcescens
atgattatttttcggggtaacgctaaaaataaagcctattctagcattctaccaggtatttcagtagcggtcttgaatatccgttacaaattcgaatgtatatttaattatagggtaatagacaagccgctggagctgcttgtctattatgtagttgaatggattactgtaaaatataatcgttatcatttgattctgtaa

SEQ ID NO: 449254 - DNA, 141 bp, Serratia marcescens
atgaatgttttaaacgatttaacattaagaatatgcttagtctatatttcgtccggcaatgagttcatcgaggcaacgctccttttcagcaagggagtgctatcgctgagtgtatgctcagtggcggcaatatatatataa

SEQ ID NO: 449255 - DNA, 1644 bp, Serratia marcescens
atgctgaaagccatcaaagagatgctggttgggaccagggaaataccggcgaggccaacggcacgcgttgcaaccccgcagagcccggccggttattttatgccggcgaccgccgagcagttgctggacacggcatctcgcaagcagtgcctgcagcagttgtgggagaacagcgcactgcccaaagacctatatacggatttctatctgcagccgctgaagcagctcatgacgctgatgcaggtattgccggctgcgcagcagggggaatatgcccgggaaggaggattggcggaagtcaccctccagacggtgacctatgcggtgcgcctggccaagggacatatgttacccccgggggcagcgccggaagagcaggcggcccaaaacgtgcaatggaacatggcggtgttctatgcggcactgtggcactacctgccgctgtttagccaactggagggtgagctccggaacggtcagccctggttggttggtgtggccatccccacagaaccttaccgctttcggttctctgctacctcgtcagaaccggtattggcgataagtcagagcacgatgattgcggcacgtttgctgccggcagcggtcatcgactggctgtcagcactgccggcggccattcagtcgttgatgctgattgcatcacgtcaaccgagtgcattaccggtaatagacgacattgtccaggatgcggtcaggctggcccgtggcgaggatttgttggctgccctgcagggcagtggggctgcgcttgtcacgccggcagtgccattaacgtcgatggtgccggcagttgaaaaagaaactttcactccgccggtgtcgtcgattgataagcaaagcacagtcagcagcacccactcacctcttatcgaggaacaactgccggcagagatagcaggtccgtctaacgggaatgtaccgtcagcaacagatgcattactcagctcggcactggatacaccggtgaacgacaagccgttggccgagatgaagatagaaccggagccggttgtcggcacgggtgaagatattcaggccctgttgtcattaatggccgttgaggtgtctgctccggtgaaccagacagaacaggcgttcggggacgcccttcacgaaagtgaaggccctatgcctgctaataatcctgtgcttactgttgaagtgacccaggaggttgaagttgtcgaagcaaactccgaacttggcgctcctcaaataccaacaccgactattgaaattaatggagaggtaacgcccggagaagccttttggcgttggttagctgatggactcaattctaatcaaatcctcattaacactgcagaggctagggttcatcttgtttctggttttatctttatcaccgtgcctggagttttttatttgtatttgaaacagaggggtctggatggctctcagcgagaagtccttcaggaagactttgaacgcctggaaaaacaccgcaggggaaagggtaagcgattttattttgcgcacctatataaaacgtcagagtgcacaggtgcgtttaaacgaaccaaaggttatctcgttaaagcaagtttgctctatcggggagaaaaactacctgacgacagtccggtattggtgatcccttaa

SEQ ID NO: 449256 - DNA, 1446 bp, Serratia marcescens
atgtcttattctgatacgcctgaacaggccgccattattgggtggtccggccatcgcctggtggtcagggcgtttgccggcaccggcaaaacgtccacgctggttcggtttgccctggcaaatccgggccgcaggatgctttaccttgcctataaccgtgccgtcagggatgaggccgagcaaaaattcccgttcaacgtcgaatgcaagacgtcacaccagctggcctggcccaactatgggcgtcattatcagcagcggctgacggccaatctgcgcatcaccgacgtggcccgccagctcaatacccgtcattggccgctggctcgcacatccatcacgaccttcaacgctttcctctgcagtagtgacagtgaattggggccgcaacacctgcctgatgaagaggcccgcagcggcctgtcggctgacaaaatactggcagcgtctcaactgctctggcgcgagtctgcacgccaggacggcacttttcctgtcacccatgacgtttatctcaagctgtatcagctctcgaaacctgacctctccagacggtggcagacgctcctgtttgacgaggggcaggatgcgaatccggtgacgcagtcgctggtactggcgcagtgctgtgatgtggtgctggtcggcgaccgtcaccagcaaatctatcggttccggggcgcggagaatgccctcgatgctccgcagctggcggatgcggaccagctttacctgacccacagttttcgttttggtcccgccgtggcccgggtggccaacaggctgctggcccgacaaggtgaaacggtacctgtggtcggggaggggggaagcgacagggttgtgacgtgcttaccggatgacgtcaaagagcggcctgtcgccgtattgagccgcacggtggccggcgtcatcggcgcggcactggatgccagtctggccggcaagaaggtgtattgggtcggcggtatcgccggctacaagaccgaggagctggaggacctgtactggttctcggcagacatgcccgagcggatgcagtccccgcagctttcccgggactaccgcaactttgaggagtttgagtcggtggccagagcgaccaaagatgcggaaatgaaccaggggctccggttgcttgacctgtacttcccgctgccgcaaaagctgcaggtgatgcgtgagcatgccgttactgacgaaagtcaggcccaggtgaccgtgtcgacggcgcaccggagcaaggggctggaatggcccattgtagtgttggatgaggattttgcggacattactgaccctttgatgaccgagcgtgagcgtaccgacgaaactaatctgctgtatgtcgccgtgacccgggccagagaaacactggtgctgaacggattgctgcagatgctgatggaaagcgaagaggatgcgacaggagaggctgcatgctga

SEQ ID NO: 449257 - DNA, 651 bp, Serratia marcescens
atgattttattcgacgaaaacaacctatctccagttcgccgcagaacgctagaacgcttgacgtctgctgcccttaagttgtaccagcaaaacacgtttccaactgcagatgagattacgcgagaggccgaatacgctaaagtaacgcttaagacttacttttcgactcacagcgaatttgttgaatatgtcgtcaaaagagtgattggttctttcgacaagccggcgatgggaaacaacgctgaagagaatgtcgcaatgctgttgagctgggggtacggtgaactctattcacatgaagcattaatgcgcgatgccctgcgtatctctcaacaacgttggcaagaagcacagagtagggatgtagaaccatcggcagttgaacaagttgaaaccagtaactctttgctgaaaaagagtaatcgtaaagaagccctcaccgccgcgctgacgccactagaagagcaacttccacaagaaaagatgcaaaaactcatcatgctgatgtcagtgctttatgggacagaggcaatgacggtactcaaagataccttcggactgggacaggatgagattattgacctgaccacctggggagcgaaatcactgatccgccaagcactggaagaacaagtcgaaggaacatcatag

SEQ ID NO: 449258 - DNA, 765 bp, Serratia marcescens
gtggaagagaaaaatcgagagtttcgtgttgaactatttgaatggacagatccactagtaagggcttgtcgagacttcgtagcgtttaaagacgctatcgacatgaataaccgagcagtgggagtttatagccttaccttcagaaaaattcgcaaatttttcggatgctatgatgatttaaagaggggcgcaaccgcaatcatgccgtttcactttttgcaactggcatttccttttacagatagctccaagtgtatcgaagaataccagatcaaacaaattcgtccccagctggtactttccgggaaatataacacctataatatgagtctttgtcaagaaccttgtgacgtttttcccgatattataatgaacgggttggatgatgcttgttttgaaaaaagtgatggtattctcaagacagagacgaaatattttaaaataggccgattacctctttatgtggctcttgaaggtaagaatcgggtctcgttgtataaagaatttcgtcaatgtatgtttgcaaacgttaaaactatttacttccctgagtcttatgcaatgactttggtgaaagtgaagccttttaatgtttggatggtggagtattgtggctgtcaaaaaatattgccatttagtcgtgtaactcttcctgttttacgtgcgtatggggtcaaaaaagaaaaaacgcaatgggggttgtcttccttgttgaagctgcgaaaacaaaaaaaagcggccgtaaactatcagatgcgacgttaa

SEQ ID NO: 449259 - DNA, 681 bp, Serratia marcescens
atgctgacgtttactgaagcacaaaaccaattcatcagcctctttggccaaacggcccgctaccatcaccggtacaaggtcttttctgactttgttcagtgcggcgcgatagcaatacacaaccgcttttgtccggaaaacgcgttggagaagcagtacatgtcgctcatcaaagggtatgaacgtgaggatgtcgaacgcctggcgcacttacttgctctggtacgaatagcactggccgctaaaccttgtgattttttgggcatggctttcatgagtctggagcttggtgataaacatcgtgggcagttttttacaccctggagtgtggcatccatgatggccaaactgcaattcaccggactggagcaacggttgttgactcaaccgttcgtgacgatcagtgagcctgcgtgtggtgccggcgccatgatgatcgctgctgcggccgagattcaggcgttggggtacatgccttcacagcatatgtgggtttcctgcgttgatatcgatgtggtagcgatgtcgatggcatatattcagttatcttcgcttggcattcctggagaggttgtgttggggaatgcactggcagatgaacggcgattggtgatgtataccccgatgcattggttggaagaatggccacttcgcttacagaaatttaaagcaattaattga

SEQ ID NO: 449260 - DNA, 642 bp, Serratia marcescens
atggctacgcaagaaagtgaaacggaaatcaccttgtcagcgttgagcaacctggcattttgcgcgcttgttgcgttaggtatcgctcgccaggatgacagcgccggtaatccactggcggagcatctgtttcttgtccgctggctggccaccgcccaaaaacaaaagcgtttccccaaatgtgttgccattgatattgcatacttactcgaagaaggacggaaaaagggaccgaccagtcagcttcgagaaaaactgcaatccctgtggcaatcctgcacagcccccttgaccatgcagtcagacttgtttcgatttacctatgttaccgagaaactacgagagcatggctggaaaaacttcaccctggacagtaaatcctggagggataagcgttttccggcatcatgcccatccaatggattttacactgaagacagcgcgctacatgtcgcctattctgatgatggccgcttaatcagccagctggatctgcggattgtgggcgatgtcgacatactcctggcgctcatggagcaatccgcgatctacgcagaactgattgagcgaagcgaactctttcatcgggtggtgatatatccggctcccccaataacactttcagtgcctcatcacgggtag

SEQ ID NO: 449261 - DNA, 201 bp, Serratia marcescens
atgttttcaagaaaagcaaaatactttatggaattagctaaaaacaactcattaaatgatgctgcaaattcaatttatataacaccctctgccatgtctcaaggccttagctcatttgaaaaaaacatggggcacaaattattagagaaaaaaaaagcaaattacaattatccaagaaaggcattgagttatttgacttag

SEQ ID NO: 449262 - DNA, 846 bp, Serratia marcescens
atgagtcgtgtctgtctccgcttcgctttccgtctcttcccattatgtttcgtgctgcttttttcgtggggggccgaggcgatacccttccctgtcgtgacgtctgctaccatttctgactgtaaagatccgtcatggaatcccgggagtccgtgccggaaccataaagtatctgggactgcggaatacatggaaatcggatcgaccctcggaacccggccgcactaccaaacccatgtctcattttatgggatgcattgtgacgaaggtgacaaggcgtcggggttccggggatgccgatggttgaagggcagtcacgggcctgccgtcacatgcaagctcgtgatgacgattccagattcacacaacttcgaaatcatgccggcgagttgccctgtgcctgcgacgtggaaatacgaacacaccggcgctgaacccggcggcgagtgtgcgatgatgggttacctcatgggcacgacgctctacactccgttcggtgccttcgacgcggagacggttgccaacagtggttcctcgcattgtgtcaaggcgtctgcccccaacataccgtgcacccttggccccattcgtgatatagagcatggcaccgttgcggcgtctggggtcgacgaacggacgacgagtacatctctatcatgcggccctaagcctgtgatcgagctggtggggggggcagatctcaccctcggtgtgggggtccgtgcgcagctccgtgcgactgcggagggcggtgggacactgcgcgtccaatcccgcgtgattaccgccggggcggcccctgggtcgtatagcggcacaaaaatactagtagtgtctccaaattga

SEQ ID NO: 449263 - DNA, 501 bp, Serratia marcescens
atgacggcaacgttcagacggtactggcccggttgcggtctggtgatgttggtattgatgttcggcccgcaggcacaggcggccagcacgaccatcaaagtgacggtgaccattgtcgcgccaccgccctgtgtgattaacaacaacaacctgattgaagtgaatttcggcaacgacgtcatgaccacccgcatcgacggcagctacaagaagcaggaggtggtgtattcgctggagtgcaaaaacgcgccgaacaacgcgatgaaactgcaaatccagggcaccggcgccggcttcgacagtgaggtgctgcaaaccaacaaggacggattgggggtggcgctgctgcgcaacggcagtcggcagcctatcaacagttgggtgaacttcacttacccgacgaagccgacgttggaagcggtgccggtgaaacaggccggggcgaccctgcgcggcggtgagttttctgccggggcgaccatgaaggtggaataccagtga

SEQ ID NO: 449264 - DNA, 5019 bp, Serratia marcescens
atgaatgacagttttacgtcacagacatccaattttatcagtgccatgagcacagatgttgactcgcgcaccggtcagtttatggttaatctgcccgttgtatcgttagtcggcaatcatcagctgggccctgaactccccctgtctctgagttattcatcactgaacaacattaacagtggttttggcaccggttttgccctgagcctgacacagtttaataacagaactaatttactggaactgagtaatggtgaaaaataccgggtaagccccggtaccgataaggtacgcaaccagaagctcggcagtttccgttttgtgtttaccaatggccagggagacggggaagggtacaccattttctggaaagacggtaaaacagaacgactgacaaaagccagagataacgacacatttctcaccacgactgtcatatcacccgccggacgacagctgtatctgacctggaactggaacgggcaggtgtcccggttgtctgaagtccgggatgagtcagttatattgtgccaggtgaattaccagacagaatcgtctgtgatgacactgtggccgggtaccgaagatgaaaaccacatacagtttcaactgatggatgataagtatctgacccgtatttttcacaatatacaggacggtaatgttctgaattgtcatttcagttatgatgccatatccggaatgaccgggcgggtgctgaccggcgtaaaatacccgaccggcatgacagatgacgttgtttataacggacaggaggggctcaggtatcccgcggcatcaaagatcacttcccgcttgccggtcgtgtttacccatacccgtaatccgggggccggacagccgaaaacaatccggcatttctcgtacaccacgcaaaacttcctcggtttcaacggcaattttggtaactggtcttctgacagtgattatatctataccacattaacggattatacctacggttcaacggaaactattaccagtgacggtgtcactgtcaccacgaagcgggaatataataactatcacctgcaaatctcggaggaaacccggaaaggcagcagtattatccgggaggaaacagcctattacgccaggcctgatgtctttattgacgggcagccggctcagtttcagatgccccgaaagaaaacggttaccctgactgatacctttctgcctgccgcagagcagacccgtaaggaaattacggaaacagcatttgatgagtacggtaatccggtcagtatgaaagcccctgacggcacactgaccacttatgaattttatccagcagaaggcggagaccattgtccggccgaaccgaatgggtttgtccggttcctgaaatccgtgacggtaacaccgcgggacagtgattataatgacacgccggagcaaataacaacatacacctaccgcctgttaggcaaccggacggactgtgtggtacaggacaccgaatccgtattcagcggtgatacgctgttatctgtacgtatcacggaatatcaggaagacaccggaaatacagagtatggccgcgtcacagcattcaccgataccctgtataacccggatgcagaggggcagtcttttaccggcagacaggatttttacaccgaggtcagcgacagcggcctgatgacacaaacggttatttttaccggttatgacgggttgcagtcatccgtcacacagcgtcggtctgtgtataacgggcttttgcattctgaggtttcaccacaggggatcgaaacccgttacacctatgacacactggggcggatactgagctggacacagaatgccggtacaggttatgaaaacatcaccacatgggagtacagcatcacaccagcgggtccggttaccgccaggcgggataataccggtaatcaggtaaagcttcactttgatggtgccgggcgtcaaattcgccgccagctgcttgatactgaccatacacacgaatggtttgatgttgcctcagcacagtatgatgccttcggtcaggaacagcgtgataccggacaggactggattactgacgggacagattccggcaggtatttcaccgtcagcagcattacagattatgacaactggggaaacccgtcagaaaccgtcttttcagacagtctccgtaaactgacccaatcagatcctgtccggcgggtttcccgcacatatgcacagggcggggaaggaatgacacaggttaaaagcggcactgtcagcacccagctggataaaatcaccgggctgccggtgcggggaacgatgacggatgtttccggggctgagcaggggcagcacagttatgtctatgacggactgaaccgtctgcgggaagaaaaagatacagacggtaatattaccacctaccgttatgacctgtttgaccgggaaatttccaggacgctggctgacggcacggtggttacccgcgaatatgcccctgcttcagataacgggcaggtcagcgcggttaagatctgcggcccggggacggacggaaaaacgctgaccatggggcagcgtgaatatgacagtctggggcggttaacccgtgaaacaagcggcggccggatgaccaggtaccgctatgaaggtgcctctccggtgccggctgaaatcacgtttccgtcggggaagtcactgaaatatgattatattccggagctagggaatgttctctcctgtgtgagcggtgaaggaataaaccagacgtatgactatgataacctgaccggtgcgctgttaagtgccgtcgaggaagataccggatacgactgtgcctggtcactgtcaggcaaactgattcaggagcagtttacccggcggaacagtgagcgacaggcagattataccagtacactgggcggcgctcagctcagctatacggatattaccggggcacagacgtgttatacccgcgatgaatacggacgggttaccggaatacaggacaatgcacttgacgttgtgctgaactacgatgccctgaagcgcctgtcagttcagactgtgacggacagagcaggcggtgcacaactgaccacggcatttgaatatgacgatttcagccgtgaaatcagccggacactcacagacagtaaaggcgtcacgctgacgacagagatgcaccggctgaaaaacggactgctgagccgccgcgttacccggcagagcagcacggtgctgaaagatgagcactatgaatatgattgccgtcaccggctggtccgttaccgggtgagtggcagcaccccgccgccggatgcttacggtaatgtgctgtcaggtcagcagtatcagtatgatgcgataaataatctgactgaggttaccaccactctggcggacggcagtaaagataccgccgtgtatcactaccggaataccgcagatcccgcacagctgtcagaagtgacacacactcatgcagcttatccaccgctgattaaactggaatatgataccaacggccggatgattaaagatgaagcgggcagaaccctggtttacgacgtggccggccggttgacggaggtcagcggagaaaatattaacggcggcagttatgagtatgatgccctcaaccggctggtgagccagcatgtcagtggcggtgatgtgcgggagctgtattactgcgggaacactctggtcaatgaggttctggcggctgaccggcaggagacgcggttgattaaacggggcgctcactgtctcggtatgagtcaggggggggaactgacgctgacggggaccggccacaacagcagcctgatatggtcagagaataaaaatgacggggcaacactgcataactggtcaccgtatggcagcgggaatccggttgatttactgccgggatttaacggtgagcggtgtgacccggtgagcggcagttaccatctggggaacggctatcgtgcctataatccggtgctgatgcgctttaactgtcctgacagcctgagtccgtttggtgaagggggggttaacccgtatgcgtattgtgccggggaccctgttaattttaccgacccgtcagggcatatgagcactggtgccggtgtgggcatcggcctggggattgccggtattcttgctgccgcatttaccgccggactgtccttgtacgcagcggcagtgcccgccatgatgggggtaatgacaggcagtatgtcagcgggagcggcggctgtgtcagcatggagttctgtcactgctgcggtcggctcggtgtcggtgacatcccttgtgatagggggattagccgccgtttctgatgtgacggcaatcgccagcggtgccacagaaaaaagcaatccgcaggcatcgtctattctggggtggacatccttggctttgggtatctctgcaatggcaggattcgccgggaaaggtatcgatgcggccatgaaatacggtgtccagggattaacaaagcgaggaggaatactcagtacccaagcggcacacagcattcttccggatggggttattgagtttgatgcatttttactaattaaaggtgggggtaatcccggaaatagggcggttataacttcacatggagttcaggcgctttttgacagtaaagtatcgatacatcatcgccaaaaagtaagattcttctcggatgatggtttcgcattagctgatcctggcatatctcaagtaactggtaattttattgagcctagggaggtgattcatggtccttctagaataaataattactatttgtctaattacaaagaggattctctgcatggtttggtttatacagcacgccaacataatgttgatataattaaggtgacgaaaaatactagtttaaagcatttgttaaataccttgagagatgcccatatagattatgaaaccattgatggtgtattttgcaggtcgactattaaagatactattctggatacattgagagtgagagaagctccatatcaggacgcgttgctatattaa

SEQ ID NO: 449265 - DNA, 1653 bp, Serratia marcescens
  misc_feature (12)..(21): n is a, c, g, or t
atgacaaattcnnnnnnnnnnactccccctgccccaatagagatgacgaatagtgagatgaaaagtagtattttcttgtgcgattaccaaactggggagagaataccgttcgattttgagtctggaataaaatctgactgtcgtgtcagcttcaataaaaatgactatttaggtgctctggaatatcattcgtccagggcgggtgaaggctcttatttattcccggaggatggctataactattgttcactatacgtgtactgtacaaaagggaatattaacaagaaaatagctgcaggtatcgctattcaaaatgttggtgagttcaaaactacttccagtggtactaatactgtgaacggttcaaacggagcacctttcaaggcgcctagtgatatcgaaatcagagctatcgaaccatacaggtatacgcttgacgacttctctatgaacacggattcagcccgtttacccggtacatctaatcagggagcaaatttgtatagtcttaccgggacaaactattatctggacattaagaaaccgtttcataaaatttcctcggtgaaagccaacttgcagtccggtgatcgattcggaagcgactatagctggtattggatttggcaggcgtttgactgtgccgcggattatggaaagagccatttgtccaagacactcaccgtccgctttagtaaatacgagttcccctgtaaacacacgataaataagcaaccaggtgtctgttttgtcttgattgatggtcactgttctgtaatgacgtcctgggaattttacggggaaacctacgttgacatcatcgataattttggcaatctaacctcccctgtgcttaagttcaataatagcaaagggattaaacacattggttttcgtaataactcacgagatgtcttcgaatgcacaggacgacatgtcagaaaccatggtgtccctgaggatattattcagcatattatcgacagtgcccctgatatgatttgtggtgtactgtctccggatgacaataattcaggattcaaaccatgtgttaatgtttctccgacacctgaacagggggcaataattgatgctgatttcctacggatactcaggcattcacatgaaatcactcatgtcatttgcagcgtgcctgatgcccagagccacgatatttctgactatcaggtaatgagtgaccgtgatggtctgccatacctgcttgttttatggcccagcctacagagcctgactattttcccgcagtctgaactagactatgaaaaccgcccctacatctatggccaatacgactgctactccctgatcagggattatctcctccgggagaaaggcattgcactcaatgactatccacgtgaggcctattacctcgattccgggaaaaatatttttgaagtacaggctccggaggaaggcttcgtcaaagttgaggatacttctcttcaatccggtgacattctagtctttaatctgccgtcaaccacactgcagcactcggcagtctatattggtaatggtcagatgctgcatcatttgccgccgggactaagttgtcgggaggcttacagcgaaaaatgggaaaaacgcaccagctcagtctggagacataataatttaatcattaagtaa

SEQ ID NO: 449266 - DNA, 1128 bp, Serratia marcescens
atgcacgcggatgcgcgcaaatttgtcggtatgcacttcggagttgggcgcgccgaccacggtggcgctctggatgcccggcatctgcggttttggcgtttcgcgcagcgggcggaacggcacgtcgtcgttcaacgcattgaaacggcaggtgacgttgcggccgtcgctgctgctgtccgggccgtcttgcacgaacacatagtcgcaacgggtcagcttgaagcggcggttgcggttggcgtccggatgcaaaatcaaggagaaatccttgccggccatcagcccgacggcgttgctctcgccaaacagcagatggccgtcgctttgcatttcttccaggcgcagccgcgccaggttttcaccgcgttcggtatccacataacccgccgcgtagtcgtaccactccagcggggtgttctgcaggccgaggcggctctcttccaccttggtttgcaggttcttgcgcgggttctggaagtcaaagtcgcgcagcacgatttcattcgggcgcactttgcgggagcgctggatgcgctggatcccttcgcggatggcgcggttttcttcgctgtccggcatgaacggcaacacggcgtaaccgaaatccagatcgtcgaaattctgccggtcggtgatcaccagcgtgtgtttatcctcggcgtgatcgaagtaataccagatgccttcgtcttccagcaggcggctgataaacgcgaaatccgtttcggaaaactgcacgcaatattcacgcgtcggataagtgccttgaatatccagacggtagtcggcaaaaccgtagcgcgagaagatttgctcgatgatgtcgagcacgttcaaatcctggaaaatgcggctgttgcggttttgcatcaaaaaccacagccaggtgctcagctccagcttataaacgaacttatcctgatgctgccccgaatcggaggcgccgatcacgtaagcgtaaaacggccgcgcgccgaaatccggcctttctatttgaatgctgatcccttgacccagcagagattcataatcaacgtccgcctgttcacattcgaattcgagcgtatattgcgagttgctcgacaacccttctttggtggtgaagctgagtggaaacgcatttaa

SEQ ID NO: 449267 - DNA, 231 bp, Serratia marcescens
atgaagacgcgtttttctgacaaacagatcatcagtattctccgcgaggccgaggctggcatttccgcccgtaagcatgctatttctgatgcaacctttacaccaggcgtaaggggtttggtagtatgggagccactgaagtataacgtcttaaatcgcttgaataagagagcacccgtctcaagaagttgcttgcagaagccatactggataaggaagcattacaagtga

SEQ ID NO: 449268 - DNA, 1233 bp, Serratia marcescens
atgctaacaaaaggttgggacaccatcagtatggtaagacaggacaccgttaatgcagatatggccgcaagttggccgacgcttgatcacggtttttactacacctccgacgaaggttatacgtgtcgaggtgagttcaattgctggtcgatcgtaaatggcggtggtggtcgactgttgcgtatgcgcttgccaattcgatcaggtacctttgagactagcggtatcactcgatcacttgccggagcagtcgctatcatcgaagttacactatcactactgccacagagccccaaacaattacagttgagatccatttttctgcataaggcccaaaattctctagaaatgcagcaggaagaaggcggctggatacgcggtgttaccctgcaagatcccgcaggcacacttggtccactgaaattagttgtgctcgactgtatctgcaactatctggttgaacatccggaacagttcacccatacctttgcccaagttaactttgccaaggacagcgcgccaaaatgggcaaccccccataagtgcgcatactcctatctcgatacagggttcttagctattttagctgtttgtagtgaccgagacattcataaacttcctctgggtatcgatgtgtcagggatcaatcagggaggacagtcctgttacgtgctttcagcacaaatgctgctcgaacatattatcttgccaggcctgctcgacttgtatcaaggggcgagcccgcgggattttaattacgtcaacaatgaaatgatcaatattccagcattgcgcatgcagcccataaaatcgggcgcaatttggtacacccccattgtctttgctggctgcaataaggcacgaatactcggagacttcgtatccattgactacaaaggaaattgcgatctgtacgcaggaattgatatgaagtggaatggctgggtgaagatgaatacttcacttgttaataatgtgatcacctttgtaaaacagtcgtccgacttcaaacatcaagtccacattccctggtatctgaagtggctctcccccatcgtgagtttgatcaccgcaattgttgcagcctccatttccgatgaccttatccgcgcaattgccaatcgaggcggctcgattaaggcagacagcatcgactgtgtttcctggagccggggttcgcataaagctgaatctagtttcctcgctgagtcccttatcatcaaatacatttaa

SEQ ID NO: 449269 - DNA, 999 bp, Serratia marcescens
  misc_feature (822)..(831): n is a, c, g, or t
atgagtaataaaagcaatgtcatgcagtccgggttatcccaacccatctccctgcaactcgaacgtctcaacgagagcgtccgccaaactatacgtgaatcgtccctttatagctgtgctagtcacgtatacccctcagaagaagcgctgaaggaagcacggaacttcgcaagtacaggcggaattagtctagctagcgcggtcaccaccaatgggtgggactcggttagcatctgtcgtgtttcggcactcaatcagcgaattgcgttggaaaaaacttatcctgacagcatcgatactgtaaatgcccctttcgcgctaaaggccaagttcaaagcttggtccatcactaccgggggagatggccgcaacgtaaaggttcgtgtgccgctcggatttgggacctacaaaggaatgaatggtaagtcttatcaggtcgacgggatgtccgcagatgtctacgtcaaactcagctacttccctgcgcccagaccagttttagcacaggatggcgactatgacctgcaggtcaacactcagcttacagatccagatgatcctatcgcggcggtgatatcactgaaggacccaaataaggttcttccagacatggataaaatgttgctgcgtggcttgttggaacaatggcttaatgagactgagaaccttgagcaattcgatactctgtttagtaccgtcgtgataaataacatgggtaatgacagtgacgaatttaaatggctccgggcaacaagcatgagctatgcctataccgactcaggctctgaggaaaatagtatcttcggtgtgttggccatgacnnnnnnnnnnccttacggctggaacgggatgataatgcgagttttctcatcagtcgtgagattttcgtcaagtatcaattgctgccagcattgccatacatatttgaagacactagtgctgacaactatgtgctcgatgcatcaggtaccaccattatcggcaagaacatcaagttag

SEQ ID NO: 449270 - DNA, 393 bp, Serratia marcescens
atgaatgataatgcttattgtcgcgaccaccaccgcaacaacgattccaactatgagggccgtgagctttgtagccaaatacccagttaccccagtgactacgaccccaatcagagcaataatggcctcagttactaccacccatactgcgatatctgttgtgttttgcacataaggatcaccgaccatagcgtagaccatgacttgctcacctttgctattaacggcaagctcaaacgtttgtttggtaacgatgtgggtgtaggcgacgattcccggagaaatatcagtgcgtaccttgcactcagtacgaacgtatgtctcatcgaaatttatatcaaaattttctaccactggatagtaggtgatggcaccgactttaatgccttctaa

SEQ ID NO: 449271 - DNA, 231 bp, Serratia marcescens
atgaacaacatacaagtgattcgcaagcgcctgggaattacgcagtcagagctggctcaacttgctggatgcacgccgggtgcaataggccattacgaggccggacgacggagcatggatatacaaacttgccgcagtttcgtggcgatttttaacaagcttggcgagcctgttgggttggatgatgttttcccgccaaccaaccaccgtgaaataagcccatcaatttga

SEQ ID NO: 449272 - DNA, 171 bp, Serratia marcescens
atgaagagtggcgaaattccgaacttgcacggcaacagcagaagacaattcagaaccatgtgggtacctttcaccaaaaaatcctcggccatgtggatggatggcgggacatggggattggtggaatcgttgaccttctccatgaagagagaaaaatcatcgctgaagtga

SEQ ID NO: 449273 - DNA, 1272 bp, Serratia marcescens
ttgacgcgccaggatcgccgcatcctcaagcccgttgaccggccgggcgcgtacatcgcgcatgaacgcatcccatttgtcggcatactcgatgagataaagcttcctcgcctcgtcggccagcttctgcgccgaggccagcgagttcaccgcgtttttcccttccccactgtcgcgcagcacccaggactcttcttcgatcatgtccttggcggcgtcatcgagctgcgccaggaaaacgtcgcgatagctggcacgggtatagaaccccggcacggcggtatcggtgaccgtcgcctggctcttgcggcgcagcatcaaggagacgttcggtccggcggcgtcggccaacgaaatatcgttgatcgccgccggcaacggtttctcttcgatgcggcgcaccacccgcacctgcatcggaatgttcatcgctttcacccgcgccaggcgcagcagatcgccgttcatcttcatgaccggcgcgtccggcaaagagaacatctcccgcagatggtaagcgaagatgcctttgttcatgtcggtgtacccctgcggcataaaggtttcccagcgcgccatgaaccagtcgaccaaggcttcggcggagcgatgcgaaggttcgcccatcatcaggtacactttcaaagtaccgtagacgtccttgttggacgccgagacgtcattcttgagttcgtccgcgatatagttttccaccgccggccagaagatctgcagcaaatggcgttggtaggttttttgcgccgcgctgttgatcagcttgtgctcgaaatagggattcggcaccggcgacacttcgccgcccaattgcgcgttcatgtagcccagctgctcataggcggaaatgacatcgtcgctgacgcggttagtcaccggtatttcgcgcacgatgcgcttcgtttcgtcaaagcgcgccgcaatgtaagagatgtaatcgctctcccacaggtaacgcatcgccagcaggttaaacgagaccgccaacagaatgagcaccagcacatagcggcccagagagctcatgcggctgccgagcggcctggcgtgcgaagactgctgcatcaccccgcgttcttgccgggcgtaatccagctccgggtgataaatgcgcccggtcgggcgagcttcatagatatccgccgcttccgcgttgtagatcgccccctgcggcgacaaggcgatggtgctgcccagccacacctgctgcagatggcaggcgtagcccaccggcgtttgcgggaagatctgctctaa

SEQ ID NO: 449274 - DNA, 768 bp, Serratia marcescens
atggctgacgcgcgccaccatctcccggtagagggtttcatactgctcgaagggggtttctccctgttcggcgcggttcaggctgaaccccatgcctttttgcaacagatcgtcgcccagcatcgacaggaaggtctcgccgccgaccagttgatcgaggtggctgatggtaagatagaccggcagctcgctgcggaaccacgaggccatctccagcaggcgcacgcgcagcgcgtcggcgaccgactttctctccgtcagcgaggcgtgcagcaaccaacgcgcatcaagacacagcatgatgccgtcgatgcccggatggcggcgatggcggcggatcagtttgaacagggtgtcgcgcgccctggcgccctcttcccccagaccgttcaactgcagccattcgccggaagtgtcgacatacaccgaattctccgccagccaccagttgcaatcctgggtcggcccgacgtccaccgtctgctgcaggccatagtgctcggccagcaagaagcgttcgccgctttcgccgatcagcgaggttttgccgctgcccggcggcccgatgaccagaaaccacggcttttcgctgacgtaacggcgcgtcaggcggtatttgaagcgctgccagggggtgcgctgcttcgccgtgccgacgtactgcaaggtgcgcaaagcgtcgtaaaagcgcgaggtcacgcgatctcgctgggcggtcttgcgtttggccggggccggcgctcgcgcgtggcggaacacccaggataa

SEQ ID NO: 449275 - DNA, 135 bp, Serratia marcescens
atgaacctttacaaaggtaacgggaatattttcttgctggaaacgtcgctctatttcgtcgataacatggcctgcagcataatgaccaacttcattggcttcaatgctgttgcatcaatatacttcagcaaatga

SEQ ID NO: 449276 - DNA, 405 bp, Serratia marcescens
gtgcggttgtatttactgttggccaaggattcgcgcagcttgtcggcgaccgtctgcgcgcgcgcctcggacagtttcaggttggagttgttggaggtgttgcgatacggtttgttgtcggtatgcccgatgacctccagatcgcccggccacggcgccagcgcttcccccaaacgctcgatgttgcgtttctttttaaactcttccgacagcttcgactgcccggtggcgaatgcgccgtcggaggtgaagatcaacagccagccgcgcggatcggcgcgcacctccagccacccttcgctgaggatttgcggcagcggctgcggcagcgtctccatgatgttgattttgcgcggctgcggcggtgtccaggccaaaatggcgttgcgcagcgcgcgggactga

SEQ ID NO: 449277 - DNA, 798 bp, Serratia marcescens
atgcgcaaattgaactcgctcaaggtttgcagcaacagcagttccagcagctcggaaagcccgccgatcgtcatatgcacgtccgggcggaaaaccgactccagacgctggctgatcagcccaagcaattcggtggtgaaagcgggcagccagccgatggcgcggaaatccagcatcggcggcaaggcgcgctcatccagcagcacccgacgatcgctggtcagctcgcgcacgaaaccgaccggcagcacgctttccgcgctgctgaccgcgtcctccaggcttagccgcgtcaccaggctgcccagttgcatcgtgcacacgcgcggcgttccctccaggctgacgccgtggttgcgatccggcacctcggcgtccatggtgcgaaaacggctgctttttcgcgcatcctggataagatcgatctgggcgttgccggcgatatccatcagcacggacaggcacaccactttcccctggcagccttctcccagcaccagcggcggcggcagcggaatatcctcaggcatgctgaacgccgtgccgtcggggaaaacgcccttggctttcttcagcgcaaacttgccctgttccaatagcccgttgtcgatctccagcgtcaggaacccccaggtgaaggtttcgacgctgcgcaagcgcgcttcaatcaagtgctcgaaaaaacgttcctgctgctggaaatgctgcggttccatcaacatgccttctacccaggcgacgcgttgtttaggtaacatgtcattcatccattttgtcgttagtcactatgctgagtga

SEQ ID NO: 449278 - DNA, 228 bp, Serratia marcescens
atgctactaccggtggtgccgattctactgccggtggcgctggtcgaaaaaccagtggtactggtcgaggtacccgtggtactggtcgaggtacccgtagtactggtcgaggtacccgtagtactggtcgaagtgccagtggtgctggtcgaagtaccagtggtactagtagaggtcccagtagtactgacactgataccggtaaagctggtgctgctaccggtctga

SEQ ID NO: 449279 - DNA, 750 bp, Serratia marcescens
ttgatccggtgcgaggtcaacggcgcggaaattgaacgcagcagcctggggcatctggcggtgcagtccagcaccctgaccaacctgatgtttcaccaggacgtgatacaggacgccaactggtacgcctgccaactcacgcagtgcctgtggcaggcgtcgaccctggatcgtcaggtgatgggcagttgtcagctggagacgtgcagctggcagacgatcgcggggcaggcgcgcatctggttcacctgccgcctgtcgggctgcactttggcgcagctacagctgcagggcgccagttttcaccgcagcgagctggaggggtgttcgttcgccgacagcgatctgacctcggcgatcttcgccgaagcgcaggtacagcgctgcgatttcgaacgcgcgacgctgaccctggcgcaggggcagaaggcccggttcagcgaatgcgcgatgggcggcgccaactgggggcgcgccatcttgccgcaagcggaattcagggcgtgcgatctggcgttagccaatcttgagcaggccgaactgcgggaagcgaacctgatcgaacagccgttgaccgccgctcagcaacagagtgctcgcctgcatggcgcgcagcgtcatcgcgccgaaaacgtgccgcttaccgccgatccgttcttgagtgcgatcgacgcctggtatgcgcatcaacaaccggggccgcggcaaccgtcgtatcaacggccaacaggagtaagcagatatgtataa

SEQ ID NO: 449280 - DNA, 345 bp, Serratia marcescens
atgggcgggatcagctttgccggctgtgacccgatgataccggcgccgggcccgaataccgcgcccaacaacaccggcataccgaacgtgcctaactatttcatttgcggcggcaatgaacagaacctcggcaccattcgcgtatcgacaatcgattctggggttgtaattggcgccgcgtcgggcacgcattcggcgcagatgcagccggtgcaggggtcggggaagtatttcattcagggaatgccagctacgcggctgggggattcctgcatgacgaacaacaacaacatggtcgccactcagatcgcgccgagtcagacaaaatattttatcaatgcatag

SEQ ID NO: 449281 - DNA, 192 bp, Serratia marcescens
atggctacgaccctcaccccgactcaccctacattctgctttttgtttgcggccgtgcgccgttctgcgctgaccgcttcaccgcgtatggtgcgcaccgtggcggattctgagcacaacgctcgccgcctgctggcccgtgattacgtgttgtcctttgccggtcgtctgccggttaaggcggtggcatga

SEQ ID NO: 449282 - DNA, 267 bp, Serratia marcescens
atgctgttgctgatgctggtgaaggagttgctttcgccggtcatcgagtttgatacgccggtgcagctggtgctctgcccggtgaacgaggtgctcagcccggtgaacgaagtgctgacgccggtaaatgacgtgctcacgccggtgaacgaggtgctgacgccggtgaacgaggtgctcacgccggtggcggtgaggctgacgccggtcatcgacgcgctgacgcctttaatcgaggcgtcaaacccggtaatgctgaagacgtaa

SEQ ID NO: 449283 - DNA, 534 bp, Serratia marcescens
gtgcgcaataaataccagcagccgctgcgctacgccgggcaatatcaggacgacgaaagcggcctgcactacaacctgttccgctactacgaacccgaggtggggcgtttcaccacgcaggatccgatagggctgcgcggcgggttgaatctgtatcagtatgcgccgaacccgctgatgtgggtggatccgctggggttgagtagtaagccttgtaaaacagaaaaagagccgaaagattcttatgaacaagctaggaataaagcactcaaatggcttgaggaacgtggtttcaaagcggaaaaagtcaatacagggaaatttggcgtaaccagaggacaacctgtcggaatgaccacccttgatggtaaaacagggtttaggattgaatatgatgagagaagtggtgctcatatcaatgtctttagtgggaaggataagggagagcacttcttatttgatgcaaaagaatctacagtaactaagcttcaggaactatttgatttcccgtcgaaaccgtggagaggaatgtaa

SEQ ID NO: 449284 - DNA, 936 bp, Serratia marcescens
atgtctgttattcatagattagctgcagttttacgtcaaagtgactctggtatcagcgcctttcttatgaccgccccgagaaagtacaaagtttacaaaatccctaagcgtacgagggggtttagagtcattgcccagcctgccaaagggctaaaagatatccagcgagcctttgttcagctctataacttccctgttcatgatgcttcaatggcctatatgaaagggaagggaattcgtgataatgctgcagcacacgctggcaaccagtatctcctgaaggcggatctggaggatttttttaactcaattacaccagcaattttttggcgatgcattgaaatgtcatctacgctgacacctcaatttgaaccccaggataagttttttattgaaaagatccttttctggcaaccgataaaacttcgcaaaaccaaattgatattgagtgttggtgcaccttcttcaccagtcatatccaacttctgtatgtatgagttcgataatcgaatacatacggcttgcaaggagctggagataacatacacacgctatgcagatgacctcaccttctcgtgtaatagccctgatgtactgaaagcagtaccttcgacacttgaggcgttactgaaggatttattcggaagcgcactcagacttaatcacagcaaaacggtttactcatcaaaagcacataaccggcatgtgacaggagtaactataaataatgaagaggaactgtcactagggcgcgataggaaacgattcatcaaacatctgattaaccagtacaagtatgggctccttgataatgaggataaagcttatctgaccgggctattggcatttgccagtcatattgagcctgggttcatcacacggatgaacgaaaaatactcattagaactcatggatcgtctgagaggacagagatga

SEQ ID NO: 449285 - DNA, 1653 bp, Serratia marcescens
atgaccaaacaatatgaaagaaaagcaaagggtggaaatttactgtcagcgttcgaactttaccagtgtaatactgatgaagcgcctggtctagataaaatgttggtggatgagtggttcgaaacctgctgggattacattcaggatggatacgttgataagtcaggaacgtttcgtccagataatgagttctatcttcgccgcctagtgctaaagaattttcgccgcttctctcttctggaaataaaattcgaagaagatctgacagtcattattggcagcaatggtaaagggaagacaagcatcttatattcgatcgcaaaaacgctgagttggttcgtcgcgaacatcctgaaggaaagcggtagtggacaaaggttaagcgagctgactgacataaaaaacgacgctgaagataagtatgccgatgtcagcagcactttcttctttggcaaaggacttaagagtgtgccgctcagattgtcacgctcagcccttggtacagcggaaaggcgggacagcgaggttaagcctgccagggatttagctgatatatggcgagtcatcaatgaggtgaaaacgatcaacttgccgacgtttgctctttacaacgttgagcgatcacaaccctttaaccgcaacacaaaagataatgccggacgtagagaagagcgctttgatgcctataatcaagcgcttggtggcgcaggccgttttgatcattttgtcgagtggtacatatacctgcataaacgtactgcatcagatatctcaagttcagttaaagatcttgagcaacaggtaaatgacttacagcattccgttgatggcggtatggtttcggtaaaatcacttctggaacagatgaagcaaaagcttagtgaagcaacagaaagaaactatgctgcggcttcctcgaaaatgttaaccgagtctgttcaaaaaagtattgttgagaaagcaatctgctcggttgtccctagcctcagcaagatatgggttgaaacgacaacgggttctgatttagtcaaagttaccaatgatgggcatgatgtcactattgatcaattatctgacgggcaacgtgtattcctgtcactggtggccgatctcgcgcgaagaatggttatgcttaatcccctgctggaaaatccattagaggggcgtggcattgttttgattgatgaaatagagcttcatcttcatcctaggtggcagcaggaagttatcctgaacctgcgcagttcattcccgaacattcaattcattattacaacacacagtcccgttgttctttctactattgagaaacgctgtgtgcgtgagtttgatcccaacgatgatagtgaccaatcattccttgattctcccgatatgcaaacaaaggggagtgagaatgctcaaattcttgagcaggtaatgtacgtacattctacaccacctggtattccggaatctcattggctaggtgattttgagctattgcttttagaacattctggagaacttgataaccggtctcaagtgctttacgagaaaataaaggcacactttggcatcgacagtgctgagctgaagaaagcagacagccttattcgcattaataagatgaagaataaaataaacaagataagagctgataaggaaaaatag

SEQ ID NO: 449286 - DNA, 651 bp, Serratia marcescens
atgaaagagttagctcggctggagagaccggagattctgggccagtatacagccggtcaaaatgactggatggagattgatcaatctgcggtatggccgaaattaactgaaatgcagggtgagttttgtgcctattgcgagtgccggttgaaaagatgccatattgagcatttcaggccaaggggaaagtatcctgctctgacgtttatctggagtaacttgtttggttcttgtggcgattcaagcaaaaggggcgggtggctacgttgcggtatatataaggacaatggagcgggtgcctacaatgctgatgatcttataaagcctgatgaagaaaaccctgacaactacctgctatttctcactaccggggaggtcgtaccggctatgggacttacgggtagcgcgcttagaaaagcggaagaaactatccgtgtttttaaccttaacggtgacataaagctgtttggcagtcgtagaactgcagtgcaagcaattatgcctaatgtcgaatacttgtattctctactcggagagtttggcgaagatgagtggaatgaaatgcttagagatgagcttgaaaagatagagtctgatgaattcaaaacggcgttaaaacatgcatggactttcaaccaggggtttacataa

SEQ ID NO: 449287 - DNA, 372 bp, Serratia marcescens
atgaaacaactattccttttggcaacacttttagttgggtccgtatcctcagccaatgccgaagcggtgaccaaattggaaggttggacattgttggcagaaggcaccgattaccaattctatggcaagaatggctccgttgaacgggccaagggaattcgttcagtgatcatccagcaagtcccactcgaaagcactccaaataaggacatttattactcaagattcttgatctctgaccaagattgtaaacaaggtgttggcacggtaaaacttacggagttatcagggaagctcaagatgaatgcggattatgttaatggtggcaacagcattgcagctgcgatagcggacgtactttgcggaatgtga

SEQ ID NO: 449288 - DNA, 843 bp, Serratia marcescens
atggtacaagcaatgtatgtagagggttggtactccgattggcgctggcttgacccgcctcacatcaacaatgattatccgagattgggtgagttggacttcaatttctccagggttgttttccatgctggcgatgaagtatttaaaaccagtagcggtaagttagattgtttcggtatttgtagtctttattttcatacctacgatgcgtttggaaatcatgtatattctaaaggccttgagtttacatatggagacatcagttttagtgttgatgaagcaaatgcgctgatgagaaacattttgcctttggcggcaacaattcaatttagacgtgtggagcagcgtcacccgcactgtttagaattattgttgagaacggggctacgtagttacgtattaggctccgactgctctggcttattgccgcctctgccgccaaccacgccacggccaccggagccgctttcttgcgcggtgacgtggcaaagcagcggcgagattgattttggcgtgatgaccgcgggtgaaaataaagtgaagggcattgccgccaaacttgcctgccagggcgggacttcgggaaaagctcgcctcagatttaccgatgtcaatcaggtgggtgcaaatacggtaacgctgcgtaagagcggcacgaatgatgaaataaaagcgaagttgtcgattggcgagcctgattcgtctaatgagcaggtgattgacgtatcacccggttttaatgcgacctatgcgtttgtcgctaaattggacggcgcgcagatgagcggtatagatgctggcacattttctggcaatgcgctgattgtgtttgaagttatttaa

SEQ ID NO: 449289 - DNA, 480 bp, Serratia marcescens
atggacgagttagtaaaaaagataagtagctatcatatctttaattatttaatcccaggagtaatctttgcttttctcttcgacaccatatttaactataagtttaagctcattcaagacaatgtcttgataggttttttcttctactattttgtcggttcaattattagccgcgtaggctctttaatatccccgttaattgatcttattttcagagtaaaaaaatcaagttatcaagactatatttcagctgagaaaaaagaccctaaaatagaagttttatctgaaataaacaacatgtatagagcattttactcaatgtttcttattctttttatagcaagcttatttagctttccagagtttggaaaagtaaaaataacaatcagcggcacattgttttttgcattcattatatatactttatcatacaaaaagcaaacaaacttcatttcactcagagtcgttaaaagtcgttaa

SEQ ID NO: 449290 - DNA, 957 bp, Serratia marcescens
atgcagagtgaactaataggaatagaaacaaggtttagagcatatacattgaagtcttctggttcgtgtttttcttatgcgacaagaaatgagtttatactaatagaggcaagggcccctgaggaggtccgtgaaaggttgttaggcgagatgagtatgttggggcatgcatctatttctgttctacatataaccagttgggatttagatcattgcagtccaagtgaactagagtggattttgtctaatctttctccaaagaaaatagagtatccgggatatgaaccagaaggtgacagaggtcaaaatgcgttgaggctaataaaagattatgaaaagaaaatggctagagaaaatgtcaggataacggcggtgactcctgagtttgtgaagagtttgaaaccaggaacaacgtatagttataaaaatatcatttttcatccaagggaatactcaaaaaaagcaaatgataactctataattaaattttttcgttcaggaatgtttaatgttttaagcttaggcgatgttgaggcaatagagataggggctatgttaaagaatagttcgttgataaaagaagtggatgttttaattttacctcaccatggaggaagtagtgaggtgttaactaaagatctgttagaaaaaatagagcctgaggtggctgtatgtagtagtaatcatgggaatcagtatgaacatccaagacagaatgtaagagatctgctgtctggcttaaaaatagaactatatactacgaagtcgcaggatgttataattgaatcgaaaaatagccacattggtaattatgatgtgtatgatttgaaggtgggcactaatgaagttaaaagtaaaatggaaaatttaaagcccaagaaatttatcgaactgcgtaaatataaagataatcagagtggtagctttaaatcaagtaattataaaagacccaattag

SEQ ID NO: 449291 - DNA, 456 bp, Serratia marcescens
atgagctggtttacccctgaggtgatcgacattctgatcgccattcttaaagcggtcgtgatcctgttggtggtcgtggcgtgcggggcattcatgagcttcggcgaacgccgtctgctcggcctgttccagaaccgctacggaccgaaccgcgtaggctggggcggctcgctgcagctggtcgccgacatgatcaaaatgttcttcaaggaagactgggtaccgagattctccgaccgggtgatcttcaccctggcgccgatgatcgcctttacttccctgttgctggcatttgccatcgttccggtcagcccgacctgggcggtgtccgatctcaacatcggtattctgttcttcctgatgatggccggcctggcggtgtacgccgtgctgttcgccggatggtcgagcaacaacaaatactcgctgttgggcgcgatgcgcgcctccgcgtaa

SEQ ID NO: 449292 - DNA, 144 bp, Serratia marcescens
gtgacgctgaaactaactgattatcaggcccgcctgctctattcacacctgtgcgcattaactgacgccggggccgagacgctcaccgagaaagagctggccgcgcttgaggaactcatcagcaaattacgtgagggaaagtaa

SEQ ID NO: 449293 - DNA, 564 bp, Serratia marcescens
atgacaaccatcaagcgctttacccctgactacaaaatgcacgcagttcgctttgaggctttcgcacgtgaagctgagcatggcgagttagttcagtttgatgaccaccagcaagtagtgagcaccctggaggctgagcgcgatgcgctggcggatcgagttgagcgccttagcggcatgctcaccgaatccagagttgcgacaaagtcggcagaagaacgagccgatgcgctggctgtggagaatgcggcgctgaaggatgcaattccaagacttaaaaatatcgactattcaaatgacaacatggatgacgtgtctcttgctgaggatttcgggttcaatgccgcagttacacaaattaacaatatggtggtcgaaacaccggccactgacgcagcacttgcagatttgcaggcgcagggagtggagaagtttgctgcgcagcaagaacagttggccgctgactatcgcaaactatctcctggctgttacggagaaacatcatctgctgaaaatgcactgatggcgcgggattttgccgcccagctgcgggaggccaaatga

SEQ ID NO: 449294 - DNA, 258 bp, Serratia marcescens
atgaaatttaatatcaataacccagtgaaagtaaagctaactgactatggacgtaatgagttattgcgccaagacaaggagctaactgatgcatatcccggactgattctgccagcgaatcgctggaatgcggatagcgaagggaaaaacaaatttcagctatgggatctcatgtttcggtttggacctgtgatgtacaacggcggccaaatacctttcgaaatggaaattgagttgggggatgaccaatgcatttaa

SEQ ID NO: 449295 - DNA, 624 bp, Serratia marcescens
atgacacaaaacgaatttcaacgggcggctggtattagcgccgggttagctgcgcgctggtatccgcatctgctcgccacctttgctgagttctcaatcgagaagccagcggcacaggcaatgttcattgctcaggtagggcatgagtcggccggtttcaccgcggtcgtggaatcgttcaactacagcgtgtccggcctgcaatcgacctttggcaagcggctaactgcggagcaatgcaaaatgcttgggcgccagcgcggcgaatcggtggtgccggtgaaccgccaagcggcgatcgcgaatctcgtctacggcggccgcctgggtaacaaatcaaccggggacggttggaaataccgcgggcgcggcctgatccagatcaccggcgccgacaattatcgcgcctgcagcgccggcatcaaaaccgatttgctgttggtgcctgacctgctggaaaaagacgagtacgcgatgcgctccgccggctggttctggaaatctcgcgattgcggccgcaatgccaacgatatcgaatgggtaacccaacgtatcaatggtggcagcaacggattatctgatcgcaaggaacggtatgacatggcgcgtaaggtgctgctatga

SEQ ID NO: 449296 - DNA, 357 bp, Serratia marcescens
atgctggtggcggtagctctcggattggtcgcgtggctggccgtcagcaactggggttaccgcaaagagctgcagttgaccggccagaggctttcaacggagcagttgaaaaacagcaagcaggcagggttgatagctacgctgcaggcacaggatgaagttaatcgcgcgctggtagcatcacaacagcagcatgagcagcaactacgccagcagtacgacatcttgcagaggaaattccgtgaagcgattaaagataatccctgcgctgctgagcgtatgcctgattctgtcgttgagctcctgcagcaaaactccaccgccggcgccagagcaggtaataatcctgccccctga

SEQ ID NO: 449297 - DNA, 267 bp, Serratia marcescens
atgagaataaccgtgttggatgacgatccgggccgcaaggttgatttgagagtcgaaagatattgcgtgttcctggatggcaaggaaatgaagatggttatcaccgccgacgatgttaagggcgaggttgtttattgcccattggacgagtcaggctatttaatccgtgatggcgacgaggttaaaaacgtgactgcctatggtcgtgttgagattcaatttcgtcttccatatccgataccacgtgaagatccccctgatgaatga

SEQ ID NO: 449298 - DNA, 210 bp, Serratia marcescens
atgaaagacatgaaaattgaataccgggacggagagttggtggagttgagcatagacggtgtgagttttctttctgcgtccgctatctccttcagccatacagcaaacgagacgctgccaacgatcatcctgacaatgtctgtcggtgtcggagaacgactggcccccgccagcccttccagcgtaaacctgcggattatcgagaaatga

SEQ ID NO: 449299 - DNA, 261 bp, Serratia marcescens
atggagatgtactgccgccatgttgttcaggccagaataattaccactcaacttgaagagtttgaactcgagtggctatcgcgtgaggacggtctcaagcgctacgacaaattgctcgctatgcgtgagcgcgaagtgcgctcggcatcttcactggcaacacgtttacggatcacccgacaagccactgcggacccaaaaacagttggtcgcgcgcacaaaaatctggctcgggagaaaaagccctgggaaattgactaa

SEQ ID NO: 449300 - DNA, 267 bp, Serratia marcescens
atgaacggcatcggagggagaaccattgttgaggctcaggagcgcgttagcctccaggagtaccggacatgggttaggtaccgagaaaaatatggctctctcaacggtattatgcgcacggaatggggctcagcgctggtgtgttccgtcctcgccaacataaaccgcagtaaaaactcacagcccttcgatatcagtgatttttctcctcacatgacctccaataaatctattagcttggaagaagcaatggcgttgtgggattaa

SEQ ID NO: 449301 - DNA, 1752 bp, Serratia marcescens
atgaccacttacaacacaggaaaccctgtcgggcctaatggctcagctgatccgcgcgatttgtatgataacgcgcaagctatggatttattgttaaattctataatcgataaaaccactggacgtattggtaatgagttaatcacctgggccggattggtcaaaaatttatcacctcttggtaaagcatataccaaagaacaagcagatgctgcaattgcctctggagaaattccaaacgatgcgtttttctttatatggtcaaatgatgaaaaaacaatagctgaccaataccaaaattcaaatggagttgcgacgccgacaggaaaaaacattaagagtggcgagttcattgacctgcttgcaaaaaccattagtgaactaaaggggatggtcagttactctaatatttcaagtaagacagatcttctagaactaaaagataaaaatggcaacttatatgctcgatttgatgagaatgcagagctatggttaactggacttaattcgtcagttcagaacttgttatcatctatatttttatctgacagtcgtgatttgattaacttcaaagatgcagatggaaatacatatgcaaaaatagataagagtggaggtctatggcttgtcggtttagataagccagtgcaagacttgttatcaactggaccagttgataagacaaatccaattctatccttgcaggttgaaccggcttattcaatgatggctgagtttctgcgtaatactggaaagccaattgttaacatgccaattgcactggttaaaccaatgaacagaactggaacggcttggatccacaacatccaagcagacgttccgctaaaccaagatcatatcgttattgacacaccataccgtgccgatgatggagttgttcaccctaacctgattcatgtccctggaaagtttcttggttatgactacctgctggcgattacgccgtacacagacatgaacgaccaggaagaaaacccatgcctttatgggtcaaatgacctgttgaattttacgctactgccaaatgtggatcagccgatcgacgacactccggcaaataccgaggggcgtccgggatacctttctgatccattttggggatacaaccatttcacaggggagctgatgtgctgctaccgcaaaacctatgttattgatgggaacggtgcagacaatgatttatttctattgttataccgctccacgaaggacggaaaaacatggggggcgccaacaattctgatgaatgaaaaggtgggcgcggaagatctcatgctcagcccatcgattgtgtataacgcgaatgaagcgcgctggtatctattttactggttacgtgatgatgtaatggtgtttcgtaccaacaaaacgttagatccatcatcatggtcagaaccggtagattgtgggttctcgaaagaccaaggatatcggggttggcaccttgaggttaaatttgttggtaatagactggtttgcctaattaatgactaccgacaaacggctaatatatacctcggaatcagcgatccagatgattggtccaagtgggagttttctaaaagaccattgttgaataaaccagggaataaccgtggggcgtacaaatcaacgtttatcccagaattcaacgatgacggtgaaattagtctaacagtaggatggactaccggcgataaaacaagaaatctgtatattaaccgaacaaattactttaatgcggggaaataa

SEQ ID NO: 449302 - DNA, 1188 bp, Serratia marcescens
atgtctctcgttctaaaatcaaataagcgcgccatgaaattcatatctgcagaccctcgcctgcctactgattactctttgatgttaaactttgaaggtaacgagtacaagaatggaacgggcgttactgtaaatcctaaatcgtatatcaattatgctcgtcaaaatacggcgaccatcaggaacgatgatggaaccgcagaatcattaatgcctgattcattggcaattctgaaattaactccgtctgacgagcaagggctttacctggcagggtttgatgaagactcgtattctccaatttttaccagaccaatgaacgatggtgaagtaacgtataacttcccgacactaacgtggaggaagtatcagtttgcgatggtaggtagcggaaaggcgacgataactatcacgttgccaaatggcattactatgaccaaatacccgtcaagtcttccatctaccggtaaccagttggtcattgatgaggaaaatcccaccgcctgtgtattcagcgcttcgggcggtgcctggtctatcaagattgaggcgacaggtcgagtcgatcaggtattcatcacacggaaagcgccaggtggcgatttcatgatgatggagagcagccaagtgattaaaccgtctgcaaccgcagcaagcacgctgcgcactgcaaacgtatattttaacgatgaaatgtttagcacgctgttttcaaataatgctaagaccgggtcattattgatctctatgtatgttccgttagaaaaaaatatttcaggacttgttggagcaaaccctggttggctaatggctatgcttttctcagacggttctgatgtgtcttgcaacgcatacactaacccagcaaacgaaccagataagatcactcgctatcgaattaacgacaaaaaaaacaatacggaaaaagctttaagatttatgcaagacaggatgttaacgatcgccgtttcattcgataatggtgtagttaagatcgcgtgtaacaacaaatactataatgacgcgacactatcgtcagaaattaatatttctaatattaacttcggcgatggggtgtggggtgccaccggttatgccaaaggaaacctcatgattaggaagatatatacatatagtcgctctcttagcgctaaagaattaatggatgcgtccgggctttttctataa

SEQ ID NO: 449303 - DNA, 939 bp, Serratia marcescens
  misc_feature (923)..(932): n is a, c, g, or t
atgaaacataaagtaagcattattatagccactttcaatatggaaaagtatatatcagaatgtttgaactccgtgataagccaagattattcaaacattgagataataatagttgatgatggttcaacagactcaacaagagatataatatataacttatctgaaaaaaataaaaacataaaaataataactcaaaaaaatcaaggtcaatcatctgctagaaacaacggagttagtcatgctactggtgattttgtggtcttcttagatagcgatgatgtttttgataaatcgctagtgtcaaaatgtgtaactgagttaacctcaaataacactgatgttgttttctttaatgcaagtgttttttatgatgatgacgactttcacattaaatttacacctacctacttacatcatgagagcatgtacggcagggtaattgatagtaaggaattttttaaagaatcatggctgctcaataactatattgtacaaccctgcatgtacatgtcaaagagggaaattgtaaatgacaaccatttttaccctgggattattcatgaagataatctatttactacaaaccttttgcttacaaaaaacctaaagatatcctgcattaatgacagcctatacaagagacgtataagacgtgattcaataatgacatctaagaaaaatcataatcacgtaatcggatatcttactgttgcaaaagaactaaaaaagttaaactcaaagacagatatagtgcttgataaatgccttaagagctttatatcgagatgcttaagcttttcaattaatgacgcgaaatcttgttatggcagagtccctaaggatttaaagaagcaatacttatcagcgataaaagagataggggtaaaaaacataaataaaaagacgctggtgaagattgtggnnnnnnnnnncaaatag

SEQ ID NO: 449304 - DNA, 240 bp, Serratia marcescens
atgggcagcatcaccctagccggccggcagatcttcattctcaacgaaaacgacagatacccagaaccgcagcaaaacagcccaccgtttttcgcaatccgcgaagatgaagagggccagcactggctttatgttttacataagggacgctggccgctcgtgtcagaagcaccgtttgaaacccagggtaaagccgttgatgcggccatagcgtttaattttgatgtgctttacaagtga

SEQ ID NO: 449305 - DNA, 207 bp, Serratia marcescens
atgaataccaacacccaaccgtccgaagccatcgacacccaacggaagctggaagccgagattgcggatttcctgcggcagcgcatcgaagatgggaacctcgatgcggaggacatccctgtgcgcctggcacgctatggtctgatggcccccgaggcgttcctcgccgaaatgcgtgagcgcatgggcatcgacgacgagaaataa

SEQ ID NO: 449306 - DNA, 156 bp, Serratia marcescens
atgaccgactcctttgtcaccgacctcatggtcggcctgtcgtctgtgcaggaagtgggcaccgaaggccgcttcgtcatgtggtttgaatactgctcaccagttcgcgcaactggtagtcgtcgtgtgctcgatgtgcaaaaattcatcgattag

SEQ ID NO: 449307 - DNA, 2361 bp, Serratia marcescens
atgaaaagtatgcaatcaaaaacgggctcaccacttgttcgaactgaagccgagctagaaagccggctcatttcagcactgaacacagcgtttcctaacattcctcgcgaagattttatcgaacagcatcattttaccgttcggctgggccatggaacttacacaatagatagcgccgcacagtggaaaaaatacgggcgagcggatgttttgatctttcatcgggagagaccacttgcggttattgaactgaaacgtgagggcctgacgctgacccatgatgattatgaacaggctcaaagctacgcaaaccagttaacaccacgcccgcctctcgttgtagttacgaacggtaaagagacacgcatttatgactcaagtaatggacaacagtggtcgggtggacaggatgcctcagccgcggtaaatacgatgctcgccaattctgcaaagttggcggcggctgacatgcgctgggcaattgaagccttgatgggccgagaaactgatgcctgggtgccagctgtgcgagaagaaactgcccggctgctgactgacataactgaccagcccgggcgttcagaacatccttttgccgacaacctactttttcctcgattaattacgtccctcgtaattgaatcagcagagatggggacagctttcactatcattgagggtaatgcacaaagcggaaaaagtagttgcctccgtgaaatttcactacaaacgagaagtagcgatcttttggccgtcctgatgttacgaggttcagggccggggctatttcaggctctggccaacctttttgcagttgaatttgaatggaatttgacctcaaatgatgcacgtaactggttaagacggatgtctaattgcacggaaggtccatcgcttgtgcttgccatcgacgacgtagaatcaggctcccaaatggctaccgatcttgaagaacttgcgggtatacgttttggaaacaggctcgtggtcgttctgactaccgatcatgccaacccgttagtgaaaaatccaaacggacgaactaagtcagcaattggtagccggtcaacgatatttaaaacatcgcctatgtgcctaaatgaatttaagttggcgcaacatattctctcggacaagcggattgtttttcaacagggagcagaatacgccgatgactaccgttcgccttgggtgcttcgcactatttatgatgacatcgtgcgcaatcatcaataccagaaaacagatcttatcgcctatcttccgccatcacccggtatggaactcatagatgccgcgcaaaagagctatgagagtcagtatgatcttcttcgttattaccgggttcttgcacgctgcgcgctagctgatacaaactcccactcagcagaattaatgtttgctaaaacgaatggatttgtagtacggcatgacgcactttctgacgaagctcgtaatgcggtgaaagagttgaaacatatgggggcagttcgtacttttcgcctttcagacagagaagatgttgtggtgccaacaattcccgcagcctaccttttggaactgtcggatgctgttagtgatgaactgattttacgggcagaacaagaccctcgagaagccggagcctggcttggcgaacgactagacgctacttatcttggagatatgatcggtgctcaagccatacgccgtatggcaattaaagaaagaaatttcagctttggaattattcagggccttctcagcattgagccatttaaagaacctataaaaaatggattgtttacgttaatcatgccagaccgtcaacaagtcaacctaaagattgaggacggattaatgtggatttctaaacacggcgatgatgcaaagagtgttcaggtagattttgaggatcaaatcccaaagatcatttctaaaacaaccggctggatgatactcgggcaactagcaaaactgccatcagctgaggttggagacgatgatcagcgcatggatgcatatattttactacacattgggctctgcccatttcctctaattcgcacgaatatagaaggattacctctctttgagcataatttgggcgatcagggtgatgttctttgcctaaatcaagcgtctattgaagttgctactcaggcgatggctgatttattttcagccccatggagctatgcggaccagtgggtggataaggctatcgcgaccggttctatgaatttactacatcgtttgtttactgctttacacacggtgagattgcgtggaatacccgagcaatctgattgggctaatgaagcgcttattcaacgggtctcaccagcccttaatgaagccatacggtctttatcttcgtga

SEQ ID NO: 449308 - DNA, 1653 bp, Serratia marcescens
atgaaactcaatacaaatttactaaatgacattaatctgagtgagatgtatgaccagatagaccctaatgatgcaaaaaagggattgtacaacaatattttttacatacttcgcttgcgtcatgatgttcacgaggttttgagagtaataacatcagatgagaatagtgactattacactgaatttgaaaaaatacaagcaatgtcaactctttttcatgagaatttgcactggtggcaatatattggctcgacatctgggctaattatgagtttaacttttcccgctcaagttttagcgagccttgattcttttaaggaatatcttgaaatagtcggtaataaaaagccggttattttattcactaaatataatctaacagaagaaaccaaagaagatgccagattcaaggctattaatgtcattttaaataccttttatgatatttactattacagacaaagaattaaaaggccacagaaaataaccgaagcctgcaaggaagtattttttgaatcaatcggacactcatttcatatggcttacgatgcttgtgtaaaattacttgctgcgacctttgatgaagattactcttttttacctaatccaaaagcttggtcaaaaatcttttctgaacttaaaaaaaataaagttgagggtttcttccacggttcaagtataggattgcccccgattggtttagaggatttatatgaaggacaagcgcgttttaatcaaattttatatttaaatatagcctctaataatatgcttgactggaaggcatttcaagagacaggcatgttggaaggtgtttattactctgcttttaatatatttttgaaaatccttgaggaaccgagacctgaaaatgtaaatagcccgcttgtagcactgtacttattactgattgacattgctatcaatccattggaaggcttcccattcgacattgctaattatgaagaatttgtcttaaatgctgatccgggttctcgctttatccatttatgtcaaactgtaaaggatttttatccacagtttaaaagtactattacagaatactctgcagaaaactatttttatatctctaccgtactatgcaaaactttagggtatcatgttcccttagaatataaacagaaattaacagcttggtgtactaatcaagaaagcattaaagaattgctaaaagagaatgaagcatttaaatacaaggaaggcaatttgcttgttagattaatattaggtaggtttttaagcttccaactggataaatttcaaagtccagagtatttttgttggccaggcgtattcatacatggtcagcacaactgtcgaaattttaatgtgttctataaaaaacaccaagccttatttaaagaaaatgaagatatggatataagtccagctatgctacctggcattgatgatgaaacgcttagaaacactgccggagaattttattcaatgcttacattattcgaattatgccgtcagtgggtgttctgtgaagggggttttacatataactttcaatggatatcgaaaaaacatgataaagaagaagtaaaacaaattgtagttgaagtatttagtggtatttttggaatttcgccagaaaattttgaaagcgttaaacataaaccatag

SEQ ID NO: 449309 - DNA, 147 bp, Serratia marcescens
atgaggaaaggatcgagccatgccgacacaccgggaaactctcgcgtcccctcagagataaacaacaaaaccagaagcatcaacaagcaagaaaacgtagccggaatggccaacctgaaatatcgcgtaaaggaagttatcaaataa

SEQ ID NO: 449310 - DNA, 675 bp, Serratia marcescens
atgtggatgacggcgcagaatatgggtattcctacatttatttatgatgagttgagagttgaacttaaaaatagattggtgaagattattcgtaaattaaagcgtagtaattttcgttctgaagattcgtattttattgcgcttttttctgcactgcagacagatgaggttaagtttggtggctactatttggactttcacactgcgaaaatgactgatagaggaccaaattctgctgagagtaaatatggttgtgatttcagttttttagtcaactggaaagacggcgatgaagtgatattgcgaaaaataattattggtcaagcgaagaatgaaccttatggtcatctttctaaggctgaacaaagaagattgtttgaacagtgcaatggtatggcggaaattactgatcattatattgtaacttttagaaatgatgatgatgttattccaacagtaaatttaggaacagttggttatggtggtttcacaaatgccaaaatcccattagatgtatatattatagataagctattgtcatgtttgcatggagaaactaatccaaatgatataggaaaaatgttaaatagtaagatgagtgaacaaggtggctactatctttacttggagacaaatttacctgtgcctgtttcaagaagtattaatcgtgattaa

SEQ ID NO: 449311 - DNA, 3459 bp, Serratia marcescens
atgtcgaattttgctttcttaagtgagtggtcagaaattcagctaaatgctcagcaggcggagaaaatgctgaacagcgatccgcgtacttgctgcttttatagtcgctacacgctggagcgggctgttcactggatgtatgaattcgacagagggttgcaaaaacctaaatatgacaccagtcttaacacgctgattaaccagtctgattttcgcgaccaagtgggatccagtgtcttccctaaaatcaaagcgattcaaaagtcgggtaataatgcggtacacagcgccacgaaagtgagtgccgctgtcgccacgcaaaccctgaaagagttgcaccatgttctttactggctctatcgcacctataccgcacatcaacctgtcagcaatcaggtttttgatcttaaaaatgttccgcaaacggtccatgttgatgtcgggctgattacccgcagcgcacaaaagctcaaagagttacaacagcagcttgaagagcgcgatagtcagcaggagcgtgaagaggaaaaacgcgagagggaaaacgcaacacttcgccaggagctggagcagcttaaagcgcgggttgctgagcgtaagctgcaaaacgttgagatcaaggacagccataattacaacgaagctgaaacccggcactttatcatcgaccagtacctgaaagagatggggtggttactggatgacagccgcgaccgtgaatatccggttacgggaatgccgctttccagccaaaatccgcagggaaatggttttgttgattatgttctgtggggagaagacggcaagccgctggcggtagttgaggctaaacgtaccacggtggatgtgcagcaggggaaacgccaggctgaactttatgccgattgcctgcagcaggactcccggtttgggggccgccgcccgttaatctatttcaccaatggctatgagatcttcttctgggatgatctgaactatgtgccgcgtaaagtgcagggatttttatcccgagatgaaatgcagcgtctgatcgatcgtcgcgagttggcacaaaatctgaataatgtcgagatcgacacgagtattgctggtcataaacgcccctatcaacagcaggctattcgggctgtgtgtgaacaatttgaccagcagcgtcggcgtaaagcgctgttggtgatggctaccgggacaggcaaaacccgaacgatcatcggcctgctggacctcttgatgcgcgcaggttgggtaaagaatgcattatttctcgctgatcgtaatgcactggttacccaggctaaaaaagagttctcaaagctgttgccgaaatgctcaccggagattctgagtggggcaaccagtacgctgaaagggcggctgtacctgtcaacttatcccacgatgatgaacttgcttagtgcgccgccggacagtcggttgttcagcgtagggcattttgatttagtgattgtcgatgaagcacaccgctcggtttataagaaatacggctatatcttcgactattttgattccctgctggtgggcctgaccgcgacgcctaaagccgatctagataaaaatacttacgacgtatttcagttgcctgacgatgacccgacctttgcttatgagcttcaagaggcgattgatgacggctatcttgttcctccccgtgacgttcgtgttgaactgggatttgtacgacaggggatcaaatacagtgaattaagcaaagatgagcaggaagagtgggaaagcagtgaagagctggccgagcgggatgaggtgctgccatctgaaattaacgaattcttatttaataaacctacggtcactgcggccctcaaaacactaatggaaagagggattaaagttgcaggcggcgacagattggcgaagacgattatttttgcagcaaataatcgtcatgcgcagtttatcaatgaggtgttcgatgacaatttcccaaaatttaaagggaaatttgctcgcacggtaacctataaagaaaaatatgccgaaagccttattgaagaatttaaaggcgaacgtgaccctgttgatcccaatacgcctatgacgctggctatttctgtcgatatgcttgataccggtgtggatgtccctgaagtttccaatctgatgttttttaaggttgttaagtctaaggtgaagttcatgcaaatgctggggcgtggtacccgactgtgcgagaaattattcggccccgtgaccccggatgatgacaaaatagaatttaaagtattcgacatctgccagaattttgagtatttcgaaatgaatccgcagggagccgcagattctgctggtaagtcgctgtcacagtcgttatttgagaatcgtttgatgctggctcaggtgctaaaaggccacgaggaaagcggtaattatggcgggattctcaggcaatatttgctgacaatgcttcaccatcgtgttgctggtatgagcctggataattttattgtccgtcctaaccgtaagcttgttgagaagtaccagaaagccttaatttggcaggatttgacggatgaacatcttggcgaattgattagtcaaatatcccggctaccaagtgcagcggaaccgcttgatgaaaaggagcgtgaagaagagctggcgttgcgtttcgatcagttaattttgacgatgcagctggctttgcttgaacgtagaggcgttagcgatactcagcaggacaaattgctacagattgcccagaagttgaaaagtaaggccagcattcctctggttgaagtgcaaatcgaatggctcgagtatgtgctgagtaaacacttctggcaggaactttcccttgaagatttggagaagactcgtctgcgtttgcgtttgttgctccggtttatcgataaagatagcacgggtgtggtctacaccaattttcaggatgagctcctctctgtgcatgagagtgaatcaccctacacctttacctatggcgatgcgttgacgctgtacaggaaacgtgttgaatcctgggtgagggaacaccaggatgacctcactatccagaggctgcgtcgtgggcaacacatcaccaaactcgatcttgaactactggatcaaaagctgtttgaagcgagtggcatcgagaataccgagacttaccaacaaaccattcatcctgataagcctttgggcatttttatacgtgaacttgttgggcttgaccgtcatgccgccaaagccgcatttgccgattatctggatgaagctcgttttgatagccagcagattcatttcgtcaacaccatcatagaatggttgacggaaaacggtacgatgagtccggaacgactagctcaaccgccgtttacggaaaaacattttgaaggtgtgtttggcttctttgttatgccattggcaatgggtctgcgagataggcttgcagacattgataaaagtgcagtaggggaatag

SEQ ID NO: 449312 - DNA, 1191 bp, Serratia marcescens
gtgagttggccgacagtgaagatttctgaagttgctgaaattaaccctaaacttcgaaaaggcgttgatgaggcgcaagatataacttttctaccaatggctgctataagtgaaaacggtaaggttattggcggggaaataagaaagctaaaagatgtaaaaaaagggtttacttattttgaacgcaaagacatcttaatagctaagataactccgtgttttgaaaacggcaaagctgcgatattgaacgatttaccaacgccaatagggtttgggtcaactgagtttcacgtaatcagacccatcgcatctaaagtagatccagagtaccttttcacaatgctttggaatacttactttaggacaattggtgctgataatatgactggtagtgctggtcagaaacgcttgccagtaaaattcatacacgagttttcaatacctttgccaccattgtctttgcaaaaagacatttctgagcggatcttgaaatcgcgtcaactgattcagcagtccatagcgatggagtcccaacttaatgcactggcgcaagctgtgtttgtggatatgtttggggatcctttaattaactccaaaggatgggatacaaaaaagctaaaagatcttggtgaactcaatcgtggcaagtcgaagcatcggccacgcaatgatccaaagctgcttggaggattttatcctttaatacaaactggagatgtagctagagcagataattacattgtacattataattctacatattcagaattaggattaaaacaaagcaaactttggcctaaaggtacattatgtattaccattgctgcaaatattgcagataccgctatattatcgtttgatgcatgttttccggattctgtagtcgggtttaatgctaatacaaacttgacctcaaatgagtttattcactattggctgaaattctatcaatcaacacttgagcaattggcacctgaatctgctcagaaaaatattaatcttaaaatattagaagagatagatgtttttgttccaccattaatacatcaactagaatttgttgcaatattgagtgcgattgaaggaaggaaaaaagacgctcgtagacagaatgagtgtctatataaatgttttagtgctctcatgcaacgagccttctccggaaaactggacctcaaaaaagtggcctga

SEQ ID NO: 449313 - DNA, 1632 bp, Serratia marcescens
atgttaacaggtaagctacgcaaccaggtcgatgagatctggacctccttctggaccggcggaatcgctaaccccacttcggttatcgaacaattcacctatctgctgtttatccgtcgtctggatgagcttgagatgcagcgtgaaaatcaggcgttgttgcgtagcagcagtctgcaaaacgcgctctttccgcctgacaaacagcactaccgttggaacaaattcaagaacattgaccctgaggaaatgtttgagcttgtaaaggacaaagttttcccgtttatcaagactatccacggtcagcaaagcgcattcgctcgccacatgaaagacgccatcttcatgatcccgagcgcctcaatgctggataaagtggttaacttgatcgacaagctggaaatggacgatcgtgataccaaaggcgacctctacgaatacatgttgagcaagttgggttcagcagggaccaacggccagttccgtaccccgcgtcatatcatcaaaatgatggtgaatatgaccgagccaaaacttggtggcgacagcagcgatgtgatttgtgacccggcttccggcacctgtggcttcctgatggctgcggaagaatatgtgcgcacacaccataaaaccgcgttaatgaagccagaaaacagtgctcatttccataatgtgatgttcaatgcttacgattttgatcagtcgatgctgcgcattggcgccatgaacatgatgcagcatggcgtggataaccctgtggtggaatatcgcgacagcctgatggattacggcgaagagaacattaaagacaaatttactctaattctggctaacccgccgtttaagggcagtgtggcctacgatgaactgtcgccagatttgctgaccgcactgggcaaatcgccgaaaaaagccgaaaagaaagtcgttaagacagaaggcggcgaagagaagaagaaaaaagacccaaccgagaaaaccgagctgttgttcctggcgctgatcctacgcatgctgcagccgggcggccgtgcagccgtgattgtgccggacggtgtattgtttggtccgacaaaatcgcaccgtgaaattcgtaagaccctggtggaaaagcataagctggatgcggtggtttccctgccttctggtgtatttaaaccttacgcaggtgtttccacagccattctgttcttcaccaaaaccaacagcggtggcacggatgatgtgtggttttacgatatgcaagctgacggtttctcgcttgatgataaacgcacaccgctgattaaagaccagccattaaccaccgaagcggataccgttgatgaacaggctgcagaaggtgttaaagccccttcagaattaccgaaccacaagctgagcaatatccccgatgtgttgtggcgctggcaaaatgcgcataaagagatcaaacgcaagcgtaccgatcaaagcttctttgtacctaaaagcgagatagtggagaaggagtacgatctcagcatcaaccgttataaagagaccgtgtatgaggaagttgcgtacgaacctcctgcggtaattttgcagcggattaaagaactgcaaaaagcgatggagcaggggattgctgatttggagaagatgctgtga

SEQ ID NO: 449314 - DNA, 486 bp, Serratia marcescens
atgatcacagttaagaaaccaacagaagaggagcttcgcaattttgttatgcgcaagtttcttgaagagcaactgaataaagaaactgaagaatacaacgaaaagaaattagttaattacaaacaaagacttatgaaggttacgccgacactctttcgtaagtttcttgcagagaaaggggcggctttccattgcctttcatgtggttctaacgagctgactgtgccagaaagcacaaccttacagagtgaaaaacttccggataattttagcagcttaccggaagctgagcgggaaatgatcactgatgctctaatacgttcttatgtttcatatgtaacttgggggaatgaaaatcgtgtatccggtctaaggaaaagctactatcaagtacattgtttgaactgtggtcaccttagtctttatcgttccgctgctgttttaaactggcttgaaaatattgagaaagcgggcgagaaagaataa

SEQ ID NO: 449315 - DNA, 738 bp, Serratia marcescens
atgatgactaacaaacaagacgcaatgaacgctgtaaatcgcgcaattggctttattcgtgccactgcggactatgacgcatgtaataaattcgcggaggaattaaatagcgccttggatttcatggaaaacaccggacaacatgaagagtataaggcggcctggttaaatattatcgacgctatcaactcaattgaaccgcaatggctggagaaatatcacggtgatagcgaatggcaaaaagcatgcacttttattgccgaacagagtcaggcattaaaaaaggccgctgccgaacaagacaaattgacgagcacctatatcggtatcgattttgctgcaatcgttagcgaaaacatcagtcagcaaatccaagatgatcttctatttaacgtaaatcacccattcccgaaattctcccgttatgaagggggcgtgtatttccgcgatgtactgagaagcgttgctattactcagatcagggaagagctgagctcagctgagaacaagcaccctacctggccgacggatgttgttcatgcaaccgccattctcaacgaagaggccggcgaactgacccaggcggcgatcgattaccactatcacaacggatcactagaaaaagtgcgccgcgaggcagctcaagttggtgccatggcaatccgtgtactgatcaacctgccctatgcaaagcgcccgggagagccagtaacgaaagctaacggggttgcatggtaa

SEQ ID NO: 449316 - DNA, 2271 bp, Serratia marcescens
atgatcatttggcctacagaagtaaaacgacaagttgagcagcttcgtggattaccaagcctgcctgaaaacaagcgcatgcaggcatacagcgtgattaacaagatgcttttaggtcgcgttaatcccgacgttatttctgaacattttcaggagatggaacgccgcgaggagatagccacttatcgcccagacatcgaggatggccttgtcgtagtgggttttgctggcggcggtgggagctgcgagggcatcaagcaggcgcttggatatgagccacatatcgcgatgaaccataatccggtcgcgatggcgatgcatgctgctaaccatccccacacccttcattacccagaggatattttcagcgttgatccgttaatttctaccggcggactacctgttcttttgggctggttcagcccggattgtcggcatttcagcaaagccaagggcggcacccctgtaaagaaagagatccgcgggctggcatgggttgtactgcgctgggcgcttgcggtacgccctaaacacctgatgcttgagaatgtcgaggagtttaaaacgtgggggccacttcttggcgatcgtcctgaccctacccgcgttggcgaaactttccgcgccttcatcggtatgttaagcagcggcgttgattctgattgccctgccctggctgaagtatgcgaattcctgaaaatcgatatcggcagtgctgatgcacgtcgccttgtcgctggcctcgggtataacgtcgatcatcgggagctgcgagcctgtgactatggagcgccaaccataagaaaacggctgttcgttgttgctcgttgtgatggtgagcctgtctcttggcccgcaccatcacacgccgcacctgatagcgacgaagtacttaccggcatgctgaagccgtggcgcactgccgcagaatgcatcgactggtctattcctacgcgtagcatcttcggccgcaaaaaagacctggccgaaaacacattgcgccgcatcgtaaaaggcatgcagcggttcgttatagatagctctgacccgtttatcgtccaaattggacaaaccggatttggcggcgatggccggcagtatgccagtaatgccccactgaccaccgtctccagtaaggccgagcatctgatcgttgagccttatgtcgtgaaatgtaatcacacctccaaccgtagcaagtacagctgtttccgggggcagtcgggccgattgccgctacagaccgtaactcaaacgcacggcttcgctgtagcagcgccagtcatggtgcgccagttcggtcgcagcagcgccaatgcagcaaacgccccggcaggaacggttatgcccaaaggcgggggcaagatccagatggcaagtgccgtcttggtcggcgccggcggcccgacatattcaggtaagccacgcagcatggatgccccgttgataacgctggccgctgagtcacatacagctatcgcggcagcaacactaattcaatgtggatatggagagcgtaaaggccaggcaccacgggcgttaaaaatcagatatccattgggtaccgttgtcgccggcggtataaaacatgcagccgtcgttgcccacttggtgaagcattacggggggaattacacaggcgcaggtcttgctgccagcgaacctatgcacacagtgacacaggtcgatcaccatgcgctttgcacatcgcatttgattaaattccgtggcacttgtaaggacggtcaacccacccgggcgccagcgccttcaatcaccgccggcggtcagcatatcggccacgtgcaggcgtttttaacgaaatactacggcacagccaccgcagttagttgcgaagatccagcgcacgcagtcacgacaaaagaccgtctggctctcaccgaagcacagtgcgaggccgaaccgctaacagacgatcagcgttatggcgcgtggtggtgcgctcgcctgattgaaagattcagtgacgcaccagacgacagtcaattattccccgcccagcggcagcaatacctgcatgttggtgactatgtcatcgtggatatatgcatgcgcatgctggaaccgcgcgagctttataacgcaaacggattcccgcctgattacatcatcgcgcaggcaccggatggcaccaagtggcccaaatcagaacaagttgcccgctgtggtaatgccgttccgccgccgtttgctgaagctttagtccgggcaaatatgccaagtaaatgcgtgatgaggcaggcggcatga

SEQ ID NO: 449317 - DNA, 1077 bp, Serratia marcescens
atgatgaaaaaatattactctgttatcacaaacatcggcgcggccaggctggccgacgcgatcgccaccggcacaatgctcgatattaccgagatggccgtcggcgacggcggcggcgtattgccacggccaaacccagaacaaacagcgctgatcaatgaagtctttcgcgagccattaaaccgcctgtccattaccagccctgccgcaaatgtcgttgaagctgaaatgattatccccgcccagcgcggcgggtggtggctgcgcgaggtagcgttgtttacgtcagatggcgtatgtatcgccgtcggcaatatgccggaaagttacaaaccactgacaactgacggctcaagccgcaccgcggccgtgcgtatgcaactgacggtcagcagtaccagcaatattgagttgattatcgatccgtccgtcgtcatcgccacccagcaagacgttaccgccgcaaaaaacgaggccaaggactacacggacgaggcattaaccgagctggacgaaagcataaaaaatgccatcgccgacgctgtaaaaggggctatccgcggcgcatgggagcaggacaaccctgtcggctcgtcgcgcatgttcaatcagaacgtgaaccctaacaataaatggccgtggtcaacatgggagtatgccggcgaacacctgacgatcagaactgcaaaatcggacggctccgacgtaggcacccagggcggaagcgatacggtaaacatcacgcgcgccaatctgccgcagtcggtactgaatgtgtcggggagcacagccgaacaaccggcgcaaacgctgaaagcaaaaatggcgggccggcacgcgcatcagggtggcatgaatgggccaggtgaacaatacggtgaaaccgtaactgggacagacaatagcggaagatacgcgctgacatggacgagcgaaaacggcgatcatgaacatgatgttgatgtgcctgcgcacgctcattccgtttgggcgcaaaccgaagcgctcggacagggtcaggcgatcaacgttgtcgagcgccataagctgcaaatgctgtggcaccgtatagcctga

SEQ ID NO: 449318 - DNA, 732 bp, Serratia marcescens
atgagaaaattgataatggctatggcgttactgtttactgttctcatgatgcaaggatgtaaaaaaaacatggaatatgaaccacaggatttttttgaaggtcgtcagttagagatagcacagctgatttatgatggcaacgaagtgaaattgaaagagaaacttcctactgtcagcaaggaagaactgaaccgaccggtgaaagctgacatgacactgctgttctggtctgtgctaaactcgatctatgatataagcacgcctgaaaggctgagaattataaccgacttggtcaagtctggtgcagatcctttgcaacctagatctgaaggggggagtagtcctgctgaattcgtcatgagagccgacaagggtatttggattaaagctatgttggatggtggtttatctccaaattctaaagacaaggtttttaatgagcccattatatttgaaacattaaaggcaaaaaacatagagactttaaaaataatgtttgatcatggggcggatttaaatataaggggcgcaatgaatcgaaccttgttaattaatgcattatatcaaaaggaagttgaccatattgtatttttgttaaagaatggagctgacacaagtcttaaggattcatttggcgaaacctttgtttttttgattaacaaagaaatatcgcaaaaggataataataatcagtatataaaagagttaattaaaatccgtgattctctttaa

SEQ ID NO: 449319 - DNA, 129 bp, Serratia marcescens
atggcaagcctgatggcgttgcctggcttgccgttggaaaaatataaaaataaggaaaatcaagccattgattttcggctgatgaccaccaaggaggaaaaaccacgttttttcctccttggtttgtga

SEQ ID NO: 449320 - DNA, 210 bp, Serratia marcescens
atgaccaccgtaaaagcagcccacatcgaaacactgaaatcagcaggcgtaaagattattgaatcccatattcacgccaacggcggccacatcgtgatagctgatgttgtccattgctccaatggcggtggcaaggaatggcgggaggaacgtccgcttaccctgcgtagctctgaatcagtatgtcgttaccttgacgacatcagctaa

SEQ ID NO: 449321 - DNA, 645 bp, Serratia marcescens
atgaatacgactgaaaatcggcgtgaacgtctgagggcttggttcgcagacaaagtgctgccagccagcgaaaagagctacctgtcacaattgatgacgggtaaggcatcttttggcgagcgggctgcaagacgccttgagaatagttatgggatgccgaaaggcttccttgatgacgtcaacgatgatcggctggcaaatcagcaaagtagcgatttcaaaatcgaagttcttgatgtccaggcaagtgctgggccaggggtaatcaacagcgaagtgattcagaccattcgttcaattgagtacaccaatgatcatgcgttgcagatgtttggtggtaagcaggcatcacaaataaagatgattaccgttgacggtgatagcatggcaggaacaattgaggtaggagatgctatctttgtcgatgtaagcaaagactatttcactggcgatggtatctatgtgtttttatttaagaatcaccttcatgtgaaaaggcttcagatgatgccagatcatttgctcgtccattcagacaactcggagtatgccgattgggttattactgaagaaaacgaacataaactgaaggttatcgggcgcgtattactcagccagtcacaagcatacaagcgccacggataa

SEQ ID NO: 449322 - DNA, 822 bp, Serratia marcescens
atgcagtattggggaaaactgctcggcgtcatcgtcgccatttggtctggcgcgggattctggggtgtagttctggggctgattatcggtcatatgatcgatacggcgcgcagtaataagcgcagccgggggttcttcaccgaccagcaaacgcggcaaacgctgtttttccgcaccacttttcaggtgatgggccacctgaccaaatccaaaggacgcgttaccgaggcggatatccagatcgccagcctgttcatggatcgcctgcagctgcacggcgaagcgcgcaccgcggcgcagcaggcgttccgcgagggcaaacagagccagttcccgctgcgtgagacgctgcagcagttccgcagcatctgtttcggccgcttcgatttgattcggatgtttctggaaattcagattcaggcggcgttcgccgacggctcgctgcacccgaacgaacgtcaggtgctgtacgtcatcgccgaagagctgggcatttcgcgcgcgcagttcgatcagttcctcagcatgatggaaggtgggcgccagttcggcggcggtcagcagggcggatattcgcagggcggctatcagcaggctcagcgcggcccgacgcttgaagatgcgtgcaaggtactcggcgtgcgcagcagcgacgatgctaccaccatcaaacgcgcctaccgcaaactgatgagcgaacaccatccggataagctggtggcgaaaggcttgccgccgcagatgatggaaatggccaagcagaaagcgcaggagattcaggcggcgtacgacctgatcaaacgcgagaaaggctttaaataa

SEQ ID NO: 449323 - DNA, 630 bp, Serratia marcescens
atgggggttcttttattgcttgtaagtattggtttattgttgactacttctggtgaaataaaaatgccatttgttgagtataggttttctattattgattttatttctgagactttaaacccctttattcttgaaggtgaaaacaagaaggcaatttcaaaagaattatcatgcttgatattcattgctctatgtacattaattataccagtgatatggtctatatttcctacaattagactaataataaaatacaaaactcttaatacaaaaccatatgttatttatgatgcattaagaggaaattccttagatagctgtctttttatatcactaataagtacaaatacgaatgaggctttcattatgctaacaatgaaggacagaaaggtctatgtgggaaatgttatttctttaggggaacctaatgaaaaaggaggtcctgaacagagtgtggttatatcccccattattagtggttatagagataaagatacattagatattttccttaccactaattacagtaggttggatgacactactaaattaatcttaaacaaaagtgaaatattatcagcaataaatatacctgtttttaaaaatagacagactaatgattataattag

SEQ ID NO: 449324 - DNA, 897 bp, Serratia marcescens
atgagcgattcaaaagatgaaggtttaatcgattcagttaagaaaacactgcttgacaggataaatacgccattattcggttttatcttgttatcatggattatgtttaactgggataatatattatttgtaatgcttagtgatgtaagtatagaaaagagaattattgcaataaagaaaagtggagagtttccatataaaaacctaatctttcctgttgcatctggttttattttcagtgttgcatttccttatgttcagctagttatatcttatctgcaaagatgggctcagaaagcaattgataaaaataaagagcgcaaggaaatagatgagtgtgaaattacaaagaatttagctcgaaaaagggtggaagctgccactgcaatggatatggtaaaagaaagcgtaggcttagaaatcgcaatgaaacggcaagaaatagcaaaggttgattttgatataactgagttggagagggtctttaagggactatcctccgatgtttcaaagaagaagcaagaagttgaaagtcaagaaacattatataaaaacattaagggtgatgtggagtttatcgagcgcaggctagtggagttgcgcgaaatagaaggcgagttagtcaaaaaaatcggttctgacgagcggcttgttaaagagttttcagagataaataaagatattataagtgtggccgatagcatgagaaaagaaattaatacatatgtcagtgagttgtcagggaaaggaattgcagttggggagtggcactctaacaaatttagcatccctggaaatgatgcgttggctaattttatagagcatattgatagaggcgtgagtactattcagttattatcggaagagaactttagtagcatattaaacaggccttaa

SEQ ID NO: 449325 - DNA, 147 bp, Serratia marcescens
atggagaatgtattgatagaattagtgaatctgttttttttacaccggatgaatttgctattgctgatcatcactttaatggtgtgttcaatgaatttggacagttttcaggaacaatcagaatatatggtgaagagagagatgtag

SEQ ID NO: 449326 - DNA, 282 bp, Serratia marcescens; identical to SEQ ID NO: 83876

SEQ ID NO: 449327 - DNA, 258 bp, Serratia marcescens
atggaaaaacataacctcaaatccggattcagcatctatttcgctgacgtccatttcgagaaacaagtctacgcattcggctcaggaccggaagaagctgagaagctggcgcttgaaaagtacgactctgacgaaacgaaggtgaagaaggtgcatgtcaatctggctcgcagccaggacatcaaccgctacaccttccctgaacaaatggctggctttgctaatgccattcagtctcacggcatcgctgtgaactga

SEQ ID NO: 449328 - DNA, 165 bp, Serratia marcescens
atgtatgaagatgatgagctcgaaaggctatttaatgaatttttgctgtgcaaagggcagatggaaaacgttaataatggtactgaaggggataaacactacctatttgagttagcaactaagagctctgcggatataaaatcccggctgtgggtcatgccctga

SEQ ID NO: 449329 - DNA, 807 bp, Serratia marcescens
atgaaaatcacgaaaacatgcattttctgtaaaaaatcgcctcccgatgtaacaatgacaaaagagcatctattcccgaaatggatgaaagagaaaataccttacgaaaaatcaattattttttctggtaactatagagaagatattttttcccctggaaataaatatgagcttagggaaatggatgggctatcgccctttgacatggccgtggccgcagtttgtaatcaatgtaacaatggatggatgtcttgtgagcttgaggaaccgatacaatcaattttgattgacctcacacatggttttactcgtgagctaacaaacgatgatattaaattgctaattagatggtcgattaaaacggctataattcgtgcaaaaattgaaaaaggtctctttggcattccagaagagcatattagatctgttttcgaaaatcggcctttagagtcagttaacgtttggattggttgttatccgccagatacagagtgttttactaggtttcaacgagttgtggatgaaaacggctataaagcttacaccgcttcttttagaataaactcattgtttattcagataattggttgtgaagattattccttagaggacatatatgataaaagtttctttactcagcgtgaagattcaatcggtgttatggtgaatattacagcgttggagaagcatcaaaagatcgcatggcctctgaaggaaaaaataagaataaaccaccacttgctaagtggtctaataggtcatacttattttaatttacctcttaatcatgaagttaacgaaatttga

SEQ ID NO: 449330 - DNA, 186 bp, Serratia marcescens
atggtaaaagcgctggcgcacggcctccccggcgcgctgggtgcgctgggtgaagtgctcaacgtcgacaccgataaggccaaagacaaagccggcaagcagctgatccagctgttctgcaagcaacagcaagctgcgccgcgcaacggccaaatcgcaccctgcggagtggcagcacttcgttga

SEQ ID NO: 449331 - DNA, 195 bp, Serratia marcescens
atgaaagtaaaactgaacaacgtccgcctggccttccctgctctgttcgaaccaaaagccgttaatggcgaaggcgatccgcgcttttccgccacattcatcttcgaccctaaacaccctgcagtggccgagatcgagaaggcaatcgaagcagtggcgaaggaaaatggggcgctaaggccgacggcgtgctga

SEQ ID NO: 449332 - DNA, 240 bp, Serratia marcescens
ttgaatttacccctccagcacatactgctgaaagagaccttccgctacaagaacgaggaagtgttcgaattcaagctgatcagcccaaccaaagccgagaagctgatcaagaaggagaagccgcgccgatggcaaaccgccgtcgcccccgaatccgatccgcgccctgcgctggtcatcaatcacgaaaacgactttgaaaacgtggacgccgtcgaggcagccgcggaatttatctga

SEQ ID NO: 449333 - DNA, 198 bp, Serratia marcescens
atgaaagttgttgtgcttagcaccgatgggcgcgtgttgctcacaggtgaccagaatatgctaaacctgactcctgtctgtaaggatctggggatctctcgtgcaactctaacctgtatggaaaagaaacgcaccttagaggattctctagagtattatattaagaaatccaagactagaacggttgcgctgaaatga

SEQ ID NO: 449334 - DNA, 1011 bp, Serratia marcescens
atgagtaaagcatacgattttgataatcaggatatgtccgcatcttttgaacagcccgctatggaaaaccacctgttgcaggaaatgaaggtattcggtagcgatacctccaccactcctaaagcctctgtggattataaactggatgagcaatccaagctgttcgaaaccaacgagcgttacggcactgattataacaccaccgaagttaaccgcgctaaatccttcaccttggatattccacacattaccgcgactggtcgcgtaactgcaaaagacttccaaggcaagcgcgtatttggctctaaagacgccactgaacaaatggccgcgttggtagccgctgaagctttccgtcaacataaaagcttcctgcgtactaaagagaaaatgctagccgatgcgctgttctataaccgcgtaagcgataagcataccggtgatgtagatttcactcaggtgtttggtttcaaccaacagacacaccagattgacgccactgttgcagctgtaccgatcgaaagcatgaaaaccgcagttaaagacattaagcgcgctgccgctggccgtcagattaaccgcatggttgccgtgtgtggctctgagttcatgaatactatcaagtatcaccctctgaccattcaaatgggttattataaaactgctccggctgtctttatcgacggtaaagagatctcacaaggttatgagattttcgagttagacggtgtgacttatatcgaatctaacaacccagattatgaagttgaagataagggcgctttcctgttcccagtctttaaacacgatactcgcttgggtgcatcgccattcatgaacattgcaggcccggcaagccgtgacgctgttttggcagatagtaacgtgatccgcgaattctacgcttattccgtacaggataaattgcacaacgttgaggtattctctgaagcctctatgttgccagttatctaccgtccggactttgtatctaaactgactctgaaataa

SEQ ID NO: 449335 - DNA, 345 bp, Serratia marcescens
atgagtattaaacatgctggtactgagtaccaatctatgcaggacgtaattgcatattctgcggatcctgttttcagtcacaaagaagttgttatcgatctgcctgacgctgtgaagccgggttatatcctgaacgcttccactggtcaactggccgcaactggtgacactgacgttgttatttcagcagacgatcacgaagccggttccgacgtccaccttattgttgtggaccgtggcaatattttgaaacgtggtgctttgaaagctgccgatgccgcagcgaccaccgcacaaatcgcagcaattgaaaaagccggtattaaccgcgtttctgtaaactaa

SEQ ID NO: 449336 - DNA, 183 bp, Serratia marcescens
atgtcatacgaacaacgttatgctaacaccctttgcaaatcatgtaaagaggatttgaaacttttcctttcgctgcttgtgggtcgcaatgcttcaaccttcgaggcaaccttaccggcccgagagggagagccttcctactcagtactacttaacatcgcagaattgcagaaacatctataa

SEQ ID NO: 449337 - DNA, 294 bp, Serratia marcescens
atgaaaaaatacgaaatcttgttcgataccctttcccgccgtgcaaagggatcctgtgttgaagtcaatcaggcttccttgcaaaaggaactaggttggacccgtgaacaattccgatacgctcgccgcttaatgttggaccttacagcaggtggaagaaagccggtagccgtaacaattattatcggtggagaggctcacagttttgaaatggaaggcggcgacgctcagaacattttgaatcaggcaatcgtacatgaagaaacattcgaacgcttaaaggagtctgtgtaa

SEQ ID NO: 449338 - DNA, 462 bp, Serratia marcescens
atgagaaagaaggggatcagaggttacaagttttaccgtggtgttaccatgacagaactctcttataaaatgctaaaggtcattgaggataaaaaagagattggcccctatgacctgctaaacattatgccgtgttctatcatggcaatcagggatcaggctagaaatcttgaaaagcttggattcattaaagtatccggccgctttgagttgggatccgataccgtttacacctcagtgattgataaagatattcccggcgctagtgtgttggagagaatgatcagtgatgtcctgactaaaggccctgaaagcttattcagctattcagtggaagatttaagacaaggagtcatatccgctaccctgcacgataatgattctttcgttgaaatgttggagtttgccaaggccgcaaaggttggcattaagactatttacaaacacggcattgcagcctaa

SEQ ID NO: 449339 - DNA, 330 bp, Serratia marcescens
atgaaaaagtatgagttcagaattgacgatctgcgccgcgccgctcatttcctctttggcaaaaacttttgtttcctgcctgagattgaagagtatggcaaactgaaaaataaataccctaacggggtcccaactcagtttaaacgcggtaagggtcaacgcttggatcatgtgattgctcaataccaaatccaagtggcaagcggtgactggtataaggatttcgaaatcttgctaaccaataataaccggcaagttaaaatctctttcccttggcaggtgtgggttcagtttgggacaatcctcaagcaagcctcagcccggaaataa

SEQ ID NO: 449340 - DNA, 660 bp, Serratia marcescens
atgaatacttttattcgtatggattacaatatttgcaaacagaaagattttaccttagccgacagatttgtttatgcctacctcaaaggctggcaggactcgcaaggcatgggtaatgtctttcccggaattgaaagaatagcctcagaccttaatatgtctaaaagtggcatctcactttcaatttcaaagttgaaaaggttgggctttatctacgttagccggaaggatagaagagcctccaataactatttagttagagacctgccagcagtaaccgaaaccgccgcagtaactaccgaaacaccaactattgaggaaatcgccaatgactcgccagacaatgcaactccagaccttccagctccaattagtgaaccagaaagcagcgatgagccacctgttcaacagactgacaatgatcacagcgatcgcgttgggtctgattgtggcgggcttacagcttttcctgtagagggttgggtaaagctctcccgcaatgtgtggaagagtttaaagggtcgcaagatcgcaggtagcaaaaagggggagggtgataccgatgcaagggcctacgttataaaccgcctgcaacatttctccggaccttatgagcctgtgttcaatcagtggatgagagaggaaaacctttcattctaa

SEQ ID NO: 449341 - DNA, 390 bp, Serratia marcescens
atgtcttatttcgatagcgttttgaaaagtatcacccagcagcaaaagcagacgcttaaaaaggccgctgaggatgaccacgttaatgttgaatatatcgacggtgtgccacatgtagacggcaagccgattaaagataaagggattgccctgtgtcaccgtgatcaaggctacagcgccaacatgcgacacgaaagcctattatctaagcgcaaactcattcgcaaaggtagcggcaagcgaaacccaatcaacattatcaaggttagcaatccgggcagcgatcccatgtatatcctagacggtaagatcctcaacgatttggtaatcgccgctctgaatgaatacaacattgaacacactatcacggatggggtgaataatggctaa

SEQ ID NO: 449342 - DNA, 255 bp, Serratia marcescens
atggctaagaagcttaccaagaaagaggccgaggccgcagcagccaaacgccgccgcaaatacaagccagaacctgaggctgtggatttggttaatagaatgaagtttcaaggcatggttaggatccgcagggtaaagaacagtttcgatcctgataatccgatccacatctgcaatggaaagctaatcactacccaagtgatcgaaatgatggatcagcagggcgttaattatattatggaggctagttattaa

SEQ ID NO: 449343 - DNA, 2187 bp, Serratia marcescens
atggcaactaatcaggttatcaagactactaacacaatcattactgaggtggaccagaacagctttaaaaaggctatggcccaaatcaaaaagctgaacaaagaggccgcagggccgggcgttggggttaaacaatcccgccgtcgtgttggtggttcccctcagtggttggcagcacagcgccgggcagaacgagctaaaagggagcgccaagaggccgcaggcagcacccgagcacctcgccagcgtaagcagcaggaacgccaagagaagcaagagcagcgccgccagcagcgggaaatggtacgccgtcaacgcatggttgataagatgcaggcccgagcctctcgctttactccacaattccaacaggcagcaggtagcgccagcgtttaccagaaagcccaattcagggccgactttgccaagatcaataaggattttgcaaagggtgcaatcggcactcagacctacaccgccagaatgggtgaattagccaagcaaatgaaagctgtagagcgtcaaggccgagccactagcaaagcattggcaatgaactccggttcaattggtggcggtatgtccccaattatgcaaggcatgatgacagcgggcgcaggttatggaatcttggcaggcggtcgcagcctaatgaaaacaggcgtggatttccagtctattcactcaactattctaatgactcagaaaacagaagaggaaggaaagcagatgtttgattatctgcaaaatctggcctcaactctgggaactgatttagttaccacctctgacgcattcgctaaaatgaaccttagccgacctaaggacctcgatcttaaccaaatgcaaaccatgtttaccggcttccaagaatacggaacagccttgcacttggataagaataaaatggatctggcgcaatttgcattacaacagatgttcggtaaaggcaaagtgaccgccgaggaactaaataggcagatggccgacgcaatgccgggcgctaagcaagcattcttaacagcttggcagaatgccaccggtaatatgaatatgactcagggaatgtttgatgaggacatgtccaacggtcttattacaatggataagatcaccccacacctagcaaaagctttcggtgatatggctcgcaaaggtggcgcattagatttcgcagtcaaaggaattaacgcccgttttaaccgaatgatcaacgaatggaataagtttaaaaactccatttttgaatccaaattaggcgatgcaatgggggaaagtttcgaggtcgcatctaaggcgctctccggaatgtctgatatgatgagcggcaaggtgggcaatgctttagccggtctcgttgaagggtttacagagattggggcaggtgtttataactcgtttgtattcgcagatatgacgattgaacactatctcaaaaagtggggaatggattcaaaacagattgaggaaattttcaactttgccggttatgccgcaggtgctttaatctttgcaggtggattactccgcatcaccaaactgttatcggggctgatcaaactggtaccggggattaaatctcttggaggtgctttatctgccgcaggtattgccaacgtgggagcaatgaccacgggcggggtgggtgctaataactctccagcaggtggcaagacaggcagcaaagcggccaagattgcaggcagcgcagttacagcagtttcccgcagggccgggcctatcggttgggggatcttcatgcaggacatgattgcagaacctctagaaaagctgttccctcagtcgctgggtaaagataacccgctagctaacggtcttaataccctgccgggttcggacgctgtaggggcggccggggagactttccgagggtgggttaagcaatgggtaagcgcggctccaacaggccagacaaacccgaatatcacttacccgtttaagtccccacagctaaacctaactaacggcgctaacgttccgggaacaacttcaccagtcggacagaatcaggttaccgttacccttgatcagaaagaattgctgattaaaacagaggtacaggtaaatgatggtaaggttgccggattggttgaacccatgcttcaggatcaggacatgcgcaccctgaacatgattctcgggtctaccgcaggaatcgccggttaa

SEQ ID NO: 449344 - DNA, 453 bp, Serratia marcescens
atgactttaaaatccgattttagcggcctgattaatatgtacaagattatcgatgaggccccggcggtagaatatggttattatgatgaaccacaccacagcggcctgaatatggccacactggcccgcattcatgaggaaggatggaacggactaccggcccgtaatttcatgtttagcgcaggcatagcagccagaaagcagcaacagaaacaggtccgcctattcatccaagcagcagcagctaaaggaaagcgtaatttcaaggcattggaagaggccgggaatattggagtaagaaccattaaagaaacaatccaaaatggtaacttctcaaaccctataaacgccccagataccgcagcaatcaagggacacaaccacgccctgattgaacaaggcgaattaatggagggtgcaaaggcaaaactgataggtaagaccgataaataa

SEQ ID NO: 449345 - DNA, 138 bp, Serratia marcescens
atgagacctgaaattttggcgggggtggggctagctacctgtttgggctgcaatctccagcttatgcagggaaggttgctagttaagcgatccatgatctactattttgtgaggaacagcaataccaataaacgatga

SEQ ID NO: 449346 - DNA, 294 bp, Serratia marcescens
atgactacatgtgatatctgtgggatgaactacgttaaagaggatgctgatgatcgtaagattcatgcagacgaacataagaagcttgcaaaaggcgtcctaccatacaaggtcagggagtttataaaagcgttcggttttgcggtggctcacaatgatggtggtctaactagattgcagggtagttacgaccctgagattgggaaactagttgttgctttctcttggtggaatcgtgccctttcgcagggtataccggcatttaactatgaccgttgtttgcatgcaatctga

SEQ ID NO: 449347 - DNA, 240 bp, Serratia marcescens
atgaatgcgaataaaataatcaccatttgcactatactattgctaaccggttgtgcaaatctgatgaaagaacgcccagtgttgtgtgagggcgtcgctaacataggccgacaagactatcggattcccatttacgatacgcgcgattatggtggtaaaaaacaatacttagcgggttcagtgttcaagtcaacatgggtagacacaaccaacttcacgcgcacgacctgcgataaataa

SEQ ID NO: 449348 - DNA, 675 bp, Serratia marcescens
atgaacattagattagcatcgaaaggtaatctttcaattaatagggatgttgatgaaggagactatcaggacattaattacacagcaactaacccagagtatcctccgctactggctataaggtgcaccagccatagaacaacgattgtaagaacactgaaggtgggaaataattatacgtttaggattggttacatgattggattagacccatctaatccttcaaacgtaacaggtcagttctatatatttgactccgcaccaaaaacaaactcgagaataggtaatctctgcttgaggaactcggtaggacaagttgtttttgatagtggatatgattatatgaatgtggttgatatggtttatctgcccggtttcaataatgggagtcagcctcagacgaataaagcatacccaactgacaaagagtatgcagccgtaacagtaagccagggatatttttggtcattctcatcttcatatgatgatgtcgggaagtattgggaaactgatatcacatacatgttctcaggggtggtgttctctggtaacactgcgttgtttcaaggtggcgtgttccacagccagtatctgcaatcgcaatctagccaggggcaaggcaatagccaatctggacttggtgtgtatatgattattgatgtgactggattataa

SEQ ID NO: 449349 - DNA, 570 bp, Serratia marcescens
atgagaaatattggtttcttaatattagctgtcggtgtcatatgggtgctcgtagctttaaatattgatacaagtgttgcaaccggatatggtggtagagtaaacaacattgggttgatggcaaataaacaaaatcaaattattattggtggcattgtcattgtttgtggtttgataatctctgtgttttgcaaggctatcccttcatataaaatagtcaaatgcccgttctgtgcagaggatattaatcgtgatgctttaaagtgcaaacattgtggtagtgatgtttcagaacacttaagtaaaggtgagttaccaaaagttcatgggcatagtgcaaatgaactggttattactaactctgatggaaagaaggtgttgaatctgcctgtggtttcagaaatagcaatgaaaatgcacctagaaatgccaaataacaaagctctttctgtgatggtaactaatgcaccaacaattagcacgcttaaggaaactatgggaaagcagatgggaataaattttgaatcgcatctggagagtgagttgattaggataaagagtaaaaaataa

SEQ ID NO: 449350 - DNA, 201 bp, Serratia marcescens
atgcttactgaagacgcagttaaattcttcggaaataaaaccaagctcgctgaagccgcgggcgtttcgcaggcttcagtatcgcgttgggggaagcaaattcccgagcgacgcgctgctcgtttagatcgcttaactgatggtgagctgtcttacgaccccgcggcataccagcacccgaaatcaacggatgcagcttaa

SEQ ID NO: 449351 - DNA, 396 bp, Serratia marcescens
atgacctcattaagcgaccgcatgaagatgcgcaggacagaactggacatttcacagcagcgactagctgacgctgtgaaggtttctcacgtcacagtttttaaatgggagaacggagacactgaaccgaaaggcaaaaacctttttctgttgtctaaggctctacgctgtactcctacctggttgctttacggtgatgaagatcaaaccccactccctgccgatcagctgcctgtagagcttgacgaacgacaagccaagctcatcgaactatttgattctcttcctgaatcagagaaagatcgtcacttggctgatctagaggccaaggtcaacgacttcaatgctctttttgaagagcttttgactgcaagaaaaaactcaaagaaaaaataa

SEQ ID NO: 449352 - DNA, 801 bp, Serratia marcescens
atgccatcatcgacactatcgagaagaatttcactgcttgaaaaagaaattgggctacgccttattcgtcgctcaacaagaaaattagaattaacagaggctggaaagctatactttgaacgtagcaataatattatagatgaagctagaaatgcacattttctgttaaatgaccttttatcaaaaccagttggaaacttgcggatttcattgcccactgacttttcaatatattacatcgccccagcaatagtagcattttcaaaaaaacacccagatatcacatttcaattggatatgactccaagaaaggttgacttaataaatgaaccttttgacctagttattagaattggcgaaatgccaaattccggactcatatctcgacatatgttaagtatgaatagatatttgtacgcatcaccagagtatctacgaaaaaatggcgagccagcccatcctttagatttggaaaagcattcatgtttagttatgaatactcctctggaaaacgacgggtggaatattgtatttgacaacatactatataaaatcaaaggtaaaagtcgttacaaaataaataatgttggtatgctatgtcgattcgctattctaggggaaggaataacattaatggcagaagaaattgcaaagccagaaattcagttaggtaaattgaaacaaatactaccttcatgttctgtagaaaatctatctgtatatatactaacggaaaacaaactaactcccgctaagacatctttatttattgatttcttatgcgattactttcgtaaataa

SEQ ID NO: 449353 - DNA, 588 bp, Serratia marcescens
atgtgggtagtatttaataatggttataacatccttattttatctggctcaacaagagctggttcgtacaatcagcaactagcggatttatttggcgagtatatagaatccaaaggtgcaaaagccataatgctttatctgagtaaatatccattacctctatatgaacaggatatagaggtaagttcatttccagaaaatgcattcatattgcatgagatattttcacaaagtgacggcgttgctattttttgcccagaatataatgctagttatcctccaattatttcaaacttactcgcatggctttcacgagtggaaggtggtggggccgaaatatttagtaagccctatgcattaggtagtgcatcaccggggagtttgggtgggtatcgaggattaatgtcactgagacaatccttggttttacaattaggttcaatggttttacctgaagtgattactttacctttcgcgcatcacgaatttacaactcaagggagaataaaaaatgaaagagctattgaacaccttgaaaaaatggcaatcgccctattaaaatatgttcaggttttctctgggaaataa

SEQ ID NO: 449354 - DNA, 633 bp, Serratia marcescens
atgaaactataccactctccaggaacatgctctctcgcatgttggattgctttagaatgggctaatgtagaacattatgaaattattccggttgatccaaaatcagatgagtacaaagaaataaactcactacttacagttcccgcattggatcttggaaatggtaaaattataacccaaacccatgccatattaaatttcattaccgacagatatattaatatagattcatcagcacacgacctctatttaaacaaagttgaatttgacgagataatgagttttttatcatctgagtttcaccctatacttaaagcatatttttcacctgatacgtttaatattttccgcaatgaatcttctattcacgaaataaccatgtcatctttctacaagatacttttttttatggaacaccttgatttggtaattggtaaaaatgaatacatattcaaaaacaaacgcacagtggcagatgcatatgcatttgtaatgttacgatggacagatagttttcccaagaattggagaaattatagtaacttggctaatttcatgaaaaagatgaatagagatccagttatagcaaaaatattggcgttatctaaaagattatcaaaaaatatgatgtga

SEQ ID NO: 449355 - DNA, 582 bp, Serratia marcescens
atgattagaaatcaatttacctcatcaaatgcatcaatgttgttgattgatcaccaagtcggaaccatgggttgggttaaatctatccaatttgaagaactgaaacgtaacgcgttgatgctggcaaaagcagctcaaatattaggaatccctacaatattaacttctagtatggaagagaatgtgcaagggcctttactaaccgagttggaaagtattcttcctgcatctttcaagaatagagtgaaacgtgagggaatagttaatgcgatggacgatgaaaatttcgcgcaggcagttaagaacactggacgaaaaaaaattattgtagcaggggtgacgaacgatgtatgtactgtctatcctactctcacgcttttggaagagggatacgaagttcaagttgttgcggatgcggggggctcaccaagcaaaatagctgatgaaattgctttgcgcaggatggagaatgcaggcgcagttttgactagtactaatcagttgcttgctgagctagcggtcagttgggcaacgcctgaaggttcaaaattagtaacaataatggctgactcactttcgtaa

SEQ ID NO: 449356 - DNA, 1071 bp, Serratia marcescens
atgtcattgtcattaactccagaacaacgatttcgtcaatggacattattaggcatgttgttggggcttgcatctattatatattttgtcatttcagacatttcacacccatttacacctcattctaggctaatatataaagtaattactgtgtcgccagaagtcagcggcaaagtgatcaatgtcgctgtgaagaatgatcaaaaagtaaaaaaaggtgatgttctattttatatagatcctactgattatatcttaaatttaaattcggcaaagttaaaacttgaacaagcctatgaagataataaaacattagactcgaaaattaaagaggccgaaaatgaacttaattctgcggaaatatcattgaaattggctagggacgatgaggacagatatctaaaactcaatgcaattgctatatccaaacagcaagtagataaagcaataggtgacagagaaaaaaatgaagcaaatgtaaagcaattgaaatataatatcctgtcattggttacgcaacggggtttatatggtgatgaaaatcttcagattaggaaggctatgaatgatctggctgtttctcgaacagaattaaataaaaccaccgtgacctcccccatatctggaacgattagcaatatgaatcttaatacaggacatgttgtgtcacctggcgttccattattgagcatagttagtgattccggtgtaatttatgccgattttcgtgagaaatcattatccaaattgaaagagaaaattagggcttatgtcgtatttgatgctattcctggcaaagtatttaacggcaaagttataggtaaagactccggtgtaattaacggtcagttatatgctgatggcaacctagctagtacagagcaaagtgatcgatggattagggatgctcaaagaattaggatatatataaatctagacgatcctttgcctgatggactaacatctggagctagagcgacagtccaaatttattcaagtaatgatacgctaacaaagtacttatcaagattgcaaataaatgttatttcttggctgcattatatttattaa

SEQ ID NO: 449357 - DNA, 738 bp, Serratia marcescens; identical to SEQ ID NO: 13703

SEQ ID NO: 449358 - DNA, 225 bp, Serratia marcescens; identical to SEQ ID NO: 25145

SEQ ID NO: 449359 - DNA, 2595 bp, Serratia marcescens
atgacacctatcgagagtattgccgattggtcccaaaaaaaacctgtttggtggaggcatgctttaaagttaacattaatgcatggaactctagagcaagatgatttaaatgaaatattgaaggttgcacatatggagcatggtcttattgaacctgatgatatatttgatgaatcatcaaagcaattggacttctctggctatacatctgagcaatatgaagtttcattaaaatcactttctgatataaagggtgtcggtttattagcagaaaatcagactataagcttccctaatgaagggctgtttattatttatggcgataacggtgcgggaaagtcaagttattcaagtattttaaaaaacacatgtttgacgcgcggggactgtccccaaataatgggggatatattttccaagcaacaggtccctcctcaggctaagattagtgtgtctctcaatggtgaagatgaggttatctcgtggaataaaagtacgcctagcatcgaagcattaaagtccataagggtatttgatagttcatctgcaagccattatgttaataaagaagatgctctgggttttaaaccaatcggcttgaatttacttgcagagcttgtaagtgctgtaaatagcgttaagtctcgtattgacgaggacctaatgcctggtaatggattcgtaaaactagaaggattaagttcatccagcgttacagctaaatttttgcgtaacctttcagctgagacagctgaaattgaaataaaaaatcattgtataacaccaaaagaaattgaaaaaatagaaccccttaaaagagagatcctgcaatacaaatctcagacggcagaagctttaagaaatagtcttcgacaaagaaaatcagtaatagaaccgttaaagatcttttgcgaaaaggcaataaaactactggacggtaaagctgttgatgcactgagtacacttagaataaaaaaggatagagctgaggggttatctgaagaacttcgcaaggcaacacttataaatttaccattggaaaatgttgcaggcttaaattggcagaaattatggcaggcaactcaactgttcattgagcacgatgtgaaacaccaacatttcccgccgattgaaggtgagtattgtcctgtttgtttgcaagaagttggtaaggagagtgaaagcagaatgggtatgctttcaagatatttaaaggatcaaactgctcaagatgcgaaatctgcaaaagacgactatgataatgcgataaaatctttaaattctctttcattagatttatcgccctatccagcagctatttctctattgaacaatgaatatgatttcataggcaatgaagttattgatttagtctcgaaactcgagaatagaagagaggtgctaataggtgttctaaaccaacccactctccctttagatattgattgttttgaaaagctaaaaaaaataattgaagatattgatgcgagtttgttagcagttggatccgatgaagaacttttggagtttatttcaaaaaaagaaacggaattaacgcaccttgaagatatgaaatatttttctagccattatgatgatatcgtttctaatttgaaacgacataaaatagtaaaaaaacttgaagctattcaatctcagtgtggaaccacatctatttcaactttgtcatcgggaatctatcgacatggagtggtacagccacttgtttctgcatttgatgatgaattgagaagctttgggtttgaacgctttagagttaaggtcgagtccaggaataaatctggcacccaacaatttaaattatctttggctgatgaaagtgataatgttattggtgctctgggtgttgctagtgagggggaacagcgttgtatcgcaattgctagtttcttagcggaaatgaaagctgattcgagaaaatcggccgtaatatttgatgatccagtcaactcccttagccatgaatggagtggtcgggtggctcatagattggtattagagtcgaagaatcgtcaggttgtagtgctaactcataacatcgttttttataaattattacttgaggttgctgaaaaaatagatgctgtttattctagtatagcattagaacgttcacgtaaatttgcaggaattgtcagagactctgccccttgggaggcaatgacgacgcgcgctagatacggcgtattaaaagttaaactgcaagaattaaagaggcttgagaaaaatgatacaatcacaacatctgagtttcgcaattcttgctatcagttttacagttacttgcgagaggcgtgggagagattagtagaagagaaattacttaacaaggtggttacacgttttgaacgtggcattgctactcagcggttatctaaacttatagatatttctcaaactgatatagatagagtggacgctgctatgtcaaaatgcagcacttattttatagggcatgatagtgctgcagcagttggaggccctaatcctactattgatgaagtggaaggtgatttaaaattattccttgattttcttactgagcttgaagggaaaattagaaagcgaagttag

SEQ ID NO: 449360 - DNA, 351 bp, Serratia marcescens
atgaaagaactagagtatatgacgccttacaggctagaagatctaattattaaaatcgttcaagagggctatataaaggataatttctgcctttataccaaagagtacgaggcaattgcgacacttgagctgacatgctatctcgaacgttatccagaggttagtgatgatgatgaagaagtttatcctgactatgttgaacaaaatgagttggagctattcttttatggagatcaattcatggatgtgctcagaagtgcactgaatcaaaagccaagtgcaactgtggatgagcttatatcagcattgaattattacttggagaatgatgctttcatcacgttttcctag

SEQ ID NO: 449361 - DNA, 747 bp, Serratia marcescens
atgttttttaaattgagaaaaataaggggggttaaagaaaaaatcaggtttcgaggcacgttctttaaaaataagaatgaactggtctatataaacctctggaacgacattgacgcgcaccagccgctggcgccgatcgccgacaaccggctccgcggcccgcagggcgaattcgaggcgcagtaccattacgacgcgctgggccgccgcagccgcaaggcggtgcgctacaagggcaaaaccgaacagacgacccgtttcctgtggcagggctaccggttgctgcaggagcagcgcgacgacggcagccgccgcagctggagctacgatccggccagcccgtggagcccgctggcggcgctggagcaggcgggcgacagccactcggcagatatttactggtatcacaccgatctgaacagcgcgccgctggaggttaccgacgcggcgggcaacctgtgctggtccgggcaatacgacaccttcggcaagctgcagggccagacggtggccggcgcggcgaagcggcagggcgcgcaataccagcagccgttgcgctacaccgggcaatatcaggacgacgaaagcggcctgcacttacaacctgttccgctactacgaacccgaggtggggcgtttcaccacgcaggatccgatagggcttcgtggcgggctaaacctgtatcagtatgcgccgaacccgctgatgtgggtggatctgtttgggctttccagccgaccaaataa

SEQ ID NO: 449362 - DNA, 543 bp, Serratia marcescens; identical to SEQ ID NO: 84313

SEQ ID NO: 449363 - DNA, 927 bp, Serratia marcescens; identical to SEQ ID NO: 164500

SEQ ID NO: 449364 - DNA, 576 bp, Serratia marcescens; identical to SEQ ID NO: 164501

SEQ ID NO: 449365 - DNA, 1842 bp, Serratia marcescens
atgctgggcttttttgaacgattaaccaaaccttttcctgatgatgagcctactcagccacctcaaggtttatttgcgttttgtttacattacagcaaaggtatggtgctgccgctgatcctgatgtctattgcaacagcgctgctggctgcgctggaagtttcattattcggttatatgggccaactggtggactggctggtgaataaaaacccggaaaccttctggcaggaagaacaagataccttaatcaccatggcagtcgtgatgctggtggtgttacccgctttagtgtttttccactcagccctgatccaccagaccatattgggtaactaccctatgtcgatccgctggttagcgcaccgttatttattaaaacaaagccttggcttttatcagaatgaattcgccggccgtatcgccactaaggtcatgcaaacggctctggctgtgcgggaaactgccaccaagctgctggatgtgatggtgtatgtggtggtgtattttggctctatgttgtacctgatagcagatgcagactggcgtttggtgctgccgatgcttgcatggttagtcatttacacaggtctacagttctattttgtgccgcgcctaaaacaggttgctactgagcaagccgacgcccgttcagaaatgacaggccgtattgtcgacagttacaccaatatcagtaccattaaactgttctcacacacagcacgtgaatctgattatgcccgcgacagcatgcagctgtttctggtgcctgtgtataaacaaatgcgccttgccacctggctgaacatttgtgtgcagggtctgaattatctattggtattctctatcgctactctggcgatatggttatggtcggtcaatgcagtcactgtgggttctattgccatagccgtcagtctggctttgcgtttaaacagtatgtcgcaatggatcatgtgggaagtcagtgcgctgtttgaaaatataggtacagtggctgatggcattgccactttgtctcagcctcagcaaatcgttgatatagcaacagctaagcctatcgaagtaccacagggacagattgaatttaaacagctgaactttaactacggtaaagtcgcaggcgaacatggccccgtcattgatggccttgaattgtcgattaaaccgggtgaaaaagtaggattagtcggccgctctggtgcaggcaaatcgacgctggtgaacttgttactgcgtttttatgatgttaattccggccagattttaatagatggtcaggacataaaaaccgtatcacaggaaagcttacgtgctcatattgcgatggtgacacaggatacgtctttgctgcaccggactgtgcgcgaaaacattctgtatggccgccctggtgctaccgaagcagaaatggttgaagcagctcgcttggccgaagccgatgcctttattcaggaactgaccgaccctaaaggcaatagcggctacgacgctcaggtcggcgaacggggtgtaaaactatcaggtggtcagcgtcagcgtattgctatagcgcgggtgttattgaaaaacgcccctatccttattctggatgaagcaacctcagcactggattcagaagtggaagctgcgattcagcacagtctgactcagctgatgataggaaaaactgtgatagcgatagcacaccgtttatccactatcgcggcaatggacaggctgatagtactggaccagggtcgtatcgttgagcaaggcagccatcaggaactgatcgccaaaggtgggatttacgctcagttatgggcgcatcaaaccggtggttttattggcgtggaataa

SEQ ID NO: 449366 - DNA, 528 bp, Serratia marcescens
atgcgattcggtagggatagtcgtcatcggcgtaccaagactacgcggtttgccggaatatgttgggccgccggcacccaccagcactgcgctggccaactgcgttttgccaccaccgccaggcataatcgtgcccaccggcgtatcggcacgttggccggtgctgttcccaaactggcgcacaaccaccggcgctgccacagcgaagccgtgggtttgcgtgaccgtctgcagcggcaggcggccggactggccccggaaacagtcgtatttggttttgctggaggtgtggttacacttaacagcgaacggctcgatcagaaggtgttcggctttgctggtgaccgtagtcagcggcgctccggtggcatattgtcggccgtcgcctccgaaacccgtttgcccgatctgcacgatgtatgggtccgggcagtcgatgacgtatcgtttcaaccccttcacgatgcgacgcagcgtgttatcggccaacggctttttgcgccccatgatgctacgtgtcgggattga

SEQ ID NO: 449367 - DNA, 378 bp, Serratia marcescens; identical to SEQ ID NO: 157174

SEQ ID NO: 449368 - DNA, 150 bp, Serratia marcescens
atgaacagcgaaactggtgccatcctgcaacagtacctgcttgaaatgcccccgataggcgtccgaaaaggtgtgcatggctggcaaatgaagtgccagcgcctgctcaaacacttgacgcataaattcaggagttccgagcttaactaa

SEQ ID NO: 449369 - DNA, 873 bp, Serratia marcescens
atgattgcccgcaaggtgggtgtgcatccatccaccattagtcgcgaactccgtcgcaaccggtgtgcgcaaggttatcaaccagcagaggctcatcaatcggccaccctgcgacgatgttccagcagcaaatatcgtgtcccggaagatacccttattttcgtgaccatggcgttggccgcagactggagtccggagcagataagctcggtctgcaggcgcattggttgccctgtcagtcatgagtggatctaccgctatgtggcgcaggataaggccaacggtggcaagctgttccgtcacttgcggcaaggccacaaacgttaccgtaagggacagaatgccaagcgctgcgtgatccccaacccggtatcgatcgatgagcgcccagcgatagtcgactctcgtagccgattgggtgactgggaggtggataccgtttcgggcaaacaaggtagtggtgccatcgtgacactggccgagcgtaagagccgactctacctagtgcagtatgtgcctgccaagacggcagctgcagtggccgatgccatcatctgcatgctagagccctacaaggcacatgttcatacaatcaccgcggacaatggcagtgaatttgtggaacatgagcgagtagccaaggtgctaaatacccagttttacttcgcgcatccatacagcgcgtgggagcgaggtctgaacgagaacagcaatggcttgttgcggcagtatgtgcccaagggcagcgacctgagccagctcagcccggatgagttgtcggccttcgagcggcgactcaaccttagaccgcgcaaatgtttggatttcaggcaaccgcagatcgtgtttgatgaactacgacaggttgcttga

SEQ ID NO: 449370 - DNA, 705 bp, Serratia marcescens
gtggatcggcgctggctgtggcaggacatcgaaccggcaccgcgtctcgatcgtccgctgacggtggggcgcaccggcatgcgccagggcgtgcgctcctgcgcctgctgcacggcgatcctgccggccaatcaggtacgctgcccgcgctgccacaccaacggctacgtgcgccgccgccacagcctgcagtggacactggcgctgctggtgacctccatcatgctgtatatcccggccaacctgatgccgatcatggtgaccgaggcgctgggcaacaagatgaattccaccatcatggcgggggggatcctgctgtggggggacggctcttatccggtggcgatggtgattttcatcgccagtatcatggtgccgtcgctgaaaatgctggcgatcggctggctgtgctgggatgccaacggcaggaagaagccgcgtgccgacagcgagcggatgcacctgatttatgaagtggtcgagttcgttggccgctggtcaatgatcgacgtatttgtgatcgccgtattgtcggcgctggtgcgaatggggcagttgatgagcatttatcctgcgacgggcgccgtgctgttcgcgctggtggtgatcctcaccatgttcgccgccatgacatttgatcccaggctgacctgggatcgcgcaagtgaaacaatcaacaaggagccgcaaggtgacggaaaataa

SEQ ID NO: 449371 - DNA, 198 bp, Serratia marcescens; identical to SEQ ID NO: 25167

SEQ ID NO: 449372 - DNA, 231 bp, Serratia marcescens
atgctcaacgatttgatatttaagattatttttattttacgtcagatcttcgggcggggatttgtggcgggagaaaaaattgaaaatattgctgagcccagcaatgacgcgggtttgcgggcagttggtaaaaactgcattgactgtaacgatcgcctgtcggcgagatgtggccgcgatgaaataattagcgagtcgatcggtttgggcgatcaattcacatgttattga

SEQ ID NO: 449373 - DNA, 765 bp, Serratia marcescens
atgactggtacagcgtttgaattctccgacaatccgcagtttgtgtggatttacagctttgacgaaaaaggggtgtttaccggcacctatcactaccaggtaccgccacagagcgggttaccggccaacagcacgaccgtgccatgccagcccaaaagtggtatgaccggagtttgggacggtaagaaatggcgcgaagtgcccgacctgcgcggggttcagtattgggataaatacggcaaggcgtccgtgatcatggcgctgaccgagaccttaccggagggcgcggttactgtcgcgcctccgattgctgatcctgggcacgttctgctgtttagcgagggtgaatggcatcaactgaaggacatgaccggcgaaacgttttacggggcatacggtcacagcgcaacagtgccggagccgtattttgttctgccggatggatgcacgttcaccccgccgggtacgccgtttgatacctggaacggctcggaatgggtgacagacaccaaagcgcaggaagaggcaactttgcaagaagccgaacaacagaggcagcaagttgtcagccaggcgcaacagcaacgcgaggctatgcgggaaagggcagatcaagagatcagcgttctggaggatgccattgaactgggcatgcagcaggacggcgacgccgacaggcttaccgcatggaaaaaattcaggctgttggtaatgcgtattgccccaactgatgcgccggatattgactggccggtgatgccgtaa

SEQ ID NO: 449374 - DNA, 699 bp, Serratia marcescens
atgcaggttgattttacgctcaatacgaggcagtggcaggcgctgcaaaaagaattgaaagccgcagaactgccgcccgctaaacgtcgtcgcctgttgtggcgaatccttaaattgggggtgatggtcgccgcgcgtcgccatcagaagcgacaggaaaatgccgacgggatcaaatggcctgccaggcaaaacggcttccccggcaagatgatgagccaattacccaaaatgatggcaatcagcgagttaccggcgagagagtcagcacaaatttacctgaaaggcaaaaagcgtgtgccgcctggtgtcgtcggccagatacagcaaaccgggtttactacccaaatgaccgccgccaaagcggcgcgcgcaagccagcggaacggcgagggggcgacactgcgccaggctaaacggctgcatgacctgggttacaccgagtttcctgtgagtgcgccgcgtaaaccggcggtcagcgagattatgagcagcctgtccaagcaaaaggccggggccattattcgctgcctggaaggtcggcgcgcgaaggcaagctggacaatcaccctgccgggccgtgagtggctggcagtcagtgacgatgaattcaacaagatccttgcgcgccaactgcaagctatcaattttggttggaaggtgcgcgcgcaggacgttaaggggaacgccaaaaaatga

SEQ ID NO: 449375 - DNA, 516 bp, Serratia marcescens
atgaaccaaattgatgaattatttgcctttttgaaaagcaatttaccggaacgcctgatgtcagcagccgtgggggctgatgcctggatggatgatattcagttgacccatgcggctaaagcctgggggctgggacagcggcggatcatgatccgccgttatagcgcggtatttgcctgggagcgttggccctatcgtgatcatgaccctgatattccgtttgccctggtaggggcctggctgattgagcatgccaactcgcattacaacggcatggaactggaaccgccggacgtgtttacgcagctgatgaacaatggcgatgccatcatcaccatcactgtgccattggcagatgacattattttggttgaagacgcggaaaacggcgttattccgctgcagggcaagcgttacagcctggctgatgctcaggtgaatgtcgcaaccaaagggtggatttacggcgcgggaggccgtggggctccggttgaggtcatgggcgatgcaggttga

SEQ ID NO: 449376 - DNA, 453 bp, Serratia marcescens
atgttcagacctggtgatgatggatatcagaaagcgacgctcaccaatgatggattttggcctgacctggcgctggatgagtttcagcggcagcgcagcattccgccaactatccaccaaaccacggtgatccaggccatgctcgccgccgttgcagaaattaacccctccctggctgagtttgtcagccagcagaagcggaaggggtacgccagcgccaaagaggtgccagggccggaaatggacggggataacaccctgacggcgcagtataaaaaagcagtctatgcccgcgccaaagccgacctgctgggcgagtttgcggcgatcagccgtcgcgaagacaacaccaatcaggatgcgccacagaccaaggcgtctttgttggccgaagcggccgtcgtgctgcgtggcattaaggggcgcaggcgcgtcggggtgcatctgatatga

SEQ ID NO: 449377 - DNA, 744 bp, Serratia marcescens
atgacattcaatcccttgcgataccgtgcccaggtgctggcgcaggcaagaacgcgcccggcccctgatgcagcggcggcaccggataacgccgacagcctgcacctgcaactcttgtctttggagcaggatattaagcgcctgcgcgcgctgccgcgtaccgccgaccgtgtggagttgaagcggtcggagctgctgcccaaatggttgccgtatgccgatcggtacctggccgcggagcgggcttacgtttatccggtattcggctactgcgtgatctggctgttcgataccggcgagattgataaggcgctggaatgggcggatatcgcgattaagcagtcgcagccgacgccggacaacatcaagcggcagtttccggcgttcgttgctgactatgtgctggagtgggcgatcgccgaggcacaggcaggccacagcattgagccttacttttcccggacattcaccaatgtgcgcgagaactggcggctgcacgaaaaaatcacggccaaatggttcaagtttgccggggaactgttgctccgggacagggacggcaagccggtagccagcgcgattgaggacattcccacgctgaaaagggctaacgagcttctagcccaggccgaagggtttcacaaaaaaattggggtggaaacgttgcgtaagcgcatcgcgtcgcgcatacgcgccctggagaagattgccgccgatgaggcggatactgacaccgcatcctga

SEQ ID NO: 449378 - DNA, 1170 bp, Serratia marcescens
atgacaatgaataaattgtatgagctgacgcaggcttacgcccgaaaaatcggcgaggccagcggcgctaacgttaattcactgccgctcggtaccaatggtatcggccggttcagtatcagcccgccgcaggaaactgcgttacgtctggcgctgatggagtccaactggttcttgccactgatcaccatgcgcgacgtgtcccagatccgtggacaggtcattgatgtgggtaaccctggtgtgttcactggtcgcgaccctgacaagcgtttcagcaaggacgtagggctgtccggcaacctgtaccagctgtacccgaccgactcctgcgcccgtttgccgtgggaaacgctgtctgactgggtacatgcgggtaccaccgacgaagagtttattcagttggttgccgagttcactctggtgacgttcgccaacgatattgcccgcgttggtttcaacggcacgcatgccgcatcggtcaccgacctgaataaatacccgaatggggaagatatcaacaccggttggcatgccatcgcgaaatatttcgacaagattcacgctgatccagcgacgccggaagaagaccgcatcccaggctttaccccgcgtgtgatgaatccaggcaaagacaagctgaccctgggcgaaaacggcatctttaaaacgctggatgcgatggcgtcgtggcttatcagcaccaccattccgcaacagttccagaatgatccgtcgctggtgctgctgattggtgctgacctgattgccgccgaacagttccgactgttccaggaagcgggtaagccgacagaaaaccttgctgcgcagatgttggcaaacaccgtgaccggccgccgggtgtatgttgcgccgttcctgccgggtaaacgcatgatcgccactacgctggctaacctgcatatctatacccagcgcgggcaccagtaccgccgggccgagcacattcaggatcgcatgggcttcgaaaacgcctggtggcgtaaccagggctatgcgctgggccacccgatgatgtacggcgcgatcgatgaagagtcggtgaagattgaagcagaagccgacattgacgcggcgcgtacggctggccttattccgggcgcacctgatgaagacggtggcaagacactcgacaagaccgaagtgtaa

SEQ ID NO: 449379 - DNA, 960 bp, Serratia marcescens
atgtccggttcacaactgacaacaagttttatccgtattgccaccgagggtaaaaccgttgatggccgtgaaattgatgcccaatggcttattgatatggccgaaagttatgacccaaacgtctatacggcattaatttggcccgagcatgatcggtggtggggcagtcatggcgaagtccaggaactgaaagccgaggaagaagacggcctgatgcgcctctatgcccggttgtgccccagcatggatcttatgtacgccaaccgtaacgggcagctccttttttgctcaattgaaccgtctgagacgttggatttctgcggtaccgggaagccctatcttgaggggctgggtgtgaccagttcccccgccagtatcggcaccgagcgcttacggttcagctcaaaacgagatggccggacgtatggctcatgggagccgttagttattagtgatgtcgccgacaccaaggaattttctatgtctagcaaagactcaaaatcgaaaaaaacgctgttccgtagtctgttcaatattcctgataaaaaggaagaaaggacacctgccaaacaggaaaagccaaagtcccgtttattctcaagccgtaaattctctgatgaggatgtgcaggtcattattgaggccgtcgcagaattgcaagacacggtcgaagagcaggccgcgacgattgaagagcaagccgccgttatcactgaaattaaagaaaacgttgttgacgtgacggaaattaaagaggcggtcgaagaagtcaaaggcgatctggagtctgttcaggaagaagtcaccgaaattaaagacgaggtgaccgggggagaattcagccgactgaaagggaaactgaaaaatgccgagacaaaattcaacaagcttgatgccgttactaccaagctccccgattcggcccctggtgcaaccagcggtaaaaactacgcattctga

SEQ ID NO: 449380 - DNA, 2175 bp, Serratia marcescens
atgagcaaaaaatcaaaatacccggaagagttaatcaccgtcgcccgctccttgtatcttaagcgctggacggcacaagagatcgccgctgaattaaatttgaattcaacgcgggtgatttactattgggcggacaaattcggctggcgcagcttactcagtgaagaagacctggaatcggtgattaaccgccgtgcggcggtgctggtcgataagcccaataaaaacgaggcggaactaaaagagctcgataagtatatagacctacacgccaagctgattgtcagccgccataagcacgcagaaaaaatccacgccatgaatctggaagcagcggcgcggggcattcgcgccgagggcgctggcggcgtgatagaggcgatcgccgatgaagggaatgacgaggcccgcggcggcaagcgtcgccgcaaacgtaacgatgtgtcgggcatcggcgaggcggactttgccgagtttatcagcggcctgtttggctatcagaaaacgttacgcgaggccaaaaaacaccgtaaccgcatttggctgaaatcgcgccaaatcggggcaacctggtacgccgcatttgaggcgctggaagacgctattttgaccggcaataatcaggcgtttctgtccgcctcacggcctcagtcgctgattttccggcgctatattgtgcgctttgcctttgagatgttcgggattgagctcaagggtgatcccatcgtgctcagcaacggggccgagctgcatttcctttcgaccaacagcaacaccgcccagggcttttgtgccaacgtctacattgacgaaattttctggcagcgtggctttaccgagctgaaaaaggtcgccggggccatcgccacccatacccaccttcgccggacatacatttcaacgcccagcgccaaaacgcaccaggcttacccgttctggacgggcgacgagtggaagaaaggcaaggccgcgcgcgagaatatcgcgttcccaaccttcgaacagatgcaacgcgggattatgtgcccggataaccactggcgctatatcaccactgtggaaaccgccgtcgctgatatgcaggcggtggccgccgccaccggtgaccctacccgcgtgctgattgaccttgacgaaatcctggaagaaaacagccagagcgccttcaaccagctgtatatgtgccagtttgtcgataccggcgattgcgtcttccgcttcgaccagctggaaaaatgccttgccgatgcctcaacctgggacgaccacgatcgcaaggctattcgccccttcggcaaccgcgaagtctgggcaggctacgaccctgcccgcaccggggatacagcatcgtttgttctggtggccccgccgttggtcgatggcgagccgttccgcgtcctgcacgtcgaaacctggcacggcttcaactttaaatatcaggttgggcggatcaaagagtacatggcccgctacaacatcacgcatatcggcatcgatacgactggcatcggcggcccggtgtttgagatggtgcaagaatttgcccgccgggaagcaaccgccatccattacagcctggaaagcaaaaaccgtctggtcatgaagatgatcgacctggtcgaacacaagcgcatcgcctgggacagagaagacaaaggcattgctggcagctttatggctatccaccacaccaccaccaagagcggcggggccatgacgtttgtcgccgaccgcagcgccgataccggccacgccgacaaattcttcgctatcagccatgcggtaattaacgaacccctcaacaacgagcgcaagcgtaagtcacgctgggccaatcgattcacaggaaaacaggatgagcaaacgcagacggcagcacaaaaacacccgcagcagcagcgcagcacctgccgcaccggcacgccgtggcacattcagcattgtgaccaccgacacaccgatgccggttttaacccagggtacccagtatcacgaaatctggtacgacaacacctacgaccactggcggcaaccgatcgaccggctggccctagcgcaacttgccaatatgtgcggccagcacggtggggtactgtacgctcgcaagaatatggtggtcagcgattatatcggtggcgggctgagcctcggcgagatggggcaagcggcttatga

SEQ ID NO: 449381 - DNA, 804 bp, Serratia marcescens
atggggcaagcggcttatgatttcctgctgttcggtgatattggcatcctgaaagttcgcaacggctggggcgacgtggtcgacctggtgccgctgcctgcgctgtatgtgcgccgtcgtaaggatggtgattttgccgtgctgcagaaggggccgtcgctggtctacccggcgcgagacgtgatttttttgaagcagtacgatccacagcagcaggtctacggcctgccggattatatcggcggcatgcacagcgccctactgaacaccgaggcgaccattttccggcgtcgctactaccacaacggggcacataccggggggatcatttacaccactgacccgaacctgaccgatgagatggaggacgatattgccaagaaaatcgaagagtcaaaaggcgtcggcaacttcaagatgatgttcatcaacattgccgacggcggcgaaaaaggcgtgcagttcatcccgatcggcgatgtcggcgtgaaagacgaattcgccaacatcaaaaatatcagcgctcaagacgtgctgacggcgcaccggttcccggcgggcctggcgggtatcatcccaaccaacggcgcggtgatgagcagcccggacgaggcacgcacgacgtaccgacaggatgaggtgatccctttgcaacgcatgtttgccagcgccatcaaccacgacccggagatccccaaccgtctgcacctgcagttcacaggcattgacgcccgcggcttgcctgtgacgcagccatcgcgtaatgaggttgttatcacaccaggcgaatcgggggctgcatga

SEQ ID NO: 449382 - DNA, 267 bp, Serratia marcescens
atggcaacactcaagattaattgcccgacgtgcggcgcgcggatgcacaaccgtaagacaacctggttaacgcccatttttgcccggcagtatttcacctgcagcaacgtggaatgcagcgaaaccagtgtctatgagctgacacgccagcatgtgatcagccccagcgggctgagtgaaagcggcctgatcaaaacactgctggacaggttacgcccagaggataagcagctggcgcttgagctactgcaggcgcaggccggataa

SEQ ID NO: 449383 - DNA, 270 bp, Serratia marcescens
atgaaaaaacacaacttaaaaattgagcctgaatatttcgcggcagttgttagcggagaaaaaaaggctgagtttcgtttaagtgatcgtgatttctcagttggtgatctaatctgcttacaagagtatggcccacatccagagtttgatcaccttgtcgggtttaccggggagtctgtttgggtgcgtgttacccacatcaccccattgggtaaatgggctcctgatttcgtcatgctgagcatcgagcgggggccattcaaattatga

SEQ ID NO: 449384 - DNA, 264 bp, Serratia marcescens
atgcatttaaaatccgagtgcatccacattaatccgagtgttttgggcaaaatgtggatcacttttggtagggtggacaaagtaaaaagccgccccgaggggcggctagtggcttacttgttttggatgtggacgttaatactgatctggttgctggcgattgaccagcctcctttcactgtaccaacgaccccaccaaaaacaatgagcaaaacacagatgtgttttttcattgcgcggttccgtttaaaccgcaaccattga

SEQ ID NO: 449385 - DNA, 2517 bp, Serratia marcescens
  misc_feature (2483)..(2492): n is a, c, g, or t
gtgaaaataatcaaccatggaagtggaattcaccagagagaaatcttgggcatagacttcctaaccaagaatctccctgctgaatggatcggtcatacaaaccttgacttatctctccctcaaggccctcgtgaaattgacatagtattgttttctgctgaccgtattttcttaatagatttaaaagatggtcatggtcactatgaaagttcagagggcggttggtcactaaatagagttcctcagagtggtcagtcgccagttaaaaaaatactggaaaatgcgcgagaggtacgccttcagctcgacagatacctcgaaagacgagcacgaaagaccaaacgacctcgccttcctacaccgcaagtagttggtgttgtagtgctaactagcagtgctgatctgagtggtatagcaccgacggaagagctaagcgtatttaccgtaaagagtttttgtagcattgttaaagacactaagctgagagttggacgcttccacccagtttcttccgaattcgtttccgacccaattcactccgaaatgtggcgacgtcacctcgaccttttcctgaacgttaaaagtggtgtatttttgcctggagcacgtaaattcgggaactatgtagcatctgggacaggagctgcaacgtacgttggcccttctcggatatatcaagagtttgcagctgaagacgatacaccagccaaagcaactggccttcttcgtgtatgggacttttcaaaagcagaaacgagattccaaacaagggacggtagattggaaattgctggtcgcgagcgcaccattattggatggttaaatgatcgtaatgaggactgtgcaaacgccgttttacagccaaaagctgaaaaccaggaacgaacaccagactactgggaagtttatgatcaacgcagacgaatgaaaagactctctgaatttgtacgaagtgagctatcacagcttcgtccaaatgaacggattaatattgctcaacagctgttactgcaagcaagctacttacatacttataatacagcacatctcgacctagctgaccacagtgtttggatagccctaccttcagaggttaaactttcccacttgatggcggcacgatacccgcaagcaacgtcactcggtgacgcgagatatcaattcctctcaagcgtaaaatctccagaggattatttcgaacaagagtcgtctggcgagcagcgggatgtttatcatcttggttgtctaatacatcaaatcctttttggcattctcccagcaggctcccccccagattggtcaccaatcgttgatacggacaatgtttatactaacctacatgacgttcttgcgcatgcaataacttgggatataaatactcgctacaaaaatgcaattgaaatgcttgaggccttcaatgaagccactgaatcaactgagaatggtgcggaagtattaaaacgtcttgagtcttttaaaactatccagtctcaaatgaagttcttcatgaagttccctatgattaaagaggtcaaggataacgatttcgttaccatctggcgttcacaagcagaggacggccccttatttgtcaagctctggaagcgtgccgcatgggcggatggttcaactgaccaacctcgcattctcgattttttagagagggcaaggcatgttagcgttaccaaccctccgggatgtgttcctatcaaatctgcatattggtttaacgatgcttttgcaatagtacaacctttcattgaggcccccaatctggctgagcatgccttaacgactaacaaaaataccctttccgtagagcaaattttaaattttgccctagaactggtacaaacgatcattacattgcatgagtcagaagttagccatggggatcttaaaccacaaaatattctcgttttaggtgagaataactcaccgcaactcgtcgattatatagatttttgtagtagtagtgatggagagttaaaatcgactgcttacgccccgaattcgggaggaaccgtagagcgcgatcggtttgcagtaaccaaaattacggaagagttactccatggggtcgaattatccgattcagctaaagcagatatagcattaggaattgaaaaatgtcgaggtaacgatatcctagcaaacgcaacgctgcttcctttgcatgatgctctacgacgtgctctttccccaccacctcaacaagtaaaacgtcagctcagtatctgtttacctaacacgtcttccgttgaaatgatgccagacgatgatggattcggatatggcattatgggtaatgaattctttgtccgtggcttaactgacatcctatatttcagaattaaacaagcacggatagtatacgcacgtcacactactgcccctcagacagagcatcgtcgactttatgcccatcaatcggggattttaaatgccgaaatttccgtacgtggccacgttgcaccatcttnnnnnnnnnntacaaagacttccaaacactcttag

SEQ ID NO: 449386 - DNA, 2133 bp, Serratia marcescens
  misc_feature (648)..(657): n is a, c, g, or t
atggtagatatcgaagctagtctaaccaatgaagccagagcaattggaccaagcacccttcgtcgagagtatggaattcatgctgtacccattgaattgatgcaaggacattttgaattcgataaacgagatcgagtaagtgttgagcgcttagggaatgatggaaggtggcgcagaatcggtattttggatctgaccagatccagtgctgaatttattcacattgaagctccaacatggtttgaggctgtaggtaatcttatagatcaagatcaacgtattcgcttcaccagcaccatggaatacgccaacataactagacgccactcggctgtgaaaagaatcctatctcgccgttcgattgtgccaaaccttatagactattttgatccagcatgctcaccggaacttcaagatgtatccattgatgtgagcaaagatgaaataatggagctttatggcctcaatgaaacgcaagcgatcgcatttgcaaaaattttcaagtcccgccctcttgcccttcttcaaggccctccggggacgggaaaaactaagttcattggagcacttatccattacgcgttaactcgcggatatgtacgtaatgttctgctctcaagccaatctcatgaagctgtaaataatgcnnnnnnnnnncgaatgatgactgcagctatcgccattggggttcctgaagatgccgccctgcagatcatctgggtagaaacttcagtacggccagtcgttgatactcttaataaacttgccgaagacacagaggtagaaggtattcctgaacggttacaaagccaatttgatacccttactactatgattgccgatatggaggttgatgttgaccttccatcaatagatcatttacctgtcaccgatttacttgatttaatctatggtgcaattgcagaccaaacaggctgttctccagatggcattgccaagttacgggctgtcgctgtgctaactagagacatagtaagcagcgtttcaactagtgaacgtagttttgaaacttttctcgcaggaacaagacagattgttgttggcacttgtgttggtttgggacgttcctcattgggcttaacatcgacagcatttgatcttgttgtaattgatgaggctgcacgctgcactgcaagtgaactctctgttccaatgcaagctggccgatggtgtgttttagtaggagaccaagcacaattacaacctcgtattgatgaaaatgttctttcacttgttgcggagaaaaccggttattcagccgaagatataacagaaagtgctttccaaacggtttttgagtccgcattcggtaatcttataagtcaacgacttcttacccaatatcgttcacttcctccaattggccgagtagtatcggactctttctacgatcaagctcttcagcctgggcgtctagtatcggatgtccaagaaacctcttaccccactgcattgaaagtccctctcacatgggtatacacggataacctacaacaagaggcataccaaagaccagagcagaaaaaaagttcaaaaagtcttgtcaatcgagtcgaatgcgagctcattgctggaatgctaatgaactgggatcaatgtcctgattttcttaagtggttaaaaacaaaaaccgaacaagagcctgccattggcatcatttgctcatattctgctcaagccactcttattcgtaataaacttcaggtgacccgactaagtgacacaatacgctctgctattaagattggcacagtggatagttatcaaggtaaagaaaatagaattattatattgtcactcgttagaaataacgccgacggtatccgtatagatggaaaacccacaattcgtcctggttttatgtctcgctctaatcgaattaatgtggctgcaagccgtgctatggacaggctaataattattggtgcaagagatcgctgggccccgggtgggccaatgtctaaattgcgaattaattttacacgggaggttgacgaaggatacggggtatttgtcgaagcaggtcatatgttaaatgagcaacgaactgcttctaacatccctgcaacagtaaagcaccataaaaaaaatagcaacaaggagactttatga

SEQ ID NO: 449387 - DNA, 1449 bp, Serratia marcescens
atgagcaaggattcagtatcttcgcataacaacactgaccaagatgatgacatgtcctcgatcgagataggactctatgacgtcttgctaccatgccgccgctatcgcgtgacgttcaaggtcgcagaagtgggtaaggtgtcattgacaactgaatttcttcttcgactcatacatactgtcgacggcatgccggaaactgcggtagcaaaattcttcagcttcgaaccacaagaaatgacatacctgttgaatgatgcagtaagtcttgggttcatcagtcgtagcgcaggacgcttatggctaacaactgctggtcgccaactttttgtaccatgggatgaagcccctcagatttataacgttgacacaagaacaatgaatgttggcttcgacatgctttctttctctcctgaggataaaacatggatggaacattttgacaaccgactcccagaacttcctatagacccattgattgccagaacagccaaggaacaaatccccatatctttcaaacatcattttaacgatctaacatcaagacgtcacacgaggtatgatgcccgaaaaacgttatattcaatagatgaagtagttccaacagaacgatacaccgcaattgtgcctatcgtggtgaaatctatgcgaactaatcccgctcagggcgaaccaagccttttagtttggcgctctgaagaacagctggaggatcgacgtccaatcacttctgcgattgctaactttgtggacgaactccgtatggatctccctacggatgcaaatctgcactacaaaatccttgctgatttggctccggatttaatgcaggattatctaggcaaggacggtatatctattgagcgtttttatcgagatacagcattactgaaaggtgcaggttttcggcgaaaccgacgcacagttcctatcttaggacctttaattagtgcaaaaactaccaggctactccttgatggccttagtcgtaccagcgctaacagccaaattgattgcatcccgaagaaattttattggagggctccttcaaatcgacactggggtctgagtcgttctcttccaaaactctgtgaaggaattacagactaccttgcaacaaaaatgggggaagatatccctcgcctagtctctgtacttatccgtgaagaacgtactagaggcccggagagagcattctctgaggtccaggaaacttctccgaactcattaccctcgtcacttgagattatcctaatacctggtctacttgttgctgtagctgtacatttgcctattcaggcaataaatggtcacgcagttccactaggctttataagcatcgaagataacgtcgttacaaaggcggagaaattgcttaaggaggttacggtgatagagcttccaaaagagcgtatcaccgacgacatgatcgatttcccagagctctaa

SEQ ID NO: 449388 - DNA, 1332 bp, Serratia marcescens
atgtcatgtgaaaggaccggtgattataccggattcggttcagtaatcaccgatgaaaaaaatctctttagtatatatgtccctggcctggctggtatatcacagaaggaagaattaaaatcaccagcaatagttagaagaggagtggcaagtggtgatgcaaatttatacttaaggaatgtgatatattatctgaacaaagacaaccgcttggtaaatctcaatagcatgctgcaagttgtatttccagatatagaaatcgaagtggatttcaaagaggataaagatacttatctaaccgttaactttaaagaaaatgtaagtgggaaaaattaccctatcgagttagcgggaactggattactccaaacattacagatatttgcatatatagtatattttaaacctaaattattactcttggatgaaccggattctcatcttcatccggataatcaatatattctcactgactcattaaatttaatgtcagaaagtaacaaatcagaaactcaagttatactttccactcatagcaaacatataattgattcattgtatggtgaggcgaattttatttggatgaaggatggtaatgttcagaatcaaggtatgaacttggacaaaatatcaatgttcttagatttaggagctttaaatgacttggatagagtaactgagggggttgtggagaatatattcctcactgaagatagagataaaaaatatttcaaggcccttttgcaacataatggttttgatatggagagaactgcagtctatagctacaaaacatgcacgaatgtgcaaggggcaattgtatctgctgaccttcttaaggaaatgtcccctaattgcaaggttataattcatcgtgaccgcgattttatgactgatgatgaagtagacatagtaaaagcagaaattgaaagaggcggcgccattccattcattactgaaggtagtgatattgagagttattttactagaatagagcatttatctcatattacaggctcttctgtgcaagatatacaaacatggatttctgagatagccacacaaaatcatgttgtcatccagtctgattttcaatccaaaagagatgtgattaaatataatttatataaggggagattggaagcatgccctcgacacctaacattatttggaagccaagttccgacatcaattgataacattaaaggaaaatatttattaaggaaaatacgaggaggaatgcaagagaaattggggaggcagtatgatttaactcaaatgagccctcacctgctcattaacgaattaagctcaattatagagaccgattag

SEQ ID NO: 449389 - DNA, 285 bp, Serratia marcescens
atggaatacacttcaatggatgaaattagagctgatattgatcaacttgatgaaaaattagttgagttagtggctcagagagggcgttgtgtaaaagcggcagcgaagtttaaacaaaatacccaggcagtacgcgcacctgagagggtgaaacaagttattgataaagtgaaaacacatgccagacgtgctggattgcccgaagaaattattgagaaaacttatttggcaatgatcaacgctttcatcgagtatgagctagtgcaacataaccagctgaaataa

SEQ ID NO: 449390 - DNA, 315 bp, Serratia marcescens
atgtctcaaccgatcaccgagctttataccgacagtgaatttttcagcccgtacgccatgtctgcctttgtcgtgctgacggaaaaaggcattccgttcaccgtgaagccggtggatctggcgaaagaagagaacaaagaggcagcctacgcggcgctgtcgctcacccgccgggtgccgacgttggcgatcggcgagttccagctctcggagtcttcggcgatcgccgaatacctggaagacatccacccggcccacgccgtgtacccgcgtgacgtgaagctgcgcgccaaggcgcgcgagatccaggcctag

SEQ ID NO: 449391 - DNA, 234 bp, Serratia marcescens
atgctgacgctgtgcctgcgcaatatggaacgagatgggttactcaagcggacagttattgccgtcatgccgccgcacgtcgaatatgaattgacgccgctcggttgctcattgaccgtacccgtcatcgcgctgggaacctgggcgaatgaacatattgccgacattgatgcggccagaatcgcatttgatgagcaaaaccgagaggcttgtgacgatgctaagtcacggtaa

SEQ ID NO: 449392 - DNA, 237 bp, Serratia marcescens
atgggcacatcacgatttacacctgtatttaaggaagaagccgtccgtcaaataacggaacgcggttattccgttgccgaagtatctggccgtctgggcgtttctgcacacagcctctacaagtggctacaggctatcaaaccggataacagcgaacagcatgcccgggatttactggaagccaaaagcgagatcctgaaaaaggccgcgcggtactttgcaagggagcccgaatga

SEQ ID NO: 449393 - DNA, 789 bp, Serratia marcescens
atgtctacagaaaattttgtcaccttctggctagccagagccgatcttccatactttcttgaacctcatgaattttacgtttctgaggcaaggcggcggcttctctctcagtttggtgatttagaacaagaagcagagaagagagaacaacagtttttggaggctactgctaagtattttgatccagataacgatgacccaatggcggcctacgagcaagcctatcatgagggaattaattatgtatggtcgcttctggagatgcaaaataccgtgttgttggcattaacagcaggtatgtatcatcagttcgataagaaactacgagaacataccatcaaagagctaagccactggtgcaaacgagagttgattactcccatgatctggaatttcacattccatcagcttactgattttctcgaatggattggcctcaaaatcaatggaacagaatacggagaaaggatcaatgcctgtaacttggtagtaaacgtatacaagcatggggacggcgctgcacatcaaacactatcatccaactatcctcagtactacccacaccctaccgatgttcgagggacgcagatcgtacctaaccatgatgatttacacgtctcagaagagcagtttgttgaatttgctgatgcaataactgcattctggaaagcagttccagagtattgccactatgcagatctcgaagatgagcctaaatggatagataaagttatagcaaacatcgagcgaaagaataaaaaaggtaatagcaaccataaagcgccgtga

SEQ ID NO: 449394 - DNA, 1020 bp, Serratia marcescens
atgactgacgaaatgcacggatacgtatatatattggaggtctctgatattgacttacctgtatgtaaaattggaatgacaaccagagatccagtttctcgatgtaatgagataaataaaagctcaactggtgatttcatttggtcagtttcccactccattcttgttagcaattgtaaaaaactagaaaaaataattcacgaaaaattaagccctttgcggcaaaagagaagggagttttttaatttatgtgctgatgatgcatacaaagcagtaatgtcaatttttgattatcaagacgagataaaaataataagtgagttaaaatcgaaatcctcatcgataattaactcgaacaagaataacagttatctgtctaggcatgattctgccgagcatgcagaaatactacagtctttttgcgaaatcttgggtgtaaaaggaagagcttttggtcagctcaacaaaccattctttggcatgagcgatggaaatgaaggtgttcaatggaatatttctgcatatacgcaaaataatagtttccgtataggcgttaatcttgaaggtaaaaaatacaagaattggcctatagctcagcttattacatcagagttatcagcccctaaatttctaagtgcaatacaagaatcaaataccgcagacgaaatttttatgactttttaccgggatgcttggcaggcggcatccagacctgaaattagagagaaatacataggtggcagagaattcactctcaatgaactgactcatggagaatggaatgaaatattaaatgaagcgttaaattgcctggacaaaaattataattatcaacgccgaaatacgcagaatgttactatgataaaaaaagatggtagcaatcctgttcgtaccatgcaagtttcccctcatttaacaatctggtctccattaataattaacgataatattgatgattcaatccgaaataaactcaatcaattgattcatatttatcgttggatgatgcagttgagttga

SEQ ID NO: 449395 - DNA, 663 bp, Serratia marcescens
atgaactgggcgaaatttacacgcaatgcggccagccgaaagtttgatgagctgagggatgccgatgcatttcagcccggatcgttagcaccaggctatcccgaccttagggccgctatcctcgactcactcccgcttttcgcaaagagtgacctcgaagccggtgcctacgatatacaggcgggcctcaccctgtacaaggtattggaggcatgtggattcggcttgcgtcatgccgccgatgatggtgtatggcgctacctttcccttattgtcctaccggactatgtgcagtcacggtgggacaaatctcaagaggcgcgtttctggcgcgaccgtagtcgtatctggctgcgcgcaatatggtggttcgtccatctttcgtggcaaggtgatgaagcttccacgcatgccagcgtacgcggcatgtcgaccgacgacgtggtacagatagttgaacgtccggggcgccgaggcttccgtgtggaactttaccgggccatggtccgtgccgccggcgcgagaccccaagggcagagaaaaatccggcagttgatgaagctcaatacggccactgtggtgatgatcgagccctccgcgtaccggggagggctttccgaatatgtggaagccctgtatcagcagatcgaccagatcgtgtaa

SEQ ID NO: 449396 - DNA, 969 bp, Serratia marcescens
atgaagcgatccccgattcccccccatcccgtactcaccgcgttacttgtcgagcagatggaatttgatcctaccatcacgtttacctcatcacgagcaaatcccggtgcacaagggaaatggggagagcagtatacgcttggccacgattctgactgggaccccggtagagacgagctcgaggtttgttgtaatatcgatggcatcaggaatgtcaggctgctcttcggaccagatggagttgctccgaggtccgcgactctagcgctcgctctcgaatggttctcgccagattcgggctggcgtatactcggagctccgacattgctgcgccagccggaacaatccgatataccagtgccagcacaactcacgctgaccctgccggcaaatacgcttagggggaccggcacactatcattgcagctcgtgcttaacgatgcgggttcgccggaagaggacgaaaaaggtctggcacgtatgcccggattccggttcggtatgctcgggctagatacacgcctcgtcattgacggggatggatcattgttcccggttgtggtggaagcacttggcatcggcgagccactctggagatttacgcaggattggtctgacccttctgaggatgaattctctaccgtatggctatccctctcgctgaacgagaatcatcctgacttttcaatgcttcgccaacagggttcagaagcgtggacgccgctcttctgccaagtaatggcatcttggcttgctacgtttctcatggagctcaagtgcgagccgggggtggattttgatgccattgctcttggtcggccagctgccgcggcgcgcggaagtattgtggatgctgcggcgtcgatggtgaagcgtggcaatctcaattgttcttcgcttggagaactgatcagatcgacccaggcgtgggtggacactacggctcggacgcctagggagaggcaatga

SEQ ID NO: 449397 - DNA, 2064 bp, Serratia marcescens
atgaagtacttcccactgagcctagggccgatgcaggaatccggcagcgctctgcttcgggcattgcagaacgactccatgattccgcttgacttgctggtcagggaagccgtccagaacagtctggatgcagcattgacgcccgccgatagcgaagtttctgtcgagatcaagatcaggtcccatgagaccgaggtggtcgctggccttttcgagtccgggatcgacaaggaggtgctcttccgtctatttccggaagggggtcgcatactcgagatccgcgacaagggcacggagggcctgacgggcccgattcgattggaagacgtcggccctggccaagcgcggggaaacttgctgaagcttgtatacgaagtgggccggacccgcagcgacgaaacgtccggcggttcatgggggcttggcaagacatgctacttccgggtcggtgtggggctcgttatctactattcacggatccggtcaaacgattacttcgaggaaaggctcgttgcctgtcttgtcgagaacgaggccgacgaaaacagacttcaacgacagtcggcaacgggtattgcttggtggggcgaggagaagggggtaccccttaccgattccgcaagaattgcgacgatgctgcattccattggtgtgcagccgtatgcgggagaggatacggggacggcaatcatcataccgttcctgagaagcgacctgattccaccgccggatgcagctgcttcggaggaaccagatgacattgctcgctgggaacctaggccgtggtggttcactgactacgtgccctacgtgcgcgtggcgctgcagcggtggttctgcgctaggatcgacaatccccggtttagaggaggacctgcgcttgcagtgagcgtcaacggccagcgtctgcaggcagagcacatgcagccggtgttcaaggtgttgcaggcactctataagcggcttgatcgagcaacttgccgaggggccgaagattatctcgacaagtgtggcatcgacgagaccgatatcctcaataagtccatagatctgaatggggtcttcaggtcaggtacgaacgccggccgaatcactgcggtgcgcctctcggcggaacagctcaagctgaccgcccccgagaacatgccagatccctaccgctgcattttcagctcgcaagagcgtgtgcaacgggatcggccgctggtggcattcatgcgcggtccaggcatggtcattcgctgggataacagtaccgaccccaaaggttgggggggaaacgcactgctgcctacaggcgagagcttcctagtcggattgtttgttccggagaaagaccgcgagttgaagaaggaagtccgcgacaagctgcggaactgggaccagacactcgaagcctacctgcgctcatgcgagcgagcggatcaccatcagtggatggattatgctggcctcacgatcatcagccggatccgcagcaaggtaggcaatgcaatcgaaaaattcaatgtgccagtggttgcaagacctcaaggcatatccctgcgcgcggctcggaatcttgcagaccgattgctccccacaggattcggccatgatggtcgggtcgctcctgtcccgccaagtggaggtggctcatcggggggccgcaatcgtagctcacacaagctccccgaacttgaagtaacacatgtgcgatacggagaaaatgaaatgcgtatctgctggcgattgaattggggcaaggggcgagccagtagacaaatagcgcttggagtagattctgagtccggcgtgatcagttatgacaagtggaccgaggaagggcttggcgcttttccgctcacgatcgaaaatgcatcgatcaccgatgaactctcatcgcacatcaccgatattctcgaaattgacaggatgctactggtagtaaggccatggcaatccaatatggatggcgccaccgtcaacggtgagttgacgatccgcatgcctaggaggcttgccggaaatcttcggccggttctgcatgctgctgtagtacagacaacggaggagcccgcatga

SEQ ID NO: 449398 - DNA, 2805 bp, Serratia marcescens
atgacaaactttctcatcgaccccgaattcgatccttatcgtgcacacatcgaaagacagctgcgggaaggcaagacttggatcgatctgcgggtgcaagtagaacagtcgttcgatgcgctggactcttggttcgtttcccagcagacgttctcgtcgtggccaagccttggctccacgccgcaagcacgacgtgctacgtggattgcgcttctcgatgcgaaagaagatgccgagtcaaggatgacgctcgcgaaacgtccgctcgtcgttgttgggcgtgaggagacagaacccaacatcaaggtgcccgaggccgagcattcgtcatggcagctatatcgggctcatctgcaaggccagggctggaacaatgatgccatcacgccgatcgaggagtcgtcgctcaggatcttgaagcggctgagaaaaaagacagctggaatgccgcccgtgcgtgggatggtggtcggccatgtgcagtcgggaaaaaccgcaagtattgcggggttgtcggcaatggctgcagatcatgggtggaatctagtgattgtcctgagcggaacgctggaaaatctgcgtcggcagacactccgccgactggtcaaggacctgaatcatcctggcaacctacattgggtgccaatcgaccaaccgtcaggcgagagccctcatggccagcggacgcaggacaagcacttcatgccgggaagcacgtcccgccatctcgtcgtctgtctcaagaatccaacgcgcctcaagaatctgctcgattggatcacaaaagacgaggcgtcgctggatcagatgcgaatcctgatcatcgacgatgaagccgatcaggccagtatcaataccgcagctggtgaacaggtccggaccacaatcaacaaggcaatcatcagtctgacacaggtgaaggcactctccgtcaactatgtcggttacacggcaacgccggcagccaatttcctgaacgaaggcccaggcgaggggctatatccccaagacttcattctctctctgccgcaatcggacaagcacttcggcccgccgcagatctttggtatacccgagcgcggcatcgaaccgctggaaatcgtcagtccgatttcctccgatgatctgagcgcgatcaggaacctgcatgacgaaccttctgcgtcgattcctaacagcttggcggatgcgctatgctggttcgtctgtgctgcggcaacgttccgggtctatgggatcgtcaagcccgtcagtatgctcgtgcataccagccaaaggcagcatcatcacaagaatatcgccgaggctgtgcgcagaatgctcttggcggtgcatgcggaccaagcaaacttcattgcagcctgccgcaagacatggggagaggtgggggcgaagctcgaccgggataatttcaaggttcgcttccccgactatggctggccgcatagtcttcgcgactacccggagtttgatacgctgatcccgcacatcgaagaactgctctcagaagtctccgccattccgctcgatgaagaaggctccatggcatatcaccggggcatccatctttgtatcgacaattgcgcaaacaatggcatcagtgacgaaaacgaagtgcgtcgactgatctatccagacccagatgacccgaggtaccctcagttctcgacggcattcatcgtggtgggcggaagcacactcgcccgcggactaacgatagagaacctcgtcagtacctattttctccgaacttcagttctcggagattctctcatgcagatggggcgctggttcggttaccgcaagggttacgaacttatccctaggatctggatgccacagcagacccgcaagaaattcgagttcctgacgcaggccgaagaggagttgcgggatgagctcaatcgattcatggacggaggagccgaccccagcgattttggaccgagagtacgtgcccatccccgagcatcatggctgcgcccgaccgccaagaaccggatgcgagaagctcaaggtgcagagtatgatttttctggggtcaatcgccagaccacgatcttccattcaggagacgaaagctacaaaatccaccaacgtaacatgactttcgcaacagagttcttagaaagtcttggagattctcgggaaaacgcccgggagaacgcccttgtatggcgtggcatagcattcgatgctatcgagagccttttgagccagctgatgttccatccgaatgcacagtttttttcggacttggcaccatttctggaatggtaccgacagcaggccgccgctgcaggctatggagattggaatgttgtcgctgcgggtacatctgctgccaaggaaaagcagtggaaggtttgtggaaagagcctagggcttgttacacgcactcgtgtcatggaagcaagccgggaggacgccgtttccatcggcgtgctgcgagacccattggacctcctagcggatattgacacgccgtacgatgtaccggacaagctctcaaacgaagttatttccgaccttcgtactcaggccggtctacacaggacgccacaactgcttctgtatctgatcgataaagacagcaaacctagtgacttgtacatgagtaagccgctgggcgagaggtccagagggccgcttgatgcggcagacaacatcgtcggtgtcagcctatggctcccaggcactacagatgttaggcggtcgtatgcgacgcatcttaccgtacgcataccatcggtgctagcctccgacgaggatgacattcccggcacgggaatcgaggacaactga

SEQ ID NO: 449399 - DNA, 222 bp, Serratia marcescens
atgcaagtttataaagatattaatcatgattcaggtgtcagaggttatgacattggggatacatacataactgtatggttcgacggcactgctagatcttatacctatagttacgcaagtgctggtgctgaaaatgtagagacgatgaagaggcttgccgaaaatggtgatgggcttaatgctttcatcaacaactttgttaaatttaagtatgtacggtga

SEQ ID NO: 449400 - DNA, 450 bp, Serratia marcescens
atgaaaaagaacgtaaaaaacagtaatgatatgtttgattgcgaggcgggaattctcggctacctgctgcgtaaagcatcaggcgcttataaacaaaaaatggaaaaggaattaagccaatatcaaataaccgcgcctcaattcgttatcatgagcattatttctaattttgaagggtgctctaatgccgatttagccagattggcactactgacccctcagaccgtcagcttaatactcgtcagattggaaaaactcgagctcatcgagcgtctgccgcaccctcgttataaacgcgttcaaatcattaagctttccacgcatggcgaaacgctttttgcatcctgtgacaaggtaatcaacaagttagagtcaacgctggaagatgaattttctgcagacgagataaaagtcattcgccgctggttagggaaaataatcagtgaataa

SEQ ID NO: 449401 - DNA, 1074 bp, Serratia marcescens
atgatagaaccttatggcgtcattggactaagccctaccgcatggggcattcagaaaagagcggatatttcgaagaatctggaccatatcgaagaattgaccaacggcgccttgtcactttgcgcattggatatcccggttcgcctgctggttttacctgagggcgcacttcagggtttcaccgatgaagtattggatatgccgatggttgagtttttaaaagacggggctattgatattccaggtcctgagaccgaaagactcggccaattggcgcaacgtcataatctcttcattatggcgcaggccaaagtcagggaacctgattggccgggcatcatgttcaacgtcggctttgttatcaatcctcagggcgacattatactcagacaccataaaatgtcagcgttgctgccgagcgagcgttccgcatcaccgcatgacttatttgacaaatgggtcgagaaatatggcagcacgctgcaatctttctggcctgttgtcgataccgaaattggccgtctgggcgtgatgatggcgatggaggggaacttcccggaaaatgggcgcggtttggcgatgaatggggcagaggtcgtgtatcgcgcttcactgcccacgccatttaccgaaaatgatatgttcgaaatctccaacagggctcgcgcactggaaaacaacctgtatattgtcgcgccgaacatcgcccctgtgtacacctttccccactctttggccccaatagattgcggtggtgggagttcattgatcgttgattataaaggcaagattattggtaaacaaaaagataccaacggttcaagctacgtgcatgccgtcattgatatcgaggcgcagcgttatcatcgaacgcattcatcagtgaccaattggttaaaagatatcagaaccgaatgtgcgcaattgatttatgaaaagccagtgtatcccaaaaatatttaccttaatcatgcgcaaggaaatcataaggaatacaaggaaaatatcctgagcaaacaaatagagatgatgattgagcgcgatatctatcgtcttagtgcctatgataaatag

SEQ ID NO: 449402 - DNA, 1536 bp, Serratia marcescens
atgaaactcattcctttgtcattgttgtttttatccgtatcttcctatgccggtatagagtataagcttaccgaaatagtcaatagcccgagcggtaagtaccaaggcctggagcaagagggttatttacaattcaaaggcattccctatgcggagccgccggtgggtgaaaaacgctggcaagcgccggaaaataaaagcgtcatggagggcgtgtattttgccggtaagtttggcaacagctgtgcgacgacggttagcctggccggattcagtaaaataagccagtcggaagattgcctctacctgaatgtttacgcgccaaaagacaatgagggtaaaaagcggccggttttggtttggatacccggcggtggcttaagaaccgggtcgggtgatgagtacaacgtgtctaattttatcaagaaagatatcgtagtcgtaacaataaactatagattgggcgtttttggttttttctcgcatccagcgcttaaccatgagagtaagaaaatcaactatggacttttggatcaacaaaaagccttgtcatgggttcaacgcaacatagccagctttggcggggatcctgacaatgtcacgttgttcggtgaatcagcgggagggcatagcgtgcttgcaaacatcgtttcccctctgtcctcagggttatttaagaaagcgataatctcaagcggttcttataacctggaccaaaaaaacatcgcgcaggccaacgcggtcggtctggaggtggcaaaagcggtgggttgcgatgacgatacgccggacgggcagctggcttgcttaaaaaaaacgcccgtcgccaaactagcgacaacggcaatatccaatttgtataacgatcaatttactattgatggcgatatcattccgtatacgtttaatgaggcgatcgcgaaaggaaaagtcaatagggttgatattatcaatggctttcagaataatgaagggactttctttgccggcgtgatagagaacgatgccggcaagaaaatagacaagcaaatctatacggagtcgatgatgaccttatacggaaaatcattctcctccgtagaggaaacggatgataacaccgattttacggcaaaactgagcgacgatctgacaaagtataaatttatttgtccatcccttaagttcaacaccgagatggctaagaaaaacaggctatatgcctacgtgtttaacgataagaccgcgcctcaatacatagcaaagatgtcgaggccttatctggcggcgcacaccagtgaactaatctatttctttgacggatttcatggcgccaccggcgtgaagcaggccttaacgaaagaacagcagcgcctttcagataatattgtctcttatttaagtaactttattaagaacggcgatcctaatcagggagctccggtgagagaaaaatgggccgagtttaataccgagcatatgatggccattgagttttctgataaaggaatttttgatataaacaatttatcggaaaaatacgtctgccctcagtaa

SEQ ID NO: 449403 - DNA, 279 bp, Serratia marcescens
atgacgctgaaccctgaacataccccggtcttccgccgtggctaccgcctgcaatgggagccggtgcaaaacagccacgtgatcctctacccggaaggcatggccaagctgaacgacagcgccgccgccatcttgcagctggtcgacggccacaccacgctgaacggcatcattgcccagttgaacgcccgcttccccggcgccgacggcttggcggacgacgtgctggaatttttccagcgcgcctacgaacaaaaatgggtgaccttccgtgactga

SEQ ID NO: 449404 - DNA, 279 bp, Serratia marcescens
atgacgctgaaccctgaacataccccggtcttccgccgcggctaccgcctgcaatgggagccgatgcaaaacagccacgtgatcctctacccggaaggcatggccaaactgaacgacagcgccgccgccattttgcaactggtcgacggccacaccacgctgaacggcatcattgcccagctgaacgcccgcttccccggcgccgaaggcttggcggacgacgtgttggaatttttccagcgtgcctacgaacaaaaatgggtgaccttccgtgactga

SEQ ID NO: 449405 - DNA, 501 bp, Serratia marcescens
atgcgcatgaataactttacccggtatacgccaaaagagccggcattcggtgcgctggcgctatatttgcaagacgaaaaaggccgtgattggtacgcaatgcaggcaaaattcactaaaaaatttaagctggctatcctccccgataccggagtgatccgcagcatcacacaagatatttcagcgttgttccctgaagggctgaccgtggtcgatatcgatacattgcccgaaggatgcaatatttccggcgattgggtttacagcaacggcagcattaaaaaagacgccgccgccgatgtccgtgccgctatcgcccaaaaaggcgcgctgatgacccaagccagcaatcagatcatggtactggccgatgcggtcgatctggggatggcttcagaagaggataaaatcacccttgaagcctggcgcacatatcgcgtgctgttgtcgcgtgtcgacattgccgcagccccggtaattgactggccggaggccccataa

SEQ ID NO: 449406 - DNA, 1560 bp, Serratia marcescens
atgtcagccattatcaccagaaaatacgaacagtgggcagcaagccaggcggccaataatctgcctgcacgcccggatacgttcgtttttgcctatattcaagggcaagaccctgaagtcgagatcagccgcgacgagccattaccggcgccggccaacatcgtgcacaccgcaccggtcatgcaatacggaatgctcaacactgacgcggtggttttctctgtggtgctggacacctcagtcggcgattttgattacaactggatcgggctggttgaccaggccagcaacacgctatgcatgattgtgcacactcgcacccagcgaaaaatcgcaaccagcggccaggaacagggaaacaccctaacccgcacgctggcgatggaattcaacggcgccgccggcaccacgcagatcaatgtgaccccgcagacgtggcaggtggatttctcagcgcgtctgggcggtatcgatgagcgtcaacgcctagctggtctggatatctacggcacaggcgcattttttgacgacggctttttggtcactcatacgggcagcaattatcaggcggcccctggtattggctatgtaggcgggttgcgcggtgtactgccggcgctaacgcctatcgctgtcgatcacaccccgacattgatttgggctgatatcagccttcaaggccaggtcacaagtcgatgggaagcactggtcaaactgaccgccattgatacgctgcagaactatatcgacgagcaaggatttccgcattacgtcacgcagctggcccgcattaacgaggatggcagcgtcacagatctgcgtacgaaaggctcacagaacgaacaggaagccaaccgcacgtttctgcgcaaagaccaaaacctggccgatgttactgacagggaagcggcacggaaaaacatcgacgttttcagcaaagatgaatctgataatcggtttgttaataaagagggcgataacgttggatggctaaccgttgatgatggactgaccgttaacggtgagggctttttgataaaaaatggcctgggtgatattgacgaaaacaacgaacgccagaccagcggattacgcatcgttggcgccggtaacttgtttgcagacatattccaccgcgagcgcattggacaaaaccatttcatgggtattcgcgtcgctaacggcggtagcgatgggtggtttgagttccgcaatggcgggcaatttatcgcaaatggcactgtatctgctggcggtgattttggtgggatacttcacacggatggtaacgtacagggcagtatctggggcggaaacctatctaattggcttaataacaacataaacacccgtgccacctgggattatgtcaatggaacatttgttaagcagttgcggctcggagccaatattcacatcggtggttatgacggtgatgttatggctccagctggtcacgtcgttaccgggatcggggactttggtgccgacgatggttatggatatgcagcaccactgcaatacctcatcggcgacaattggatcacaataggggtgtaa

SEQ ID NO: 449407 - DNA, 1878 bp, Serratia marcescens
atggctgacgaatctttgccaacaaaacgcatatcggaattggcgccagcatcttcacttaatgatgctgacgtattcccgttttcatcaccagatggtgacgcctttctgactaaaagaggctctctttcaaatttaagaggactgttaaatttcgaaaatgcctttgactctatagacgatggtctagcaacagtcgatgatggcaaagtattccatgtatggacatcacaagataagttgtctgtcgttgaatttataaatgagaatggcaccgctgttaaccaagggaaaatgtatttttccccaaattacaccgcttttattggtgatcgcaacgagcgcacagatcgccgaacagctgggcttaaattgtctgaaacaatacgagacgatttcggcgtagagttaacacatggctttggtacgaaggatgggaaacttcctcttcacataaataagaatggcgtaatcaatatcggccatcttaaatttatggaaatagacggccctcctggaatagtcttggttgatagatttcttagaccttatgcatgttttcccggatacaaaaatgacattggtttgcctgttattggtgaaactactattcccaagccgatagaaaaaattacgtacacgggccatatgggtatactgggcaacgggcaatcactgatttgtggtgtcactgaattggcaaagttgcttgcaatatcaacagaacagccatatctaaacctgacatttagcggatcaatcgttagtgatacaactgagacagataccttagttcctcttgttgaaacggtgcgaaccgatttacttcaatccgaaacaccgatcagctcatttacaaacggtctgacaggtcggcttttgtctgagtataatataaacgctaatgaactcggctctgtttttattggttcctcatctggtgcccctggcatgaaactatcaaatattatcaaagggacacccgcatatgataaaacccttgctcacataaaaaactctgttcgtttagctacgctcagtaatagtgagtattcattacttagtgtattgtggtttcattccgagtcagattaccttgctaatactacacgggaagaatatcgctctgttatgaaaaaattcatttctgacttttataccgatgtcagaactataacgggtcagaaatacaaccctatttttatcgttcatcaactatcggcacatgtcgcctatgccagaccagttccttctatggcgttggcattgcgcgatcttgctggcgaaggtctgattcacattggtcaggttggctatgtcagtgtgtacgcgggcggcgttcataaaacacctgaagagtattatcatgacggtaaaattatgaaccgtatattatataaattgctcgacgacaataaacgcggaaagccgttcggcaagcactggttagatgttgtttcagagtataggatcggaaatgtcgttgaacttacatttaatgtcccatctccgccactgagatttaaaacggattgggtttatcctgcccctaatatgggattcgatgttagagataagaatagtttttccttgtcagacattattacaagcgtgaccattaccggaagtgataaagtcattattaagtgcagccgacctttgcttgatagtgaaatggttacttatggctggggcagatttgatccgaaagacccagagaacccagaaaacccacagcgaaacggaagaattaacgggccacgtggaaatctttttgatagcgccggtgatattcccggtgaaacatatatagatattaatgaaaacgttcgcgtaatggacaatccatgtgtgatatttagtacggagaatatttaa

SEQ ID NO: 449408 - DNA, 789 bp, Serratia marcescens
atgactactttaataattgaccaaaccatcaataaaaaccctgcttttgatgctatggcttatccatttgaatctgtagatggattaatggctgcgtggcgtggtgatttctctcatgatctgtctggaaacggccatactttagagaaaatcggcacgccaaatcaaggtgttttcagtgtttcaggagatcgcgccaacggatataaaaccagtgttcccgatggtgttaaccgcactcttatttgcgttcatcgtcagccatctattgttaatggtaattcatataattatcctattggcaccttgagccaaagtaataacataaaccaaggcgtcggcattggcattagacaggccgcaggatatccggggaaaaataacttatccggtatagttggtgggaattctaaaaatgaaggctattacgggattgcaaaagttgataacttagagtacgacactgctttaaattggatgtggagcgcattagttgtaaatgggactcagaattttgcggcgctatatgttccaaccgtctcaggagaattggtcatggcgttgctagcaaacggcgctaatctagccaacagaaatattgttgagggtgattcgcccgctcgatttcgtattatcgcttggcgtgatccatctgcaccgccggttcagtcgtcatcattggaggtcgccgaagctttaatttatgacagggcattaatgattgatgatttacagcttcaatactcacgctcaaaatactatatgagccaaaataatcgcgttgtataa

SEQ ID NO: 449409 - DNA, 621 bp, Serratia marcescens
atgaaagaaatgatgaagaacattttcagccaacttaaatatgcatctgaggccgcagcctgggaacctcgtgtatatgaggcaattattaatgctgaaagagttattgaatgccaagccgcaacaattgaatgcctaaaaaacaatcggcttggtatcggtgactatcttaatgaactgcaagagcgttgccgttttcttcacaaaaatagcgttgagaatcttatcctccgggaaaaaagtgagacgcaacgagacgccttgctgatggctatcggtggaactgaagatggaagaatcattgatatcaccaagcctgaagaagccacggagcaagcggtaattatcatccgtcaatctttccgcgacctaaagcagtatcgcgacattgaagaaatcccgttcggcgccgttgagcaggatcatgaagtggcccagctgcagcgccagatcgatgaaaaagatttgttgctccaacaggcaaaagagaatgaacgccgcgcgatagattgctttgcgcgcgcggtggctttcgctaaaggcgctgaaggtgatccgtgctacatcaccgagctggaaaaagaagttgctgacttggcagacgaggtgcggaaaaaatga

SEQ ID NO: 449410 - DNA, 126 bp, Serratia marcescens
atgccccgtttaagcaatgttcaatatagggtgaattgtctcaactgtggttttgtcagtcattaccgtgcctatcctgttgtacagtgggttttggatcaggaaggggcggacaaggatgaataa

SEQ ID NO: 449411 - DNA, 330 bp, Serratia marcescens
atgctggaacatctagaaaaacgagtagagcgcttagaatctgacgttgcgcagataaaacagggtcttaccgtgctaaccactcgctccgagacatttgccacgaaatctgacatagaggctattcgtgctgaacatcagacattacgggcagacgtggtaaaagaattggcggcgtccgaaaagcgcattaacgataaatttgaaggcaagttcgatagcgtaaataaacgacttgatggcatcaatgatcggcttctctggacgctaatggttcctgcaattctggctatccttctttggtttgtgaaagaggctattctcaaatag

SEQ ID NO: 449412 - DNA, 387 bp, Serratia marcescens
atgagtggttggctgcaaaaactgacgcatggcagtttagtgctcttgctgctggtggctattagcctaggtggctacagctcattgctatcacatcgattggatctggcacggaggcagtctgcggagcagcagaagacgctggcgcagcaggcaaagttgatcacctcattgcgcacggatgacgcccgcaatcgcgcattgatggcagaacaacaacggagagagcagcagctgcgccagcagggcgaaatctatcaaaggaaataccgtgaagctatcaaaaatgatgagtgtgcccgccagtctgctcctggcactgttcttggcatcttgcgcggaacggataccgcagccgccagcgccgatcatcctgttgccccctga

SEQ ID NO: 449413 - DNA, 189 bp, Serratia marcescens
atgcaagactggtttgtatcatggcaagttatgaataatgacaaaacggttaagtctgtcggttacagagtgttttcatcatctcataaagaccctgcagtggtgctagcagatcaaattaaagaggtcgcggaaaaacaaaaagtggacccgtacgacatcctggttatggcattcaacaaggtataa

SEQ ID NO: 449414 - DNA, 186 bp, Serratia marcescens
atgaataaagcaacctggattaaagcttggtttactgttgctaccgtctatacctgcattgacctgagcaagatcatcgcagatgagtttctatgtggttctcaatggttcaagctctttggggctgtcttattgatttttgccattagctggggtgcccgttcgaaattgaaagaactgaattga

SEQ ID NO: 449415 - DNA, 399 bp, Serratia marcescens
atgggacgcaatatttcggtagaaattaacgatgtaatttacagcggtgccactgcaccggcgaaagatcaggttgagatgttgcagattgcttcgcagtgcggcctgttaccggcgatttctgacactgtgactaacatggggttggctgccagcttgtcggctgtggacgctgccagctttaataggctgaaaatgctgtgtctgacgaacggtaagatcgtccgacagatagacaatatcccggttgctgaaaatttgttccaggatgaaatccataatttcatggtgctggtagggagggtgttaaaggaaaatatcggccctttctggcaactcagcagcgacggaggggaaaaaggcaacgacagcaaggtagtggcgggaactcaagagtaa

SEQ ID NO: 449416 - DNA, 615 bp, Serratia marcescens
atgagttcccatttgaccttcgtggttatattttggttttcgccagttagggcgttaactaaaatcaagggagttattatgtctgctaaaaagcttattattgcatcgctcatttctctgggaatggtaagttcgacctgtattgctgctgagcagtctaatggaaaggcggcgatggtaggtagcattgtaagcacacagccaacctgctcaatctcacctgaaagccttgatcaaaccattagcttcggtcaaatatccgatgcggttttattgaaagagaatggttcaggcaagtctacaccacgtcctttttcaattgatttggagaattgtgatgttggtggaggtaacagtgtaagtgtcgcattttctggaatggaaggaaaggatgggcggttgggtatttcaggtgcagccagtggcgccagtatagcgtttactgatggcactggagatgtgattaagctggaacagccaagcaaaagtttttctctccagaatggaaacaacaccctaccttttgccgtttatctccagggtgatggtgagccgggaaacattaaaccgggtgattatcatgccgtggccgattttacgctcagctatcaataa

SEQ ID NO: 449417 - DNA, 477 bp, Serratia marcescens
atgtatcaattacgtggtgccagggtagctcccatgaaagagacagaaattgcaaatcgcgccgtcaatacctgtatagcccttgggctactggacaaatgcggctcgagaaagaaacggtatgacaaagcattcgaggagctgttcaaatacggcatcacagtatcgcctatggacgatcgtagttggaaaaatgcaacatacggcttaaccataggccattgtgacccgaacacccttacgattactgtccctaatcatatttatgaaatggcatgtaaaggtgaaagaaatgctctgctcgtaatgttccacgagatagggcacctgcttctaggccataaggcactgctgcatttttccaatacacaaccggatcgttccgaagacgctgaatggcaagcagatttttttgccgaagtaattctggagtatttagggtttaaaacggaccagttgacgctggacttttattga

SEQ ID NO: 449418 - DNA, 360 bp, Serratia marcescens
atggctctcacagaattcggcaaagccgtacggaaagcgaggatagataccgactataccctgtacacaatggcgcaagagctcgatacaacgcctgcatttctgagtgccctagaaaccggaaacaaaaaaatccctaagaaatggatagaagctatttctaagttcttcaaatctaaaggatatgacatccccaatctgacagagttggcgaatgtctctaatgatgtagtcccgttagacggcctctcccaacagcaaaaaatgctcgttgctggatttgctaagtcttcatttacatctgaacaacttaaaagcttctttgagctactggaacaaattaacaaagacgataattaa

SEQ ID NO: 449419 - DNA, 129 bp, Serratia marcescens
atgtggtctgaatattctcttgaagttgttgacgcggtcgcgcgcaccggcagtttcagcgcggcggcgcaggagctgcaccgggtgccgtcggcggtgagctataccgtgcggcaactggaacaatag

SEQ ID NO: 449420 - DNA, 1755 bp, Serratia marcescens
atgagatttcgaacactatctaaatgggataaccccgagaattgcaatgccttggtatacttagcacaattacttgatgagatgctttttgactacacacttgatacatacaaaccctcagttatgactacacctactcttggtgtagaggctttaaatacaatcatagatattgatgctggaatcatacaaccaaaaaacattgagcatttaacctctgaacttgtacataatctctctaatgataaagtcgcccaatctcttttaggtgaagcatatacagcttttcttaataagctaaaaaatcctaccctaggtgttaaagaaagaaagtcaataattgagatgttagtcatccaattaccagcaaacctgtataaagaaaaaagtgaagagctactattaaaagagctggcattacctaactgggaacgttctgttattcgcaagttagcgaggaattacattagtgttttactttacattgggtttagtcaacgcaatcttagaaatttaatccataaattcttttactatggcgatggtaaaataacgaataattctgacgcagctttgctcttcgagagcataaaactggaaagaaagaaatataaggtttatttcattgtagacactgtatttttaggcgcagagcctacatttaagcgtctttctttgtctatagaacagaaaccacctgagcaattattagggaatgactttttcaaaaaggcccagcgaaagaaaatagtatctgtatctgatatagaagcattagattcatataccgctcgagaaatagcagaggatcatttaaaaattgcgtcatctttcttaaatatatatcaccacaaagataagccttcatggtcaaatgaggccttggtagtatctggcgttcattcatcaaaggttccagaacgattgaattctatggaaaaatgcaaagacttaaagcatgaaaaagcaatgaggcgcctagagcctttgatgtctgagttttctcttgaaaacagctcgtttgctaaatttttaagaagtattcaattgcattctatggcattgaagagtgagagtgttgaaaaccaattattgaatctttggatagcgctggagtctttagtgcctagcgacacaaaatcaagtgaccaagcaacaatagagcatattactgatagtataattccattccttaatatttgctacattgactcattaattgaaaatcttgctagggatttactattatggaatagacacatacttaatgcgcacttccacgaaattccagggagtaagtccaagcacaaattggccaatataatgatattgccccaatatgaagcagtcagagattcattatcagctaaattccgtgattatagcctcctgtccgatagatttaatcacattaaaacgatgatttccacacctgcatctataaagtcaacactagacaatcataagttgaggttagagtggcaattcagaaggatttacaggacaagaaataacattgtacactcagggaaaggacaacaattcacacatcttttagttgagcatacacataattaccttgacaaggtttttgaaattcttgtcatgctagcctcaaaagcaaggaaaatacgttcagtaactcagggcttcagatacattaaaataattagcgatcagagatactccgtcattacaaagaatgggttcatctttgatatacatagcattaaagacaatctcttctgggactag

SEQ ID NO: 449421 - DNA, 1212 bp, Serratia marcescens
ttgttcgccaaagccggcgtactggacgccccggtttatactcccgacatgataaaagcggccaatgccgcgttggccacggccggggtcatggtgctcaaccgcgcgggcggtatggtacaattatcgacatggggcaacagtgtgatgaccaccgccagtgagctggccggctgggtatccagtgccgtgtggcgcggcgccgtcgaagtttcccgggttgccacgctcagtgcgatagctccggcagtcggcgccttcgttgtcggattctggccggggaaagccggtgaaagtcagagcgatattgataaattgctgggccgtgatttgacacagatgtttaccgttccggccagcctggttgccgcagggaaaacacagatccagccggaaatgaccacggtcgatttaccggtgcgcgggtttattcgccgggggaatagccgtcagcaagaggtaatactggtcaaaaccggaacaggcggcatctccgctaccgtgccggtgtatcggccggttcgcgatgaaaaaaccggcctggaccggataaccttgccgacggtcgccggtgcgccggggcgaatcattttgataaacccgggcaccgccccgtcgggtccgtggcataccggcaatcctgcgcctgcagcgccggtaacgccggtgcataccggtacggagataaagcaggccgacagtatcgtcacgacgactttcccggcagacgacatgccgctgcaggattttatctactggcagccggacgcgaccgggacgggtgtagaagcaatttatgtcatgctgagcagtccgcgtgacatgccgggtaaagtgagtggtaagggagagcaagtgggtgagggctggttgaacaaagcggggcaggaacttggcgcgccagtcccccgtcagattgcggatacattgcgtggtcgtgaatttgcgaactttgattcgttccgcaaggcattctggcaggaagtgagtaaagattctgcattaagcaagcaattcattgttcctaatcgtagccgtatggctgtaggtaaggcaccgaaagcacgtaaattggatgccgccggtaagcgaacctcttttgaaattcatcatgtaaatgagatatccaaaggtggcgatgtttacaatatagacaatttgcgagttatgacaccgaaacggcatgttgatattcataaaggaggtaaatga

SEQ ID NO: 449422 - DNA, 1020 bp, Serratia marcescens
atgtccgtgtgtccttatgccgccgcgctcgtcgccgagccgcaggcccattatcgcgctttgccgcccctgagctgggatagcgtatggcaatgttgggtggccgcggcgccgcagctagtgagggaagcgctgctcaatgccgatctcggcgtgcggccggccgatgagccggtgccggtggccttgctggagacgccgatggcgccgctgttcgccgggctggtgcggatgcgcgacggcgaacagcaccacgcgcttaaagcggcgctgcagcgggcgctggccgtctgttcggatgccctgattcagcaaaccgctgcacaatgcgctgagtggttagcgccaaaggtgcctgatgcggcggcgatcactcgctttaactacggattgccgctctgcagcctcggcgcattgttgggtgtgctcaaggcgcaatggccatgcctgatcgacgacggtctggacttcgtccgctgtatcgcacccggcagcacaccgccgcagctggcgcgaggtatagcggcagcgcagcggctcagcgcccagttggcgacgggcaagggcgtgctgcgtcaggcattagcacgggagatcggcgatgtccggcttgagttagccaatgcgctcggtctgctgtttcaggcctgtgaggcgacagcgggctggaccgggcaggcgtatttgctggcgcggcagaacggcgaagtggacaccgcgctggatcgggtgcgggcgctaacgccacctatccaaaacacgcgccgtttcgtcttgcgcgagacgcagcttggcggttatacgctgcgcgtggagcagactgtcttgctgttgctcggcgccaatggcgaactggccttcggcgcgggggaacactgctgcccgggcgaacgctgggcgagtattatcgcgcgctgcggcgttgcgcatctgtgttcgctggatattgatgagcgggcgttgaaatcggtgcagtggcgccgttcgctgaatgcgcgcgtgccggaattttaccgttga

SEQ ID NO: 449423 - DNA, 810 bp, Serratia marcescens
atgaatatatatcattatactgatctgaatggttttaagggaataattgagaatgactctctttgggcgacgaattttcatttcatgaatgatagtcaagagttgaaacacggggttgattgtgtaaaaggttgccttgattacatatcttctgaatttgatgttgattttattaatggggttagaacagctattgagcactatgaaaatagccgggcaaactacgtttataacttatctttttgtaaaaagccagatgtactcagtcagtggcgtgcctatggaaaaaatcaaggagtatgccttgaatttgacagtaatgaacttagtgagtgtatcgatcaaagtgatctaagttacatagatggtgatgttatttatacaaagcctaacgctacgccagaggcaaaagaaaaaattataaagtttttccagcagaaagaacatgtcaatcaattgaataataaatctattttaaggcagcttaatatttccaattttgttcatattgccatcccttactttaagaatgatagtttcaaggaagaggatgaatatagagttgttatttatcctgataaaaagttttgtggggttaagtttagagtaaacgataaaggacttgtaccatatattgagctaaaagcaagaaagatggatttttatcaaataaaattgccaataaagaaagttatcattggcccttgtgataattatgattatctaaaaaggggcgttaggctattgcttgataataatggctataaaaaaacagatattaatttttccagtataccatttcgaaattga

SEQ ID NO: 449424 - DNA, 861 bp, Serratia marcescens
atgttttcaattgcagctaatgtcaggaattctctgggggagtgccccctctggtgtgaaaggacgcgcagactttactggaccgacattgaaggcagtgaacttctcgccttagaagagggctcaggagttgtgacgcgatggtctctacctgaacgactaggatcctttgctcttaccgaaaaaaatgatgtgttgttgatggggctggcatcccggcttgccttctatgagctcagtacgggcactttcactacaatagcagtctctcccggagaagcaggtacccgtacgggggatggccgatgcgaccgctctggtaattttatctttggaaccatggatgatggttatcccgttgctgtcgtcggtcaatttcacagactcaatgccgagacgctgaccattgaaacacttccccttccgcgtgttgctattcccaacagtatttgttttagccctgatggcgatacaatgtattactgcgactccatgcaaggccgcatattctgttgtgactatccctctttcaataaccagcgcgtgttcagtgaaacagaagggaaaggtgcaccagacggctcatgcgtggatgcaatgggatatttatggaatgccgaatggggtggaaatcgtgtagtacgttaccatccggatggaacaacggactgtattctgccctctccggctgttcagagcacgtgccctacactggctggtgaagacctgacaacgctttattgcacgacagccagcgtggggctatccgggccatcgaagtatgacggtgcattattaaaggctgaatccgcagtattcgccggtttaccggaaagccgcttcgccgttgcaaaactctga

SEQ ID NO: 449425 - DNA, 771 bp, Serratia marcescens
atgcaagaattaaccgatgcagtaaaaaagacattggtagacagaattaacaccccactctttgggtttgtaatattatcctggctctcatttaactggcccgacattgcaaccttacttcttagcaaaaaagatatccaagaaagaataaacaccatcaatttaaactcagacttactcggacactcgctgttatatccattaatattaggctatcttctaagtgttatatttccgtatgctcaatggacagtctcttacctgcaaagagtcgcacagagattattaaactccaacaatgaacgcatagaacaacaagaacataaccttacaaaaaaactagctaaacttagagctgaagctgagggcgcattagaaattgaaaagatagaaataaagaacaccattgcagataaagaaatagcaatagcacaaaaaaaagccaacctagcagagttaaacgacgcatatgctgatatccagaaaaaagtatcagatgcagaatcaaaccttaacaaattaaaacaaacgacaataaatcttgagcgtgaaattaaagagaaaaacccaaaagaaatagcaagtaattattatagcaatcttgactgggatgagaatggaatcaacgcccataaaaaatacctaatgaatgttaatttcctgcttgatgaaatcaaggcaatactcgaaggagacataacgcaagaaatgaaacttaaagcaattgaaatcctgaatgatatacaaaggggcaatagcattagaggttga

SEQ ID NO: 449426 - DNA, 699 bp, Serratia marcescens
atgtctatcgcattaaaatcaatattcataatcctttcactatccctgctcatgtatattttaaaagggttcgcacatgatgtaggaattagaattgacgctagcaccggcccattatcaggtttattaggtagcattgcatcactgaccacatgtggcatagccattcgagcattattagttgcaaaaaaatggcgcaatgaaaaaactaaggcggagatctttgactcggcgacgaaagtctttggaattacaaaaactctacccctaacaatgttattaataaataaagaattagaaattagcgagcgagtattaattttaaaacaaaaagaaaaaaccatcgaggaaatgaagtgtgaaataatattggaaattaaagaattttcaagcagaactagcaaattgcagcatgacgtattaaaggacattgtggaactaacgagattcaacaattacatcacatcaaagtacaaaacactagctgacaacattcaagctggcgcagccgcctatctaggcaacttgaacaatgcctttagcttaacttcagatggtcatatccaaaaaaaccaaaaattaaaagatgcctcagaaaaattattccttagcgaggatgaagtttatcgagaccttggttatgagatgttaccagaatttattgatatcgataaaatggttaaagaaacaataaaataa

SEQ ID NO: 449427 - DNA, 573 bp, Serratia marcescens
atggaatttaatcagggtgctaaagcagcaatcgaaaggatggttgaggcctacggagtcaagacaaaactggccctatgtgaagcattgggagtaactgcaagtgctctttctaatcgacaagtccgtgattctttccctgctgagtacgtactgaaatgtgctctcgatacaggtgcttcattgcgttggctaacatatggtcaaggtgagatgtttgagcaaaacgttataactgctcccaatgcgctagccgttccatctaagaagcttttagatcgtcaattatatgagggagagactttattattagataaagcatttctccctgaaaatataaaaagcccgatagtactaactgacgaaaatactcgatatatagccacgcaagcttatgacgaaatttatgacggcatgtggattattaatatagacggaaacatcagtattcgtgaaatagtacgaacacctggaaacaaagtcaaagtatccgatcgtagacattcttttgaatgtgttgttgatgaactcaatgtaatagctaaagttcttatgaaatgcacattggaataa

SEQ ID NO: 449428 - DNA, 1008 bp, Serratia marcescens
atgaaaaaatttaaattcctacaattagatgaacgaaagctctcagtccagtggatgttttggttatctatgttaactccaattatttcatcaataatcctatcaatccctatatggatgcaaacaaaaataaacatatccgcagaagggtatgataattttttaaatttatttaaactaccaataggagtattatctttatccatcccacttgttgcaatcgttgcacatatacacagaacaattcaaacagcagagcaaatacaaacaaccagaaataaaaatacggcagacagttttttttcccataataaatatatgattgaagcacttacaaagataccagaggaagacataaaaataggcggggagcgtgtgaaatacaaaataaacgatccgtaccaattatatgacaacctatttaaagggtcatcctatgagaccgggatagtaacgagcgagttaccaaaggtaataattgaaatagaaaaaaaccttaataaaatagctgaatcaatacaagctgccaagacaaaagattacattaaaataaatgacatagaattattgattgttatatcaagatgtatcgaatccatagagaaaacgctcacactaaagatcaatgacaatgagagaaatatgatggtaatggatgtcatgctcaataggacagctattctcataacaggatttcataacgaaatcgaattaaaaataaaaatactggctatagtaaacctaataaaaaagacacttcagataacaaacaaccactttaaaaccccagatataataaacagttacataagaaatacagaggcaaaagatgatttattttggcgttcctttgatgaaatgatctacgtaaacaggaaagtaagctatttatcagaaacggagccatcaaaaaaacttgaaaaagaatatgaaatttaccgcagtgctcttattaatgcgagaaataataaaaaaagatttgaaagcttatttaaaagaaatcgttaa

SEQ ID NO: 449429 - DNA, 957 bp, Serratia marcescens
ttgcaactacacaacaatctcgcgattgaaacctacgtatctaaggctcgacttaagacgtacattgctctaacaaacaatgccactcttggagagtgcatcggagcctatgtttggaacaaacgcgtaggcgctgcacttttccctcttttgcaatgccttgaagtaaccttgagaaacggtattcataatgcagcttctgctcactttaataaccctgcttggtttgatcctttaacgaagctggctgggcatgattactttaactccttcatgactcaatatcctcatttatcaaacaatttctatcgaaaaaacataagtagcggaagtcgtaagaacaaaaaggtgtggacatcacgccatgaaagcatgctgaaacaagcaaaagaaaagttgactagtggccataagcctcaacatgcagatgcaattgttgctgaattgatgttcggtttttgggttggcatgtttgagaaaaactatcatgacctcaatacatctgaccgattatggccacatttagaaccgatggtttttcccaatttattgccttcagaacgtcgacatggcgatattcataataaattgctacctatcagagagttgcgaaatagggttgcacaccatgaacctatctggaagcacgcttcagtaggaaatagtgtcgccgcaatcaaaatgcttacagcaataatcgatgatctagtcttcctcatcaatggaatcagccgcgatcgcgcagaaatgctgcatgaatctggtatcgaaggtgcggcgcgagcaatttgccgtaaagaatcgcttgatttttaccttaccggacggatttctaaggaaatatcattaagacgtttgaaacgggacctgctccgccacatagagggaaaaagccttttccccttgtctttcagtaatgcaggcaaagaaacggtcattctcaacttcaatatttaa

SEQ ID NO: 449430 - DNA, 843 bp, Serratia marcescens
atgaattgcaaagtatacgcactgagtcgtacgatattatttgttttcttgagcggctacgctgtggtctgtcacgcacagtggtatcctgtcgtcaccatcacgactgaccggtggtgggagactgacacaaagccgaaggtgttgtctgtgacctacgaccatggcgaaggcggggcctttcaacaacctccgctcaacgatcctgaaaaccacggaacctggatgaatttttacttgcgtggtgtgaacaaagcctacaagctccggtcgtggaacggggaatgtcttgatgagaacgtgatacaaccaggcgtctggcttcggccagagaccaaggccaaaatgaagcgactcgttgaagggcttgcctatgcgtctgcccaggattatatggggacgtgggacgggtccggtgaacaagtgctacccgacacaggacgcaaaaatatgttcgagatttgcattaagaatagtgaccgggctgttggtattccggatgtgcgcgtgaaacccttgcccccgcggggggggacatgtgctctcctgtctgtgcccgccattgtccttcgtgggacctccggtactgtcgtcacacccgtaaccgtcaccgcgcagtgctcgagcaccaccgcgcaattgggcacgatccgtgtaaatggtcctaccacccagaatccagctaaaggagtagcggtcacgataataccgccgtcgcccgagattgttgacttacggcctggggacaacccgttggacttttccgtgcgcagcgacatctccgatggggctacgccgggggaatatactgtgtcgtatgtggtgacattatctctactgtga

SEQ ID NO: 449431 - DNA, 840 bp, Serratia marcescens
atgcgcaaatggcttttgtttattctgctcggcggtatttatctggcgggaatgcccgccgcagtcgctaaaatatcgcttaacgtcaagtggtctcaggatagcagtggaaaatggtcattaagcatcagccctcaaggatcttatgaacttgaccgtgatttgatcattgctaaatgcaccggcgcgggggtatggccgtgtgaggggcgatggcggctttacgtcaacaataaaggcatttattgcgatcctctcgtcagcggttcggtgggaatgacgataggcacctttgcggcgcgtgtggcgagcgcttataacggtaaaacttgtacgctgggcaacttagtgctggatggcaccgagaagatatgcgcaatgacctactttaccggcgaatggcgtcaggaatgggcgttatattctggcggggcactgtatgcaacctccggctgcgatggcggccccgtcggggatggtgaaacgattttaccgccgatcaagccgttgagctgttcgatcaacagcagcatttcgctggcgcacggcaccgtcgattacagccagataggcgcaagccaggcgacctatctggcgaccgtaagctgtacccggcaggccacggtaaaaatcaccgtgccgaacggcggtaaggtgaattttaataacgacggctcgttttattcagtggtatcggtcatggataaaccgggaggtgcgcaattctccgttaacggttctgtgcaggtgaagttctcatcccggctttataccgtgggtgacgatacgttaaacggcgcgtttaatagttcggtcgttgcggtattgaatatcttgtaa

SEQ ID NO: 449432 - DNA, 516 bp, Serratia marcescens
atgtgcgcgacatggcgatctttaccgaaggaaataggctgttatcgcttgttgccattgcttgccactgttctggtattcgttccggtaacagggtggacggcgaccgcgccgatcgtcatctccggttcgatcaacgccaaaccgcagtgcgtggtgaacaacaatcaaaccatacgcgtggcgttcggcgacgatttgatcacctccaaagtgaacggagtgaattatctgcgcaccatcgattacacgctggagtgcaaaaacgccggccaaagcctgatgaagatgaaggtggcaggcgcggcggcgacgttcaacaatgcggctattcagacaaataaagccaatttggccattgcgctgcgcgccaacggcaatccgttgccgatcggtacctggctggccttcaactatcccaacaagcctgtactgcaggcggtgccggtcagcggcggcgtgctggccaccggcgcgttcagcgcggcggcgacgttgatggtggaatatttatga

SEQ ID NO: 449433 - DNA, 828 bp, Serratia marcescens
atgaaacggttagtggtgagttttttactttttttctgtcagcaaagtgtggctggcgtgactgttgactggcggttagataacgggggcgctttgctgcgttttacggtcctgtcggcggactttgttggtgcgccgaaggagagcatggtggactgcggaggcatcttcaatgcgggctgccagatatcgatgtacccaggagggtggggagctgctcctgcctacacatttgctctcccagataaaaagaataagttaaacagtgaactggttgcttcatggaaccgcttacttcctgatagtggggcaatagttaactgggatcaatgggtgaaaaacaatggcggcaaggcgccttgcattgtcttttatgtcggcaccaaagcgagtcctattgcgggtgggtggtttgcggattcttgtgccgggagcgttaccgaaccgccggtagaaccacctccgcagccggtgtcctgctatctgaacggcaatatctatctgcaacacggcgtactggcggatagcgacgttgcgggcaaccgcgctgagaccgtcgcttatgtcatttgcacgcgtgcggcaaaagtgaaggtgcgcgccctgagcagcgttggcagtgacagctatctggtgaatctgcgcgccgacggcagcctgaaatcaatgttagccgtgaatggctttaccggtaatggtggggtgacgctggatgtatcgggtgccagcgcgcagccggtcacgttttcttcgctgctgatttcatcgggaacgccggcgccgggggatttttccggttcggcggtggcggtggtcgatattatctaa

SEQ ID NO: 449434 - DNA, 546 bp, Serratia marcescens
atgaactccgttaatattattatcgatgacgaaaaccgctatttctctgcgggtttgcgacacagcattacggaatatgtgcagaccaacaagaagtcggtgcgttttttaacgccggggagtatggaatgccccgatatcgtgctggcgtcggtacggcgccgtgctcaacgctggcgcagaatgggatacggggcgtcggcggcatcggttgttacgattaaggaacggccggttaaattcgttgatgaaatacaccgcgtgctctaccgctcagacgatcagcaccgtctttttgagttgctgactgaaaccttgtcgggcatccaatatccagtgaatgaacgccgtgcattgaccgcgcgtgagtggcaggtgatgggctatatgcggaacggttttgatcagtcgcaggtggccagaattatgggcttgagcgttaaaacggtgcatagccataagcgatccgtcatgggcaaactaatgctgtatcgcaatcatgaatttttgtattggcttttatcgcatgagggagaattatcttaa

SEQ ID NO: 449435 - DNA, 126 bp, Serratia marcescens
atgcctaaaggcgtttggggagaagaatcggcgaataaagtgaacctggctatcactgttgtcttgtctatttttgtgagaaacaggcaggtttaccaatgggagtcacccaaccagcagggatag

SEQ ID NO: 449436 - DNA, 546 bp, Serratia marcescens
ttggtattattgatgtaccaagcagaaggagagtgtatgtcgaagaaatcagaggtggctgggcgaaaagttcaagaagaaaaaaggttggcgcttcgtcaacaagtatggggaagcgaactcgagcaattagatttgtgggataaagcaacccataaaggatttgcatcagtgccaagaacgctgcctcaactatcccgtattatggatatgtttgcaggaaaaggtactccggtatcaacaacttaccttgctcttttgtgtaatgtgtttgatagcagttttgtcgaaataaaggaaaagaaacgattagcttttgagtcaggattttcggggcaaagagcgataacagcatggcatagtcgcatgagaaagcttgagtccatggggttcataagtgcaaaggctggtatgcatgatgattttagttatgtgcttattcttaatccattttctgctgttaatcgtctttatgatggaagggataaggatgaattttattatggtttgattagccgaatgtcagacgttggaacagttatgtaa

SEQ ID NO: 449437 - DNA, 720 bp, Serratia marcescens
gtggatgagaaggatataaatgaatctatagttcttctaatcaaatggaatcgccttgttagacaaatatcttccaagataaaaccatcatctatgctcataggtaagatctggacgcgactgttttttaatctatcaaatattgcggcaaaacataaatctttgctgggtagtgattccttggcgagtgaaggtaagtatacaagtcatactaatgcggcaaaaattatgcggttcaatgtgttggcttttctccatgcagttttagtggaggaagatgcatatcatagagttagtaagagttctgtttcgcgtatttctgtgaattttaagcagaacccgattacatctgttggtcaattattgactaaattgcaatcgataggggatctctcggatataagcaacactcatccgattttctactctattttgaagtgtccattagtgcatccatttatttttcctttgggtagcattaattcggcagataatttgttctctcaacaggaaaaaagtcttcttgatctgttgaatgaaattattggtgatggatttaaggataaggttaattttgatgctgtagagtctttagattcttcaaaatctgtattgggattaaggtttctgaatgttgttggtattgctgctgcgccatatgaaccaaagaaaaagaatggcagtgttaattcttcaactaatccagcggcagatgaataa

SEQ ID NO: 449438 - DNA, 591 bp, Serratia marcescens
atgtcaaatcaactcagtaatatcaataaaaacagcgcgctgctggtaatggactttcaggcgattattctcaacaacttcctaccgcatgagagtgctggagacgttattcgtaacacggcctcgctgatatcatccgcacgcgcagcaggtgtacccgttatctacgttagtgtcggattccgcaagggttaccctgaggtcagccaaaacaacacgattttctcgtccattaaagagaatggaatttttatggctgatagcgagagcacggctattcatgctgatgtcgctccggcagagaatgagcccgtgattgttaaacgcagggtcggcgctttttcttttaccgaacttgatatgattcttcgtgcacaaggcatcgaaaccctgatccttactggcgtgacgactagtggtgtggtgctttctacagtcgggcaagcttttgaccttgattaccgccttatcgttgtgagtgattgttgcgaagatccagatcatgaaaccaatgtgtttttacttgaaaaaatcatacctcaacatgcttttgttaccagctcatctgaaatatcagaagtctgggcataa

SEQ ID NO: 449439 - DNA, 1203 bp, Serratia marcescens
atgacccaattctataacagcttttggcagcgaaatctgatcgtttgcttcattggctcgttctcaaccgtcttcgcaatgactctgatgctgccattcctccctttgtatgttgaagagcttggtgtaaacgggcatgccgcagttattcaatggtctggtgtggcattcagcgcaacgtttattactgccgggttgattgccccggtctggggaagactgggtgacagatatggacgcaagtcgatgctcgtgagagccagtctgggcatggcggttacggtttctcttatggggctggtgacaaatatctggcaacttgtcggtctgaggttgttggttggactggctggcggatattcatccggtgcaacaattcttattgcggtccaggctcccagagaacgtgcagcgtgggcgcttgggatcgtttcatccggtgtaatggcaggtaatcttgccggtccgcttgccgggggctggttacctggcctgattggaattcgaaccacatttctttgtgctggcgcgctgatattttttgccttcctcatgacacttattcttatccgggaagaggtgaaaaaaccttcggatgtagccacccaatcccgggttggctggtcgcagatacccgcacgctctgtaattgtctgcatgctttgcaccggcctgctgctgatgctggctaacatgtcaatagagcccattatcacggtctatgttcgaaccctcgtcagtgacgcgtcccagataactaaagtggcaggatatgtgatggcggcagcggcattgggaagcattatttccgcctcttggcttgggaagctggcagacaggatagggcatttgcgcattatcgctcttgcgttagctgcggccggtttgttgctgatccctcaggcatttgtcacgtccgggtggcaactgattgccctgcgtttcctaatggggctggcgcttggcggcctgttgccttgtattgcggcagtgatacgtcatcgcgtaccagaaggaatggtgggcagcatccttggttattccgtcgctgcgcagtttgccggacagttcatcgggccgctgattggaggttttgtcggcgggcatatcgggatgcgagccgttttcctggcaaccagttgcatcctgctgctaggagcggcgtggaacctcaatatacaacgccagccagtgacacgctga

SEQ ID NO: 449440 - DNA, 651 bp, Serratia marcescens
atgagtcaggcatcagaggttgaaaaccagttacgagaacaaattctcagcatggaactggggccgggagaacggttgacggagcgttgggctgaagcgacgtttaaggcgtcccggacacctgtgcgagccgcattacaaaagctggaatcagaagggctggtatgtcgtgacgggatacgttggttggtggcaccgatcgatatcgcggaagttgaacagctgtgcatttaccgggaagtactggaagttgcggcattaaaaatttcagccagccaaatgacggaagaacaactcagcggtctggaaaaccttctcaaggaaaaggcggctgatgcaactgaagatattatggacgatgccggaacgcaatttcatctacatctggcccgtatgtgtcagaatacgtttattatcgaaggaataagcgatgctctgcgccggctttcacgggcacgatggctggacaaagcgccgtcgaatcccgcctgggaggatcatcgcgaaatatttgctgcgcttcgctcgcaggatactgagaaagcagcagaattactcgccattcatcttagcgaaagccgcctccgccttctcgaagctatcaactcaagcagacgtagcctaagggcgagaggtattgctataacctga

SEQ ID NO: 449441 - DNA, 2484 bp, Serratia marcescens
atgtctggattttcccttgacttaactaaactatctgcaggtataaatagtgactcagcaatccctcctcgggatatatttacagcactaccaaacaaagacacaaaataccaatacccaagagacgtccaatctgaggtttgggaaaagtggtatgacgcaagaaataaccagaccactattataaaaatgaacactggcagtggaaaaacatcggttgggttaataattttaaaaagctgcataaacgaaggggttgggccagcagtatatatagttcctgacaactacttggttgaacaggtcatgtccgaagcaaaacagctcggaatacctgtaacccaagatgaaaaatctcaaaaattcatcgctggaaaagagattctcgtcacaaacatattcaaacttgttaacggaaggtcagtatttggggttggtgatgaaggagagaaaatatctatcgggtctttgattatcgacgatgcccatgcttgcctttcatctattgaggatcaattcactgtcagcatcaacaacaataaccccgcatataatgacttgtttagaatatttgaaaattccctaataacacaagcaagcgccaagacactagaaataaaagatggtgataaaaatgcctatgttagagttccattttggaactggcagaaaaacataaatgacataacaaaaaccttacttcaaaacaaagaccatgatgacttaagttttaaatggcctttaatcaaggagaatttagtattatcaaaatgcgtggttagcgcaaaaaaaattgaaatatccccccactgcatacccatacaaatgataccaagcctttcaaatgctagaagaaaaatattcatgactgctactcttgttgatgagtctattctagcaagccactttggaattacagatgaatcattgtccagcccaataactcctaaagcaattggtgatatcggggatcggatgatcctcatgcctcaggtcattaaccctgaccttactgatttagatatcaaagccatgtgtaaagagatatccactcaccataacgtcgtggtaatagtcccatcagattacagagctaaattttggcaggatgtagcagatagaatattagacaaagatacgatataccgcggagttcaagaattaagatctcaacatgtaggcttggttgtattaataaatagatacgatggaatagatttacctaatactgcgtgtcggttgctagtcatagatggtctccctgacgtccgcagactaacagataaaataacgcaaagcatgctattaggtagtgaaagaacaaaggatgagataattcaaaaaatagaacaagggatggggcgcggcgtacgctccagtgatgatttctgcggcgtaattctacttggcaaggcattaaatggagctgttttccttggttcttctttagaaaaattctcaccagcaaccaaagcgcaaatccaactttcccagcaactggttcaaatacttcctgatttaacaataaactcgattaaaggagcacttgactattgtctattacggaaacaggattggacatccatgagtaaaggcgtattagcaggtttaactacagcagagaccaaggtcaacccacatacaataaataaaagacgagcgtatgacttggcgtccaggaacatgatgccacaagctgctagaattttagttgatgatagtaatactgaagataaaatttataagggttttttgaaagagcacgctgccgaatacattaacctttatgatgaaacagaggctcaagttttacttcaatctgcctcaaatgataactatcgtgtattgaaaccattaactggcgtaacttacaatagacttaatggtgcagctctagaacaagcaaaagaatgcagcacttatttaaggagtgcatttaaaagttcaaatgaaattattgtatataccaattcaattttagaaagccttgtattttcagaaggaacatccaatccatttgagaacgccattgataaaatcgcgaatttaattggatttagaagccatcgccctgaaaatgatacaggtaaaggacctgataacctatggtccttaggagacaatcattatcttgtaattgaatgcaagaatggtgcaactgctgagaaaattagcaaacatgactgcaatcagttgaatggttctggcgcttggtttaaaagcatgtatgaccaaactgcaacatttcatccagtaatgatacaccactctatcttcccagaacatgcagcaactttgaatcaaggctctagaataatgacgataagggatctagataatctaaagacatcgatccttagttttataactgccatttgctctagcgacaaaaagcatgatgagatctttatacgagagcgattgatatcttgcaaactccgctcatctgatatagtcgacaattacactaggaattttagataa

SEQ ID NO: 449442 - DNA, 315 bp, Serratia marcescens
atgaacaatctaaaagtgtgttttgaaactgcgcatgccgcagtctgttttctcaggaatcaggtgggtcatcgtcgtctctggatcacccgtacctgggtcggtattgaggacgttgggtattactatgcccttgttgacagtgatcaccgtgtacttgctgactgggatcaggattcatgttactgggacttacgccctgaagcctggactgttgttcaggacagcagggattatcttccggaggatgtgttaactgaggtcatttcagaggagcaactctttcagcgctccactgtggaaagctttttataa

SEQ ID NO: 449443 - DNA, 657 bp, Serratia marcescens
atgagttatcaactcatctatgcagatccgccgtgggactataaaaacaaggcgagtaacggtgctgccactaatcattacccaactatgaaaatcgaagacatcatgcgcctgccagtatgggaattagctgccgatgatgccgtacttgccatgtggtataccgggacacacttcaaggaagccttagcactagcaaaatcctgggggtttagtgttcgcaccatcaagggttttacttgggtgaagttcaacgaactaagtgaaaaacatttcaacaaggcgctttgcgaaggcgagattatcgacttctatgacctgattgagattctgaaccagcaaagccgcatgaatggcggaaactacactcgggctaatactgaggacgtacttttcgctgtgcgaggtgcagggctcgaacgcgtgaagaagaatatcaaacaggtggtctacagctgcttaggagagcatagccagaagccatgggaggttcgtcaccgattggaacagctatacggcgacgtgtcacgaattgaacttttcagcagaggtgacgcgccaggctggcaccattggggtaacgaatgcccacggaatgacgtcgaactgctccccggcggattcaccataccagcagcagtgaggatcgcatcatga

SEQ ID NO: 449444 - DNA, 348 bp, Serratia marcescens
atggataagctacgcgaagagttcgaacagtggtggcaacaagaaggctacgataatcagctaagcaacattcaaggcgtgatgtttaaccgcatcaagcgagggatgtttgcagcatggctggccagccgagcaagtatcgtggttgagcttccaaagccacacgcacacttaatctggattcaggctggatatgcgcctgatgattattgggatgacgtcgaagtgtcacgaagcgagaaagacaaatgctgtgatggttcggaccgttacccagtttacgcagagcatgagattgctgaatccctccgctctatcggcctatcaatcaatggggataaggtatga

SEQ ID NO: 449445 - DNA, 288 bp, Serratia marcescens
ttggtaaaatatctaaggagaatagggtttacactaaccatcctttggttggtgttctcagctatagtattttctgaagtggacgggtgggtgtcacaaagcgatcttgaaattctggtctatcttgcaattgcgctgtgtgtttttaatgcattttctttctttgtcttcgagataaagccagagcaaagaaatggcgaggaaaagtcaggggggaatttattcgcgctgtggcttaaaagaaaacgactggaagaagaaagacgcattagcgatctagaaaaatga

SEQ ID NO: 449446 - DNA, 231 bp, Serratia marcescens
atgtggaaaaaaatgaagacctatcgccgtcacagaaaaggcacgctcctcgaaaccacacgcgtggatgctgtcagaattgttgatgctaacactctattgcttatgacaaaaaatgatcgtgattcaatcgaatccatcaagttcgagccgccagtaatcggcgggaagggattcggcgatttcgccattaagttcaagcacccgcgttatgaggtcataaagggatag

SEQ ID NO: 449447 - DNA, 561 bp, Serratia marcescens
atggggcctttggccccattttattgtataaggaaagacatggctctaagtgataccttacaggcctgggttgcttacactcagatcttcagttcaatttctgttggtgctggtgtattagttgcagctgcaactgttgtttacaatgttaaaacagcaaagaaatcactgacagcaacattcctttatgaaagcagattcgataaagattacattgatggtctgagagcactaatgaaggttcataactctggtaagtcattcagagtttttgcatacccaaccaaagattttcctctaacagaggaagatttggctgatagattaaaaataacctattgtcttaacttctatgaaagaatggctgtaagcatacacaaaggaatatatgattgcgaaatggttaaggatgttttccatagttcaatagtaaataattacgccacagcggaaccattcataaaggcaataagggaaataaaaagaaaagacacttactatcaggagtttgaaaaacttgccaccgcatggaagaaaaaaccgctaaaaattaagagataa

SEQ ID NO: 449448 - DNA, 1380 bp, Serratia marcescens
gtgagtaggattcttaggataaaaataaatgggctttttggttttctgaatcatgacatcgacctaagccatgaaggtattacatttattcatgggccaaatggatgtggtaaaactacggccttaaagctgatttcggcattttttgatcgtgactttatcgaggtttctagaactcggttcgacggaattgaaatttattatgaagacggattgataattaaggcagttaaagaaaaaaagcaagaaaaactcgaaaagtctgaaaagctagaaaaaaccgctaagcgcggtgttttgaagaaatctacgctgctcaaaatatccttggttagcgaagataaggagcttaagacctacgacgcaagttcgtatgggaggtatgggagaaatggagagatttccccggccgtcattgatgagttggtaccatccctaagaagggttgggccgagatcctggatggatatgcgaacgggtgagcgcttcatgtacgctgaaatcttagaacggtttgcagatgagctgcctgagcctttcagtaataaacgaccagactggttacttgcccgattagatggtgcaaagctgcatttcgttcaaactcaacgccttctgaaagtatcaattgattcgacgccgcacagagagggccgtaattttataaatgttattgaactttattccgaagaaataaagaaaaaaatttccgagctgctagctcaatctgctgcggtatcccaatccagagacagatcgtttcctcagcgactactatctatgaagttagatgaaagttattcagaggataagattcgtagtgattacgccattacggaacaaaaaattcaaaagctcatggggtccggtttaattgagttggaaaagaatatttctcttccagggcaagcgtttgaggcaacagaaaagaaagttctctcgctgtatgttgaagatataaataataagctatcaatttttgatgatatgctaaaaaaaatcgaaacctttttaggggttgtcagtcccaagctcagaagcaaatcatttaaagtcaatagagtcgatggttttcttatagaaacaactcaaggggaaccacagaagctagaacccgcacagctttcgtcgggtgagcagcaccagattgttctattttatgaactcatctttaaaagtaacgataaatcatttttcttgatcgacgagccggaaatttcgctccatatagattggcagcgtcagtttttaactgatgtatcgaaagtcgctcggctcggcgatcatactttccttgtggctacacattcacctcaaattatcggcgctcgtcgcgacttggctgtggctcttgatggtggaatacttaatgaacagtaa

SEQ ID NO: 449449 - DNA, 795 bp, Serratia marcescens
atgtctcaccataaaaggccttggctaattctcgaaggctcaactgatgctctattcttttcaacaagaaaattgagtaattcgccagttacaatggtggcatatgggtgggaaaatgttcgttatataattgatagggttttacaagaaggcatcgatgcacatgttctaggttttattgatcgggactatcgcgaggaccttggtattgtcatcaacgactctcatattgtggtcaccgattaccgagatctcgaagtttcaatgttcgaatctgatgctctcgatagagtaactgttgagtttggatctcaacaaaaattacctaagcgcgaatgtggtagtgttgcgcaggaaaatattcgcaaaaaaatatacagtgtcgcgcaaaaaatgggtaggttgcgatattacagtttagtacacggccttcattatccgattaaaaatctagaatatacgaagtttgttgatgaaagaacgcttgaaattgatgagtcgaaacttgtgcagcaaataaactctaaatctcaaacgaaaatcgatttaagcactttgcgtcaggcgtttgatagcgacatacctgagcgtttacgcgatgaaaaaaatatttcaagtgggcatgatataatggaactgcttggcttgtcattgaaaaagctatggggaaccaacaactctggcgccatatctcgcgagaggctggaatcttgcttcagaatcggctattcggatgactactttactcaaacaaacatgtttaaattattagagcaaaagcttgcgcatgtgtag

SEQ ID NO: 449450 - DNA, 177 bp, Serratia marcescens
atgatgaaagaccgcagtcacgacaatgcaatggcagagcttttccaggccggtctgtcttgtgctgcggagctgctggtcgaggttgttcattatgcttatgtggatgagttggccatcttggagaggcagctatcggtagcctttgccacgatagaggataatccgacttcttga

SEQ ID NO: 449451 - DNA, 1776 bp, Serratia marcescens
atgacgtataaagaattaaatgacagtcagtattgggtcgccttgcagcaaagggacgatttattacagcacgggaatttaaactcggctttgtatgctttagagttacatggggaaatggatgatgtgaacttaatcgctccagatattattactgagggcggtgatgatgaaaacatagatatactctatgtggatagagatgggaaaagaatatatcttatccagtcatttcaatcacctctattccgtcctcaaggtgcaaaaccttcaaaagcccaagaaacatcatacgctgaaaccgcgcttttttcagctgatataaatactataccagagagaattcgtagtcaggtaagtgaggctagagctgccttgaaagatggcgttatcgagaggctaaatatatggtttttacataattgtcctgaaactgatgattgtggaagacctttaaaagccataggacagtcagtaaccactaagattaaatctgactatcctggtaataatattattgtagattgtcgtcaggttggtttgaatactttagatgaactatatacatcccagcacagtccgatattgatatctgatgtcatacatacaggggatcttcctggttatttcgaagaaaatagtgattcttggaagtcattctccacatcgataactggaagattcttaaaggaattacatgatggctacggagaggataggctatttagtgccaatgttagatcatatcttggaagtaacaaaagagacctgtcgataaatgataggataaaagaaacagcaaaaaatgatgcggggaatttcttcgtttataataatggggttacagcattagtccacgatttttcgtttaaagaaatagatgggcaaccagcattaggtgtgttgcaatcaattacaggtatttcgattgttaatggcgcgcaaacaacaggtagtatatctaatatcaaagggatagttgatgataatttaaagattggtgttagatttatcaaggtaaataatgaggagcaaattcaagcaatcactctctcaaataactcccagaacaaagtgttacgttctgattttagatcaagtgacccaatacaatgtcgtttgagaaatgagtttgctaaaagtaaagactccctttatacgggggggttgagaaaatcgctaacaccttcacaaaagagaatcctttttccgacggatacggttgcgcaggtattaattgcttttcacgatcatcctacaaatgcatatcataataaaaaggatatatgggatgatgatgctttatatagaaaagcgtttgatgattcaataacaaaaggtcatgttatatttgtttttactttgaatgaagctattgctcagataaaaaaacaatatggagatctgtttagacatgggaatttgcctgagcttgataaagccaaacagcaatttttaagtcgtcctggcgtctctttgcttataataaatgcaatatctagcatggtggaaattattgtcggtcgggctgtgccaaataaatactctttgtcgtttaaggagtctataaatagaaaaaaggcaattgagttgtggttgcctgttataacaagacttcttactcgagctactttattagacccagccactgaagctcgtgtatccaaaagaaaagttgtgacggaagttgtatctagatttcagagtgatatggatatgtatcgcgaagatttccctaatttacttcctgacttcgttaaaagcgtgactttctaa

SEQ ID NO: 449452 - DNA, 1233 bp, Serratia marcescens
atgaaaataataatcattagtgatttacatgttggtgacgcggctgtttcaaatgagtttgcagtgggaagctctaacaacgctgtaaaaaatcagtttctaaatgaattaaagtatcttgctaaacaagaggatatacgagctgactatcttgttgtcgcaggtgacatcaccaatagagcaactagagaagaatttgagcttgcatctacacgcttgaaagaaatagcgatgattgtaggtgtagatcaagaaaaagtctttttcgttccagggaaccacgatggtaactgggttgaagaagaactctcaatgacctcaaaagaaaacattaacataacaattgaacgcaaatataacaacttgcgcttcaatgatttttttaaacaatgtttagatcgagctcattttggctgttattacaaagaaccatattttgctatttggagtgatgataacttaaatatcattggtgtgaacagttcagttttcgatcactatgatagaaagcctcatcacggtgttattcgcaaacaggatttagcagaactggatagaaagcttcaagaactgcagattgcatgcagcgagaagattaatctgctagtcgtacatcaccatccaatccagcagcctgatttaccttttgacgccgctgatcatagcatcttacaaaacgcagctatcctgatggaaattgcgtctaagcataacgttaattttatcgtgcatggacataaacatatacctaggcttgcacagtattctgacgactatcagcatcctgttaatatactttgtgccggcagtttctctgcacgtttagatgataggtggttccaaggggtaccgaatactattcatcgaattgaaattgataaaatttgtgatgtaaacaaaacccctttagggaaggtagtgagttggtcacacaatacaggacatgggtggacaaaagatgagtccattaacggaatacctcataaagagttttttggtaatcgtatgttacctactgaactaaaaacacagctaaaaaaatctattgagagttttttcgagacgcagactcatgtaaagtggagtgagctatctaatcattatgctgatataatatatacttcgagaaaactacttgaaaagactattaaggatttatcgggtgaagttggctttacaatatttaaaactccaggacaagatgagttattcattttgctgaaggaaaaataa

SEQ ID NO: 449453 - DNA, 1797 bp, Serratia marcescens
atgcataacttatttgggtttaataatatatttgaacactctaatgctagatatttcacttctaaccaactggctgaagagtttgtttggactccagcgtttgaatctctaatatctaacaaaaatcatataatactaggttctcgaggctcgggtaagactgctttgattaaaatgctttctcatgaatgtcttactaagttaaatgatgagaaagcaagaaaaatcatagatgaccgctcatttattgcgacgtatattcccttgaaggttgaatgggtcaactcaattggtgacattgatgataataaccagctttttaagtggagtttgaacttatcttcatgtgcaaggtttctagataccatacgaagctgtcttcattcgtatattgatgatgaaatagataggattctcaaagagaaatctatttgcaataaaatatcagaattatggttgtctaagaaattaagtacaattaccgatatttatgacgagctagagattaccgaatataaaaagaatattgtgtttaataaaatgaagctaggtcttaaattaagtgatgatgatcttatggttggacttaactttaatactgatttatttaaacctttaataatggcgctatctacggtaagaaaagaaatcggactttctaattcctctacattctgtgtttgtattgatgaggctgagttcttaacaaaagagcatcatagaatattgaacacgcatatgcggtcatataatgagatagtattcaaaataacaacaatgccatatcggcactacactctggaaactgagacgggcactccattaaacatggggcacgactttgattatttaaatattgataagcaaggcctccatggtagctcaaagaataactctcatagtttctttgaaaatttcgcagagaggctttttagaaaaagaataaaaaactcatctgttataaataaagatatcacattagagtttcttttgggtaattcaatattagttgattcccctaaagatgcactccctgatgatgaactgatggagaaggtgagagaatattgtgattccagtacgataaaaagagcggagaagttactggaaaaagactattctcttttcgaaagttcagtatcaagaaaattgagagggacactgatattaaaggattcctttcaacgttataaaggtaatgcttcaccatttatattttctgggtattcattgatagtaagatgctctgatggaaacccgcgtcggctattacggttattcaattatcttttttcaaagaatattgaatcttgtactgagcttaagcctctatctgacaaggagcaaggtgcgaaactaaaagagttttcatactcagagctagatggtttaaacctagaggtggatggaaagaaagctttcgatttgtttacaacgattggtagatttttaaaagacaaacttcatacagacaaaataaacacagatacatacaattcattttcattcgatgttgaagatgatacagtatggaaatatatagaaacagctgtagatctaggtttaatttacccagattttagagggttggacaacgataacaaaatgccaaacagaaaaggtagatttgccttggccttttgtttatcacctcatttttacttaatgccaagaaaaggaaattccatcaaattatctgtgataatgaacaattattcttatagtcgatttaaagctataaataaaaataatgatgatgggcaatatagtctagattgggagggtgatgatgaataa

SEQ ID NO: 449454 - DNA, 951 bp, Serratia marcescens
atgaataaattacatgtagatgacttatcaataggtgagctaagtcagtcaaaatatgatattgcattattttcttgtggatacgaagaacgctgtattgatgtggctacacgattgcataagggcaatatcgacaatgtgattgttttagcttttgaccaacataaagaagatccagtgcgtatcgatagtttgaattacttttcagaaagctggactggtttcaaattgttagaaatttcacaaagagaaatctcgaaaatacaaaaggtactaagtgaaataattaacaagatgaatgtttcggaattaaaaatattaattgactatacatcgatgtctcgagcttggtatgcagctattttaaactatctagtcaatttttgtgaattaagagtaacagttgatttgacatatgcaactgcagtgtataaaaatttagatctcaacgttgaactaggtgagttacgcataattccagggtgtgaaggtatttcattaactaaaagacataatgcagcaatatttatgttgggctttgatagatatggtcctcaacgtttgtataacttattaaacccaaacaaatgctttggtatcatggctgcaccagctgcaacctatgattatgaaaatacttgtttagaaaaaaacaaagactttatttcacactaccttgggggtgaagataaactcataaaattgccaattaatagtattgctacatgttatgataacatgtcacaaatgctttctcctcttagatctgagtataacgtttccatcattccatttgggcccaaaccacatattttagctgcgatattatgtagttttaattatcccaatgttacctgtctatactctgaatatattcgaaatgaaactacaaaagttgaatcttccggtgattttgtaatatctcgcttgcatgtcaaaaaaaacaaataa

SEQ ID NO: 449455 - DNA, 2148 bp, Serratia marcescens
atgccccctcaacgttttaactatcagcaacgcgtcggtcgagctggacgacgcggccaagctttttcttttgttatcacattttgtcgtgggcgtactcatgatgcatactattttgctcatcctcatgcaatcaccggcgattcgccgccgccacctttcctggcggtagatcacgacgccattccattaagactcatgcggaaagtatggcttagagctgcatttaatcttttacgcgaagaggattatagaaatggaataaccttccctggagataaactcgttccacctgatattcacggtgaatatatttctacgcatgattactatcatagcgatgaaaagaattgggctgaacgattgctgggagcgttgaaaacaactcagaatatacatgatcgctttattgaggcagcaacgttcgatccagagcaaaaacggcgtctttattctgcagtaaatgcggaaggcataattgatgaaatcgataaactgaacgcttgcgtccctgaagacgatatagggcttgcacgtttcctggccgagcacggtaaactgccgatgtatggcatgccgactcgggtgcgaaacctttatttaggattacgtaaaacaaaaggtataaatgctcaagaagaatacgaatggtcgacgatggatcgcgatcttgatctagcagtttttgaatatgctcctggttcggtattgatcaaggataagaaaaagcatgaggtaataggcttcacaggaaattaccaggaaccacagattcagaacaaccgaatatcggatctttcggtggtaggctcatggcaggagtcttgtagccatgtagcaatttgccctgcatgcggttctgccaagctggagttacataaacctgacaacgacattaattgcgaggattgccgaacaccgatcagtcctgaagaattcaggctttatatcacgcctgcagcttttcgcacggatttcaaacccaaagacgatatggatagttttatccgaatgtcgttaaaaaccacggcgacagtgttgcatgagggggttccaacaaaatgcgactctttcactgtacgacgtggcgaagtgaccattcttcgcctcaatgatggccccattaatggagaaaaggaaggtgaacgatttactgttgacttggcaaatgatctaaaagcaccaatgcccttttctacttattgtccgtcagttaaaggtgaacaggctatcgattcaggttggttggagtctcacaataacccgcgctggcaatgtagcggcaagaaaaaaagttttggacttgtatcaagcaaagagacagaatcgcttcatattgaattaactaaattcgatgcacgccttaatctggacatggtcgccagatacggcgagcacatgaatttgcctacgcgtgctgctgctattagtgcgacccagatattgacgcataaggcagcactctatctggatgtttcgccagatgaattcgaaatgcttgaaccccgagtgcatcttggtaaacccatcttgcaaatcgccgacgcgttgatcaatggttcaggattatgcagacgacttgccgaacctgccatcgctggcggtccacctttgatcgtcacattattgcatgagattctggaagataagtgcgtctggccaatggttgactttctgaagaaggatcatcctgctcaatgtcaaacggcctgttacaaatgcatacagcgctatggcaaccgtcggtatcacggcttgctggactggcgtttaggtatggcctatttacgtgcaatggttatgcccgaattcgtgtgtggtctgaacgccgctgattggagtcagccagaaatgaaagaatggcgacaaagagcatttgagttagcggaagacgtcgaggcactacgaccggcaacgatcaaattgttaaaagagtattcattacctgttcttattgaaatacaggatgggaaagaactttggagagcggccgtaacacatcctttatggcaatggagagaagccgaacatgatgccctgattgactcttttggattggctggcggggagtcgccactactattcattgatacgtttgaattggaaagacgaccgctgcgtgcgctggcgaatcttaaaccgagttag

SEQ ID NO: 449456 - DNA, 1770 bp, Serratia marcescens
atgacgctcttaagcaccgatccactcacccagctcgctttctccgttcacgaaaataaaggggtttttgctgttcttttaggttctgggttatcccgaacggcacaaatacccacgggctgggaaatcactctcgatctcatcaaacgcattgccgccgcgcaggacgttgaagaacaaacggactgggcgcaatggtaccgtgacaaaacaggtaacgaacccgactactcaaaactattagaagacctgacgatttcgcctgctgaacgccgctctattttgcacaactacattgagccgaatgaagaagaaaaagaagagggtaaaaaattacccacgccagcacatcaggccattgccaggcttgttcgctcaggccatattcgggtcatcctcacaaccaactttgaccgattaatggaaaatgcgctgcgggaacagggggttgaaccaaccgtgatttcctccgtggattctctttcaggcgcagaacccttgacacattctcaatgttatttgttcaagctgcatggcgactacaaagatgcaaggattctcaacaccgataatgaactggcaagctatcccgttgaatacaaccagttgcttgaccgaatcattgatgaacacggcctaatcatttgcggctggtctggtgagtgggatcatgctttgcgtgcagcaatactgcgggcgcccaacaaaagatatcccatgttctgggcagcaaaaaatccgccgggcacaaacgcccaggatcttatctcccatcggcaggcaaaaattatggaaatcaccggtgccgatgatttcttcaacacacttcagcaacgagtaaccattcttgaacaaagccgaaaacaaaacccattaagcgtcgaactgttaaccaacagtacaaaaaaatatctggctaaagcagaatttcgcattcaacttgatgagctcttttcaggtgagtttgagcgtttattagaagcaatgaattcagacacactctcccctaacggccgatggagtcctgaagagttcagtcaacgggtatcaacttatgaatcgataacagagccattaggtcgtatggccggaatactgggtcgttggggagaggataaacataaagaattaatatttgatatcattaataacatcatcagccattccaaaaaccacaacggtgggctgagtgcatggataaatctgcgcacttacccggcagtgatgattatgacagcgtatgcgcttggcttaatccgttctcgccgatggggcacattacacgagctgtttttgaaaaaaatagtgatcccccatcacgaaccgtgcagcatcattacgcttttatttttatggtcgtgggaaggcggtggtgatatctggaagcaattggatgggctagacagaagaaaaacagcgttaagcgatcatcttttgacgattatggatgaatggaaatccagcttcatcggaacaaccgccaacttcgaactctcttacgaccgatatgaaacgttagcatcactggcatactttgaggaacaactgtcaacatatccggataaaacccaaattgacatacaatacttccgtatgcctgttggccgggttggctggaatagttcttcctaccgcatactcacccaggaattgaaagatacaaacatccttgatgatttgttaacgcatggttttgccaacaatagcgaagaagacctggctctgtttttacgatgtttcgaaagcatcgcaggacgcatgagctggtaa

SEQ ID NO: 449457 - DNA, 525 bp, Serratia marcescens
atgaaattgaataaaatcatgctggctgcagtaatgactctgggtactatctccatggcaaacgcggcaaatcagggcagcggtagcgtcacttttaaaggttccattatcgatgctccatgctccatcgagcctgaaagtctggaccaaaccgttaaactgggtgatatcgcctccgctcaactgaaagacggtggcaaatccacgccacaagatttccttattaaactcgtgggttgtgatgtaaaaacagccacaaccatgaccactacctttaccggtgctgagtcagaagctgcaccgggtctgctggcgatgaaaggttctgcccgtggtgccagcattgcgattaatgacgtagatggtaaattgctgaaattgggtacggcaagtaagccgcaggaagttactaatggccaaaccacgctgcgtttcagtgcaaacctgcaaggtgatggtgcatctgcgactgtaactccgggtgagttctcttccgttgccgactttaccctcgcctatcagtaa

SEQ ID NO: 449458 - DNA, 546 bp, Serratia marcescens
atgcctggataccagaataaaaaaatagggcacattgcgctgtttatttcatttttattttgctctccgtgggtatcggccgctaatcaggggcgaggagaggtgactgttaatggtcgtattattgcctcggcctgcgcgatcgatacacaaagccgtgatcaaacaattaccatgaaaacattaccggtcagtcagattattcgcgatggccagggtgaattgcaaaacttcacgattaaactggtgaattgcgtattggaaaagcccaatcccggccatggcgactggcgttattttgaagtgactttcgacggtaaagccgatggcgaacggttcggtatcgacggcggtgccaaaggtattgcattgcaaatcagcgatgctcaggggaatatcgccacaccaggggtgcctttggcgaaaagagatattcagcctggtgacatggcgctggattatggtttacgcgtggtcggtaattatcagagtctgagagcgggagattatttctcaaccgtcaaatttaaaatggattattactga

SEQ ID NO: 449459 - DNA, 822 bp, Serratia marcescens
gtggatctgaagaatattttcgtactggcggtgctgcttgtatcttcaacggcgggatctactatgatttcgtatcctatcgtgacagacctccggatcacagagtgccaagacaacccgatcggcgttccatgttcgtatggagtgttctacagcgtgttcactgaacggctaaatgtgccggtactagcgccgtttccgcgaaatgggaatgtcatcagaatgtatggtatacactgcgataaaggtagcacggcactgggactgccgttcgaacgttgtgtttggtcaacgagccactcggtacctggtgccacgtgtgaggcaagtgattcgtgggaatcctttaacgtactacactgcggggggattggagccggcaaatggggaccccattcgggtgcgggggctgggggtgaatgtaacgtatgggggatatccgtcgtagaatccacactccacacaccgtggggcgacttggatgccaccaccgctgctaacgccggatcctcggtatgcgtgaaatccccgccgcccactgaaacctgcgaaatggacccgatcccggacatgaccttcgggcggatgcatcccgacgaaaccaaagagatgattgtgtccgcgcctattaattgcgggccgagaccacgcgttgacataagcggacctactaacatagagatcgtacctggactgacactaaaactagacacgacccgatcaacacctacacgagccaccgttacaggagttatgagcggaaacaatgcggctaaaggggctcactcctacactgctgtcgtcgttgtgtctccacaatga

SEQ ID NO: 449460 - DNA, 1932 bp, Serratia marcescens
atggctcaacgtgataatttgtatcgccgtagcagcggtatttatgttgtccgtattgcagttcccgcccgataccgtctctacacgggacagcgtgagattcacgcttcaacagaaacaaacgacatcagaaaagcacgagcgattgccgcactcctattggctgtctggcagcgatgtttgggtgagtatcaaaaattggatagagaaaagttggtgagcagtgcgcctgctttggcgggcgaaggaatgatcagccttgctgaattttgcggtttaacgagtgcttccctgcaacaagttgctcagcgcttgcttgatacgaatatcccgctgttttggcttgctgatgggcgtcctgcttactatgtggaagacctttcactcgttgataaagacgatcctgaggtttctggatttatcatcgatagtgccattaacatcggtatcagaggttctctgagcggttatgttcagcccttggtttcatcacgtatattacgtcagatgatcgctggcgagccgctggatgcagaaaccgcatttaaatcctcagaggcttcatccaaagccgcttggttcgttgactttcccggtgtcgaaatctcgcctaattcattgatgattcatcgtgttcaagccgagcgcttacgattattttggctgtcacatagcaccgcagtttctccagtcatgccagagaaaccaaaaacaattccccctatattattgtcctcatcaataccggataatgaatatgtaaatcgtaaatactactcagtgaaaatgagcgagttatgtgaaaaatatattcgctacaagcgcggggggaaattcacggaaaaggcagagaatcgagtccgggaaggttttggcttactccttgaagtcatgggtgattcaacgcttgaaaaggttgaccgtgacttcctccgtaagtatgagagcttgctaaggtcgatacctgcaagacgcgatctggcgaaaataagatataaaatcaatgatgctcatgaattgattggcaaggcaaaagagaatggcgaccctctaatgagcgataatgccgttcgtaaatatatgcgaattctcttcgaggctttccagtgggctgatggagaaggcatttttattaagtctcctgcgaataaattctttgcacctgttgaaaatgaaaagatggatcaggatttcaaatctgatttcactgatgaggatttaaacgctatttttggtatgccttggtataagcgtgggactgtcgataaaaacagtcaggggcaattccatcattatcgtgcatttcattactggctaccgctaattggcttttttaccggcgcgaggataaatgagttatgtcaactttatctagatgatattaagcaggatgctaccggattttacttctttgaaatcagcaacgaacgggacgatcagtcactgaaaacgattaattcacgaagaaaaataccgttgcatccgacattgctcaagcttggattaatccactattgtgaagcattgaagaaagcaggtcatgagcgtttatttccagagcttccttaccactctgtaaaaggatacggcgataaggcttctgactggtttaaccgttcgttgctcaaagaacggttaggctttgaaaaagacagcagaaaatcttttcattcattccgccacacgttttctaccaggctcaaacaagctggaatcgacagcgagacgcgtgcgcagtttgttggacatatccgcggttctggcgagacagagaatcggtatagcaaagatcatccaccagcagccctttatgctgtgcttgagagcgttacgttagggctaccggaagtagctccatttgtttgcgaagatggtgtagatgcggtagctgatgctcttagaatcaaacaaattaataaacaacgtagataa

SEQ ID NO: 449461 - DNA, 678 bp, Serratia marcescens
atgggtaacttaaaattccctaagactgcgcagcagttgaaattagccccgaatgagggtaggccagacgaattatccttaccattatcaaaactcccccgagttaaagacctaaagcgtgatgcattaatacccgtcgttaatgacgaagtaacagaggtaacaactgttgaagatatcgcaaaattaggtgggggtgtaaaactagacccaagtgtaaataacctgttgtcaaatagcagcgatggattgttatttgatagatataaagctcctaacgtcgggattacaggggcatatgttagcactagcgccggccctgactttacagaggataatgcctttagcgaaacaggtggggtgtggcgcgttaaaaatacattaatgcttagccgcgtccccgcaaaatatagcggtgctgtgattgtcgatatttcgctgggtaaaataccatgtgatagctctgggatacccttgcaatataccttgagcacgacaacaactagcaaacaagttagcggagtatggcgccaacattctgtaatgattttggctgtggtagggagtccggctaagttgatggatgttgcatcgggtgctttggaggattataaagagggcgccgcctggaatgtgagcgttaaatacaccttcggggaaatggcgccatcggtataa

SEQ ID NO: 449462 - DNA, 531 bp, Serratia marcescens
atgtttacaaaatacgttagcaatcctacacctgcctttttggcccctcagtcttatgaggagcggcctgattttgttcgcaaactgtttgattctgcctctaaccgcaaagtttggttgtgggtggggttctacggtattcagccgttagatccggccacggataagcctatctcccgccaacggttctttaactcacatcgtgcgcaggcaatccaagctattaccctgggcattatttatcatttggatgtgatcaccggcatagcgcggattagcgttgaacaactggcgcaacaatgtggcttatccacaaaatctggggctataacccgcgctagccgtgcagtcgtcacgctggagcaatatgggttactcaaatgcgagaaggaacgcggtagagaaggggcgcgggcacaaaaacggatagagataacgcccttatttattgatatgtgcggcgtcaatcctaaagaattcgtacttgctcaggttgctgcaaaagatgcgatcaaggtgggtgtgctatga

SEQ ID NO: 449463 - DNA, 834 bp, Serratia marcescens
atgagttatgtgcataacccatacccgacttttgaagcgccagcccatcatggccaacgccccgcatttatccgaaagctggttaactatgcctctaaacgcaaggtgtgctattgggaagggtttcgcgccctgtggccgattgaccctgcaaccctcaagcctatccatcgccaacggcatttcaacctgcatcgcgctcgagctatacaggcagtagttattggcattgcacatcatcttaatattgttacgggcattgttaagggagctagcatagagctactagcgcaccagtgcggcttggccacaaagtcaaaagcgggtaatgagtcgatcacacgcgccagtcgcgcaatcattaccctggaacaattcggtgttttgaggtgcgaaaaggtatgggataaaacggcgggaacgtggatccctaaactgatagagatcactcctctatttttggatatgtgcggcattaaccgtgaagaatacgaaagagcgcaacagcaacagctcggctttgaaaaacggggcctatcgttggccgaacaggaagagttaacgatcagtgaggctcgccggcgcgcaaaattattacataggcaggcagcttttgaacgtcgccgcaaacaagataaagaccatgccgcccgaaaactggctaaaaagctggcgcaaaagtcgttagacgaacagcgtcgagttgtgcaaaacaacctgataaaaatgctgggcgcagatgaaataaagcgtctcggcgtggctggttttaaagaactggtagatcgcgagctaggccgtttaaggcgaattgcggcagacccgccaacatga

SEQ ID NO: 449464 - DNA, 267 bp, Serratia marcescens
gtgggcagcataacattgaagcgtaagggccgagccgattttatggatatgttttccgccggcgccttttcgaaagttgtggccacaaagaacgagcgcggccgctggcagctattcggcttatcgacttcgggcgatatggctgtgtttgttgagaaggcgcgcggcgatgtgcgggaatggtccggcctggactacctggcggaattctgcgggaaaatggggatcgagcgctgggaggttcacgcgcgccgaatcaataattaa

SEQ ID NO: 449465 - DNA, 312 bp, Serratia marcescens
atgactaataaagaaattgcacaaaatatcctgacccagctcggcggcaaccgtctgattgcaatgactggcgcaaaaaacttcgtagccatcgatcgcgggctgcaattcgacctcccaaagaaggcgcattttgttaaaaatggcatcactcgcttgcacatcgtgctcgatgcatcagacacatatacgatcaaggcatttaaaatccgtgggatgaatgttacagaggtgagcgagagcagcatgatctattgcgacgttctgcaggcgacttttacagaactgacaggcttggatacacacctatga

SEQ ID NO: 449466 - DNA, 264 bp, Serratia marcescens
atgggcttcatgtcgatcgggggcgcgggctacctggtgcaaaaaatcggggaggaactgccgcgcgttccgttcctctattctggccaatcatttgttatccgccccgaggcggctggctatgtcgtttatcattggtctgcgcgttcctgggcgcgatatgatgaaacggtgcatcgtgaccagcacgcggcgtttaatcacgtctacgaggcggagagcgcgcgctgggctgaaatggaaagagcgctcagagataagtga

SEQ ID NO: 449467 - DNA, 180 bp, Serratia marcescens
ttgagtagcaaggaattaatgaaattgttggttagtaatggttgggtgctagaccgcacaaaaggaagccaccacacatttgtgaaggaaggcagagatgacattattacggtcccccatcctgagaaggacttagcgaaaggaacgctacagaaaattctcaagcaattaaagcagtaa

SEQ ID NO: 449468 - DNA, 408 bp, Serratia marcescens
atgaaatttccgatctatctccatcaggcagagggcggtagtttctccggtttcgtaccggatattatcggcgcttactttgccggtgataccatcgacgacgcgatcgccgatgcatatggcgcgattgatgcgcatctagagtatcaggccgagaaaggcaaagcgttaccagctgcccaggacatttccgcgcacttccatgatgaagattgccaaggcgggatttgggcttatgttgatatcgatttaagtaaatatgacggcaagtccgtaaagttaaatatcactattccacaaaatctgttgttgaaaattgacgaatatgtagaagtgcatcgcgaatacacatcccgcagcggctttttagctgagctggcgcgccgcgaaatgcaaaaaaccgcataa

SEQ ID NO: 449469 - DNA, 243 bp, Serratia marcescens
atgactttaaatgtgacgattctcggcgccaaacattttaacctggtggcccgtggtaacgatatgacgctgatgtttgatgaaaaatttgagtggtgggaaatgtatactgataacgccgctcaccgcgcatatcgcggcccaggcgttagggtttttcactccctggctgaggttgaaaaagcgtataagagctggcgcggcatcgctgagttagtcgagaataatgatttaaataattaa

SEQ ID NO: 449470 - DNA, 240 bp, Serratia marcescens
atgagaaagttagcggccgttgtggcctttcttttattcatggccattttgccgaacgtgatcccgtctcagctgctgctaacgaacagcatggcgattaaaatggtccatcagtccacagaatggggcctcagtgacccagaggcactatcaacggcctatctgctcgctatctatgccgcgatcgctgcagctgcctcctggctcgttttacgcctcgtccccaaaaaatcagcgtag

SEQ ID NO: 449471 - DNA, 510 bp, Serratia marcescens
atgattcacggacgattcagacttaatcgagacaccgttacgcttttagagtgcggggtgaacgggaactatcccgcgttctccggcaacggcaaatacaccaatcaaccaggatgcacgcataagccggacgacggcgcgctaccagctggacgctattggattgttgaccggccaacgggcggcataggctcccaggctctcacctgggcgaaagactttgttaaccgtacagatcacgccacctggttcgccctctaccgcgacgatcaccgcatcgatgatttcacctggataaacaacgttaagcgcggacagttccgactacaccccatcgggccggccaggctttccctgggctgtatcaccctatacaacgcagaggactttgtacggctccgggagcggcttttacggacgccacgggtaggagttccacgcacaaataacaaattgatggcttatggttccatcgatgtgatcggctatgagaggcgttgcaccgtatga

SEQ ID NO: 449472 - DNA, 777 bp, Serratia marcescens
atgacagctcaaagcccccttttaaccacccccgaacacttcatatcaagccagaacggcaatctaatcaccacctcatacgctatagctgaggcattcggtaagacgcacagtgatgtactgcgcagaataaaaacactagatgcacctgaagactttactaaacgcaattttgcgtttagctataaaatcaacaagttagcaaacaacaaaaaagacgtatacgtcaatacaacaaaagacggctttatgctcctggtgatgggcttcaccggtaagaaagcgatggccattaaaatcgcctacatcaacgcctttaacatgatggccgaggagctggccaggcagcagaaacaagccgaccagatgaagcaaaagcagctgcaggagatcgccgccaaaagcgcccaggagcacgagaaatttaaaacagcgccggcatatcgcagcgaggcgcgcgattacgtgtgtgacgtcctggcaggctgtcaggcgttcgcagaggagcatgggataagtatggctgattgggtgcctatcgaccgagataaagctgcctcgggcctcctagcggacctgctctatggtatcaaggctgagctgacatttagcgccagcctcgagccgcaatttaaaatactgcccgccggcgccgttcacatcatgccaaccgatccagaatgcatgaaagccgttgtggagcgtgttgtaagctccgatatcctggcggcaatgctccaagtggggattgcccggttagccgccggcgccaagtag

SEQ ID NO: 449473 - DNA, 147 bp, Serratia marcescens
atgtccgagaaacaatataaccaaattttgaaaacccgtctaactgacctgccagaattgaaaattaaagacgtcgcggccgtcctggccactcggccggcatggcttcgcgaaattgcgtgtcgttgcctgatgaaagcaatttaa

SEQ ID NO: 449474 - DNA, 243 bp, Serratia marcescens
atggcaggcccatctagaccagcaaagaaagggaagggcattgcgccaacactcggccagaccgcaacaggcgtagaaaccacagccaaagcgggcagggagttaaaaggcggcaaggcaatgaatttcaacgttgaccctgagtttttcactgactataaaacattcgccacaatgaataacctgagcatgaaagagcttttagagcggtcttttgccgagtacaaacagagacacggctaa

SEQ ID NO: 449475 - DNA, 648 bp, Serratia marcescens
atgacactttcagtagccctcgcctccggtaaaggcggcgtatcaaaatccaccctggcccgcgccttgggtgtctcttatgcaaaatctgattggaccgtactcggcgccgatctcgatattggccaagcaacaatggctaactggatgcgccgacgcattgcgaacaacatcgagccggtttttgacgtccagtcattcggggcgccgtccctggtgaaaaagaaaatcgaatccggatcgtgggatatggttgtgctggactgcgccgcgttcgcgtcaaaatccactatcgagatcgcccacatggtagacctaatggttatcccgacgcgtttcagcctcgatgacctggagtccacagtgcatacggctaacagcctggtacaagccggcgtccctatcaaaaagttggctatcgcattcagtgccgtagccgagaacgcgcaggactatgaagacgccaaggcatacattggccaaaccccgtatttcatgattgacggttacattcctcagaagccggctttgagtaaaacgcaggacctcggccgcagcatcattgaatgcgcctatgtcgccccgcgtgaacgagccgatcacgtcgttcagggcatcatcgatcgccttgaaaaattaacgaattaa

SEQ ID NO: 449476 - DNA, 387 bp, Serratia marcescens
atgcaagattacagcaatacttcttatgcagattacaccatgaatactaacgatattttgtcaaaaatcatggctgtagaatctattctcctcaacatgcttgatcgagggggaagggaccaaggggaattattcgaagctgtattatccctattattacaacaagtaagggaaattgataggtttcgaattatatgtgagaaagataaccgcttctccgccgagctgctccgcattgcttcacacaatatcggtgctgtagcaatgaccgagcggctccaggcagaaggggataaaagcggagacttggctgaggcgctgttaaccctcatacagaaccaaatttctgagattcagttagttaggaatgagatcacctcattctaa

SEQ ID NO: 449477 - DNA, 639 bp, Serratia marcescens
atgaaaactagagacgaacaaacaacgcaagtgatcggcttacgactgcagcaaaagagaaatcacgcagggaaaagcgtggtcgatgtgcaaaacgagacaggcataccacgcagcacactacaaaactatgaagcggggatccgtcaagcgccattaggtgtgattcgaaagctcgccagcgtctatagaacctcagcggcttacctggccgggctttctgactatgaaggcgacgatgaggccctggcgttctccactgctgatccgtttctggccggcaaacagacaacgagagaggacccgctggcgttcaatagcgccatgctagcccaaaagggattatcacctgcaaaactggccctgattaagtcatcagataacttcctggaagaagtgccaaaaggcgccgatgtgctaatagacacatcaatcaaagaagttacagcaacagatgtttatgcgttcaaagacgatcgcgacaacataattattcggagcgcacgccaagaaataggtaaatccgggtttactatctacgctacgaaagatgtccattttccaccgaaatatatctcaggtgaagatgacagcatttcggtttttggacgggtcgtctttgtgggtagctggcggtaa

SEQ ID NO: 449478 - DNA, 450 bp, Serratia marcescens
atgatggttatggcgtttgttgggggccagcatagcgcacaagtaattatggcgcgccagctggccaaagacctgaaaggttgttaccgcgtcgagcacatcgacaacgccggcggctccctggagcctgaagaaaaatttgctcgccttagccgtctgatatcgaaccgtaaggcgaaccgcaaagcccgggacctggtgatcgtcgtcaccgggataaacgagcaatgcgagttggattttcttcgccgacaccaggctacgatctgcataccgcacgcgccgctacatagcctttttgatgaaaacccgatcacacctgccgatctctttgtctgctgccgccctggctcgctggagtctgagcagaaacgccggcaatacatcacccccgaagaggcgttttcagcctgctacagccgtgcacgcggtttccggggtgcggtatga

SEQ ID NO: 449479 - DNA, 231 bp, Serratia marcescens
atgagctacgtcataggcgcggcgcgctactgcgcaaatccaaaattttggcgctttctggctgtggaaaccaacacgccggtaaaagacaaagaagccgccgcgcagcagctgcgcacattgtgcggcatcaagtcccgcagtgagctgaacagcaacccctacgcgcgaacggcttacgccggcctgatcactcgatttaacgattttttgcggagagagcgccaatga

SEQ ID NO: 449480 - DNA, 405 bp, Serratia marcescens
atgaacggccgcacaccaaccaaaaaggaaaggctgtatatcacggctgtaattcaatcagttggctgtattgcctgcatcctggacggccgcgaaattgaaaacccgggcgcgtggactgagtttcatcatgatcctgattttgggagtaccgatcccggttgccactttcggggctatggcgcctgcgctgcgcatcatagaggcgtaattcccgccggcgcgcgcctgcctgctggctttgcagttcgccaccctgtaggcaagccagcagtgaaattttccgagaaatacggcgcagacgcttatctgtgtgcgttgacgtgggaacgtctgccgcagagcgtgaaagacgagataggtttcgatctcagtctgggcgaaatgccggcagaggccaattaa

SEQ ID NO: 449481 - DNA, 327 bp, Serratia marcescens
atgctgacttacaagacattgcgccaaacaccagggaaatacgggaataaaaaaacggttgtcgatggcttcacgttcgacagcaaaaaagaagcggcttattacggccagctcaaactacggcagcgcgccggcgatgttgtgatgttcctccgtcaggtgccgtttcatctgcctggcggtgtgaagtacgttgcggattttgttgtttttggcgctgacggtgttgttgaggttatcgacgtgaagggcgtccgtactgctgagtatcgaatcaagaaaaagctggtggagcaacactacccgatcaccattatcgaggtttag

SEQ ID NO: 449482 - DNA, 408 bp, Serratia marcescens
atgcgccctcatgagctggacgcccttctggagcagtgggccagatggatccgcgccgatggttatggcggctctggtttcgggtcaatgttggaaatgatgatgatcaccggctgcatgttttccggcggtggccgtggccaggcgctgtggactgtagaggcagacgtagaggccgctgttatggcgttggctgcagctgatagaaatgcggcaacggtaatccgaattgaatacggggcgtgggatctggggggcctcgacaaaaaagccagacagatagacaaagcccacgccctttttatgtcgctgagcacctacaaacggcgcttagcaaagggtcgcggatttatcgcggcctggttgggtaaacaacgggggaatgatggaaaagcgccgcattgctga

SEQ ID NO: 449483 - DNA, 180 bp, Serratia marcescens
atggaaaagcgccgcattgctgacgatagaacggcgatcgaggaagcgatcgacattctgacaaaactaacggatggccattcgctgcgaatggttcacggagtctctacgcggcaaattgtggccgcgcgtgacgagctggcgaaggcgctggccgggctgggtaattatgcgcactga

SEQ ID NO: 449484 - DNA, 318 bp, Serratia marcescens
atgaaaaaaaccacttacgacatgggcaacaatgaaagcgttagcgttggtgttttccctaacggtgacggcacttttaccgcgatgacccgcaccaagagcaagtcattcaaaaccgaaaagggcgccagcaactggttaaagcgccagctgtccggcaagcctgcagttaacaaattccgtctgcaataccgcgtgtgcggcgtgtgggtgaacggcaacacgttcccgaccaaacaggccgctgatgcctggggcgcccgtgaatgccgcacgatgacacgctatgacggctatcaggttgtgccgttgcggtaa

SEQ ID NO: 449485 - DNA, 585 bp, Serratia marcescens
atgtgccgaaagagtgaaatcacagctgcagagctggacgcgtgcccatattgcgccggcgccccggcggaggttatccgctacgaaaccacgcaaaagccgctaacacgcggtgacgcgctaattccgggctggtacgaggcctttgtgttttgccatgagtgcggcgcccaaagtggtgaggtatcagccgaggtaaacgacgctgacgatctggcattgctgatcgccgccgcccgggctgagtggaatttgcgagacaagcgcaatcaggacctttacgccgccgcgttatccgatggccgcatagtggccccagctggcgccgatggatggatccccgttcctgaacagttgccgccgtatggcgtacccgtagacgtggtgtgtatgggtcacgtccagcacatagcgcacaagctggcgcaggacggcaagggcttcagctgggagctttgctctgaagaccacgatgagctggtggagctggacgctatttcacattggcgcgttcgccctgaattcccaactgcaggagctgaggcaacagatcggctacgcgctaaggctggcgaacatgtgtaa

SEQ ID NO: 449486 - DNA, 357 bp, Serratia marcescens
atgtgtaattaccagggatatgaattccacggcggctaccccgatagcgtctgcaatgatggctatctgtgggatgccgatagcggtggcatcgatgacgccggcaatatttacctggatcacggcggtgatctgccttgcccgtcctgtaaccgtgcggcctggttggcgtattacagggaagacattatcggtattggccaagagcagggcgaagaaggccggcgcccgcaagtgctgatgtatggcggttatccggcggtagttcgtgctgattcgcgcgccatgaaaaaggccaagcgctggatcatgaggggatggtatcgaggcaaaaaggagagagccaatgaaatctaa

SEQ ID NO: 449487 - DNA, 264 bp, Serratia marcescens
atgaaatctaatcacgccgcgcgccggcagctgggcatgtcttataaattaagccgtcgcaagcctaattcctgggtgtttctctactggccaacgtcaattgctcggagatttttgctccctgattgggttcgagaattggaggttacagcggtgaagtatgagccggcacagtttcgcggcttcacggtcgacgcatacggatattacccggcatcggcattttatccggcccatacggccaacgggagggcaaaggaatga

SEQ ID NO: 449488 - DNA, 321 bp, Serratia marcescens
atgatccatagcattgacgtaaaaacgcggtactacagcggggcatacatcgcaagacacgccggcaaacaggcaactaatacggccagcgctgaaggagctgtgcgccgcctggccggtaagattttcggcacctggcagcacatcactgtgacgcgcatcgatggcactggcgactatatggccagcgtttatcgggttacacctgacgaggcccaaaaatgccgcgtgtgcggctgttcctattcgcgcggctgtgctggtggctgtcattgggtggccgctgatttgtgcagctgctgcgcaccaggggagggctaa

SEQ ID NO: 449489 - DNA, 714 bp, Serratia marcescens
atgaatgaagtaatcaaacttaaatcggccgcaatagccgcaactccggggccgtggattgtgggcgccgaggaccgaatggaaaacggcaacctgtacggcatatacgtttcaaatcctggcgatgatgatagtgaagatgggcggatccttgagtgtttcagtaactgcctcgtgacgactgacgctgatgttagggccaatgcggagtttatagctgcagctaaccctgctgccgttctcgagttgctggctgaacgtgatgctgacaaaaagcgcatcgccgagcttgagcgaattactgagggtgtagaccagttagccattgatggtggctggacggcccgaggaatgagcgaatacgccaagacgctcgaaaggaaattagcgctgccggcagtggctgacgttcttgcggaacgccagcggcaagtaagcgagaagggttacacggcggaaagtgatgattcttatcttcccggtatcctgtgcctggctggagcggcttatgcggttgccgcctccgcgtttcctgatgcacgccggcgggctaatcgtctttggccgtggcctaacgccccgaagtatttcgatcctgcgcgtaaaaataatccgcgcgctaatctggtcaaagctgcagctcttatcatcgctgaaatagaacggatagatcgcgccgctggcggatatcgaagaggagccgctaagcaatga

SEQ ID NO: 449490 - DNA, 387 bp, Serratia marcescens
atgaacgtaacagaacaaggaaatacatttacctgcgattgtgggtttagctggcagcgtggcttaagtgggtcgcatgactgctcggccggcctgcgccgccaaatcgaagacctgaaagcaacagctccaggcctgggcaaactcccacctctgacggctgaattagcgggtatccttgggcgccctaatttccaatgctgtcacctggcggcggcgctgcgagctggtggccatgacatcccgagaaaggcagaggctgaacaggctgcggtgatttacttcatgctggggcattacctggaacacggcgagaagtggagcgagaaggccgaggaggagctacaacagcttatagcaacggggaaactgcgcgccgatggctga

SEQ ID NO: 449491 - DNA, 516 bp, Serratia marcescens
atgactattatttttttgattattggctttgccattttgtatttttacttcgtttacgtagctccagccctttcaaaaagaaggttaaaaaacctccaaaacgaaatgacggcgtcgcagcaaagaatcgatactcttttgaaaaaacaagatcacgtcttggaaaaaaccgctatcgccgagacagtggatgcctccacccaaaagccaagcgatacaaatcataattacatctcctcgagattcgaccactacgatccagagcttgcacttaaagttgatgcccgtcttattattttgaacttagacaacgagggagaagatagacttattcatgtaacggattacgctcccatttcctgctgttttcgcggttactttgtcggaggatctcaagacgggcaagttactgaggtcaacctcgactacaacaaagaggcaattaaccctgaaacgggggaaaggattcctggcataaagcgcttcctgagacagcaccgccttaaaccacaataa

SEQ ID NO: 449492 - DNA, 1062 bp, Serratia marcescens
atgattaatcaactcgcattccgcgacattcaattcaacgtcgtaaaccacgccaatcaaatctggctgaccggtaaagaactggcccaagccctcgattacaagaataccaagtcaataactaaccttttcaacgaaaacgaagacgaatttacacctgcaatgtcattggtcactgaatcaatgaccaatgggataaatggcagcaagcgccgcatgaaggttagagttttctccctgcgtggcgcccacctgatcgccatgtttgcccggactgagatagcgaaagagtttcgccggtgggtgctcgatatcctggacaaagagacagccggatcgccggcgccgctggtggttcgaaccgagcgctgcaattaccctgcaatgaatgagctgttagagcgtccgcgttcgttcgtctctgagtttaacggcatggcatacgtagacagtaaatcgcttgcccgggtttatggtgtattggcccgggaccttaacgcgattgtccgccgcctggaggttacacaggactttgccgagcggaacatagtgaaatgcaaaggcgccggctatcagttcaccctgtgggggttcctgctgttatccaggcatatcgagggggatttgagttctgaggtcacgctggcttttattcgggcgttgatggccaacacgggcataacggcagggagtgatttagatacaccgttgctggtggattctgattatcgccggcgcgcgcgtgattatgcggccgatatgttccagcgttggtatcgccaggcgacggcggcgggaatttcggtagatgactttaaccgggctgatattgataaatttgctgatgggttgctggctgatgctctgacgcgttttagggttgaaatagggtttaatcagcatttagaggctaaggtaagtttcctgccgcaggatgttatccagttggcgccgtccagcagggagagcatgagtaatttaattcagaacgtagtcgatacggatgtattgcaagaaatgctaatgaccggcattgcccgcctggggcgcgcggcgaaataa

SEQ ID NO: 449493 - DNA, 396 bp, Serratia marcescens
atgaccgctaattacctcttcagccaacgcagcgagaaaaacctcgttggtgttaaccctgagctggtggccgttgtacgccgcgcccttgagctatcacctgttgatttttccgttattgaaggcctgcgcaccaaggcaaggcaacagcaattggttaacgccggcgctagcaagaccatgaacagccggcacctatccgggaatgcggtagacctgctgccggtcggcgccgactggaatgatcataaatgctggttgccggtgctggtggcgatgcgccaggctggccaagagctgggcgtaaagctgcgatttggtatcacatggacggataatccagaagaccggccggcgaagttcctggacgctccacacgttgagatccccgcatga

SEQ ID NO: 449494 - DNA, 582 bp, Serratia marcescens
atgattgccggcgcgttgctcaaaaactggcgcttaggtgtgggggcggcgcttgtcgctgccctggctatttgtctgtggtgtgtctcgtactactcagagcgagcggagaaggccgagggacgcgcgcggcagctgcaggccgataactctctgcagggggaaactatcgcaacacaggcgtttcagtttaaccggatgaaccaaatcgccggcgccgttgccgggtatcaaatggccgtcggcctaaagtcagaagaggcccagaatgaaatccgcacgattgttaagcgtgacccggttggccggcagtgtgttgatcctgttgttgctcagcgggtgctcaactacgcgaaccgtttacgtgccggcgcagtgccaggccttgccgccggcgctactgcaacagataccgccaccgttgccgccggctgccgattgacctacggccaggctgtttactggcttgagccgttactggcaacggtcgataaattaaacaggcagttggaaggggtggaggaagccgatcgcgcccgagcgatgagtgggcagaaaggaccggcaaacccttttaaatga

SEQ ID NO: 449495 - DNA, 216 bp, Serratia marcescens
atgatcctggtgcaactgcacaccattagccgcatagccgttatttctcaccaggtcatcagctcgggcattacctcgctcaaagttaggaagcaatgcagcatcgacgctttgggaagagggttgccagccggcaatttggccaccaaatcctacgccgccgccggcatatccggcgtactcacgcaacggcgtagaaccatccggggcaagtaa

SEQ ID NO: 449496 - DNA, 1314 bp, Serratia marcescens
gtggacaagacgcgtaatttgccccatatcgccagcatggcgctcaatgaaccgcttttattagaacccgcctacgcgcgggttttcttttgcgcgttgggtaaagagcttggcgtcgggcgcttgattgatagcacgacggacactgttttatccccacctcaaatgtcggagttagcggcatcttatggctctgggcgagtgacaatatcggataacgggtatgacattcaggaccgtatcgccattgttccaatatcggggacgttggtaagcaagtccggctcattacggccgtactccggcatgactggttacaacgggattgtttccagggtaacagcggcaattaacgatcccgatgtcgacgggattttgctcgatatggataccccgggcgggatggtcgcagggggatttgatgcggccgatatgatcgcccggttgcgtgaaaaaaagcctatctggtcactggctaatgatatgaactgcagcgccggccaattgctggcgagcgcgtgttctcggcgcttggttacgcagacagcaaaagccggatctatcggtgtgctcatggcccatagcaactacgccggcaatctggagcaggctggcatcgatattactctgattttcgccggcgctcacaaggtcgatgggaatccctgggaagccttgccgaaggatgtacgagcaacgtttcaggcaaaaatggacgcgatccggcaatcattcgcggaaaaggtatcgagctataccggtattactgttcaagcggtgctcgataccgaagcggccgtttacaccggccaggagtcgatagacataggtctatctgatgagctggttattaacaccgatgcgctagcggtaatgcgtgaggctatcagtaactcaaaagtaacccggtctataggaggccaaatgtcagtaaatcaaccccaaaccgcagcggaagcgccagccggatcggaagcggccaccgttcaaacgcccgcgaacgtggcaacgacccaacatgatggggatgtcaccgcagccgtgaataatgctgttcaggctgaaaatgctcgcatcatggggattttagactgtggtgaggctagcggccgtgaatcatctgcgcgcgcgctggcagccacgccaggtatgacggtagagaatgcccaacgcattcttgccagtatgccgaaaagcgcccaggtacggacggaaaccgggttggatcgcctgatggaagattctcccgaagctctggggcaaggggctacggccaagaccgatattgacgatttaatgaatactccggtttaa

SEQ ID NO: 449497 - DNA, 423 bp, Serratia marcescens
atggctactaaagacgatttgatcgccgagttgggcgagctgggtaaggtgctgggtcgagagctgagcgctgaagggactaacgcagatttgcaactgcggatccgcgaagccaaagaggaaatcgaggcactgcaagaggatggtgatgctggcggtgctggcggtgctggcggtgctggcgatggttccggctcaggcccaaagccgccaataacggacagtgaaaaccagcccaaaccgcctaaaactgaaagcgagtttgaatgggtaaaagttcgtgtccttacgaccctgcatatcaatgcgttgcatgagtcgcgtaatcaacccgtgaaaatggcgtatgccggcgatacggttcgcgttctggattcggacgtggatgagctggaagacgctggctacgttacagagctttaa

SEQ ID NO: 449498 - DNA, 3642 bp, Serratia marcescens
atgatagaaaatcagcctattgatgttgatgagcactcgagactcgtatcgcttacgccggagtatatcgaggaagaacatgttgggtatgttctggcaattgaagctgctcttgctgataagcagatccgtaacatcgctttatcgggtaactacggagtgggtaagagtagcatcttgcaagaagttgctcgaagaaaggatgatcatgtagtcgaaatttctttatcaaccctgtcacctattgaagtatcaaagctggacaattcggtaccaaagcaggcaacgacgccaacgaatcgcattcagcaggaaatcgtgaaacaactgctttaccgcgaagagccgagtaaaacaccgggctctcgctttaaacgaattgagcgatttcgatggaaatgggaaacagtgtcggcttgcttgctgggattcgctgtcgctgtcatttttctcttgtcggggtggacggcccaagttgtatcagctatcccttcattgaaagctcttggtgcctggatacatgcggggacctttagtgtggcatcaggtattgcctttctgattcgctggcggttctacggcaagcttcatattaagcaattttcagctggtgccgcgacggtcacacttgatgataattctgtatcgtactttgaccagtatttagatgagatcgtatatttttttgaagtttctgaacgcaatatcgtcatttttgaggatattgaccgttttaacgattcgcacatatttgaaacgctacgtgcactgaatacattactcaatgcatcgcctcagatcaaaaggacggtctgtttcatttatgccgtcaaagacagtatcttcgacaatattgccctgaatgaggaaggacgtaagattgaaacggcgatacttgataacggcgacccagcgctcgctgaggtagttcgtgcgaaccggacaaagttcttcgacctcatcatcccggttgttcccttcattactcacagaagtgcacgtaatctcgtgctgaaacagcttgggaacatgaagaaccagatagcccctgaactcatcgacctggcatctcaatatgtcccggatatgaggttgctcaaaaatattcgcaacgagtatatggttttccgtgaaaggattttttctggtgatggagaacagctcaatcttaataaaaccgatttgtttgcgatgatgctttataaaaacacccatcttaccgattttgagacaattaggattggcaagagtaaattggatgttttatataaaattagccgtgagttggtggccagtaatattaaaagacttgagggggagtgcgctggtcttcgttataggcttgagcatatcaacacaatagcctcaaagtgtgagcgattaggtgaggaattgcttgcccatgtaaagagaacagcagaggccgttgattataaattaccgaacgcaactttcaccttcaagggcgtggtattttctcaagaggagctgaaaggagagtcattctggcaagacttattattagctgatggtgatactgtattccaggtccgtactcggcaaaactatactatgaattttactcgggatagtcttgctgaagtcctcggtgagccattagatgcagatttatgggaaaatcaagaaatggagtctattactgatgagattggggatggaaattccgatattcagtttctgagaagtgcagatctccatgatcttattagacattcggaatttttggtggcgtacgaggataataatctacctctcgaaacaattgcacggtctctgctgaaaacaggtctggcttaccaattgattcgtgccggatatattaatcgtaattttacactttacacgtcaacgttccatggtacacgtgtgagcccgacggccactaactatattattcatcatgttgagcgtgatctgatggatatctatttcaagttaacgccagaagatgttgatgccatcgttcgtgagcgtggtaaagagtcgctcaaagattccgccttgtacaacatcgatattctggaccatttactcgttaaagatagcgagttagctgatattatgatccattctttattagattttagcgagaatgctgaaaagttcatgcaagcatacctttcttccggggaacagcgtccgcatttcattgagcgattaacaaatgtatttaccaggatctttccgtatattgtaaacttgacggctttagatgacgcatcccgcttgcaatttgtaaatattgccctgacccatcttccaaaacttaaacaacggactgattcaatttcatctgtgtacctcttaactcattacgctaagcttacagcccttacctcagatgccatttctacgtctcaggcagaacgtgttggaacacttttcaaggaagcgcatattattgtgcctcgtttgcagcctttgggtagacaggttcgtcgagctttccagtcccaaagcatttatgagatcacctatgagaacctgttaactgctatcgatagtgcaaaaagtgtagcgctggacataataaacactgcgagtaagacagtctttagctatgttcttacaaatctgggcacgtaccttaaggctatagaaggcaaatctttaacaattgatgtccccgattcctttatcaccataatcgaagaggtgcttgctcaagatgcatctcatcttaatgacgtaattaagcatgctcatactgattgtcatgtaagggatcttgcgcaggtgtcagaggctgcctggcagccactcgctgaactttgtcggttccccgcaacatttaataatgtcatacgctatattgcagtctttggtgcagtcgatgcgcacctgtcccaagtgctttctacaggcggcaagattgttgagactgaaccagcggaagacgaaccaaagacttccttagcgacagcaatcctcgcagccaaagaatatctttctcctgcatctctgcgagtagagctggtgaacagtttaaacctcagccattgccttgatatcagcgatgtaaatgcggaagtaggggatcttttcgcgttacttctcaggcacaacctcattaaggatgattcggaatcgtacgaacatctagctgggactgactggccgacccggcaggcgttcattattgagtcagcggaatttgaagagtatatgacgcctgaacttgtttgctctgacttggttgagattttggccagcgatgttatcaatgcttcgataaaatcaaaaatagttgatgaagcaacttcatacgttgcattagcggattttgcgggtattaatcaactggcaaaatatgcaacacaccatggttatgtctgtgatctgtcagtagttcagaagatggcagaggagggggtgacggcggagctggttatccttctcttacaaccgcatctgagatcgattagccgccaacagctgttttctgtgctgcgattacttgatggggattaccctaacctgacaaatgttggttatgacaaaccccgaattccaaatactccggcagatctggaactgcttgagagactaacgctagaaggtattgtaggtaaatacgatgcccaagagtcgccgattaaggtaaataagaagtataaatag

SEQ ID NO: 449499 - DNA, 729 bp, Serratia marcescens
ttggaaggattaattgtatttgttgcccttgcttctgcactggcatttttcatcggattgataaaacctcagtgggtacgaatgccaagtaggaagggcgctagtgtaatttatggaatcatttttatatgtgcttcaacgttgggctctgcgctatatcccacagagaaaaaaaatccactagttgagaatgaacccaaaattgaggattcaaaagcaccaacagcttttgaagatgctggcttaacactgattgagtaccgccggaagtcgcagactgaccgccacgaaatcgtcagtgattacgttaaattcaaggggattcctgcgaatgatagtgatggattctatgcgtgcttaagccagtacagtatcaccaagtctgaggatctaccgcttggtgaagtacttggttggtgcgatgctggttatcaaaaaaatccgaaatcgatgtcagaatataccaatctcgacacgtttcagggtaatttcagcggttgggatggctcatatcgtccgcttgaaaagctgattaagaaaagcatgaacgatgattcatcatataagcatgttgaaacgatgtcgcatcttgtcctcgggaaagaccctcacgcagtggttaaaaccagatttaaagggacaaatgcttatggtggtgtagttacccagactgtgacggctcgcgtggacatcaggtccggtgatattgtacaaattattgaagaataa

SEQ ID NO: 449500 - DNA, 894 bp, Serratia marcescens
atggcagagaaaacccaatcagtgagtattgtttaccaaggcgaagctcttgatgaccataaaatggacatattggcattttctaagagtttacaggggttgggggaggccatttatgccgctaacgaaatcgtaaatggtggcagggacatagaggttaatgtcgatgcggagttgattgctggctctttcgggtttgatattgagataattcagcacttagcaaacgcgaaggacgtcatacagattttgggattgtcatcgattcccatggctttggggggcgctacggtcttagaggtcctgaaaaagttaaacggacggaaaattgatattgtcgaaaccgaagctggtggggacaaagtgaagctgaaggttgatggcgaagagattgtttgctccgaagatgttgaaaaaatagtcaatgctccagaggttcgcaaggcagtagatgcctttgttcggcagccgcttctacggccagggattgaaaacttcgttgtcaaagagtctcgaactgcaaaaaaagatatcatcaacattgccaaagacgaagctgacgaatttaaatctccaagggttttgtttgaaactaaagaagaaagtgacgagtttgaatcaacggtaacgttcatctcagcacataccgacaagaagagcggttggcgtgtagagtttaatggtgagaagtgcaccgttcgcatggaagatgatgagtttatcaagcttgtaactggcccaaaagcacctaaagtatttggtgagctgttcgctgtgaagatgaagaaagttacaaaagattcaggtggacaagtggacgaaaagctgtcaatcatcaaggtaggtagacatttcacggataaagcgaaaaagattaaacttgatgcgaaataa

SEQ ID NO: 449501 - DNA, 543 bp, Serratia marcescens
atggacaaattagtaatgattagaagagcaactgtacacgatgctgataaattaggtgtggttggtcccgctgcttatgcagcgacataccattatctgtggagtgactgcgttgctctggctcatcaacttgatactttcagcaagtcagcattcttaacgctcttacagcgggaagaatcaagcgtgtgggttgccgaaattgcgggcgaaattgttggttttcttgcaatgttaatcaattcaaaaaatccaattacacatgatactagcggggcagaaatttcgaggatttatctacttccaggtagtcaaaaaatgggtatagggaagcagcttttgaatgctgcacaagaatatgcgaataaacttaaactgacacatatgtggcttgatgtgatggagtcagccacagcggcaagaggggcatattgtaagtggggtttttcagaaatagggtgtaaaaaattctctcgccaagtaaaagaaaacttttctaatatgcttgtcttgagtataatattgaatactaaaaaaaattaa

SEQ ID NO: 449502 - DNA, 1323 bp, Serratia marcescens
atggatgataaaaaataccaaatctttgtcagttcaacgtataaagacctgtataaggcgagaaagaaggtaattgaagctatattgagtatttatcacttccctgttggtatggaaatgtttagtgctgatgattccgaacaatgggaaataataagggaaactatagatgcgagtgattattatatagtgatcattggtcatcgttatggcgtgatgactaatgatgaatatagttatactgaaagagaatatagatatgctaaagagataggaatacctgtcctggcttttattcgttcgagaaatatagccttaactgatgatgaaagggaaagtaatccagaggcacagaaaaaactcaatgattttatttcactggctcaggggagtaaaatgtgcgatttctgggaaaccccagatgatttggtaaccaaagtggcaattgcacttcctaaaatctttaaaagaacccctagagtaggctgggttagggggagtgaggctatttctaaagaaatatctcaagagctcgctgaactgagtaatgaaaacagaaggctgagagagaaattattggctttggaaatggatagaaatcaggatgtacctaagttaatagttagtttgtcggatgaagatacattgagtttaaaaatatcatctgatcttgaacaaataaaaatgcctgaaaggttaagctattcggacatcactgcggagtatgttgggtctgttagccatgcggatatagaccgttacaatgagaaattaccatctgctgatgagtttgaacgatataaaaaggctgtcattttttattctagagtaaataatgacatattggaagtaactccaaaaataaagaatataggcagggtgagtgcgtcaaatattagagtggaaatggtttttcccgacttcgttaaacctatggagttttatgatgttaagcgtataccagagccgaaaaacatctttccggcgaacccaatggtgataaaaaggtcgttgacagatatcagaaatttcctcgggaaaggaacgccattaagctataagcctatcgatgttaatagtgggtctcaatcaattatttctgcagctcttaatattccagtggcatcaccaaactcttgggttgatgtgaacggttcagtggttgaggtttatagaaataaagtaatgcatacaaaaagtgctgagtgtgattcttttattttgattcctttagataaaggtgaagggcgtattgaagtcaatgttatttgtgaggagtataaagagcaggcaaccatctatgtgcctatctcagtgaaatag

SEQ ID NO: 449503 - DNA, 615 bp, Serratia marcescens
  misc_feature (592)..(601): n is a, c, g, or t
atggttgcattatcaactttagtagctgaatcactgctagcaggtttcttcaagtctattgggagtgctatagctgattcgagcactaaaattgcaaaagggaaaggaaataaaataattgagtcatttaataactctacaataacaaatgactatcttagcaaggcagtatacaagatatttgcatttagaactattactaaaggcgatcgagatgtgtatcttgatgaagtttatcacccgctcaagataagtaaaggaggtctgagaagaggtcggaaaattaatatcggtgataaggcgaaaataaaaaacaatggttgcagtgtgattatagggctggcagggcaaggaaaaaccactatcatgcgaaagttgtttttagaagaggtggtaaggaaggaacgcttacctttgtttttaacacttaggcaatatagttttgaaggaaaaagttgcgaggacattattttagagcatctatcttctaatggtattgactgtaagcctaacgatgtagttgatgttttaaaaacaaagaaagtaattatattctttgatggtttcgatgaggtaatatcatctcaaagannnnnnnnnnagtcatgctcttaa

SEQ ID NO: 449504 - DNA, 876 bp, Serratia marcescens
atggagtcaaatagtgattttactttagagtcaatgttagctctattcaaacgtgccagtgaagctaaaaaaataaatgttcctgaggagttcatttgtagtgatgttattgatgggacaaatctaattgtccgcgatggatatgataaatatgtttatattcatcgctccattcaagaatatttttctgctaaatgcatttcacagctaaatattggtcaaaaaaatacattcctaactaaatactctaatttggaaactaggaagaagaatgtaaatatgttggctatgttgagtcatatagatccaatttgcttttataaatcatatataattccattattagagaaaaatggtgtattatcagaagggaaagttatatgtagaagtaaaagttgtattagtgagttcgttgatggttggcaggttgccttagatgctgatgatgatgaaggagtcgtcgggtttagtcaatataatactaagcaagatgaaatatcttgccatatgaggagcttgactcatgttttgagtttgaaaggtatcgcatttgatgacgatgctccaagtatttatttaatgactggtggggaaggttcaatttctaaatatctaaaaagtatcccacccaggggcaatattgaaaagtcgtcaggtgattttttaggtgaggttttcggtgaagatttagattgggtaacgctttctgaaataaaacagtttatcgagttatatgacgagagagttgtaacaccaatctatgagtcttacttgaaagctataaatgagatgcaaaaaattatagacgaagagtatataaataaaatagaaagcgattctatcatctcaggaatgttaaacgatatggggtattaa

SEQ ID NO: 449505 - DNA, 1512 bp, Serratia marcescens
atgaaagaaaacgcgattctccggttaaatacattagccttatttatttttttcctgctcacagggaaaagtgctgaagatattgagagcttttcgatcggcgaaattaacgttctaggtactaacagcaacgatgaagacagtgatgcattagctgatagctaccgttcaccgataccttctgcttatttgggtaaagacaaggtagagcgatttcggggaacgcgtaatactgatattttcaatgatattactggcgtgcaaatgaataacccggctaatgaagcgggtgcgctagatctgggtattcgtggtatgcagggcaatggccgtgttcctgtcgttattgatgactctgtacaatcgacgctgacagaacggggatatcagggaagttcagatcgggcttacattgatatggatttaatccggagtgtgcgagtcgataaaggaccaacaattggttcagatactgtaggggcgacaggtggacgagtggaaatgcgcaccattaatgccaatgatgtcattccacaggggcacaacttcggaattaactttaattttggtacatataataataaccgaatgcctcatgagtttggtgattcatcaaaacagttgaactatcgtctgcaacgcgaacaaaaaacaacacatttccgtaatggcttttactcgctggcgatgggaggtaaaaacgactatggcagcgtgttactggcctataccgaacgcactaccgggaactattttgccgggaaaaataacgccacgcgttatgacaacggtaacaagtttgatcaggtgacccgtcccggtcaggaagtagctaacaccagcaacgaaaatgtttcttttctcgctaaggtatcggctgatttttcacagtataataagttattgttaacctatcgacaccatcatcagcaggcaggggaaatactttctgcctatttgaccaaaaatcagaacacaaacggtgaggaaactcaggctcagtggtctctaggtactgcgaatctagacgcattcagcgccactcacagttataaatcgcccgtccataactggcttaatctgaagtccactttcttctatacagaattacagactgagcaacataatggttttctcgggagtggttcttatggtgacctgtactggaactccgtacgtgatcgtcgtgtgggtatcaatgccagcaatacttcgctctttccggcactgcctgtggtgggtgatttaaaagcggaatatggttttgccatggagcaacaactgattggtccgcgagtaactggacgcagctcaggatcgacgaacattgacggtaattgtcgcagcaacagtttatttatgaacctcaccatcgatccaacccactgggttactgtagccgttggcttacgcaaaaatatcgtcaatctgcacagtaatcgacaggccgaatatacaaaaaacatctttgatgacgcagagcacgggggggagggcccgccgcgcggttga

SEQ ID NO: 449506 - DNA, 384 bp, Serratia marcescens
atgagcaacgcatcacgaacccgcacaccacaggacacggccggcacgcagggaaatcgcgccaaagccctgcaaagcgccattaccgccatcgagaaggcgttcggcaagggcgccatcatgcgcctgggcgacaaccatggcatggcagtcgaacgtatcccgaccggctcgctcggcctcgacatcgcgctcggcggtggcctgccggtcggccgcatcaccgaaatctacggccccgagtcgtccggcaagaccaccgtcgccctgtcggtcatgctgcctgcgcccagcgcgccggcttgcaatgcgtctttatcgatgccgagcacgcgctcgatccgcgttacgcgcagcagttgggcgtcgatatcggtgaactaa

SEQ ID NO: 449507 - DNA, 696 bp, Serratia marcescens
atgattgcagccgaaggaagcaaaaaacctcgtctatccgggcaaaacgtgacagtacgttcgtcgcttagcttgcgagttattgtacatgacccggtttctctgtatcgcgattgcctgatacacgtgttgaaagcttattttggacataccgtaaaaattttgggggaggctaagacactggcggatgtgcggaaaatactgattcatgaacacgcggatcttctgattggtgtgccctacggtgttggagagacgctacttgactgggaagttttcgggtgtcagcttaaatgttatcaccctagcctcatctgcctgatgtggacgaatctgccgaaaaatttcgtgcgattgttcacacctgctgaacgtgtgggcaagaccctatttttgaaaaagggagtatcgataccggttttttgccaggccgtgtcacaggtagctgcgggggatttacctagaaatgatgtgtgtcaatgcccgactgaggatgatggggcggctttaaaaacattgactctgcgggaaagtctggtactgagcgagatgatggaagggaagagtttgcggcagattgccgcgcggtatcacaactcgctgaagacaatcagttcgcacaagtgcagcgccatgaaaaaactgggggtgtccagtaatgcacagttgttggcgttattgcatgacctgtattga

SEQ ID NO: 449508 - DNA, 948 bp, Serratia marcescens
atgacacaggtttcaaaactaaagaaagtgctgatgaaaaaagaagttgctgtcctcgtgacttctgtatgcctaatggcttattcatccggcgtgactgcttttacttgtaaggttagtgcaaccgggcaaacaattacttcaggaacagctaacgtttatgtaaaccttacgccatccattggagtagggcaaaacctgattgttgatttatccagccagatacaatgtaagaacgactctacaccaccaaatattgatacggattatgtgaagcttaccgacggttcggcatatggcggtgtgcttgacaactttaacggaactgtatactggaatggcaagacttaccccatgcctttaaatacaaatacaaataatgttgtaataacacaaacctattatcaagggttgccttttaaactatatttaacggctttgggcgctgcaggcggaaaagcagtaaaatcaggtgagctgatagcggtaatgaggatgtataaggtagctacttttggtggtgggtatccaagaaatttcatctggaatatttatgcaaataacgatgttataattcctacaggtggttgcgatgtatcatcgcgcaacgtgactgtgactctacctgattaccctggcacggctgctgtgccgctgactgtccattgtgcgcaaaaccaacagctggcttattatctgaccggtacaacggctgatacggaaagcaccatatttaccaacacatcatcatccaatcctgccaccggcgtgggtgtgcaactgtctaaccgcaatggcgtgattgctactaataaaaacgtgtctctcggaaaggtaggcagcagtcctgtaagtttgggcctgacggcttcctatgcacgaacgacgggtcaggttgtggccggtaatgtccagtctattatcggggtgacgtttgtttacgagtag

SEQ ID NO: 449509 - DNA, 747 bp, Serratia marcescens
atgaatcagagacatttcacccaaccggccctttccctgttggcctcgacggcgctgcacggcgctgccctgttggtgctgctcggcatgactacgggcgaaccggccaacagccaggcgctgcagggcaagacgacggccctgaccctccatatggtgtctgcctcttccccggcacccagcccggattcgcccgtcgagcgccagcaaccaacgcctcagggagaagacccgttacctcagttgcccgtcaacgatcggagtcagtggaaatccgccgccgccaagccgcaacgcaaaacgactccgccgcagaaaaaaccacctacgccgcgcaccacatccgccctcccgctggcggaaactgtagggcaaagcgccaaccagggtaaggacagacaggagagcgaagaagggattgcggcacaaaccagccaacgaccgatgattggcagcggcaacgacgaaaaggcagcctacgccgcacgactgcgcagcgagatagaatcccacaagcgttacccgccgcgggcaaaacaggcacgcgccggcggggtggtgaatgtgcgctttaacgttggggatgacggcagcctgacagatccgcaactggtttcctcctcgggtaaccgagatctggacaatgcggcgctgcaggcggtgcggcaatctaacgccgtcggccctcgcccaccaggctttggccgcagggccagcgttaatattcgctttagtctgcgcagttga

SEQ ID NO: 449510 - DNA, 2280 bp, Serratia marcescens
atgaaaataagcactatcaacaaactaacgctcatcggctgtgcgctgatgggaatgcccctttgtggctacacggcagaaagtaagaatacggcggaagtcaccctcggcgatatctacgtcatcgacaaacgagacaaattcgaaagccaatttctcgatcggcagcaaatcgcccgttttcgcggcaccgccaacggtgacgcgttttccggtatcagcggtgtgcaggtcaacagcttgcgcaacgaggccggcgccatcgacgtcggcatccgcggggttcagggggaagggcgtgtgccgatcgtcattgacggtagcctgcaatcctcacatactttccgtggatatcagggggaaagcgaccgcacctatatcgacatggatttaatcagcaccgtgcagatagataaaggtgcgtcggcggggaaatatgccaccggtggcataggcggtgtagtgcaaatgaagactctgggcaccgaggatatattgctgcccggagaaaattttggcctgctgtttaaaggcagtgcttataacaataaccgcaagccggatatttccaacgatgcaagggatcaggagcattatttaatggccaacggcattaagcccaacagctttaataatggctccgccaccgccgcactggcgtataaaaacgatatcctcgatctggtgttggcctacagcaaacgcgccgtcggcaactactttgccggcgccaaaggtattgaacgctatggcgataaagccatcgtcaacgccgggcaggaagtggtgaataccagttttcagagcgactcaggcatcgccaagctgggcctgaacctgagcgacagccagcggctggagctcaatttccgccgccacgtgcaacaggcaggcgaagtgatggcggcctattggtataaacatgcgcatgacgacggcgagggctacgcctcctggtacgcgcctgacggcgtagactccatgccgcaatggtcgctcggttcgtccatcgtcaacgcttacagcgccagttacagctatgcgccggagaactcgcgcttgatagacttcaacctcgggctgtggaagaccaccgcccgcttcgatcaacacaacggcgcctggggcagcggcagctatggcgaccaatacaagcacagctacggcgacgatcgccagggcatcaccgtcagcaaccgcagcagccttgccacgttgccgctgagtttcgattacggcaccaccctggatgaacagcgcatgcagccgcgcggcagggaaacccgtaatgtcatttcccgcaacgggcgtcgcaccgagcaaagcggctatctgaacgccacgctggattacccgctggcaacgttgagccttggcggcaaggttcaccaggcggcagtaaccgattaccatgagcaggaccatattgactatcgggcgaaaaccgatctgctcagccagctcaagctgcacctgtccaacaacgtcgacctgtacgccaaagcttccagcacctatcgaaaccccagcctgttcgaatctacccgctcggcgcaaaccttcagctatgatccgcacaacccgttgcgggcagaaaatgcacgcagttgggaagcaggtgtcagcggcgagttcaacgatgttttcaccctcgatgaaaaaatagacttccgtgccgcctattttgataaccgcatcaaagactatatctccgcttcgcagttgccaaaaaacccaggcgatgcctggtggcgcagcaacttctccttcaggaactacgatagcgtcacgctgaaaggcgtcgagctggcgatgtcctacgacaatcaacacttttacgccgatgcctccgctattttttatcgcaaaccggagatttgttcgcgtgccaccgccgaacaggatcgcgggcccacctgcaccgacgtcggctattcctggagcctgatatcgacgcgcattccgcctaaaagagcctttaatctgacggtgggcacgcgcttgctgaatggcgatctaaccctcggcagtcgcctcaagtatcattcgggtaaaaagaacccgcaggactggctgcagggcaccgccgcccaggcggtggtggaagtgccgtccgaaaaaatcgtcgacctgttcgccagctaccgcgttaaccctcagttagaactgactttcaacatcgacaacctcactaaccgctatgccttcgatcctggcacggtgatcggcatgccgatgccggggcgcacgctgcgcgctgggttggaagtgcgtttctag

SEQ ID NO: 449511 - DNA, 3309 bp, Serratia marcescens
atgaaaaagcttttcatgacggctacgttaaccggtttattagccagtaataattcatatgccggagaaagctatcttgtctatagcccgcaaaatattcctgtatttcaggtgcgtttctttgatgttggcgacggcccgtttatgccggattggccgcaaccttctgagtcaacctgggatctgggtcagcaacagaaagaaaaaatactcgatgccatgcgttactgggctgaagttatcacccccagaccaaggcaattgcccgccattatcaatgtcggcacgtttgacgttaataatgcagcgggatccagcgattcagtaaacaatggcgttattagtctgacgcagctgcagggggctttgagcggcattgataccggagagttgaccttcggatcccatgcccagttcatcatgggtaaactggattttgacgacattccctatgtgcctgcgcaattgccgcgcaccggaaagacggatctggtcagcgttgctgttcatgagctggcccatggcctgggcatctccaatatggttaccgacctgcaggggagaggtacattcaccccggccttcgatactcagccttttggctcttggaccagccatctacgggatgatcatggcaatcctgcccggccagggcaggtaatagtgtgtaatggatgcaataactcatgggatccgcaaggctttgatgtacggctcgataaaggctatttcaccggtagacaggtagatgatgtgctcgcaggtgccatgcctggcgtaccggtgaaaatgttgggagacgacggttcggtcgatgataactacatgagccatatcgagctcaagaacagcatgatgagccaccaaaactaccgcaactacacaacttttatggaagcggaactggcgctactgcaggatatggggtatcagattgaccgacgtaactttttcggtttttcgctgtatggcaatgggcaaactctcattaaccgcaatggctatttactgcgtaatcagcaaggggatggctatctggcagggcaatataacactgcaacgctgggggttggactgcatgtttatggaagcgataatcgcatatttcagcaagcggatctgttgacgcaaggggctggcggcgccggtatccgtatcgatgggcaaaataacacgctgaacatcgaaccaggaacacgggtctacgccgatgggctcaatggccggggtgtgatgtttacttacggcaaacagcataaccttattcagcgaggcgatattcaggctctgggaaccaatggcgtcgccatcagctttgattttggcaataacctcctgggtaacgaggtggactatcgtggttcctggatccaccaagtgggtgggtatgtcgccacattattacccgagttgcagggagcccttgtagataatgccgatattagcggacgggttgtcggtaaaggcgcggcgatttatatttcgccaaatgcgctggtcggcaatattaatatattaaatggtgcccggctggagggtgatatttactcggattataaccagcgagatgcctatggtcagcagcggttgacgcagcttaccttcggtcggaaggccagtgcgcaggggcaggcgacggatggtgctgattctgatttcagctttacttaccgtggaaatattgaaggtatcaataacctggcactgaacgcgcacggagggaaaacctcgcttaatggcgactttcagatttacagcatgactatcgcgccgggtgccgtactatacggcaatggtagctacactctgaacgaggaaggacgctttgtaaataacggcatccttgcgccgggcaattcactcgggcaaatcaatgtaacaggcgcttatcaacagggcgatactgggcagttgttgttggaagtcgacgggcgcggcgggcatgatactatgcgggttgacggtcacgcacaattcaacggtcagctgacgtttgcgccgcagccgggctggtatgcggcaaactggcggctggattcgcaagatttgctaaaaaccgcctcgtacagcgggaaattcagtgcggtgaacagcttgctcctctcacccactctggcgctgcagacaacgccgctgggagagaatggctggcagctctcaatgctgcgcgcctccaacgcttacagccggtatgctcaggacgacaatgcgcggcaggtgggtcaggcgctggataaaattgtggcggtagccgattcggatatacaaccgttgtatagtactctggatttctcagccactgatggcaagagtatcagcaatgccttgcagcaactttccgcggcagcttacagcgccatgttcgccagttcccttcaccgtgaacagcagataacgcggttcatcggcgggcctaatcctgtcgttactccgaaacagttggcgcaaggcgaatggcgcagctttgccataccctttggcggcggcttctggcaacagcgccaaggtggctgtgtagggtacgacgccagcagttatggcatgctgttcggcgccgaaaaatcaaacgagcaagatcgcaactgggtttatggctttcatggtgcggtcagcggccaatcggtgacggtgaaaacaccagaaaccgcgaatgcgaaaaccactgctttcgatctgggtatccatgctcgttatgcaattgaaaggcccgaagggatatatttattcggcaatggccgattcggcattgaagacagctggctggatcgaagcattcatgtagaaacttacggagcaagccaccatgccagctggactggattgtcaggctctcttacggccggcgggggctatcgttgggctctgaatgataatatgagcgccggaccgataacttcattaaattacaccacattacatcgcccaggcgtgaaggaaagcggcaatgacggcagccggctgatgctgggtgcggagaccttcgattctctgcgatcgagtatcggggtgaatggtaactggaatttgccgcttgcttcaggggcatcggtcgcagctgagctgcagcttacctgggatcatgaactgctggatggcaatgtggtgcaacaagcctctttcgtcaactatcgcagcacagggtttagttccaggaatcaggtgactggccgtgacgcactgggggttaaggctggaatgagctataaaatcaatcccgatgtcgaattgggcatcgggattgaaagcgaagtgtttcattctggctatgactcgatcgcaggtaatctttcagccacctggcgtttctga

SEQ ID NO: 449512 - DNA, 291 bp, Serratia marcescens
atggtgcgttactacggcttcctggccaaccgcaagcgcggctcgttgctgccgaaagtctacgaagccctagagatgacgccactcgagaaaccgcaaaagccggggttcgcgatactgatgaaagccttcttgggcaccgacccgtaccagtgcatcctgtgcaagggccgactgcgttttgctggcccagtggcgggcgagcacgccaccaaaatgctttctgagcggctgcatcggatgttgaaaaaacgatggcttcagacaccggctctggataagtgcgcctaa

SEQ ID NO: 449513 - DNA, 537 bp, Serratia marcescens
atgccgcacttgctgtggccgttcgccgctgctcaacgacctgtttcgctgcgccagcacgcgcgcaagctagacatcgaatacggcatcttctgcgcgctgcacacctacggacgccaactcaatcagcatccgcacatccacgtctcaattacccgtggcggattcgacatcaaacacggcgtctggcgcgatctgttcttcaaaaaacagcaggttgaaaccatctggcgtggtgccattatccgtctgctgcgtgccagctacgatcgcgttaatcccggtaagctgcccaacctcggccatatccgcgatgctaagcagtggaagcgctacctgctggcgcaatatcagcgccattggaaggttcacttcgccaaaaagacacgcggcgcttggcgccgcgtcaaatatctcggtcgctacctgaaacgcccttcagtggcggcgtcgcagctccgtcattatcgcggcggctcgcggtggtacaccagtataacgaccacaacacgcagcagcacaaacggcaaaaactga

SEQ ID NO: 449514 - DNA, 270 bp, Serratia marcescens
atgacctccgacggtcagccgttgtatggctctgttacccagcaaacccggcagatcatgctcgctatcagtgacaccctggcgcgggcgcagaggacgctggaaaatattgtgaaggtccaggtttggttaagcagcatggagcatttcagcgaattcaatgccgcctacagcgcgttcttcccggaggggtttccggccaggagcgtcgtcaccagccgccttgcttttgatttggacatcgaaattgaagtccaggctgtcgcctga

SEQ ID NO: 449515 - DNA, 654 bp, Serratia marcescens
atgacagaccagcacgaacgtttaatcactattctgacggcgtctctcgaagcactgagaactacgctgccgttaaataccgaggcggtgctgcacgatctcacccgccctgaatcgtccgtggtcaacatcgtgaatgggcacgtcagcggcaggaaagccggtgatgcgttgctgtcaggcccggaagatgacgcgggattcttaggcttactgaatgcttcacagcgtgtgccaagtcaggtattcagcggatataccactaccaccctgtcgggcaccatgttgaatagcgcttcaacgatttattatagcgatgacggcgtgccgctagtggccttctgcatcaacgtcgatatggacgtggtgttaaaacttaaacgcgatctggactatttactccacccctctgccgttgaaacgccagaaaatccgctgggtgatattcaggacaagtccctggatgatgttatttcgaaattcagacccacgggttctgaaagtaaaatcgatttcagaaagcgtgtgattgcggaaatacatgcacagggctttttcaagattaaaggcagcgtgaatcacgttgctaaagcgctgggcgtcacccgatacaccgtttacaactatctggataaattaaatgacaaagcctga

SEQ ID NO: 449516 - DNA, 807 bp, Serratia marcescens
atgacaaagcctgacaccgcagtgattcctttttatcaggttgatgctttcacctctcaaccttttggtggtaacccggcgggcgtttgcccattaacggagtggctgccagacgatgttctgcaagccatcgccaccgaaaacaacctttctgagaccgcgttttttgtgccggtagaggatggctatcaactgcgctggtgcacgcctacggtcgaggtggatttgtgcggtcatgccacccttgcagcttcctgggtgctgttcaacaagcttggttaccagaaagaggctatctgcttccacactcgcagcggcgtgttgagggtcaacaataatgggggggcgctctgcatggacttcccggctaaatcgtccacggagattgatatccctgacggattactcgacgccctcggcctcacgcgcggcgttatcggggtgtggcaatcggacgatctgattgtgttggtcgatgataaaagcctcatcgacgcgctaaccccggacttcagcaagctggcagagttcgacacccgcggcgtgctcgtcaccgccgctgataaccagtttgattttgtgtcccgctggtttggtccgcaggttggtgtgaacgaagatccggtcacggggtcggcgcacacgttcctcgccccgttctgggcgacgcgtaccggaaaaaatatcctgacagctcaacaaggcggcaaacgtaaggggacattgcgctgtgtagttcgcgatgacgggcgtgtggaattacacggcagagcacgcatgaccatcgaaggggtatttcagttgtaa

SEQ ID NO: 449517 - DNA, 1170 bp, Serratia marcescens
atgacagcaaacacaagactttccttgccagagacaatggctcttggcgggatgaccctcgctctttttttaggcgcaggcaatattattatcccgccgctggtcggtatgcaggcgggtgcgaatgcctttaatgcaggcttcggctttatcatcactgcagtgctgttcccggcgctggcgattatttcccttgccattaatgacggggatatctcggaattaaccaggcctttaggcaaatggccgagcctgatttttattggtatctgctttttaacactgggggtgttatttggcacaccgcgcaccgcgatgatcagctacgaagttattactgacggcgcgggaagctccctgatgcagaagattattttctccgccgccttcttcggccttgcgggcgtgacgctggccaggccgggaaaactgctggaaatagtcggttttttcctgtcgcccattaaaataagcgccctgatttttatcggcgtgtgcgcctggttacacccgattggtgagctcacgaccgcgaccaccgcgtatgcaacccgcgcgttcggcaccggcttcgtgaacggttatcagaccctggatgtgctcagcgcgctgtgcttcggtgccattatcactcatacgcttaaacaacgtggaattcatcatccgcgaggcatcttcacccattcagctgccgccgcctttatcgccgccgcaggtctggcggtgatttatatttgctatctgtcgatggggtcccacagctctgtgccggatgccaccaacgggatgcaggtgatgagcgcttatgttgaaacggtgcttggcttttatggccgggcgctgctggcggcggtcatcaccctctcctgcctggttacggcgattggcctgacgaccggcacggcgcgttattttaaccagaccaccggcgcgtcttacgggttgctggtgactctctccctgatggtgtccgccgtacttgcggtgctgggactgaattctctcaccgaaatggcggtgccggtgctgtgtgccatttatccggcggcgctggtcgtggtcgcgctgggcatcgtgcgaaaatgggtcgacgtaccaaccaatctgtatcaggtgctgttctacagcgctctcggggtggggatagtgagtctgtttgtaaaatcctga

SEQ ID NO: 449518 - DNA, 429 bp, Serratia marcescens
atgtttgattttgattcgcctgaacagtccctcatcattggttgggccagccatcgcctggtggtcagggcgtttgtcgacacaggcaaaatgtctacattggtccgttttgcacaggcaaacccgtactgcaggatgctctacctagcctataaccatgcagccaaggataaggccgagcaaaaataccccttgaatgtcgaatgtaaggcgtcgaaacagctggtctggcctaacttcgggctccattatcaatatcggttgaccgccaatttgcggttaactgacgtctcccgtcaacttaacatgtgtcactggccgctggctcgaatagctatcacgactttcagtgccttcatctgcagtggtgatattgaatttgagccacagcacctacccgatgatatcgctggaggcctggcatgttga

SEQ ID NO: 449519 - DNA, 1701 bp, Serratia marcescens
atgttgaaggctatcaaagaactgctggttggaacccgggctatgaaggcaaatcccacggcaagcattttagcctctcaatgtcctattggttattttatgtcgacatccgcagagcagcttttaagcacggcatctcgtcagcagtgcctccaacagctatgggagaacagcgcgctgcccaaagatctctatgaacatttctatctgcaaccattgaagcaactcgtcactctaatgcaggtgctgccggccacgcctcatggggaatatgccagggaaggagggctggttgatgttaccctgcagacggcaacgtatgcggtccgactggctaaagggcgcatgttgcccccgggggcagcgcccgaagagcaatctgctcagaatgttcagtggaatgccgtggtattttatgccgcactatggcactaccttccacttctcgcacagcttgaaggggagttgcagagtgggcagacctggttacctggtttgacggtaccgggtgaaccctaccgctttcgcttcaaggtttccttgtcagccccgacattgatcacaagtcagagcgcaatgattgcggcacgactactgcctgaagagcttattgaatggctgtcaacactaccggcggcaatacattcgttgatgacaatagcgtccaggcaaccgagcacattacctgcaattgacgatattactctggaggcggccaaactggctcgtggcgatggtttggccatatcgcttttaccgatatctaaccccgacacattggcaatagccataccatcagtggcgccggcgatagaaaatatcaccttttcagtacccgaggttgatttgcaaagcgcagtcagcagtacccattctcctctcgctcaagagcaactgccggtagagaaattagatcagcccaatggaaatgcaccgttagtcacggaagtgttacttagctcggctctggatgtgtcggccaacgataagcctttggctgagatgggattggcgccagaaacgatggctggtgtggaagaagatatgcaggctctgttgtcattaatggaggtagaggtgtcagtaccgacttgcctagttaaccaagaagagggaaacgcccctcagaaagagagcctccttcctgaagaaaagcaggagccggtacatgacataactattgtaattgaagatgactgtgttttaccaggcgtaacagaacctggacgattaaataatacggacacaacgactattttagaaaatcaacatttatcaaaggacccatggctagaagagaataacttggaagatactttgaatgcagaaaataatgtagggaacgcctttctacagtggttgagtcttggagtaagaaaaggggacatatccgtcaataacatagtttccagagcgcatattgtcagtggtttcgtgtttctctgtgttccagacatttttcatctgtatatcaaggaaaataaattggagcgtactgctaggaactcaatccaaaaggaatttgaaaaaatggggagacatcggatccgaaaaggacagcgattctttattggctatctttatgaaaagcctgatggggtgggcacatatcgtcgtatcaatggttacctgattaaggtaaatagtttatatggcgggacacgcataccagaggatagtcagttgctcgtgatcccgtag

SEQ ID NO: 449520 - DNA, 945 bp, Serratia marcescens
atgcaaaaaacggatgttaatgcgattgacctgaatttgttgaaattcctcggtgcactgctgcgcgaacgcagcgtcacgcgggcaggtgccaggctcggtctaagccagcctgcggccagccgcgcgttggggcgtctgcgtgtcttgttcaatgataaagtggtcgtgcgcacctcggctggggtcgaccccacacccagaatgctgacgctggagccgctcgtggaacgcatgttggaagatgcccgcagcattgtggcgccgatgcaattcgaaccctcgactgcgcaacaccatttcaccatcgcgtgcatcgatcatctcgcctcgatgatattgccaaaactgacggcaaaaatagaacgacaggctcccggggtaacaatgaggatccccgtacctgatggtgataacgtaaacgccgtcgcgcgcggagatgcggatatcgcactgggcatgtttgatggcgaacagttgcctgcggggttttacttacgaaaactctacgatgatgagttcgtctgcgtggttcggcgcggccatccgcttctgtcttcccgattgaccctggagaaatttgtcgcgtcatcacatgttgccatcaacatcgacgatcggggcagcacccctgtggactctgcccttgccggccaaggacaacgccggcgcatagcggtgcgtcttccgcacttcttggtcgcccctatgattgtggcgcaaagtgaccttgtgctttccctacccaaacggctggctttgttcatgtcgcaatcccttcctctcgaactcatggcattgccattagcgatcgcgccattctcgctatcaatggtctggcacgaacgcactcacggcgatcccgctcaaatatggctgcgccgtcaaattggcgcactcattgacgaccacgagcagacacaaggggcggaaaatacgcgatga

SEQ ID NO: 449521 - DNA, 984 bp, Serratia marcescens
atgaaaaaaagcacattactcgcaacgatgttgagcgcttccttgctgtttcccactttttcatcctttgccagcgagcttgggcaatcgcaacacggtgtggaccaactggcaggaaccggcgtgtatcgatacgcattgaacgatgtcaggatcaccgcattgtccgctggggccgtggatttggacctgcataagttattgcatggcgcgacgcgagcgcgcatcgatcaactgctggggcagcatttcctggaaaatcctgtgcggacttcgatcaacgtttttctggtcgaaacgcaagggcggcggatcctcatcgataccgggagtggcaaactgtttggtggcaatgccagccggttgatggaaagcctggcagctgcgggggtaaatcctgatcagatagacgacattctgattacccatgcgcatatcgaccatatcggcggactggttttggatggcgcaagggtgttccgtaatgcgacacttcacgtcagcgaaccagacctggtcttttacttgcagccggcgcaaccctcggtgccgcatgccgacaagatatcgagtgaaattgcagagaagatgctgcgcccatatgctgaggcgaaaaaaatcaagccgttttctggtacgtcggaagtgctgcccggcatcaccgctactgtacacagcggccacactcccggcagcaccatttttacgcttgagcgccagggaagggagatcagcttcgttggcgatatgatccattccagcgtacagttcgacgatccggccctgacgattggctttgataccgattcggcacgcgcacgcgctgtacgcgagagaacgttcgccaacctggcttcggaacgatcgctgatggccgctccgcatcttcctttccccggaataggccatctgcgaaaagctaaggagggatattcctgggtgcctgtcagttttgacgatcgcccgctgacgttgttaccttaa

SEQ ID NO: 449522 - DNA, 2880 bp, Serratia marcescens
atgcagcaggtgaacagcaatgaacgggatatcgccctggttggcatggcctgccgtttcccgggtgccgaggacatcgaaagctggtggcataatttgatcaacggtgtcgaatccctggttcgcatcgataacgatcgggatgatgccgtcgacaagggatatattcccgtcgccgcgcctgtggccggcgacatatctcgctttgatgcaggattcttcggtattagcgcgcgcgatgcgctgctgatggatccccagcagcggctctttttggaatgcgcctggcacgcgctggaaagcgccggtgtgacaccgggggaacttgaggataccgggctgttcgccggctgtagcagctctgactatttacgtcaggcgcaaggatccgagctactcgataaactcaatccttcgccgttcgagcggcaaataatgagcgataaagattacctcaccagcagggtggcctggcatctgggcatcggggggccggtgtgcaacgtgcaagccgcctgcgccacttcgctggtggcggtatacgaagcggtccacgccttgcgcagcggccgttgcaacctggcgttagcaggcgcttgtaccctaaggatcccgcaaaacgacggctattttgcgcagcaaggcatggtgttttccaccgatgggcactgccggccattttccgcagatgccagcggtacggtattcggcagcggcgtcggtgtggtggtgttgaagcgcctgagtgatgcgctggcggccggcgataacgtcgtcgcggtgatcaaaggcgtggcgatgaataatgacggcgcgcgcaaagtcagttttaccaccaccagtttgcatggccagcaacgcctgctgcgccaggcgatggacgatgcccggttgacgcctgaggattttcgcgccatcgaagcccacggtacgggcactctggccggcgatcccatcgaattcgaggcgctgaacggcgttttccgagagcatacgacacgacgggggttctgcgccatcggcgcagtcaaggctaacgtcgggcacctggaaacctgcgccggcatggcgggattgattaaggccgccctgcaagttcagcatggctggctcacgccgcagatcaacgttggctcaccgaatccggaaatggcattggcggagagtccgtttgagtttatctgttccgctcaacggtgggatcgcgaggatccgcgccaggccatcggcgtcagcgcattcggtattggcggtacgaatgcgcatgtcgtactggcgaggccgcctgtcatgccgccggcgcgaacaacggcctcattgtcctccaccgtcgtaccgatcagcgcacagtcagaacaggcctggcatcggctggtaaaacgctatctgcagcgaccgcacggcgaaaacgacgaacgcttggcctggagcgcgcaaagcggaagaaagtcgctgcgctatcgcggcaccttgcagatagacgatcggggcgcgttgagcgtgaaagaaaacatgatggatacggggaaagggcgcttgtcgatagttttccaattccctggccagggaagccagtttatcggtatggccagcgatttgatggcgcaggacgcgaccttcagaaaactgatgaacgacaaactacagatagtacaaacgcaagccgcactggatctctcggcgttatttaccggagaggccgcgcccgagtcgattaacgataccgcgttgacgcagcccgcgctgatcgccgtcgaaatctccgtggccgaactgctgatgcattacggggtcgagccggattgggtcattgggcacagcctcggcgaaattgcggcggcctgggccgcaggggtgttctcggtgcaagaggcgctggttttcgccgctcatcgtgggcgtctgatggccgggttgccgtccgggatgatgttggcggtagagctgagcgttcaacaggttcagccctggttgagtcatcagctatcgctggcggcagaaaacagtgatgacggctgcgtgctgtccggcaccgctgaagccattcgcgcttgcgaacgccagatgcgagaccgaggcgtgcgatgcaaagccttgaatgtttcacatgcgtttcattcgaccctgatggatcccattcttgacgagctggccgatgttgcgccgccgccgcgtgaatcggcgacgggggtacgttacgtctccgccttgctggcgaccgaagtcgaatgttcggcgcttgacggccgctattgggcgcgtcatgcccgtgaacccgtaaattaccaccgcgccttgcagcagctaccgcagcgcggcaagacgttgtttatcgaagttgggccgggttcgacgctcacggcgttggttgcacagctgaaatccgccggatctgtgaccgcggtgcgaaccttgccgcgtcgcgacgaagcgcagaatgaaggcgccgtatggatccaggcgctgcaaaaaatctggcgcgccagcgtcaacgttaactggcgccgcctgtggcaactaccgccttcgcgcatcgcattgccgatgtatcccttcgatccggcgcactggtggttgggcgaacgggacaggcaggggccgcaagccgagcgaacgccggcggcaacaagtcagtcagatcctcagatggcgcgtatctggcgcgtttggggggatgtgaccggcgtgaaccccgattctaaccactgtgacttttttgacgccggcggacagtcgctgatggcgctgcgcctgctggcgatgttggagcaagagtttggcaaggcaatagggatggccgattttcttaagcggcctacgccgtggggcattaaacaacagttggaccaggctggagcattcgagcaagattctcattaa

SEQ ID NO: 449523 - DNA, 606 bp, Serratia marcescens
atgaatagccaaaatcttgtgttaggaaccgaagatgagctaagcgaagctattggtgaaaaactagtctcacttacaaatgggaaattgatagtaaatcaaaagctccggcaaaatggttttggatacttaaagaagagaattcataacttctgtcaactcgcagagcgacatcccgtattgctaatcactgacttggataatgctgcatgtcccgagaaacttaaattatcttggttaaaagaaagaaaagagcccgacagttttatatttagggtagcagtcagagaaattgaatcatggatactagccgaccactctggattgaatactcttttcggtaagaaagcaggtaaattccctgataaccctgacctattgcctaatccaaaagcgactttactttcactcgcaggaaaagcaccaagagatgtaaaagaagcattagtagcaaaaaaagggagtactgccatacaagggatacaatataattcattgctatgcgactttgttaaacggaactggaatcctgaagaagcatctttgcgttcaaaaagtttagctttgacaattaatagtctaaataaattagcagagaatatttaa

SEQ ID NO: 449524 - DNA, 1155 bp, Serratia marcescens
atgaatataacccatctaaaattaaggaactggagaaatttcagggagttagacatgccactaaaggaaactacctggctattgggtccaaatgcttccggtaaatctaacttacttgatgttttccgttttttaagggatatctgtaaggctcaaggtgggggattacaaaaagctattgctgagcgtggagggattcctaaactcagatgcttacatgctcgacgcccaccagaggtaagaattgatatatccctctctgagaatattgatgacttagtcccaacctggagatacgtcctttcatttatgccagagggtaaaggtgcacaaaggactttaataaaagaggagcaagtattccataaagggaaaagaatcgttaatcgccctacagcagcagatgagaaagacaaagttagattgacgcaaacataccttgaacaaattcaaacaaatgctgactttagagaaatatcagactacctaagtaatacgacttacttacatctagttccacaattattgaaattcggagatctgattggtggaaaaattatcgaagatgatccgtttggacaaggttttctagaaaggctagcaaaaacgacgccgagaactcgagatagccgattacgtaaaattgaaagcgctctgagtcttgctgttcctcaatttaaacagttgagattttctcaagactctattactggaaggcctcatcttgaagctttgtatacacatcataggcctaacgctggctggcagcgagaggagcacttctctgatggtacattaagactacttgggttattttggtctatattagatggcaactcattattactacttgaagagccagaattatctctgaatgatgctatagtaagagaaattcccgctattttgcaacggatgcaaaaagataaaaaaaggaagcgtcagctaattataagtacgcacagtgaagctttacttagcaatcaaggtattgatgccagtggagtaatgatcctcgaacctagtgccgaagggacaagcataaggcaattgaatccaacagaaaaagatgcgattaaaagtggtttctctgttgcagaagtagtactgccaaaaactcgtccacaatttgctgaacaactaggattgtggtaa

SEQ ID NO: 449525 - DNA, 225 bp, Serratia marcescens
gtgctggcctatcaggacgatgccgtgggcgtgatgcgcgaagacgccgcgcgcggcggctttttcacctcggtgacgctgcggccgcaggtcacggtgcgcgacggcgacgatctgcaactggcgcaacagctgcatgagaaggcgcatcacctgtgctttatcgccaattcggtgaatttcccggtggcgtgcgaaccgcaggccgtgtacgcaacccgctga

SEQ ID NO: 449526 - DNA, 966 bp, Serratia marcescens
atgaaaagcacaaaacgtacccctagtcttcaaagatccccaaagatttactctttgaaccaatcccctctattcaagcttaaaacaagaaaaaaactatttgaaatcataggattatcaaagaagcaggctgataaactcatgcttgactctgcgtacaaagaattcgaaaacgacgcaggaaggaagattcaggaaccaattgcccagctcaaagcggttcacaggaagatcggcgttttattgagcagaatcgaattacccccttatattcactccggtcgaaagaaacattcaacactaactaatgcagaatcacataagcaagcaattgaacttctgaagctcgacattcacaagtttttcccctcgactagggctacgaaggtctacaaggcatttgttgagaaatttgagatgtcacctgatgtggcttatgtaatgaccaatctcgcaacctatgcaggaaaagtgcccacaggcagcccgataagcatggctatggctttttgggccaataaagatatgttcgacgagcttagcaacctcgcggcctcaaacaacttagtatttacggcatatgttgacgatgtagcgttctctggttcgaaaatcccaaaaggatttgccgcccaagctaaaaaatgtatacgttctcatggcctcacctctaaagacaagaaagagcgattttatccgtcatcagagggaaaactgcttacagggatagtaattcaggatggagaactcaaggttcgttgggcacacaatgattcgatcggaaaagaattcaacgaattagcgaaagctaaagacgatactgacaaaatcatccaccttgaaaaacttgcaggaagacttcacgcagcagggcaaattgatgaaagaatgaaaaataaagcccgttttttctctaaaaaactgaaagaagcaaaacaaagcttattgatacgctcaactaaatag

SEQ ID NO: 449527 - DNA, 834 bp, Serratia marcescens
atgttctatcatgttgttattgaagaaaaaaatcaaaatgcaagcagttatggggaacataagacagacttgactaaagaacagcttcttgctcgctttgtagagccatatgattacggaaagccaattacgctcaacggcaagactattgatctagaaaatattgttcgttttaccgtcaaagcaacagataacccgattgaacaatacgcattagagattaaacaccgccgtagaaattcagatttcgtattcatcggaggtccctccgatgtcgagcaagcagtgattgatgctaaagatgtttccgacgattttattacgggtcccgcaggttcaaagaaagaactcacagcgacgagaaagccccttaatgatcgtagctatgaccatagcaaagtttttattgttcatggtcacgatgttgccgcaaaaacaaaggcagctagatttgtagagcgtttgggttttgaagcagtcattcttcacgagcagatcagttcaggaagaacaattattgaaaaaatcgaggagtttactcaagttggctttgccatagtgctatacacacctgatgatgtaggcaatgccaaaggactatcagaaaatttgaaactccgggcacgccaaaacgtcatttttgagcatggctacctcattgggaagctaggaagagaaaaagttatagctcttgtagatggtgatattgagcttccaaatgacattagtggtgttgtgtttacaaagatggatgaagccgatgcctggcatctttctgttgccagagagatgaaacatgctggtttcacaattgatatgaataaactcatctag

SEQ ID NO: 449528 - DNA, 852 bp, Serratia marcescens
atggtttttggcatgcagatggtggatgtctttggcgccgggccgctcgccggcaatccgttggcggtgatcacgggcgccggagcgttgtcgacggaggacatgcagcgcttgacgcgttggttcaacctgtcggagacggcttttttgctgccgccgacgcatccccaggcggattaccgggtgcggatattcacgctggaccgtgaaatgccgtttgccgggcacccgacgctgggcagttgtcatgcctggctcactgcggaggggatgccgcgcaatgaggcggagatcatccaggagtgtggggcgggtttggtgagcattcgccgcgaggccggacggctgtgttttgccgcgccgccgttgattcgctccggggcgccctcagaagcggcgttggccgacgcgctgcggtttttggggatcgcgcctgaggaggcgctcgatgccgcctggatcgataacggtccggggtggctggggatccggctggccagcgccgaacgggtgctttccctgacgccggcgagaagctggccgcgcagagtggacattggcgtcgtcggcccacatgccgatggggacgcagccttcgaagttcgcgcttttttgagcgatcaccttggcgctatcgtcgaagatccggtcaccggcagcctcaatgcctcgctggctcagtggctgtttgcaagcggtgtggtcagcggcggctatatcgccactcagggccgctgtcgtgggcgcaacgggcgcgtgcatgtcacccgcgacgagagcggccggatttgggtgggcggcaatacgcgcactcaggtcgaaggtcggctgcatgggattggcacggcgtag

SEQ ID NO: 449529 - DNA, 1041 bp, Serratia marcescens
atgcgaaaaaaaattaataaatttttctcacgcgatattaattcaattattcatttagacgacaaaggttcagaacttttagcattgaaggtcaaagaaattgttaatgatgataagataaaactcttaaattttggcaagatgcatgaatctgattatagcagtatgtcatctgtttttgttgtagcaggagcaataacgacgggtaggaagctattatccgtctccagaaaacttagaagtcttgataagtcgtcttcaatttcatattttgtcggtttttcgaaattacaaaacgcacctagcctcgatcagctaagaaaagacttatgcatgggtggtcatgaacttatagttctcaggaactgcttcttaccaaggaccactgagaagttaaaaacctattgggaccttgagcatgaaaaactttctcgttttaaaaatgatgatcctttagatgattattaccatcaacaaaaaatctctgccgacttgctctcaagactaactttacttgaatcgcccataagtcctaatgaactgttcttgaaagatagcaatgggaaccatctgaagatccgggaaacatttgtcttctgggacaaactggccattgcaacagaagactcttctcaagcagatgttttttggactattcaaacactgcttcatgatttaagaatgaatgacggaaagggtttatctacaatttatcactacactcttttgagccctgtttgctttgaccgatacaatgacggcgttatacaagcatgcctattacggtcagcgtattcttcagagctaaattatactattgatgaaaattacagtcagcaaatgtgcgatataatatcttcggttgtcagaaattatgacaatgaacaaggagaaggatgccttgagttcttaatgtcgatctggattaagcatctaagaatactcgaccaccatctgctggaaattctatcgttagaaaatccaagcatgcctgactcggttaaattcttattgcaccagattaaacgtgatttctcttga

SEQ ID NO: 449530 - DNA, 1371 bp, Serratia marcescens
atgactaagtataaggtgtatccggagtataaggattctgggcttagttggtgtgatacattgcctctgcgatggaaaacatctcgacttcgatggttatcttatatttatgcaggggggaccccatcaaagaatgtaacagaatattgggataatgggactattccttggataaactcaggttccgttaatcaaggctatattattgagccatcagaatatatttctaaaggggcctataaaaatagtagtgctaaatggattccgaaaggatctttagttttagcattagctggtcaggggaaaaccaaggggatggttgcgcagttagggattgatactacatgcaatcagtcaatggctgctatcgtattttatgaaaaatcacaatcgcgttatatttattggtggttagtttcaaactatcagaatatacgtaatatgtctggtggtgacttaagagatggattgaatcttgaagttttgggaggcatagcgtgtccacaaccatcgatggatgaatcgcataagattgctagctttctcgatcacgaaaccgcaaaaatagataagctgatcgagaagcaaaagcaactgattgaactactgaatgaaaagcgccaggcagtgattagccatgccgtcaccaaggggctaaaccctaatgtgcctatgaaagattccaaaaatactctgttagggaaaattccagctcattgggggttaactccaatgagctttttagcagacagtattactgttggaattgttgtgactcctgctaaatattataaagatagtggtgttaaatgttttcgctctctaaatgttggtgagaatacaattagagagcaggactgggtctatataagtgaggtgagtaataatcttctgtgtaaatctaaagtttatactggagacatacttgttgtaagaagtggacagccaggcactgctactgtggttagagatgagttttgcgggtgtaactgcatagatcttataataatcagaaggtcaaaaagatttgactccaactttatatgtatgcaaattaactcgccctttgttaaaaaacaagtcggtatggcatctgatggcgctatacagctgcattttaatgtggaagttgcaaaaaagttagttcttaccgaaccacctaaagaagagcaaagtgaaatattcaatttcttatctcagaagaataaatattttgatgagttgatgaagaaatcagaacttcaaattagtcttctccaagaacgccgcaccgcccttatctccgccgccgtcaccggtaaaatcgacgtacgcgactgggttgcacctgatatgcaagacgctgaggagccacaggagaccaccgtatga

SEQ ID NO: 449531 - DNA, 756 bp, Serratia marcescens
ttggtggatctcaacgctgagctgccgcctcaaccgctcaccgccacgctgaaccgcctgctgtccgcgttggtcagaaacaataatctggtggtctcccgcgataccctgctgacgcaagtatgggaagcgcacggccaggtggcctccggcaataacctcaataacaccatttccatcctgcgcaagatgttcgccgccatgggcgaggacgacattatcgtcacgttgccgcgccagggatttatgttcactgccgcttcgttgaagacgacggacagtctggctcccgtagcgctcgagacgattcgggaagtttctgaggtgcagaacttgggcgaaagagggggcgagtttgccccccgacgcagtcaggcgcgtggtaaacgcattggcgttgccgcactgatgattgcggcgctgggcagtgcgatatgggcctggaacgatacaggatatgagccggtgagaacgctgtctgtcggtaaaattggggagtgcgaggtgaaattcatcacgtcttaccacaaggtaacacccgaaatggttgatttaactcagctgaaagcgctgctgaagaaaaacaataatattcaatgtgatgagccggccaccttgctctattacgacagccggtcgatcgttaaaggtacccacgaacgatttaggaactcatatttttattattgcccgcaggtgaaaatggccggtgccaaagcgcaatgcgagaacatccatgaaaatcaggttttttaa

SEQ ID NO: 449532 - DNA, 468 bp, Serratia marcescens
atgtggcgcagacgttatgttctgctgagcgccttggccctggcgatctgtgcggtgtccgcttattttttgtttatgaaacccggcattccggaatgtcgtgcgacggtgagggtgacgaaccaattgaaggatgccacattgcagcgaatattgctggtgagcgttgtgcccgagggggcggggcaagcgataatactgctgaacggcagtctctacagtaacggcgtgcgatacaacatcgacagagcactcgtggtcaattatcaacgcagaggcagttattacaacatgaagatcagagaaaaccgccttaatccgcaagactcagtcgcgagcgagacgctgagcaacctactacccgtggtggggcagcagttgcatttgcgtgtggagcaattggataagcatcattacctgtttgttaacaattattcgccgagctttgtctgtactagcagccggtag

SEQ ID NO: 449533 - DNA, 543 bp, Serratia marcescens
atgaaacgttggttaatgggctttcgggcttcttgcctattggtattgctgcttggctgcgtcggttcggttatatctgcaccgcaagggcaagggcgagtcaatatgcaaggcgccattatcgatactgcctgcgccatcgcgacggagagccgggagcagattattgaaatggatatcacgccattttctgatattgcgcgcggtggggaaggtaaacatgtgcctttcagtattgaattagtgaactgcattcttgaacgacaaaataaaacattgccggactggaggcaattccaggtgacctttgacggtcacgccgatggcgagctgtttggtattggtggtgatatctccggcgtggcgctgagaattaccgactcggcgggaaatatcgccaggccaggcattcctttgccgttggtggatattttgccggggagttaccgtctgaattacgccatgacgttaatcagcaatcagcggccattgaaggccggcagttatttttcatcggtgcgtttcaaaatggattattactga

SEQ ID NO: 449534 - DNA, 2535 bp, Serratia marcescens
atgatgttgtcgcctgccgggaaaccgtttcgtttgcatattctgagcgcctgcgtggcgttgggctgcctgatgggcaaagtcggcgcagccgaggacattcagttcaacaccgacgtgctggacgtgaacgatcgtaaaaacatcgatctgagccagttctcgcgcagcggctacatcatgcccggtcagtacagcatggtggtgcatgtgaacaagaacgatctgcaggagcagccgatcgcgttttacgcacctgacaatgataccaatggcagccgcgcctgcctgacgcctgaactggtggcgcaactggggctcaaggaagcaaagctgaaaacgctgacgtggtggcgtgacggcacctgcctggatgaagccagcctaccgggcatggaaatgcgcagcgagctggccacctcgtcgctctatctgagcatcccgcaggcctacctggactatgtctcggaagactgggatccgccgtcgcgctgggatgaaggcattccgggcgtgctgctggattacaacctcaatgcgcaggcccagcatcaacagcagagcggcacgcggggctacagcgtcagcggcaacggcacggcgggcgccaacctgggggcctggcggctacgcgccgactggcaggcgaacgtaaaccaccaaagcggttcagatttgccgacgcaaaagcggctggactggagccgttactatgcctaccgggccgtgccggcgctgcgctcgaacctgacgttgggtgaggactatctcgactttcgcatgtttggcagcttccgtttcggcggggtgagtttgcgctctgacgacaacatgttgccgcccaacctgcgcggttacgcgccggaggtggtcggggtagcgaagagcaacgccaaggtgaccgtcagccagcaggggcgggtgctgtatgagaccacggtcgctgcggggccattccgcattcaggatctgaacgatgcggtatcgggtgatctggatgtgcgggtggaggagcaggacggcagcgtgcaggaattcaaaatgagcactgccagcatcccgtacctgacgcggccgggctcgctgcgctacaagctggcgatgggcaagccgtcggatatggatcaccgttatcaggggccgctgttcggcaccggcgaattttcctggggggtgagcaacggctggtcgctgtacggcggcgcgctgctgggcggggactacaacgcagcttccgtggggattggccgcgatctgatgctgttgggggcgctgtctttcgacattacccaatcgcgcgcccgcttgccgcaggatgagcagacgctgagcggcaagtcttacagcctcagctactcgaagaccttcgacgagctggacagccaggtgaccttcgccggctaccgtttctccgaagagaactttatgagcatgagcgagttcttgtcggcacgtcagtatggggagcgtttcggcggcaacaaggagatgtacaccatcacctacaaccagcaactgcgcgagctggggttgagcgcctacctcaactatgagcaccagacctactgggatcggccatccaacgatcgttacaacctgacggtggcgcgctatttcgatctggggcggtttaaaaacctgagcctgtcgttgacggcgtaccgtaaccgctacaacgagcgcaatgacgacggcatgtatctggggctgtcggtgccgtggggcaacggtgccacgctgagctacaacaccacggtgaaccgtgatgacaacacccaccgggtggggtactacgatcgcatcgacgatcgcagtaactaccagctcagcgccggcagttcgcgcagcggcgccaacctgagcggttactacaaccgcgatggtgatatggcgcggctgagcgccaacgccagctacctgcaggacaggtacagcgcagtcggcggctcgctgcagggcggcatgacgctaacccccgaagggggggcgctgcaccgcagcagcatcgcaggcggcacccgattgctgctggataccgaaggcgtggctggggtgccggtgcgcggctacggcagcgcggtggcgaccaaccgctggggcaaagcggtggtgtcggacgtcaacagttactaccgcaaccgggccagcatcgatctggacaagctcggcgacaacgccgaggccaccaaatcggtggtgcaggcgacgctgaccgagggcgccatcggttatcgcaaatttgaagtgatcgccggtgagaaggcgatggcggtgatcaagctggcggacggcagtgaaccgccgttcggtgccacagtgctgaatgcccgtaagcaggagaccggcatcgtcaatgacggtggcagcgtttacctgagcggcatcaacgccggggaacgcatgacggtgcgctggaacggcgctgaacagtgcgaagtgcacatgccaacaccgctgccagccgagatgctgacagccaatttactgctgccgtgccgggcgttaagcgccggtgcgggcggcgaagaacactga

SEQ ID NO: 449535 - DNA, 363 bp, Serratia marcescens
atggcaaggatgaatgatgaggcgcatgaaagggtctatgtgctgaaagagctgcgttactacgccgcgttgggcgggttggcgctgatggcgccgctcagcctgacgacgttactgtggctgctgccgctggcggacgtggataacccgcagctggtgaaagctcagggtgtgagcgggctggggctgcggtttctggacgcgggtggtgaagacgtgcggctcggcagccgcggcaagccgctgtggctgacgccgggcagcgatacgttgacctaccaggtggcaccggaacgcaccgccgcgccgctgatggcggggagttaccgtgcggtggtggattctagcctgagttatgactga

SEQ ID NO: 449536 - DNA, 498 bp, Serratia marcescens
atgaagagaaggaacagacggcatcgggtgctgggggcaatcctgctggtggggattttgtctcccgcctgggcagggacgccgctgaccgtgaaagttaccatactggctccgctgccttgtgagatcaacggcggcaaacccattgaggtggatttcggcgacgaggtgttgaccacgcgtatcaatggcagcaattacaagacgctggtggactattccatcagctgcaagaacccgggaaagaacgccatgatgatgcagattgcaggcacaccgacgacgtttgacggctctgcattgaaaaccaattttggtggattggggattgtgttttttcaagatggggtaaaagtcaagctgaacagctggcagaacttcacgtattcctccgggaatccaccgaagctggaagcggcgccggtaaaattaggggcagccacgttgccggaaggggcgtttaccgcctctgccacactgcgcgtcgattaccagtaa

SEQ ID NO: 449537 - DNA, 495 bp, Serratia marcescens
atgagaaaagaggcgatcttgatgttgtgctgcgccatcgcgttaacgggctctccggccaggggcgcggtggaggccggcatgacattgaagggagggctgcgcgcaccgcctccctgcacgatcagcgacggtggcacgctggcgatcgaattcggcgatcgggtcggtatcaacaaggtgaacggtgagaactaccggcagaaggtggattataccatccgctgcgattcgccgggcgcactgccgtgggaggtggtgttgatggtcaaagggacggcgaccgccttcgacaagacggcggtgcaaacgaacaaaaccgatctcggcatccggctttatcagaatggcgcctcgctgctcatcaacagcgcgattaaggtcgatccggcgaatccgccgcggctggaagcggtgccggtggccaagccgggagcgacgctgacggaaggggcattctccgccacggcgacgctgcaggcgaactaccaataa

SEQ ID NO: 449538 - DNA, 795 bp, Serratia marcescens
atgaaaccgtttttgcttttttttatgctgattttttcacttcaggctaaaggtagctgggagttagacgtaaaatactcaccatcggttggccagtatttagttaaagttataagatgggacgtggacgactccagcccgaaccctatacgtttctgttatagccctgttacgggcaatgatagtaggtgccgtattgtaatatactataactctctcacccatatgagctggtttaatgactcattttacttaggtcgtgaggcatcagacttaaaaacgatgggggagttagccgatcttttcgccaggaaaggctatttaaatcaggtgttaaaatcttacaatacgtctgccttagaacagaactgctatgcattgggatatatacaaaacatagggcaagctgcaccaatagacggaggggctctgaattgcacgatggcggaaattatccccacatactgcagcattgaggagccctatattgagttgaagcacggttcggtaacgagtaaaggggtgaatggccataccgtcagcagttcctttagagcggtctgtaataaagatttcaaattattgattgtcgcacaggatggaaaaggcgatcttcagctgggtggtgggatcaccagtcacttgaaagtaaacggcgacgatctcggtattgggcataaggcggtggtcggtccggcaggaaagacgtttacattaagttcaacgctgagcggttcccccagcggcgtcggtgaatttcaaggttcgaaagtgataatgctaagtatcccctga

SEQ ID NO: 449539 - DNA, 309 bp, Serratia marcescens
atgaaatcactcaatatcgtcatcagtgccaacggcgtcaatgggcatacggcgagcgcgcagattcatgcctcatgtaatcaagactactcggtggtcatttggacgtttgataaaaaaggcacagtccccttagggaatgggttaaacagcacgttaaagattaacggtgtcgatctgggtaacggatatagtgaaatgcttggagcgatggagaaaacactgaccttaacctcaacgctaagtggttataaagctggtgtgggtacctttcagggttcaaccgtggttattgtggattttccatag

SEQ ID NO: 449540 - DNA, 855 bp, Serratia marcescens
atgaaaaggaagggttgtaaattaggtgtactaatgaaactatttaaatggttgatgcttgttcctctgctttattctggttcggcggcggctgcatggacgctgaatgtgcagtacgatccgagggatgataataagagggtattttatgtcagcgtggtcagttttgagcagaatgatccctctcccaaccctctgtatagagaatgtggagttttttcggctcagcgtcttatgtgtgaaatggccatagtatatacgagttctttatcagcgggcactgctttcacggaaacgatgccggttcctggggcagagcatgcccaaacgatgggggagttggcgaagatatttgctgatgccggttatttaaaccgagtatttaaatcacagaatgtgttgtttcaacctgaatcatattgctttctccttgcttatcggaaagtgcatacctcaggttcaggctttgtcagactgcccggcgggagcagcgtgtgtcagccgtctgagttgattccgaccttttgtgactttaccgaaacgtctcttgaattaaaccatggccggttgacgcccgatcaggtcaatggccatacggcaagcgcgcaaataagcgcgagctgcacgacaccctactgggtccggattaggtctgccgacaaaaagagcgtgctggaaatgggggaggggttgaaaagtgatttgaaagtcaatggggtcgatctggccgaggggatgagcgtcaggctcacgccaacggcgcaaacgttcaccatcacctccacgctaaacggttatagccagggcgaaggggagtttcagggatcgacgataattattcttggtttgctctga

SEQ ID NO: 449541 - DNA, 540 bp, Serratia marcescens
atgaaatcaatgaaaattatcatcgacgatgaaaaccattactttgcagcagggttaaaacattgtctcgtaaaatatgcgcaaggccacaataaagcgctgaacttcttaacgccgggctgtggcgagcggccagacctgttgctggtttcggcagcgcgccgcacccggcattggcccgcctgcgcgggaacccgtacggtgacgattaaagcgcggcgcagcgtcccggtgagcgacgcgactctggtcttgtaccgaatggacgataaaagcagggtatttgaggtgttagccgaggcgctgaaggacgaggtacgcccactctgcctttttcccagccaatcgctgaccccccgtgagcggcaggtagtcgggtatttgcggcgcgggttggatcaatcgcaaaccgccagagtaatgggcgtgagcgtgaaaacggtgcacagccataaacgttcggtgatgggtaaactgatgttgaaccgcaatcatgagtttatttactggctgctatcgcaaaaggaagactattcctaa

SEQ ID NO: 449542 - DNA, 1209 bp, Serratia marcescens
atgatagaactacctgcatcattgagtttagataagatggattccttcatcagaagggtaaagatggcagatgatgaccaacctttgctccttcctgtgggtaagagaaactctgcttttggagggatagccattgctgtacagtctattaatacttgggcgaacttaagtctgaacaagaagctggttttaaaagagtcatccatgaaggacgctgactactttacagacttgatcaacaccccacacaaattcaccgctgcaatgatgtcgaaagagatttcattttctggctctcccaatataagtataagacgtgatataaatatacttgccaaagaggcaattgagtcacaatcagacaatctttttggtcaacaacatggaaggctctgctggtattcgtttgttgatcacagcacaaaaggatttgatagcaacttttataacaattcaccttctgttcattctgagccaaaatcctatgaagaaataagaaacataataagcgcaatggttttgaaatcatcaactgttgcaggaggagctatatctcttgacgatgatagtattgacgatattggaagaattttttatgaattatttgttaacacacacgaacatggcagtcgtgctctaaatagggataagtggataaaaccaggaaacagattaatatatacgtatggaataaacttatctgatgaagcaataaataattacctcataaatgatgaagttctttctgagtacatatcaagccttaaacaaaccaacgtttcttcgcgaaggttcatagaaataagcattattgattctggtttaggctattgtggccgatggttggcagatcactctgatgctggctcaactctagacgttgatgatgaatatacgataataaagaaatgcctgaaatttagaagttcatctacaaataatgatgtaaaaggaaatggtttgccttcagttatggcatcattaaccaaactgaatggttttatgaagataagaagtaatagagtctcaatttatagggatttcaatactatcccatatagttttgaagagagcgatgactgtaaatttttagattggtcaactaaaagctattgtgatgagaatataactgaacattctgaagttcgcggagtttcaataacaatccttgtaccccttatcgataaaaataattccaaggaaaaataa

SEQ ID NO: 449543 - DNA, 3081 bp, Serratia marcescens
atgacatttaccgatctgttcgtgcgccggccggtgctggcgctggtggtcagcaccctgatcctgttgttcggcgcgctggcgctcagccaactcccgatccgccaatacccgctgttggaaaactccaccatcaccatcagtaccgactatcccggcgcgtcgtccgagctaatgcagggctttgtcacgcagccgatcgctcaggcggtgtcgtccgtcgagggcgttgactacctttcttcctcctcggtacaggggcgtagcgtggtgacggtgcgcatggcgctgaaccgcgattcgacccaggcgttgaccgaagtgatggccaaggtcaaccaggtacgctacaagctgccggagcaggcttacgatccggtgattgagcgctccgccggtgaagctaccgccgtggcctatgtcggcttttccagtaaaacgctgtccacgccggcgctgagcgaatacctgacgcgggtggtggagccgatgttcaccactatcgatggcgtcgccaaggtggaagtgttcggcgggcaaaaaatggcgatgcgcctgtggctggacagcgatcggctggccggccgcggcctaaccgccgccgacgtggccgacgcggtgcggcgcaacaactaccaggcggcaccgggcaaggtgaaagggcagtatgtggttgccaacgtgcgggtgaataccgatctcaccagcgtggaggagtttcgcaatctggtggtgcgcaacgacggcaacggcctagtgcgcctgaaagacgtcggcaccgtcgagctgggcgcggcggccacggaaaccagcgcgctgatggatggcgaaccggcggtgttcctcggcgtcttccccacgccgaccggcaacccgctggtgatcgtcgacggcattcgtcacctgatgccggcgatcgacaagatgcagccgccgggcgtgaaaatggcgctggcgttcgaaaccgcacgctttatccaggcctcgattgatgaagtggtgcacaccctgatcgaagcgctggcgatcgtggtggcggtgatctacctgtgtctgggatcgctgcgcaccgtgctgatcccggtggtgaccattccgctgtcgatccttggtgccgccgggctgatgctggccttcggcttcagcgtcaacttgctgacgctgctggcgatggttttggcgattggtctggtggtggacgacgccatcgtggtggtggagaacgtgcatcgtcatatcgaagaagggaaaacgccgctggcggcggcgatgatcggcgcgcgcgaagtggcggggccggtgatcgccatgaccctgacgctggcggcggtctacgcgccgatcggcctgatgggcggtctgaccggcgcgctgtttcgcgagttcgcgctgacgctggccggcgcggtggtggtgtccggcgtggtggcgctgacgttgtcgccggtaatgagttcgctcctgctgccggccaaacagagcgaagggcgcgtggcgcgcgccgccgagtggttcttcggtggcctgacgcggcgctatgcgcgcgcgctggatttttcgctgcaccaccgttgggtgaccggcgcgctggcgctgctggtgatgatcagtctgccgctgctgtacctgatgccgcagcgcgagctggcgccgacggaggatcaggccatcgtactgaccgccatcaaagcgccgcagcatgccaacctgaactatgtcgaacgctttgcctacaagctggacgaggtttacaaccgcatgccggaaaccgaaagccgctggatcatcaacggcagcgacggcacggcgtccggcatcggcggcatcaacctgacgctgtggcaggcgcgccagcgctcggcgtcggcggtgcaggccgatctgcagcgggcggtgaacgacgtcgaaggcaccagcattttcgccttccaactgcccgcgttgccgggctccaccggcggactgccggtgcagatggtgctgcgtacgccgcaggactacccgcaactgtaccgcaccctggaagaggtgaagcagaacgccagaaacagcggcctgtttatggtggtggacagcgatctggactacaacaacccgctggcggaggtgcatatcgatcgcgccaaggccaacagcctggggatccgcatgagtgacatcggcgaatcgctggcggtgctggtgggagagaactacctcaaccgcttcggtatggacgggcgcgcctatgacgtcatcccgcagagcctgcgcgaacagcggctgacgccgcaggcgctggcgcggcagtacgtccgcacgcagggcaatacgctggtgccgctctccaccgtggtgtcggtggccgttaaggtcgaaccgaacaagctgacccagtttaaccagcagaacgccgccaccctgcaggccattcccgcgcccggcgtttcgatgggcgaagcggtggcctttctcgaacggcaggccaatgcgctgccggccgaatttagccacgactggcagggggattcgcgccaatatacccaggaaggcagcgcgctggcgttcgcgttcctggcggcgttggtgatcatctacctggtgctggcggcgcagtatgagagcctgaaggatccgctgatcatcctcatcaccgtgccgctgtcgatctgcggcgccttgctgccgctggcgctgggttacgccacgatgaacatctatacccaagtcgggctggtgaccctgatcgggctgatcagcaagcacggtattctgatggtggagttcgccaacgaactgcagatgcatcaggggctgacgcggcgcgccgcgattttgcaggcggcgcaaattcgcctgcggccggtgctgatgaccaccggggcgatggtgttcggcttgatcccgctgctgttcgccagcggcgccggggctgccagccgcttcggcctggggctggtgatcgtgtccggcatgctggtgggcacgctgttcaccctgtttgtgctgccgacggtgtacacactgttggcgcgcgatcacgcggtggcgtcgccccggcagcgtgagttggccgccgcgcaaaaggcgctgacggaataa

SEQ ID NO: 449544 - DNA, 135 bp, Serratia marcescens
atgccgagcgccatcatcacgccggcgagcgccaatatcgcgttcatctgcaaatgcgcgccgacgctgccgaccgctgcgcccaaaaccagcagccccgcactgatccatggtgccaaaatatttaccctctga

SEQ ID NO: 449545 - DNA, 240 bp, Serratia marcescens
atgttcaatctcgatacgttagggctcgcggccactgtggcagcgagcgtgatcacgcccgattatcaggcaatactcaatacgctgaccggttatttccagcagatttatggtgacgacgtctatctggcgtctatcagcaaagatggtcagctgctggcgatctatgcgcacgggatccatgactcgaacaacatgacgatcgccgtctataactctttgagccccgcaacggcgtag

SEQ ID NO: 449546 - DNA, 249 bp, Serratia marcescens
gtgatttcaatgcgctggattaacctttatcggattttggccaacatactgatggataaaataaaattacggagagtcactatttgtcaggcggattgtcagtgggcgagactattgcaggtgtgcagttatggccacacagagataaacgatgtgaatgaaaaacggcagccgcccgcaggcggccgcaactattttttctcgatggggacaaccagcagatcgacgttcagttcgttgatcgcctga

SEQ ID NO: 449547 - DNA, 213 bp, Serratia marcescens
atgttcccattcagtatagccaacgccgcggcgggcgccgaaagcgatgaaaaaggacgccaatacgcatttaacgtgcaaatactgtccgtttatatgacgcattttggagaaatctgcagtgtcgaagtagccacgttttatcagatttcacgtagcgcgatcaaaaaaaacaggggatttctggccaatatcggcaggtatgcgccttag

SEQ ID NO: 449548 - DNA, 921 bp, Serratia marcescens
atgggtttttccttcgcggatcaggttgctgaccgccgccgtcgccgtcagcacctcaaagattgccactcgcccgccgccgggccgcctcatcagcttttgcgcgatcaccgcctgcaggctgccggccagttgggcacgcacatagggtttctcttccgccggaaacacgtccaccagccgttccaccgcctgcggcgcgctgcgggtgtgcagcgtcgccagcaccagatgcccggtctccgccgcggtgagcgccagccggatggtggcgatatcgcgcagctcacccagcaggatcacatccggatcttcacgcagcgcggcgcgcaacgccgcatcgaagctgtgagtgtcgcggccgatctcccgctgctggatcagcgaacgtcggctgcggtgcaggaattcgatcggatcctccagcgtcaaaatgtgccgcggctggtgccggttgatctcgtcgatcatcgccgccagcgtggtggacttgccgctgccggtggcaccagtgaccaggagaagcccatcgtcgcgccgcagcagcgccgatacgatggccggcgccgccagctcggcaagcgaaggcgcttgcccggcgacacgccgcaatgcgagagacatccccacgttttgctgaaaaacgttggcccgcagtcgctccccacccggcctgtgcagtgccagatcgacctgccccagccgcagcaggctctcgcgctgctgcgcattcagcaatccgtcgcagagggtctgcacgccttgcgccgtcagcattggcaccgctgccagcgggtgcagttcgccgtcgatgcgcaacatcggcggatggccggcacaaaggtgcagatcggaagcgttatgctttacactaagggccacgaattcatcgatatccatatcactctcctgggtcaataa

SEQ ID NO: 449549 - DNA, 363 bp, Serratia marcescens
gtggcgggcgcgcttgagcgcgctgtggcggaggctgtgcgcatgaagggctgcgcctgggtaggctgcacgctattgttggtttgggcgccgtggagccaggcttctttaaacagcgcacgccctgacgctacactgggggaaaggatggcgacgacctgcaacgcacggggggttgagcttgcggattggggtaacatcgccgcggtggtgcagtccgctcgcctttgccggtggcggggcgacgtgcggcagtggtctgaacgcgcgccgatttacgtaggcgtcggtctggttcagcatcgtggcgaccggttgacgggaaccctcgccgcgcgggcgctggcggaaaaaacgccataa

SEQ ID NO: 449550 - DNA, 240 bp, Serratia marcescens
atgcgttcgttgcgagtttgtaacgtgatgatttatttcatggcacgcggggagaggctgaccagaaagcaggtgtttggtaacaagggaaaccccgtttatgcgatttggccgattgggaaaatgtggagtgctgcggttcacaacggtgaggcatggcagccagtaaccaattctcccgcaactgacgagcgagcggcctacgattgtgtaatggagcacttctacaaaagtcactaa

SEQ ID NO: 449551 - DNA, 156 bp, Serratia marcescens
atgaaagtagagaccatcaactacgttatagaatcctatgagcagcagcgggagcaagagaacgccattgttttgctgaaattgctgacgctgtcagagaaggataaagcggaagggcgcgtgttctcaaaggaacagctgttggatgatttttaa

SEQ ID NO: 449552 - DNA, 903 bp, Serratia marcescens
atgaaaaattcgccagttcttgagttgcagggtttggctgctgacgttagtaacgacattgttggtgttttaatcaaagccaaaatgattgcagtgaaattaaacctccctgaattggcagaatggtttgattgtgaacttgatggctatcctgatggagttgaactccctgattatcgtatagggcaggggatagtaaaaggctggaatccctatcacggatggataaatgtccaatatggtgatactaagccagaaattattaaaaaaattcaggaatatggtttaagtgaatctatctcttcgctcagaaatttacgtgatgcggatgatagtgttaggttagtaatgcctgctgagcggataaaaaggattttcccttcaagaagcgctccttcagaaatatgttggtttattaatgcttcaaaattggaatgtatagtaactactgtaagaaatagaatattaacatgggccttggagttagaagtaaaaggtattatgggcgaaggtgtcgtgttcagtgcagaagaaaaagaaattgcacctgcaactttccacaatactaatattttttatggttcagttcataattcagggactattggcgcaggtaatacaggtaacattcatcaaaataactcagcgctggttaaggacttcgaatcacttgctctgactcttcaaaaatacggtttgattgaagaggatataagtgatttatctagggttgttagtgaatcaccactaccaaaaaacaaaaatgaagtggaagaatgttttggtgattggattggcgttataactgtaaaagcattgaaaggcggtcttgctataccaggggcaagcactcctagtattttaataaatgttttatgtggttactttaatctacaagattag

SEQ ID NO: 449553 - DNA, 549 bp, Serratia marcescens
atgaaactgaataaaattatgctggccgcagtgatggctatgggtgtctcctctttcgctaacgcggcaaatcagggcagcggttccgttaccttcaccggtgaaattatcgatgcgccatgttctattgctgctgacaatatcgaccaaaccattccgctgggccaaatttctaacctgagcctgaaagatggccgtgagtctgacgtgaaggaagacttctcgatcaaattggaagactgtgcttttgcaacggctaagacagtgaaaaccacctttaccggtgcaccgggcggcactaccggcgctgacaagaaaatggttgcttttggcagcggcagcaccgctaaaggcgcaagcgttgtgattaccgataacaataagccaattgagctgggcactgcgactgccggtcagctgctggatgtcggtaccacccaggctgagctgaaattccaggccttcctgaaaggcaatggcggcgctctggacaccatcgttccaggtgccttcaccagcgtggttaacttcgccctggattatcaataa

SEQ ID NO: 449554 - DNA, 546 bp, Serratia marcescens
atgtttcggaaagcccatatcttagtggccccttccctgttgatcacattttttattacccagccatcggtggcgcagagtgctgtgattgggtggggaaaggtcaatatggaaggtgccattgttaatgccgcgtgcgctattgaagcggcaagccgcgatcaaaccatcgatatgcaaacattaccggtagagcaaattgcccgtgagggtcatggcctgaccaaagcattcagtttgcggttattaaattgcagtgtgtcggacgtggggggaatacagcctggtcgccaacattttcaaatgacctttgatggtcaaaccgataatgggttattcggagtgacaggcgaggcaaagggaatcgcattacgcatttcagacagcgtcggcaatattatttatcccggttcggccatgccaattgatggcaccgcgataaaagagaattacgtaaattattccatgcaactggtggctaatcgccagattttgcgtgccggggattatagaaccgctatccgttttaaattgaattactactga

SEQ ID NO: 449555 - DNA, 615 bp, Serratia marcescens
atgcaaagaaaggacgaaggggatcgcaatgtgaagggcggttttttgaagcggcgaagcggcctgggcgtcatgttggcgctgacctggttgatggccggttccgcgaaggcggaagaagggaatcacggcgtgttattcgttcatggcgcattgacggagggggcttgccggctggatatggcctcggcatatcaggatgtttggctgggggaagcgacgacgggcagcctggccaacgtcggggctcgtactccgccggtcgctttccagcttcgtctgagagactgcctgcgcgcgggggcggcaacacaggatcaacgccggggcagccaggtttgggatgcttaccagccggctgtgacggtgagtttcaatgcgcctgcggatgcggataacccacagttggttaaggtgcgcggggccggcgggctggcgttgcgcttagtggatagcgaaagaaacgatgtgcgcatgggcagccgcagccggccacagttgctggcggtggggagcgacgcactgaatttctatgtgatggcggagcgcacgcgcgcgccactggtggccggcgcctaccaggccgccattgactttcggatgaactatgactga

SEQ ID NO: 449556 - DNA, 558 bp, Serratia marcescens
atgggcagcgcatggcgaagggcgggggaaagtctgcggcttttctgcgccctggcggccaccatgacggccgcctcggcgctcacggtattggcggtgttgttgctcagccaaagcgggtgggcggcgacggcgatagtcacggtgaaaggggtcgttgtcgctaagccgaaatgcgaagttaacggcggccaggatattttcgtgaacttcaatgagctgatcaccaccaaaatagatggcgaaaaatacggcaagcggccgattccgtacggggtgagctgcagcggcaatacgtccgggaccgccgggttgttgaaagtgagcctgcaggggctggggccggattttggtgacggcttgttacgtaccagtaataacgatttggcgattaagctgctgcaagagaacggccaacagctgcggttaaatggctggcttaattttacctacccgatcgtaccgccgttatatgccgtgccggtgaaacgcagcggcgccacgctgaaaggaatgggcttttccagtagcgccacattagtcgtagaagttcaataa

SEQ ID NO: 449557 - DNA, 528 bp, Serratia marcescens
atgaagataatgaatatggaaaaaatgaaggtgatgcgtttctctggcatagcggcggtgctttgcgtgggcatgctgaacctggagccagcgcaagcggtgaacgtcaagttcaacgggacattggtggagcaaccgacctgtacgctgaatgatggcaaagacattagcgtggattttgccaacgtcgtcattaataaaattgacggcgtcgcgtacaaaaaaatggaaatcccctacagcgtttcctgtagcggcggttcgccgaatgccggcgatctgaaagtgaacctgagctttgcgccagtgtcctggggcgatggcaaaccgctgcaatccagcgtgggcaatctggggctgcgcatcacgcaaggcacgggtgataccacctacgtcagcgataccaaactgatcattgatgccgctaacccgacgaaactgtacgcggtgccgattgcgcgcccaagcaccattttggtgggggccaattttaccggaacggcgacgttaactgcagagtatgagtga

SEQ ID NO: 449558 - DNA, 870 bp, Serratia marcescens
atgagaaaatttttcttatttttaaccgtgcttttcttctgtgctgaaaatgctaacgctgcatttcatgaggctatcgtaaaaacaacgcttgtctcagggataaattaccggatcgatattacgccgatcagtgtttcgcccgcattatcctataccaatatgtgtaatgacacatacagtcggggttatccgtgtgtatatggtatacacgcctatgcggtaactgctcaaggaactagtagttttcttgctgcgagtgggacattagtcgaccgaaatcccccaaattggtgcaacagcgttggttgtaatgtaagcgtgggtaaggctaagacggtaggtgagttagtgccattaatgcagtaccgcggtgcctttggtaaaaccaacacgtaccacgctaatatcgctcgtaacgttgtggggttaaaaacttgccttcgtattgcaattagtgaaccgaccggaaacctttcaatacacttggccgattgtgggccggtttttccattgataacgacttgcgatattgttgataccaacgccgttgtcgattttggttcttttggtagtgatgtcacgagccgacaggccagtggctcatttaaaattaactgctccagcgctgccaacgtgcgtgttaaattcgcttcaagcgtagctcatatacccttgagcgaggatggtaggctcaacgccagcctgaaagtacgcaactcaaaaccaggctctaccgagacggaaatttttattgaggtgcctggcggcgaacaggagatatttatcgacggagagcttaaaaataatgacacttcgcatactggcccattttccgcatcggtggtggctattgtcgaggtagcgtaa

SEQ ID NO: 449559 - DNA, 984 bp, Serratia marcescens
atgaattattttaatttatatttttttaaaaataagcctgtatggacaggtaagtttgttttgttttcttttttgatggttttttttaccatgaaagccggtgccggcatggtgtggcacaccgagaaggcgcctatcgtcgatgggaattttaaccaggcaatcacttattcctatggcgccttagggcgattgatgagtatcgatttcaacgatccgacgccgaacccttgtaataatcttgttggtggtaatgaaagctgctacataacgtttggcgtttttcataatcacacccagtttccgcaggagtattttccttccgccacggcacccaactggagctcgacaaattaccctgatatcctgaaaaagaagaccatgggggaactgtatacttttctaagtcaaaatggatattctggcaagctgcaggtgggtatggagagccggggatatggcaatgtgcgggcttattgcgatcctataaatcgacctgcatcggactgcattattaaaaatagatttgaagcctattcaaaagtctgtcatgcattggtttatcgtaagttttcatcgtcttactattacgtgtttcctgggcaaggctgtattggcccgacgccgcccaataatgaatgcaacattgatgcgggcgccgtcacgctggatcacgggcagttaggcaccgatgaggtaaatggccatcggaaaagagagagcttccgcatctcctgcacctacccggctaacgcggaagtgtcggtggtgagcaataatgccaatgaaaagatcatgttaaaaggcgacggcagcctctattccaccgtcaccgtggatggcgtgcctggcatcaccggcaagaaaatcaccattccgacgggcggtgtgcccattgatttggaatctactctgcataccgtcggtaatattgaagaaggtccgttcagcggtaatggcattctaatcatcaatgcttattaa

SEQ ID NO: 449560 - DNA, 546 bp, Serratia marcescens
atgaaggcaatcaatatcatcattgatgatgataatagctatttttccgcgggtctgcaaagcagcataaacgaatatgccaaaaccaataataaggccatttgttttttaaagcagggtgcggcagtgcggccggatgtgatgttcatttcatcaaggcgcatcgctcagcgctggcgcagagcggcctatgatgaaggggggccgcccgttgtcaccatagaggataggccggtgactgcgcatgaagcgttctgcgtgctgtaccgaacggatagtccggagaaattgtttaagctgttggccgatacgctgggcaatacccgaattgcggaccgttttgaatatcagccttttacgcgtcgtgagcgtcaggtggtgaattacctcagaagagggtttgaccagtcgcaaaccgctcgagtgttgggcgtgagcgtcaaaacggtgcatagccataagcgagcggtgatgaaaaaattaatgctgagccggcatcatgattttatttactggttgctctctcaagagggagaatgttcttaa

SEQ ID NO: 449561 - DNA, 288 bp, Serratia marcescens
atgtggaaaacgacgctgccatttattgtggcttgcctgcttatggcaccgcagacttatgccgggttcaacggcaatcaaggagtatcgggaaatgagagggcaggcgacggtgccggcaacaacaatgtcggggtatgcattaatggcaatggccaaaatgccgggcagtgcgtaggggaaagtaacggcaccgccaaacccaaagaaaaagagcagagtgagacgttaaaatccatttgttcttcacccttcatgaaaaaatatgccgccatctgccgacagtaa

SEQ ID NO: 449562 - DNA, 3459 bp, Serratia marcescens
atgaatcatgtatttcgcagcgtattcaattcggctttgcaagtatttcaggccgtgtctgagttgaccgcagggcgcggtaataatgggcaggagaggggggcagctcccttgccccaagcccttacgcatcccgtattccgctatagtgccgtcacgctggcgttatttagttcgggtttcagcgttgctgaggagcatgggcaaatcgttttggacgatcctaaaggcaatgtccaactcattctcgctcccggcgatacggtgaaccacactggtcacggggccgccgttttggtatctcaggttggcaatagttttgccggcgacaacatcaccattcgcgcggactccactgatagcggtgatacccctgccgtgttggcgcgggctggtggcgtggtgttcttgagcaagagtaccgtcgaaggcgtcggaaccggcaataatgcccacgcactgtatgcaagagatgtcggcagcagtattgcaggtacgggcgtcacattatccacagaagggcccaactcgcacggtgcgatggcgcaggccggcggaaagatcatattaaatggcggagttatcacggtgacgggggcctcaagtagtggtttgtacgcgaaagacgcaaaagccaacattacggtgaaaaacgtgacgatcagctcagctaaagggagaggcgcctacgcaggtccaggggcttcgattcgtttggaccattcaaccgtcaccactcaaggagacaatgaagcggcgatttatgcgagtggtgcaaacgcgttgattaccctgcaggatactgacgtctcttcagcaaaagggcccgccgtcattgtgcagagcggcaccgtcgacattacgggaggcacactgacggcggcgggtgatgtggtcagactgacggctctctataacggcccttctcccacggtaacgataagcgacgccaaactgattacaggcggcgagtttagctatggtctcaatctcaatacgaagaattcgcgcgccgacattgaaaatgtgcagatccttgcgcagggtccttatggttccggcgcctggttaccttcagtcggtacccgcctggcggcaaaccgcttcgatattcgcgccgcttatctcggtatagataatcgtgcaggaacggtcttattggatgagggcgttttgacgacggaaggccgcagtggccatgcgctttatgtggctgccttagccaataacaaggcctcgaccacggcgaaaaaagtgcagatagaaacacagggtgcgggggcagtcggcgcgttgtcgcgattcagtggctcgtcactcgctcttgaagacgtgaacatcaagacctacggcaccgaggcttacggcctctatgccgttgggaaaggggccagtctgacagcgctaaacacgacggtcacggccttaggggcttcctcggccggtttgttcatcggcaacagcccaacggtcaacttgaataatgtccacttaacgacgacagggaagcaatcacacggtatctggagctatgccaccgccgaggataccactaatactctctttttgaccaaggggtcgcaggtcgagacgcaagatggcctagggttatttgccaacggcggcaatcatgcgttcttcctggagcagtcagccatcacggcaagaacggaaggcgacgaagatcgaggtctactgctgtatgccaaatcagccaggattaccgaacaaggcgaagaaaaagagattcaaacgggcactgtcttgttggatgcgaagcatagccaactaacgggcgatattctgattgatagtggctctgccaacattttattgagcaacgcttccctgtgggtcggcgccgtgaatcaacgagaacaaggtcgcgttaaacttttggcgctagacaacgacagtcgctgggatgtacggaataattccacgctggagagattggaaaatgacggcacagtgaccttcttggcgccaggtggcaatggccatttcaaaacggtggcggttaatcactaccagggcaacggaacgttggtgctgaatacccggctcggtgatgacaattcgccgactgaccggctggtgattgatggcggaaaggcggaggggaaaagcaaattacgcgttatcaatgccggtggtagcggcgattttactcagcgcggcatacgcctggtcgagacgattaacggtggcacaacgaatgtagacgcgtttcgacttgatgcaggttcaacaggttatcgagcgggaacggctactctggccatcaatggctacgattacagtctggtgcgcggcgggaatcaaggcgtgccggatgactggtatctgacctcggcttatacgccgccggtcacgcctcccacggtggaaccccctgtggtaaccccgccaatcacagagcctccggctatcgtgccgccgccagttgcaccgccaggggaaattattatgcccccggtggttcccggtgtgagcaatgtgtcaccggaaagcggcgcttatatcggcaatcagcttgccggcgtcaggctgtttatccataacctgcgagatcgcgttccggtttctacagagggccatcttgcagcagacgaacagggattgtggattcgctcccaggggcggcatgacaaagggatgagcctcgcggaggggagggtcaacatgaaatcagacagcacgcttctgcaattgggcggggatgttatccatttccctctgagtcacaatggcgcagcccatgcaggcgtcatgagcgggtatggcacggtgcgtacgcactcggtttctaccctgatgttgcctggtaacgatgtcagcgcacaggcaaaagcaaaagggaaaatgtcagggtatacggtagggttgtatgccactgtttatgaaaacgacgtaacccatcatggagggtatgcggacgcatggttgcaatatggccgttactccaatcaaatcggcagcgagctcggaacggtaggctaccattcgaatgtatggtccggttctctggagatggggtatgcggtaacgtcattcgcaaccggatccgcgttgggtggcctggtcatagaaccgaatgcccaactggtctacagcgattaccgcgcctcggatgcggtgttgcaaggcacacggatgaggaataacgtagacaacacgtggtttgctcgcgccggtttacgtctctaccctcagaatgaaacaggcattcgccctttcctggaaaccaattggctgcatcatgatgaaaaggcttcggtacaaatgggcagttccgtcatgagggcttcgccagcgcgcaacatactggagatgaagcttggcgcagcgggaaatgcaggagagaaactgcagatatccgggcatgtgttcgggcaggcgggtcataatggccagcagggttacggtgggatgctgaacgcgcgctaccgattctaa

SEQ ID NO: 449563 - DNA, 171 bp, Serratia marcescens
atgatgttgagctgcgctagctcacagctggacttacagtgtctaggggcgctgttggtcggctttgagcgagaagcggacatgcctcccttgcggtgtaaaaaactatctggtaacaaggtggtattggtgtatcagtggccggtatacttagtcgcagtcccattttga

SEQ ID NO: 449564 - DNA, 1050 bp, Serratia marcescens
ttgagacttaatgatgtaattactgactgcatcaagcttaaattaagtgggactgcaacggataatgttattcaatgcttcggtggcaatatactgaggaaggaaaagccagttttggcaattgaagtttcgagcaaagacatattactttggatgatgcaaggagcaacgaatgtacatgtttatatcagcgcaggtacttttcatgtaaatgcaatgtatgcaccaactgtccgctttccagcagccagaatttattttatgaaatcaaaagaccttttctggtttggccatattggtgtttatctcgaacaacacggaatcagactcactccagtagatgatgccagcttttcaaagctcattgatgatacggggtatgtacaacgttataagccgtggtacgaaaaaaggaaagctgactcgagattattcgatggtctgctgggagggcggcttaagaatactgctatagatcaagctatatggctgtcctccggtggaaagtgcttggtttgtggtgaaaaaaccgatcgcatggcaaccagtactgtttgtgggaagtcagggatgatgattggtatgcagctgtgtttgacacacgaagaggaatctcagaagcaatcaattcttctcaactatctctcgaatcatttgggtggaatagttatgttctcaaatatgcgtccactgactactgaagaaatgcttgagcagacctgcgaaatacttaaagtaaatttcaagtgcactatcatgaaagttgtaggggaaactgtaaccgcccgaagaacgtcgggggtcaccgtagtaattagacaccaatctccatcgaattatgcctatataataatgacccctgaaggaaaacagttgtctagggtcgattcagccgatcatcacaaagtaccttacggccctgatcatgtacattctgatctgcgtagatctacaaaaaatgtcgtcgagactagctttacatacgggcatatttgtctagatatgaaactacttttaaagctgatccaagaggctgaagataaattataa

SEQ ID NO: 449565 - DNA, 1098 bp, Serratia marcescens
atgggcaaagaaaacagagatgatttttcttccaagactaagcaagctttagctgcaagagcgaattttagatgttcttttacaggctgtgcccagattacatgtggacccagtaatgagtctagctctgcggtgaataacaccggcgttgcttctcatatttatgctgcagctcctggtggtaggcgatacaaaagtgatatgacctctgaagaacgctccgatatcactaatggtatttggttatgtgtaacccattctgtaatgattgatagagatgaagtaatattcactcccgaagtattatttcaaatgaaagaggaacatgaacgtaagattcaacatgaacatttaaagttaccggaagaagccatatccgagttatttaggttaggtagtcaattgatttttactggagaattattatcagttgaacccactacatggaatataaaaattgatgaatacatttctggtgataagtttgatattttaaatgtgataaattgcttcgacgatcttactaatgaagggaaatgtataatttcagaatcacttagtgatgcccgtctactcacaactccccctagaatggttttcacatctactggcctaattttagaattaaaagtatcaccaagaacaaaacgaattagtggtcgtaaccttgggagtgatttggctttagataatactggtaatcttcttattgaaaatggtgatattaagatcatttcaggcatagatagactatcacagcatctcatgatctgcttatcaacgcagaaaggagaagtttacggacagcctgaaattggagtaaatctttctgaatattataatttgttcaagtacactacttggcttgagcggattttaaaacttgaagtgatatatcattcggctttaggcccagaaaaccatttgccggtagaaagacaaaccactcttgagtgtattgatcgagtagaagatttttatgtggtcagtgacattttagataaagatttttttactgtctttatcggtgtgcaggtaaaagattatgggctttggaaagctgaagtaaaaatctatcttgataaaaatactaaatag

SEQ ID NO: 449566 - DNA, 582 bp, Serratia marcescens
atgcagacctttttccgccggcgcagcgatgcgctcgcggccgataatcaaacggccgatgagatgattcggttttggcgagacgccggcgccggtcaatggttccggcaggatctgcgcttcgaccaacattttcgtacacgctttttgggcctgcatctggcggcggcccggcgtgaacgtgacgactggctcaaagcgccggaaagtgcgctggcgctgataatcctgctcgaccaatttccacgcaatgcttttcgcaataccgcccacatgtacgccaccgacccgctggcacgccgcttcgcccgcatcgccgttacggcgagctacatgcaggccgtcgagccggcgttgcgcctgtttttttgcctgccgttcgcccactcggaaaatctcgccgatcaggatctgtccgtagcgctaaactctcaactggggtcggccgaacgtgcgcatgccgaggagcaccgcgatatcatccgccgtttcggtcgtttcccgcatcgcaatcggctgctgctgcgcgatacgactgagcaggagcaagccttcctggaacaaggagggttttccggataa

SEQ ID NO: 449567 - DNA, 1731 bp, Serratia marcescens
atggataaaaattttgccaattcagacactatcaaagagttcgattactccctcataaacatcaatcacaaattgaattgcgcacctataaaaaaaatagattcttatattaataaaacaggtaatacaccattaagcattatcgcctttacgtttaaaaaagcattttcatttttaattaaccatcacaggatcagtatctatcctgataaaattcctttaaaagaagaggaatgcacgctctctccagatgaaatcaatctattaaaagaaacgttagcattccttcctggaaagatcattaaagcttacatatgcgatgtgatttatcttttcagtcgcaacaaccaattttcattgacggccatcgaatgctacttgtcgcacaaatcgataactgagtacaacaataatgaaagtttgtttttttatagaatggcgatgcaattatgcaataccagaggtgatgcattcagcaatcacaaagaaagaataaaaaaagatttaattaacataactcaagatagcaaaataaacgcaccataccttgaagtgtataacatactgtcaatagacaaaaatctagaaaaaagcactaaaattatgtttgccgaattgttatcggacgtggcattgcaattaatcgagcaagaaaccaagattattcaaaaaaacaaaacccattcacgtttattattgagcctacaacaaaacatagagctttacgcaggttttgctagtaatatatacaaagaaactgagcattcaaatagtgtggagttattaaattcccgtatagtaaaaagcctgttatctctggtgacggcgatagaatcacttgagcagaaagatcttaatggacaattaatggttcagttttgcttccttgctgaggactataagaataaaagctccagaaaagctttatctgagattggctgtaacatccacgatgtagagttgctgattaacagcgtgaaaacaaatgcggtgaaagaaggcgaaacgatgcccctaccaataaataattacattaaagaaatagagctaatgattgaaaaagcagattcagccagcgatgctttttccttgcttgggaagtataaattcacagaccaacatccattatatcatactgatgatgaagaaaaacagagcccaactattgaaggtcttttaaaaaaaataacaatctcagatgatggtagaacaatctctcacaatcaagaaagtaatcactatacaacattattttttggcacatatggagcgatattccatactgcaatagatatgattgagaataagttttcagattccacagcagctattaagaccatggttgaaaacgctaatatcttaccgagaaaaataaaaccatttttattcacaggacttgaacgatgggtaaaaggagacatcacgtctgccttatttgtactcaagcatcactccgtcagtactatcaccacgaataaaggttgtcaggatgaattatcattaccaaacctgatgagaaaagccgaaactgctcatatattcagtaaagagtttatttttgaaatagaaaaattacttacagaatcttcgggaacaaattttcgacataaggtcgcacatggcttactgacacctgacgatttaaaaaacgcaattagttactacctctgctggcgatggttatcaatagccacaggaggttttaatccgttatcacttgatgataaataa

SEQ ID NO: 449568 - DNA, 249 bp, Serratia marcescens
atggtgcgctactccggctttttatccaatcgtaagcagggctcgctgctgccaaaagtgtgtatggcactgaagatggaagcgcgtaaaaaactggagaagcccggcttcgccgcgctgataaaaggcttcctgggagtagatccatatcaatgcattctctgcagagacatactgcgctttgccggggcacagagtggtgcgcaggcgacgaaattattgtcagacaggctgtacagaatggagtaa

SEQ ID NO: 449569 - DNA, 204 bp, Serratia marcescens
atgaaatacagccaatacacacagccggccgggaccccggtaacagaattctccatccagtcccttgcgcgccaccgggttatagcggcggaaatatcaggttcagacggccgtctgggaatagctcaggagcgtcttgtcggcaaccagcgctattctctgacccatcttttaccgctatatcaaaactcacctgaagtttaa

SEQ ID NO: 449570 - DNA, 396 bp, Serratia marcescens
atgacgcctaatggcgaattgtttttcagaaaagagctgtattccccggattttggcgctgaatcaaccgttgatatcaggcatctatttattcatgaaatgatgcacgtatggcagcatcagaaaggtatgtgggtaagagctcggggaatgttcagttgggcagctgattatacctatcgattggatgacagagcgttattggactatgggcttgagcagcaggctcagattattgctgattactatgttttgcaggcctatggctaccgtgaatggaatatccagcggcgtaaggcttggccggtggtcacttatcaaggtgtttcagatcaaaatacgttagcgacaaggtatcgcaaaacgctgttccgctttctgcaaggagtgaaatga

SEQ ID NO: 449571 - DNA, 132 bp, Serratia marcescens
atgtcaataattcgcctgtggatgcgaatttatcagattttcgcctgtgaagacgaaacgaggcagggcgaggagtgggggatgaacggccgggaatgcgcgggcctgtcaggctcgccaccggcggcgtag

SEQ ID NO: 449572 - DNA, 549 bp, Serratia marcescens
atgaggcctattatggaggatggtatgataaagaatatgccaactaagatccttaccctgacattaagcctctttaccttctcttttcactctgcggcaggagcatccgtgaaaaatacagaattatggcatttcatcgatgacatgcaaaaaaaaaccagaacactaacaacaagtagcataaagaaaattacccctcccttcaccataaagtcagaaaatgaatacacggcattttattcaggcgaagatgtaactttaactggaaagataaaaatatcacatttagatcttagagtcagcaaggacgagaaagcggccactgtatttctctcctttgaagtcaccggtgactgcattacccttgatgacatcaagaaacgttatagtaatctgcagcttacggattaccctcgcggtgaatcacctgaagaaaagacctattatacaacagggaataacccgtacggccaacatatatcatttggattcacggcgaaagaacagcaatgtttgagccaagtcgttctcgactcagatgaagagtga

SEQ ID NO: 449573 - DNA, 546 bp, Serratia marcescens
atgaaagtgatttattacgggttaacagctatcgccatcagttatggggctaacgctaactgcacgctaacggccacacaaaacagcgtttatctgggagagcacaatatcgggtcactgtctcaacaatccactctgctgcacagcgccccattgcagtatcggttggcttgcgatgagccagtgcagttgcagggattcactctgcgggagaatagaaacggaggcagcgcagccgatgcttctagctatctcagcctcacggttgatgaattacgcaatggtgatggtgagccgattgccttttcacttggccccgggctgctgagccaaagacatctgcccaactatcgtttatccgtcgatcgtgaagcattacacattcttgtaccggataacgaggttgggcaacacttcaccctgtcattaacagtgtccagtttcgccacctccgcgacacaactgcgtcaacagcaacgcgataacatcccgctgtcgacccaattgctggccagcgctaactatcttgatcccgacgttcggtga

SEQ ID NO: 449574 - DNA, 4095 bp, Serratia marcescens
atgaagaacacacacacgggcgtctttcggcagcgactgcggttgctggcctggatgaacatcggcgtgcaggcgtgctttccgttagcggtcgctttcacacccgccattgcggcgtcaggggagacagcgcgtcatgcttccccctcctcattgcaaacgcgtccctacacgctgctagccggcgaggatgcgcgtctggttgcccagcggttcggcatcagcctggaggagttgcgcaagctcaatcagttccgcaccttcgcgcgcgggtttgaccatcttcgtccgggcgacgaagtggatgtccccctggcgagcgcaaaacagcgtgccagcaacgatgccgtgacaagcgaagaggaggcgctggcgatgcgcaatgccggcctcgcctcgcaggcagggtcgttcctggccaataaccccaacggggacgcggcggcatcgatggcacgcggcatggccatgggtgaagccacgaaagaagtgcaggactggatgagccagttcggtaccgcgcgcgttcgcctggatgcagatcagcacttctcgctgaaaaactcccaactggagttactggtcccgttgtatgaccaggatgaggcgctggtctttacccagggcagcctgcaccgtacggatgaccgtacgcaggccaacctggggatgggggtgcgctggttcaacgacagctggatgctgggcgggaacacctttgtcgatcatgatctcacccgagaccatacccgtatgggggtgggggtggagtactggcgcgattacctgaagctgggagccaacagttacctgcgcctgaccgactggaaagactcgtcggacgtcgacaattacgaagaacggccggccaacggctgggacctgcgtgcgcaggggtggttgcctgcactgccgcaactgggtggcaagctgacgtatgagcagtattacggtgacgaggtggcgttgttcggcaaggaccaccgccagaaggatccgcatgccatcacggccggcatcgagtatacgccggtgccgctggtgacgttgagtgccgagcagcgtcagggcaaggatggcgagaacgacacccgtttcggcgtggatttccgttaccaactgggggcgtcctggcagcagcaggtggatgcggatgccgtgcaggcgatgcgcagcctggtgggcagccgtcatgacctggtggagcgtaacaacaatatcgtgctggagtaccgcaagaaagaagacattcgcctgcgtacggccccgctggtgaccggttttgccggggagaaaaaatccctggaggtgacggtcaacagccataacggcctggaccgcattgactggtcggcgccggcgttgctggcggcgggcggtaaaatcgtgcaggacggtccggcggcctacagcgtggtgctgccgacctaccagtatgccccgggcatcaataattacgtcgtcagcggcgtggccgtggacaaaaaggggaaccagtcgaacacgagcgagacgcaggtgagcgtccacgagccggacatcaatgaaaagaacagtacgttcacgccgctgagcagcacgttgccggcggacggcaagagcacgcaggtgttgacgctgagcatcaaggatacccaggggcagcccgtggacgtcccggccagtgaaatcagcatcggcaagagtgcgctgaaatcggccacggtctcggcagcggacaagaccgccaccggtgtgtatgccatcacggtcacggccggtacggacgtggagacggtggtgctgaccccgacggttaatggcgtcacgcttgacccggcacgcgtcgtcatcagcagcacggcgccaagcgataccaactcgacggtggagaccgacaaggacagcatcaaggcagacggcgttgacagcctgaccgtgacgttcacggcgaaggatgacaacggcaacctcattccggggattgcggacgacatcaccttcaaggtggtggataaggacggcaacccggccccggctggagcggtgacggtgacgccggcggtggaagtgactccggcagggacctacaccacgactatcaccgggaccaaggcgggtgactatcaggtgataccgcagtacgacggcagcgcggtgggcaacctggaggtgccgattgagctgaaggcagacgagacgccgagcgcgacggtgtcgacgttcgggacatcaccgaagattatcgaggcggacgggacggcgacatcgaccctgacgttcacggcgaaagacgcgaacgacaacgtcatcaccaacctggctgcggtgaccttcgtggtcaaggacggcagcggcaacgtgccaaccagtggcgtgacggtgagcgcgaccaccaatgccggcaacggcgcctacacggccaccctgagcgggacggcggcgggcacctacaccattacgccgcagaacaacggcgccccggtgggcagcctgagtgacacggtggagctgaaggcgggtgcggttcccagcgacaccaactcaacggtggagaccgacaaggacagcatcaaggcagacggcgttgacagcctgaccgtgacgttcacggcgaaggatgacaacggcaacctcattccggggattgcggacgacatcaccttcaaggtggtggataaggacggcaacccggccccggctggagcggtgacggtgacgccggcggtggaagtgactccggcagggacctacaccacgactgtcaccgggaccaaggcgggtgactatcaggtgataccgcagtacgacggcagcgcggtgggcaacctggaggtgccgattgagctgaaggcagacgagacgccggacggcacgcagtcgacgtttgcggcaccaaacccggcgagcattaccgcggacggcaccagcacctcggcgctgagcttcacggcgaaggatgccaacggcaaccttatcagcgggctgaccggtatcaccttcgaggtcaaggacagcagcggcaacgtgatggcggacggcagtggtgtcaccgtcagcgcgaccaccgatgcgggtgagggcgtgtacacggcaacgctgagtggcaccctcgcggacacgtataccgtgaccccgcagaacaacggcgccccggtgggcagcctgagcaacaccgtgaccctgaaggcgggcgatacgccggacggcacgctgtcaacattcagcgtggacaaggcgggtatcgagcctgacggggaggatgcggccacgctgaccttcacggcgaaggacctcaacgacaatgccatcaccgacctgaacgcgctcaccttcgcggtgacgccggcatcgccggatgtgacagtgagtacggtcaccaatgtgggcgatgggtcctacaccgccaccctgaaagggactgcggcgggtacctacaccctcacgccacagcacaacggcagcgcggtaggctcgctgagcgagacggtcaccatcgccgcgaccgcgacggccgtagagggtgtgcttgtcaatgggtacacgttcgcggctgacgccggcttcccgaaaaccggctttaccggcgcgaagttcaccgtgcaattgaacggcggcgaggcgacggattacacctggacctcgacggccacctgggcaccggttgatgcgaacggaaacgtgacgttcacaggcaagggcgacagcaccgcggtcaccattaccgcgacctcaaaagtggacccgtccaaggcgtttgcctacaccttcacgttgaacgactggtacatcaacaacggctcgaccacgatgacctggtcagcggcgaacacctactgcacgaatcagggcgccgccctggcaacccgcctgcagctgggcgggacgcagatgacgtcaggcctatacaacgtccgcggcacggtggattccctgtggagtgagtggggggatttgaccaagtacaccggctcgggcttcccgagtagcatcctcacctggacgtccgaggtcgccggcagtagtggccactacggcgtcttcttgaccgcgggccgcgtctacagcgacgacgacatcttcagccactacgttgcttgtcggcagggtctttaa

SEQ ID NO: 449575 - DNA, 555 bp, Serratia marcescens
atgcggtattcactgaaggatgcctgcctgccatcacgggtgggcggctatcgcgcaatgttaaggaaaaaaacgatgacgaaacaaaatcattcaccccataaccctcctctttcccccttgcctgatgacagtgccggcattggccggcgcgtaacgccgcgccagtccaatcacgagagctacgtgttgccagtgatactcgaccacctgccgcccatgccgctttatctggccgttgcccattttgggttattgaccgagaagcccttgtcgcgggagatgatttgtcaggcgttccatctcgatacgcgccgggcactggagattatgcgttatctggtcaacggggcaccccgcgtgacctgcaaatgcctctcactgatgcagggacaggggtattgcctgcggattttggcgattgccacaccggagcaggccgtggccgatgcggccgcctcgcgcacggctgcgcggccgcgcggcagcaccgccgagcgtgaacaggcgcagcaacagatgcgtcagtggtttttgcgacgcccgttgctttga

SEQ ID NO: 449576 - DNA, 420 bp, Serratia marcescens
atgacgatggggggatggatatgggcgtgggtgctgtggctgagtctcagcgtgttgttgcttggcgggatgttatcgctgccgtccaggacggtggtaaagccccgttcgacgcgggttgcgcccggcatttggcgcttcatgcggggtgacatggccgtggggggcacggtacgcattgggctgggcctggggggcgccgggtggtggctcggtgccgccggcctgctggcctctgactggtcgcgcagtctgctggtcgtgggggccggagcactggtgttgattgcgttatttaacgccggtcgcaagggggcccagtccctggtggggctcaccatgctgtcggcgttccagggggcgggctgggtggtattgctgctgattctgctgcaatttttcgggctgacgccacggtaa

SEQ ID NO: 449577 - DNA, 708 bp, Serratia marcescens
atgggcgacaagaatacgccgtgcggtcgagggacgacaagcattcacagccatagcccggacggctgcatggtgaccatcgtcgatccatgtccttacgggcgactggggttacagtgccttttggctccaaaggcgacggccgtgggggccatttcggtcggggcgtatgaacgggttgaacgggcgttggcggcgatgcccaaaaacgggggggcgcatggcgcgtcaacgtccaggcgctgtctggtggtgcgattgtcgatgtatccgtcgcgggcgctacagcagttgctgcaactggacgaccaaaggatgaggcaagcgggcatcgagcgcctgattgtgctttccccgtttgaagtcaacaacgtcgtccgccagaccctgatgtgctgcggcgttcggttgccggtgcggattgtcaacgcgcgcagcccgctgcaggtgttgcagcgggtggtgttgtcggaagggaccttgttgcagttgggtcgtgacgaacgcctgccgcagatgccggcgctgttgttgtcaccctgtgagcgcagggtcatttccaacaccttgttggaagtctccattcctcaacaggcgtggcgacaacggcgccagcccaaaacgctgtatgcgcagcggcacaatgccttgctaaaactccgtgctttggggctggcggcattgttgcgccgcttccgttcgatgtga

SEQ ID NO: 449578 - DNA, 471 bp, Serratia marcescens
atggacatggagatgtacctcaatgtcgccggtgttgccggcggctcacaggatattgcgcacaggaactggattgatgtgctgtcatttcactggggggcggcgcaaggcgccacggaacgtgccgatgcgggccgcgttcggttttatgacctgcgcgtgcgggcgcgtctggacagggcttcgccggcgctgatgatgtattgcgcgagggggatgcccgtggaacatgtcgtgttgtcgatgtacgccatgcaaggccggcgggtcgaacggacacggcttgtgctggacgatgtgcgggtgagccgcatggaggttcacggtgataaacatcacgacggggtgatcgtgacatatggatttcgtgcgacagcggtgcgtaatcattattgggcgctgactccgcaagggggaaagggggcggaatcgatgacggggtgggacagacgaaaaaatattgcctgctga

SEQ ID NO: 449579 - DNA, 672 bp, Serratia marcescens
atgaaaaaaaaccttatcagtttgctcttcgttttatccagcggtgcggcctgtgcggcgacagacacctcaaaaccctatattggcacgcagacccccgacagttcggacggattgaataatggagccattcaggggctggcctcctggggggggtgggacgtgaccggcgaaatgggggacacactcgggtatatcacgccgagcaacaccgccggcaccggcggggtctgggccggcgacaaggccgcggcgttgacgtttggcgatgcgcacaccgggctgtttgttgatggcgacggggcgcaaataaaaaacagcgatttaaatcttacggacaacaaaatcacgcacctcagtgacggggtggcggacacggatgcggtcaacgtttcccagttgaaaagcgcctcgcaagcggcgctgaacgcggccaacacctacacggatggcaagaccaaagagacgctggacacgaccaccgcctatgcagacaacaaatccagggaaacgctcggggcggcgaacgcgtacgccgaccgaaaggttgaccacctggacaagaggatgaaccaggggctggcgtccgccgcggcgctgtccggtcttttccagccgtacggcgtgggtaaattcaaccttagcgtgggggggggcgggtaccggagttag

SEQ ID NO: 449580 - DNA, 990 bp, Serratia marcescens
atggcagcctcggcactcaacgaggaagtcagccagtggctgcagcggtacggcactgcccgggtgcaggccaatatcgacaaccacggcaacctcgagggcagccagctcgacatgctgctgccgctgtacgacgacccgagcgacatggtcttcacgcagtatggtctgcgccgcgtcgacaagcgcaccaccgccaacctcggggtcggctatcgtcacttcttcgacgactggatgctggggtacaacaccttcgtcgaccgcgacatcacgcgtacccacactcgcatgggggccgggctggagtttgcccgggactacctgaaactggcggccaacggctacttccgcctgagcggctggcgcgactcgccggacctggacgactaccgcgagcgtccggccaacgggtttgacattcgcagcgaagcctacctgccgtcgctgccccagttgggcggcaagctgatgtacgagcagtatttcggcgatgaggtcgggctgttcggcagtgaccaccggcaaaaggacccgcacgccatcacggccggggtgaactacacgccggtaccgctgctgacggtgggcgtcgaccgtcggcaagggtcgtcgggcaacggcgagaccctgtttaacctgggcgtgaattatgaaatcggcacgccgtgggccaagcaggtcaacccggacagcgtcgccagccgtcgcacgctggcgggcagccgctacgacctggtcgagcgtaacaaccagattgtgctggagtaccagaagcaggaggtcattcgcctgtccgtggccggtcccgtcaccggcaaggcggggcagacccgtgcgttgaccgtgtcggtcaccagcaagtacggcctggccggtatcgaatggcaggcgtatccgctggcggtgacggatggcacggcggcggtggtggcgagccgggaggcggcgcagagacaggcctgcgaacggatgcggcaggcgctgtag

SEQ ID NO: 449581 - DNA, 432 bp, Serratia marcescens
atgtttgataaattgagcctgcaacgtcaggccgtcggggcacgggtatttaccgcccctgactacaagcccggattattaaaacacatcgtgctgttcaaatataaaaagaccgtcaccccggcgcagcgagaggacgtggtgagtcgctttttgtcgctcaagcgcacgcagcgtccgggagcggacgccccctatattctgtccatcgttgaagggcggcaaaacagcggcgaaggggtggacggcggctttgagcaggggtttatcgtgacgttcaaatcggaaggcgaccgcaattattacgtgggcaaaccgctggtcgagtcgccgggcgattacgatgaggcccatgacgcattcaagcgctttgtagcccccctgctcagtgagactaacggggtgctggtgtttgatttttcgctgagatga

SEQ ID NO: 449582 - DNA, 2313 bp, Serratia marcescens
atgaacagacggataacggttcacaccgcgctggatgacgccgcagaggcgcccacctttctttttcaatcgctgaccggcagggaagccctgtcctcgctgtataccttcacggtggacgttttgtccgaacgccggcacatcgacccccaaaacctgttggggcaggccctgacggtggcctgtcgccacgccctgcggcctgccacgcgctatttgtcgggtatcgtgacgcgggttgaggtcagggggcgggaccgcaacgaccgctatgaccgctataccttcacggtcggcccggccctgtggaccctgggacagggccgggattgccggatatggcaggaaaaaagcgtgccggacatcattaccgcgctgctgcgcgagcgcgacattgcgtttgaaaaccgcctgagctgggaatatcggcgctgggaatactgcgtgcaatatcaggaaagcgacctcgattttatcagccgcctgatggagcacgagggtatctattactacttcatgcacgagaacggcaggcacacgctggtgctggccgacgctcccgggcagcacgaggtgctcagcggctttgccaccttcccgtctgtcgacgagacagaggatacgcgctttggggacgggattgcgcactggcaggtgtccgagacgatgtcggcgtccctgtatctggccgatgactacgactttcgccaaccgcgcgccaacttgttgcaggcgcggcaaaacccggggcccgaggggcagcaggaggcggtcgtgtttgactggccggggcggtatacccggcatgacgacggggcgttttacgcgcgaattcgccagcaggccctggcctgcacgcaggcgcagatgtcgggggagaccgggtcgctcggcatggcgcccgggcatgtctttaccctgacgggtgcggcgcgcgcggaagataaccgggcctatctcatcagcagcgcggagtacgccttccgtgaggcggggtattacagccaggatgcgcaggatacgtcacccctgcatcgcacggtctttactgcccacccggccgcgttgaactggcgcccggcacggcagacggcctggccgcggacgtacgggccccagacggcgacggtggtggggccggaggggcaccccttctggaccgatgcatacgggcgcgtcaagctcaggttccgctgggaccgccataacgacgccggcaatgacgaggcggcctgctgggtgcgggtgtccagcgcctgggcggggtgggggtatggcagcattcaggtgccccgtgtcggggaggaggttatcgtcgactttatcaacggtgaccctgaccgccccatcatcaccggtcgcgtgtataaccaggacaacatgccgccctgggccctgccggcttcggcgaccaagatggggttcatgacccgttccgcgggcggcacgccggagaacggcagctttttggtgtttgacgatgcgcgggggcaggaggcggttgacctgcatgccgagcgtgacctgcacatgagtgccgaacgcgacctgacggtgcgtgtcgagggggcgcggagtacgcaggtgacgggggaggacagccacaccgtcgatgaccgccagcgcgtgcgcatcgccaaggggcgccaggtcgacatcgccgccgggggcgataagcgggaggtgacgggggacagtacgacgatgctgcacggcaaggagaccgtcatcattgagggggcgctggttgaggagtaccgggacgggcagaccaccaccctcaccgccggcggccagacgctgaacattcacgccggcggtcaaacgattatcatccgcgagggcggtcgcaccattgatatcgttggcgaggcaaaaaaaaagataaccggcgacgagcacgaggaggtcacggggacgtggacgaaggcggtgggtggcgccattaatattacgtccgaggcggatgtgaccatcaccagtgcgaccaaaatcacgctggatgcgcccagccaaaaagccagcacgggcctgaaagggcacagtgaaagcctgaccggtcactccttcagcatgacaggggcatcggaaagctttaccgggagttcggtcagttttaccaactcatcggtcagttttacggcgtcgagtgtttcgatgggcatgttctccatcagtaacacgccgtttaaattatcaaaacatgataaccaccttgaatttgtcagcggtaataaaacactcaccagtacctttctatctctcaaaagcgattacagtgcctttgcgagtgcgctgacaacgttttcgtga

SEQ ID NO: 449583 - DNA, 621 bp, Serratia marcescens
atgaaacgcaaatatttaaccggggaagaaataaaccgtttattgcaaacgattgcgggggatggggggtctgttcgtgactattgcatggtgagcatggcgtttttgcatgggctgcgggtgagcgagttgaccgcattgcggctgagggattatgacccgctgtcgaagatgatttttatcgcgaggctcaagggagggatgagcagcagtcacccggtgctgccggaggagcatgtcgcgttgcaggcctggcttgcggagcggcggcgatttgccgggcagggccaaccctggttgtttttatcgcaacagggaaaccggctgtcgcgacagcgtctttatcaactgatacggcgctatggtgagcgtgccggtctgccgcttgcgctacacccccatatgttgcggcatgcctgcgggtacaacctggcggagcgcggaaatgatacgcggttgatacaggattatctgggtcaccgcaatatacggcacaccgtgctttacacagcggcgaatgctgcgcgcttcaggcaggtctggcagaaggaggcgggagtaccacaggcctcgccgttgcgaggtctgtggcctgccagtgcggcgtgcgacgaaggctga

SEQ ID NO: 449584 - DNA, 159 bp, Serratia marcescens
atggccgccgccgccgcgcgcccgcagccgccggcggatttcgatttggaggcgcacattcgggtggtagacggcgagacggtattggcggacaacgccgacggtgacgaacggatgtgccgcgatttcgccgcggcgatagaggcgcgtttggtttaa

SEQ ID NO: 449585 - DNA, 201 bp, Serratia marcescens
atgggcattaaaaaaacattagagaaggtattcttctcgatctctgacatactgattcatttgctcggttctattggctttttattgtgtatttacttctttttccacttcgactcagtgactgacagactcctctatattggaggaacggtggctctcgtctgcatccttgcctacttaatacccacaaagaagcaatag

SEQ ID NO: 449586 - DNA, 654 bp, Serratia marcescens
atggattatcacgaaatagccaaccgaatagcgcaagttatcttatcccctaacgctgttattggcttcacacatggagtcattagcgtacctgttgattttggatatctcgcttatagctatctcgatactggaaatcgatatagcaatcaaacagaaagcatcagattaactaaagctattcgatatggcatattagagaaccacaatctaaccaagagcattaagatcattattgatttattcaatggatatataccgaacaatacacaaaatataatgtatagcaaaagtgtatcttctttagctgggcgaatgattaccagtgcaacaatcagtagtaaaattacgacagccattctacaaaccacccaatatagccggctgatcaaacttagaagcggggttatcagtagtattttattgatgggtggaatggcaactcgaagtatttacaaatctaaagagctaagcaataaggataatattgtatacagcaagctaagatatgccggtgatttagacttcatctacttcttgatacagccctttgccgatccatttattgaagcaatagcagtaaggcaaaagcaagggcaggaagcgtttgataaaatcatttcacttgttgaggatacgttaaatgggcattaa

SEQ ID NO: 449587 - DNA, 330 bp, Serratia marcescens
atgagtttacaggttttgagagattcagttcaaagacgcaaaccaatctcatttcattacaacaagccaggtaaaacaccgggcgagagaattggaaacgttcatgcaatcttcataatgagaaaaaaagatggcaccgaatccactaaattgcacattgtccagacatccggcgtaacagacagcgagcctgatttccctgagttcagaatgtttgatatagagtctctatcaaatatcacaattctcgaaggtgaatcccaattcccaattaatgataaatataaccctgagtacgacggctataagaatgtaattgctaaggtttaa

SEQ ID NO: 449588 - DNA, 576 bp, Serratia marcescens
atgaccactttaaatcaagctgtaaaaattgaatcacccattgcaagtatcagccacctgttaccgttcgaacagaaacagcatattgaacgcttgtatttcccaaaggtacaacaggctactgacagaatgaataaagctgaggctgaatatcaggatgctgtagaatctcgttcagtgttgattaatcagaaagctgctgaatatcttgctaacccgtctgaaagacacggattcattgtgaagcaggtttatccaactaaccagcaacaagtgattcaaggcatggccgattctggctacatggtgtaccgtgtatctgttggaatggttacctttatccgtatgccaaagaacgctaaagataatcctcttcaggaaatcacagataaagctacggcagaagctgaatcaactaccgacaagatgattgaacgtctgaaggtaaaagcctctgaagctgtccaccagcgaaacaagattgttattgaagcccgtaaagctctggatgctgtaaaagactttactgattacctgaacgtgattgtaactgactctgaagaggtaacagaataa

SEQ ID NO: 449589 - DNA, 810 bp, Serratia marcescens
atggatggaggtctcactgattcagtgaaacatgctttagaacagaggattaagagtcccttgtgggggttcattattctggcgtggacatggtttaattggcctaacctagcaatgttgttcatgagtgatgcgcctgtaaagttccgaatcgattacatcctttcacaggattatttctatctgtattacgtgtttgcccccatcctttctggcagcattttggctgttgtctcaccctatgctcagtggctcctgtctcaggcacataggtgggctgatgacagatacaaggataatgtttttcagtccaaggagagagtgtttcaagataacatcaagctatcaaagcttaaggttcaatcagatatggcagtggatgttgaaattgccaaaatcaacgctgatatacagactgaagtcgaaagaggcaagcgcgagcagatactaactgaagagcttgaaacccaaaagaaaatccttgatgaaaaaattgaacttcttaccaaaaaacttgaggatgagaaagccgattttgaagagttgttaaaggaaaagcaaaagattcaagatattgcgataaacgttacgacactgttagaaaaagccctaagacttgatgacagaaggtcagttcagcaattggtggatgaaatttctgatttgttcagcgtggaagacttcgagctttcagaacaaaggaatgctctgaagaatggtataaggaaaaaacggagcgtagctgaatttattgaagaggttaaactcaaccaaagcgaaacatcagagattaatcttcaaaataagtga

SEQ ID NO: 449590 - DNA, 1020 bp, Serratia marcescens
atgctttcatatgctttctggaataacaagggtggtacaggtaaaacaagcttggcatttcaggtaattgccagatatgccgagctgaatcctaaaaagcgcattttagctatagacctgtgccctcaggcaaatctatctgagctaatgctcggagggatgaataataacggaagcgataagttattggcacgtcaaggattagtgccccgctgtactattggcggatattttcagctaagattgccttctccatattcaccgccgccctttacggctacggattacataaccgttccaaatagttttaatcctgaactccctggaaatatcgatctgatttgtggggatccactgttggagcttcaggcaaatgctgtaaataccttggcgaaccaaaacattccaggaactaatgcttggattgcagtaattgactggctaaaggatttactcgatcaactaagaaactcttacgatacggttttttttgattgtaacccaagtttttcattttatacgcaaatcgccttagccaatgccgacagaattgttctccctgtaatggctgatgattcatccagaagagcgatattaaacgccatctccttggtttatggtttaaaacttccatctgagatctatacatcatatatgttctcaacaaagctcaaggacgcagggagaaaacttccccaagttcatcagcttgttagaaatagacttactcagtacatgggagatgcttcagcgtatgcagctgtgctgcaagcaattaagaaagatgtcgaagaactgttaaaacatcatcctcacttgttcacattcagcatcgctgatgatggattctccagcataagggattttcagacaaccggtgtcattgcgcatgcaaaaggccaaccgttctcgagggtccgttctggcaagcagtcaattaatgggcatagagttcaagtaaaatctgattatctggaaaattgcagagaatccatcgagaagctagtggttaagttttaa

SEQ ID NO: 449591 - DNA, 519 bp, Serratia marcescens
atgaatgcggacggtctgaaattgacaaaagagcaggaagagtggttgcagccgtggcttgagcggtggggtgcctgggtatacaccgggcggctagagaagcgccaaagtagcattatcgcagagtacatggccacagtagagccccgccactacccagaacggccaatatgcaacgacgatgacggcatgctaatcactcgcgtcgtggataagcttcatgcaattgatcgtcgggcgttctgcctgctgctgagccgatatgttcacggctcctctgatcgttcaatcgccagctattactatgcagtcgccaagcccagggcgatggttagacgcaatggacaaccaggattccggcgcccgtcacacacgacatgccggagagaggtcagcgagatactggccgtggctgaatatttgctgtatcaaccactacaagatgcgtttatctcacgcgaacaggagcgaaaaaataaaaaaaatgctgcgaacgtgttgacatttatgaaccaatga

SEQ ID NO: 449592 - DNA, 846 bp, Serratia marcescens
atgaattggcaaggcattccatttaaatatctttcagctgatccttcggatactgttaatttagctctacaatcaattcccagaattattgtagattctcccactgattacacgtctcctatagtgactgggattgtatctcttattgctggtattattcctgcttgcatcgctatctggacatttaagaggaacgcgttcaatacaaaatccgagagagaaaaacaagagctttttctggttaatgaacgggctgaacaacaaaaatttcttcaagaggaaagggctgctcaaatagcttctacggaaaaagacaggcaaacacagttattgattgctaaacaaaattttgacgttcaggtactatcagttaatcgacagcaatggatcaataatctgagggatttattcgctgaatatatggctttagtccctttattactcgacgctaaatttaaatatcttaatgagaaaacgttttatcaaaaagctattgatcaaggtgaacgtgatagtaaacgttatcaagttgaagcgtatagggctgatttaacaagaagagcttcaacgtttgaacaagctttaagtgttttcgatgatgtcagaacgcgagaaagactactgatttctaaaataaaaatgatgataagcccaaaagagaaatggtattctattttcgaatttcagtttaatgaaattttaattaactataactcattcgaggagctaaatatggatgagtatcaaaaaaagataggcatccaaaatcagtgtattaatgccaccttaaatgcggctcaagaacttcttaagcacgagtgggagcgtgtaaaaaaaggcgtttaa

SEQ ID NO: 449593 - DNA, 1071 bp, Serratia marcescens
atgcgcggacttcttataagcaagttaataaaaagagatgaaaacaacttagaccttatacggttagtagcctcattgtcggttattgcctatcattcctttgctctaaacccgcaatggggaataactgacccagtaaaatatttatttggttacatgacaacaggcggcctagcggtaaaggtttttttctttataagcggcctattggtaactaatagcttgctatcgcgaaactcaatcataaactttattgtctctcgttcactcagggttttccccggactggcgtttgttgtaataacaacagcatttttaatagggccaatttttacaacaatgcctattgctgaatactttaaaactaaccagccgatagtttatgtcgtgaaaaatttgctattagatacccaatacacgctgcctggtgttttcgagaaaaacaactatggagttaatggctctttatggacgattcattacgaggtgttggcctatattattttggcattgctttatgtaactaaagttggaagctcaagattgatatcatccctactatgcctcatcgtaatcatagaaccaatcactccattcaaagggattttgtttgctggctcaagtaacaacgcaatctatctattggcgccatgctttgcacttggagcactactagcaataaataaaaattactttcatactaacatttatattccttttatattttttgctactcaattcatatttaacgatgagcattttagctctttattgctatgtatatccatatgccttttttcacttcacatttcatcgatgagattaattgtcggtttgcatttaaaacatgacatatcatatggcgtttacttatggggatttcctattcagcaaataatatctcaaaattcaaaccttcacccggtgttaaacatagcgttatcaattctactggcaataatcatggcattttcgtcttggtttcttgttgaaaaaccagcgatgcgatttgcaaagaaaatcgcagataagaaaccaagacaattatcaattaagagtactcacaaataa

SEQ ID NO: 449594 - DNA, 351 bp, Serratia marcescens
atgaaaattgagatcattgtggatggagaaaccgccaccgctaccctttttgacacgccgacgggacgggattttgcgtcactgcttcccctcagcctgacgctggaagactatgccgatattgagcgcatcagcaatctgccacgcaggctttccacggcacacgcaccggacggcatgacgccggaagccggggatatcactttctatacgccgtggggcaatctggcgatttttgtccagggcagaccttacgcccgttcactgatcccgctagggaaaatcgattccgggctgccagccctggagcgtcgcggaccgctagcggtacagattagggccgcagactga

SEQ ID NO: 449595 - DNA, 579 bp, Serratia marcescens
atggatatcgtgaaaattaaagggcgtctgaccttccttcagaaagcagaaaaactcaaaagcgtgctacgcagtgcgcactcatctacgggtagagcggaaagtacagccgagcactcatggcgcctgtgcctgatggctatgatctttgaaaacgagctcgctggtatggatatgctcaggatccttaagatatgtctcgttcacgacctgggagaagcaatccatggtgacattcctgctgtagaacgagaactgcatccggataagagcgaacaagagaaagccactctgttgcatctcacacattctcttggtgaaaagcaacgggaggaaattctgtcactttggcaagaatacgagcatgccgcctcgccggaagccagggtcgtcaaggcactcgataaactcgaaactatcctccagcacaaccaggggattaatccaccagacttcaattacgaattcaatctgacctatggtcaggagtacacaagcacccatcccttgtttacgttaatgcgcgaaatcctcgatgaggatacgcgccaaaaaattgccgagcgtgcgcaactgtag

SEQ ID NO: 449596 - DNA, 474 bp, Serratia marcescens
atggatgacgagcggcttaaaaatccgcccgtgggttcatccgcagtgcctgattactttgatgagatgctggagcgcatccgtgatatccgtgccagtgagcgtcgggtttatttgcgggttagggagatcttcgcattagccgccgactatcagccgtcacttaaagagacaacgttgtttttccaaactatccaaaacaagctgcattttgcctgcaccggccacaccgctgccgaactcatccatcagcgggctgacgccagccagccccatatgggcttaagcagctataagggggaggaggtgcgcaaaagcgacgtgacggtggcgaaaaattacctcaatcaggacgaagtcagtgaactcaatcgcgtggtcaacatgtggtcagatttcgctgaagatcaggcgcggcgtcgtcaacagctgttcctgcgtgactggcaggataagctggatcagtttctgtaa

SEQ ID NO: 449597 - DNA, 465 bp, Serratia marcescens
atgaataaaaaggtatggatggtggccgtgttggccttcgctccctgggtgggtggatgcagccagtcgggcgaagcggagccggtatcgctggttactcctgcagcacgcgcacaaagtacgctgagtgatgtgtcggagacgcctgtcttgatccccgagggggtctccacgccgcctgagacgataaatggtgatgccgaggcgcgcatgcagcggtgccacggcgaactgcaggccttgcggaaggtggatggcaagcggtatgcggaacggaaggtggaatttgaccggttgatgtctggggcggcgctgtatgcgggtatccggggggcggtacagtcacgaacgcaagacgcggtggatgccttgtaccgttataaggcagacaagctgtgtgcggatatcggacaggacgtgctgaatgggctggcgcgaacgggtaatgccgggcgggcgctgtga

SEQ ID NO: 449598 - DNA, 591 bp, Serratia marcescens
atgacgggtttacttcaacggcaatgcagtggcgtggtctgtgcgcttttactcatgtcggtgtcggtgccggggcaggcaaagcgattgtttgccactcagcagacgccaatacagattgatatcaaggcgacggtggtggtgccgccgtgcgaggtcaatggcggtcaggcgatagatgtactctttggtaatgttgaaatcagcgaggtgaacgatgacggcgataatgcagcgcgttctgtcgtaaaaaccattcaggtggtctgtccgccggggattactgacagcagtgcactgaaggtgaaggtcgagggaacgacggcgggcgcaacgaatcgcctggtcaccagcgagagtaccggtgccggtatcgggctgtatcagggaagtgtactgacgagtcagacacccctgacggtcgggaccgcgttgccattgtctggaatgggaagcgttaccggcagttatgataacgggtacaacggcgagttgacgttcagcgcacgggttgagaaggcgaatggcggagccggtgtggtaccgggagatttttcggccacggccacgttggtggttgagcagttgtag

SEQ ID NO: 449599 - DNA, 951 bp, Serratia marcescens
atgataatgcagagaagcctgcgggtgttgttggtttttatgctgtgcgctgttgggatcttacctacggtacatggagcagcgtatatagagtcaaatcgttatgataatcgcccggcacacttgcaacaagatcagttacagctgtctgtaaatgttagtaacaccggagggtataattattctgttttctatagcgattgttccagccctgttactcagatagctctgcgttacatgttggtccccaagaaagttaacattggtggtgcgagtatatctatgaactggcaagggaatgttattggtgaactagatgaatggttaatcattggggatgtatcatcagtcccaaaccacacctgctattcgggtatcagtggttacgcgccgggggcttatgttggtcctacagcaataggtcgagggaatttacaagacgtgccaccaggttcctataacgtaagtcttacatattatgttgggttggtgtatgcaaccacaagttctgaagcgattagcatgatcattgcccatggtttggatggagaaacaagctcgactcctgtaactccatttactggtgtggccgcctgtggccaggacagccctacttccggtgcgaccattgactttggcactgtcaccagtaatggcacgattcaaccagggccgctcaccacgcttgggttggtctgcaactatgacgtggctttaaacgatgtgacctattccttaacgtccaataatcccgttaccggagagcccagtaccggtcagaacgttgctgtcgcactcactaatggcgcaatggttaaattggatggcggtaatgttacgcaacccgaccccaaaagggttagcgtaaatattactccgagcattgatgctcgaggcgcgacggccggtgaaggaacggggtcggctaccctgacgtttaattatgaataa

SEQ ID NO: 449600 - DNA, 1236 bp, Serratia marcescens
atgcctttaaccgataccgctatccggggcgcaaaaccaaaagaaaagccctataaactcagcgacacgcaagggttataccttttagtacacccgaacgggtctaagtattggcggttccgacgaactatcggcgggaaagacacaacacgagcccttggttcatacccgctaatgacacttgcggaagccagagcatctcgtgatgagctactcaggagtcttgcgcaaggtattgatccgctgcactccaagacggagaaagtgagttcttttgaagaaattgcaagggaatggcactccagaaagaaggcttggtcggctcaacattcattaagtgttattaggggctttgaaatgcacctcttccctgccattgggtcgttccctataaacaccttgaatactcaagacttactgtcacctttacgtgcagttgaaagcacgggtaagttagaactggcatcccggctgcaacagcgcattacatctattatgaggtatgccgtccagtgcgggcttataaaatataaccctgctcaagacctaaccggcgcgattgaaaccggaaaatcaatgcataggccagcacttccattagatcggataccagaacttttactcaagattgaaaattattcaggtagaaggttaacaaagcttgctgttcatctaaatttgctaacctttataaggtctagtgagtttagattcgccagatgggaggaaattagcgaggaacatgcaatctgggaaataccagcccagcgagaggagatagaaaaggtccgttattcatttaggggaagcaaaatgaacacgccacaccttgtccccttgtctcgccaagcgatggagttacttagccaaataaaatttatttccggggatgaaaccttaatttttcccggtgaccattatcagtataagccaatgagtgagaacactataaataaggcattgcgaacaatggggtttgatacaaaatctgaaatttgcgggcatggtttccgagcaatggcctgtagcgcactcattgagtcgggcttgtggtctcgagatgctgttgagcgtcaaatgagtcaccaagagagaaacagtgtccgggcggcatatatccataaagcggagcacatggaagagcgtagacccatgctacagtggtggtctgattatctagatgcatgcaagagcggttttatccccccttatgcgtttaagtggcaagatgagtaa

SEQ ID NO: 449601 - DNA, 213 bp, Serratia marcescens
atgctttcacaacctcaagtaaatttttcaaatagactaattcgcttgccaaaagtgatcgagataaccgggaagtccagaacaaggatctatgaagacataaagaaaaactcatttcctaaacaggttaaaactggcatgcgttcagttgcttggctagaaaaagaaattgaggagtggattgaggttcaaaaaaaacaacgctaccagtaa

SEQ ID NO: 449602 - DNA, 606 bp, Serratia marcescens
atgtcaattatatttaaatacaatcactcattttctatttcttttttcgactttttacgctgtcgacgttttatctctgactgcactgcacttacgataaaacccgcaacactttcgccatcctcttttagtttttcaatggcgtcaaaatcctcgaggggtagcctaactgaggtttgtagtgacttattatttcttcgacctgttgccattactgcttctccgtatgtttggtggtgttcagtatacacgaaaaaaaccaaaccaaaacgcttgaagtggtgttcacctaagtgtaaggtggtgttcaccaaggcggatgaatgccttgtaaatagcgacgccccagagtgcgggaacactaccggggcgtctaatcacaacgtaatcgagatttacgctatgactaacaagaatcataccacactctctccagtagcatattgctggctattcctcgctgtcagacgttctgatgcggctgagcgtcctcaccgtaaagccattacagcgccagacgaacgcaccgcctttcagattctggccggtcagtttgtcttgtctttcgcgggtcgcctgcctgttcagggggtgagccatgcataa

SEQ ID NO: 449603 - DNA, 447 bp, Serratia marcescens
atgtttgatttcccgcaacccggtgaaaagtaccgcctgaataacggcgacaatgctaccgttatcggtattttgcataatggcattccacatgaactcccctaccgttgtccgggactggtctggaatccttaccgtaagccctattccattattatccgcatcgagcaggatggacggattattgagttaccgctggcgcgctttctgcgtgagtacacctgtatgggtgaagacaggttcaaacgggatccggctaaccgccatgctgtactcaaagaaatagcaaataatgccctgctgaatgcccgtcgtaacactaacgatataccggaggatacggaggcattaacactacaacaggtcgcctctcatcgtcctgcaaggcaggactggcgacatcggcagcatggcggacagtctgataattatcaccgctatttataa

SEQ ID NO: 449604 - DNA, 411 bp, Serratia marcescens
atgaatatcattcatatggttaataccatggaatttaaaattgccctgttacggcactatattgcgcaggcttttattgatgctatgtgtgtaaacaataatcgcccggtttatctccataacggggcggaaattaccctgacctctgaccgcgtcagcgccaatattgcctattacattgagcgtgaaaacatactggactacggcatcagccacggacaaatcatcaacgcggaacgcctttacagcatgctggatgactgcccgatgaccgtccccctgccgcaactctccgcctatggacagattgccatggattacatttatcgccgtatcgccctgggcggcgtgaatggtgtgctcccggcagaagccacggtaaaaatcctgacgggagacatggcgctatga

SEQ ID NO: 449605 - DNA, 2679 bp, Serratia marcescens
atgaaaatcgtctctgagactacccagaaggccaacggccattggcccttaattttgcagtcgcaagggattgccgttccggccaaccgtcagcacggggcctgtccgcattgtggcggtaaagaccgtttccgcttcgatgacaaggccggacgggggacgtggttctgcaaccagtgcgggaacggcgacggtctggatttggtctgtctggtgtccgggctggacaaggtcggtgccgccaccgcgatagccaaggcgctgtccctgacgccgcagcaacggccgggaaaagcgcccgccagaaaagaaaatgccgacgtgcaaaaacgcgcccagatgcaaaaaaactatcaggcactggctaaagaggcggtctccggtgagagtgcctacctcaaaaagaaagacctgaacggccatccctacttactgaccgccaaaccgttcagcatggccggactgaccttcccgccggggtcactgctgttgccgttacaggctcttgatggcgacataaccggcgcgcagttaatcggcccggagggcgataaatgcctgctgggtggctccaaaatgaacggctcctttcttgcggtaacgcctctgccggatgaagctcccgagcgtatcgtcattactgagggatttgccaccgccgtcagcgtttctctgctgtgtgacggttggtgcgtcgcagcggtctccgccaataacctgctgaatgtggcacgcgtgatgcgtgagcgctggccggatgtgcggctggtgattgccggggacaatgattttgccgatggccgggacaatccggggcgggagaaagcctttcaggcggcacaggcggttaacggctgggtaactatcccgccgggccagtttaaagccgactgggacgattaccgccgtgaatttggtatccagcgcgcccgtgacgcctttaccgacgaaatggtgaacccgaaccagaccgaaacccgtttaccccatggtttccgtctgacaaaggatttcctgtggttcgacaaggcggtcaacgatgacggcgacagcggccagacgcgccagattaaaatctgtagcccgttgcgggtcacggccatcacctgtgatgctgacggcggcaagtttggccgtctgctggagtgggaagactccaacggcattaaccatcagtgggccatgccgatgacggttttagccggtagcggtcaggagctgcgtgaggtgctgctggagaacggtctgcattttatcagcgtcaacggcgcagcgcggggctacctgatggagtacatctccacctgtcgcccggtgcgtaaagtcacctgcgtgaataaaaccggctggcatggctcggtctacgtgctacaggatgaggtgattggcgccggggccgagtcggtgattttgcagtcggcgtattcctccaaaaatgatttcaggatggccggcaccacggaggaatggattgagcatatcggacgttattgcgtgggcaattcccgcctgattttctgcgtcagtctggcgttagcggctcccctgttgcacctgataggggccgggggcggtggttaccacctcaagggggaatcaacggacggcaagactaccaccatgaaggtcgcggcatcggtctgcggcagcccggaatactggaagacgtggcgtgcgaccggtaacgcgctggaagggatcgccctgcgccgtaatgatgccgcgctgatgctggatgaaatcagcgaagttgacggcaaagaagccagccgcatcgcctacatgctggggaacggtcaggggaaagcccgtggccgtgtcgatggcagcgtgcgcgacccggtgacgtggacaatgctgtatatgtccaccggggaggtttccatcatagagcatgccgccgaggccggagagaagcgtaccggggccggtgtcggggtgcgtatggtgcaaatccccagcgaaacgggggcctatggagcttttgaactcttgcacgggttcagcggtggtaaagagtttgccgagcatctggagcaggccagcaagcaatatcacggcgcgccgttccgtgactggatccgttttttgaccggcaatttgcaagacatcaccagccgggccaagacgatgaaaaaagacttcgagcgctctctgttaccggccgactctggtaaacaggtgggccgcatcgttgaccgcttcgcgctgctggccgtggcgggagagctggcaacggaggccggtatcaccggatggcaacccaatgacgcctataacggcgcgaaaatgtgccttgaggcatggctgaaagaccgtggccactccgccaatcaggaagaagcggacgcgctggagaaggtgcgacgttttatcacggccaaccagtacacccgctttgctgactgggaggacgagaagaaccgtccggctaatatggtgggctatcgccgggtcatccggggcagtaacaccactgaggccaccaccacgttctatattctgccgagtggctggaaagagatatgcggtacttcagaccacaagaaaacagccacactgtgccgtgaagccgggtggatcaccgagaccagcgagagccggatacaaaaacaggtacgcctgccagaagtaggccctaaattcgtgtatgtgctgaatcatgaggtcgttggctaa

SEQ ID NO: 449606 - DNA, 204 bp, Serratia marcescens
atgctgaccctgaaaatcggtaatgaacaaatcacactgcctccccgggacgccgctcgcttatccgaagggttattactggccgttcttgacccccagtatgatgacggggagttttttcaattcgggccgttaaccctgacgaaagaacccgtgaccacgccaatgaaaacaaagttgattttcaaaactgacgcaccataa

SEQ ID NO: 449607 - DNA, 864 bp, Serratia marcescens
atggaaaagacaatgaatatcgacaatatcgttaatatcatcagacagcattttgacgccatgccactgaatcagtttgatactgacgtattaaccaatgcgattaaagtgggtctgggtggcactcaggagaataatgacacggttaatacggccattcaggcacttattgtggccaaggctaaccatcaatctgatgttcatgagatggaaggtattcttgttgccatcaataattgccagcagcagaaagaagccgctcaaagccagagccaacaggccgagggtgaatggcgctcccgcttccgcctgttacggggggccatgaccgaagacatgaagcaacaacacctgcaacgcatcgcacagcgtgagctggccggtgaacttgacggtctgattgccgagctggaactcgataaagatcgtcaggcactggcctgttccgcgtctgccagcaggctacaccttgctcacaaagacgctctacaggcttacgccagtcaggagatgagccgctcactgtcggcactttccgggctggtacgtgcggttaagctgaaacagcaggcgctggacattgagcaggtgtttaccacgaataatggcatgttcagcgagtacgaaaagaactccgatgcggtgatattcagcgagattaatcagcacgtgaaagacctcgcggagggctacgtattcagcatggataaagaagcggagctgactgaaatcggttttaatcccccagctgttgaatacgtgaatcaccgtatcttgtcatcaccgtgcgcacgccaaaaagcctttagggaactgcaggaaagagaaaacgccttaaaaagtaagagtatcgctcatgattaa

SEQ ID NO: 449608 - DNA, 180 bp, Serratia marcescens
atgattaattgtccgctatgtaaaagcaccgcatgggccagaggcagccgttatttacctgatggcagcaaagagatagatattcagtgccagaatatcgaatgttcggccaccttcagaacgaaagaatcggtgattaaaatcatcaaggaacctgttactcaacaaaagcaggtgtaa

SEQ ID NO: 449609 - DNA, 174 bp, Serratia marcescens
atgtttatttgtccttcatgtaaaagcaacgtcatcgccaaacaaggcagagtggtgacaggaacgacgaaagagaaatattattattgcaaaaacacttcatgcctgatgagtttcaaaacagtagaagggtttgaggcttatattcgcatcccggaaaaggccacgctatga

SEQ ID NO: 449610 - DNA, 261 bp, Serratia marcescens
atgataccgatgtttccctgcccggcctgtgctattaaggttaaggcccgctcctcacgcatgttgtcagcacaggtaaaggagaagtattaccgttgcaataatgcggcgtgtttgtgcaccttcaaaacctatgagagttttgaggcgtttatcaccaagaccagagacccgtatgcgccgcaacaggtggtctctcaggagccagaacgtcctcagcagcccaaacacaacccacgtttctctatgcgtctggagtaa

SEQ ID NO: 449611 - DNA, 1152 bp, Serratia marcescens
atgagcacagaaaaaccgttagtttttataagttacgcccgtcaagatagagaaaggattttatcgtattttgactcattgaataatgatgattactccctttggatggactgcaaaaaactaaccgcagggcaggattgggatttcgagattagaaagaactttgacaaagcagatattgtagtggctttcatttcaaaagaaagctatcaaaaaagaggttacatacagagagagctgaagctagcactaaagaatctcgaagaaaaactacgtgatgacatctatataatccctgttattttagatgacgtagaaatccccaccgaacttaaagggattcattgcattaaagatttgagcgaagtcgagataattagcgaaattaaaaaatcaatcaatgtacaactagacaaaatcacagccagtgataaaaaagaatcagaagacaaaactatatcatggagattcgaaaatagaaaagaataccgagatggactacctggatatgaagttgattgccagtttataaggttgtcatcaaaagaccataaaaatatagacgatatttcattgttaattaacagtgatttagtagaaaacttcgtggagtaccgaaaagtactgttggaccaagactcaactctattcaactatggaatgtctccataccagaggatggataccattgaatcaaactgcactacagtgaatgtcatcggaaggataatatctattttatatagtaattattacatgggagcgcaagcagcacatggaaatatggggttttccacatataactttatacttgatttccccgccagaataaactcattaagggaaatatttaaaaatccagatcaaactctaccaaaaatacaaagccatattacagaacatctaatttcaaccatttatgaaggggaagcagatgaacattcattagattggattaataatggcatacgtgattgggaaatgtttagaaatttcactttcaataatgatgggataactattcttttcagtccttactcagtagctgcttacgtttatggtccacaaattatacaaatcccatactcaattctatatgatgacattaaagatctatacatatcatttcttgagataaggcgccctatgtga

SEQ ID NO: 449612 - DNA, 141 bp, Serratia marcescens
atggatccgcaacggcaaattatcgactggctgcaacaagatgacgcgcgcatggccgccctgcgcaccgtgcgccggctcggcctgaatgactggtgcctcggcgccggcttcggtgtgggatcggcgccacggctataa

SEQ ID NO: 449613 - DNA, 792 bp, Serratia marcescens
atgagatacataattaataataatattaaatatcatgaagatagatcggagctggtctcgctgcatgacgataccccgccgattgtgctgacggccacgctgaaccgcctgctttccgcgctggtgcgcaacaataacctggtgctttcccgcgaaacgctgttgatgcaggtgtgggaggcgcacggccaggtcgcctccggcaacaacctcaacaacaccatttcgattctgcgcaaagcgttctcttcactcggtgaggaagagatcatcgtcaccctgccgcggcagggatttatgtttaccgccggtgagctgaatacggccgatagcctggcggaaagcttgcaaacggtggaggcggtaccgacaccgccagaaaaggcggcgctttcttctggcgccgtgcaaagcccgtggtggaaactcgccgccgtggcgctggttctgttggccttaggcagcggcatttgggcgtggctggaggcgggctatcctcctgtcagcgcaatcccggtggggaaaatcggcagctgtgaagtccgcttcgtctcttcctaccataaaccggggcccggtgaggtcgatttggcacatttgaaaacgctgcttgaacagcggaatcacatcaactgcagcgagcccggcacgctgttttattatgacagcctttcgataacaccaaataccacggggcgggtgagagtgtcttacttctattactgcccacaggcgcagatgaaggccggccaggtacaatgcgagaattttcatgaaaacagtgggttataa

SEQ ID NO: 449614 - DNA, 492 bp, Serratia marcescens
atgaaaacagtgggttataaatttttccatcgttatcgctatgtgctgttggcgcttttggcgttgctcggtggtgcagtggcctgttactcgttgtggttcaaacctcagatcccagaatgtcgggcggtaatatgggcaacgaatcggctggaaggcgaaacgctgcggcgtgcgttattgatcagcgtagtgccgaacggggcgcggcgcgccaatctgatcgtcaacggcagcttttttgtcggggatgctcgatacagcattgaccgggtcgtggtggcggactatcagcggcagggcaacaactatactttcacgatggtagcgaacaacaaaaggccccatgattctttaacattaccggagctgaatcggcgcttgcctatggtgggccagcagtatcatttacgtattgagcagatagacagccgacatttcctgttcgtcagtaattcggaaccgttatttgtctgtaccgtggcctcgtaa

SEQ ID NO: 449615 - DNA, 756 bp, Serratia marcescens
atgatttactgtataaatgacagcatcctctataacgaggaggaagggacattggcgcatatcgataacgtcaataataaaatagctttactcaaacctgccagtcgcctgctttccttatttatcaggaataataataagctgctgcttcgtgatagattacttaatgaggtttgggttgagcatggattgaaagcgtctaataataacctgaacaactacatttcaggattgcgcaagtcgctggcgcagttcggtgcggaggaaattgttatcacctacccgcgacaagggtttaaattcagcgccaaaaatattcatgaaatgaatattcaccaagaggagtcaaacaaccgagatgaaagtacaattgaaaatatgaccctgcccgcttcccaaaggagcgaccccagcatgcggcacgctatacagcgattaattatgatcgccgccgcgtgtttagtgccgtttgccgcggtcgtattataccaaaacagcacgcgcattaatgtttatccgctgggtaactatcagcactgtcaaatctatagcatgacgctaggcaacggaaatatagaaaaagttaaacgtatgattcaacaggcgggcctcagctgccaacaacgggcggatgtctattactacgatagtattcttaacgagagttcacaacgccatgaggagcaaataaccttctgcccgcgcgatgcccgtagcccatgtatcaataactacaaagatcataacgagcgctag

SEQ ID NO: 449616 - DNA, 1515 bp, Serratia marcescens
gtggccggagatgtcgttgttccagaagtccaggccgcacagtacatcgctgcagacgcgctcggtcggtttgcccttgtccagcaccgcgccgacgcccggcaaatccaccacgaactgggtcgggccgtaggccacgcccgtcggatccgggatgcggaactccgcaggaatatcctcgacggtcaccaacatgcccgggccgttgatggccttgcccaggttgatcatcccccaaccgtagagcgcgtcgatgcccggcgcgcccatgtcggtggcggtggttttcagcacttccgccacctgtgcgccattcaaatacgggaaacgctccatcagcaccgcaacgctgccggccacgtgcggcgccgccatcgaggtgccgctgtatttggcgtagccggtcgtcagattctccacgctggtgccttcgattaccgagctgtatacccgggtgcccggtgccgagacgcacaaactggcggtgtagccgcagcgggaagagaaggtgctgatgctgtaatcgccggtattggtgggatcctgcaggctggcgaccgacagccagttcggcgcgatgtccggcacgaaatacgccaggccggccatggcgtccgggttgttgaggttgccgtcgttaccggcggcgaagatggtgaccacgccgctacgcgccgcatcgatcgcgccctgataggcgccgccgggcttggtgcccaggatcacgctaatctgatcgaactgcttttgcgcgtcgttcaccgtgaagtgcggataagccgggtcatacccgcctttatcgaacttctcagtgatgccaatgccccagctgttgttgatgatgcgcgcgccgctggccaccagcgtattccaaccggcctggtaaaccgcgccgtcgttaccgaggatgatgccgtcttctggaccgggatcgccgttttcggcgctgatgatctgcgcattgaacgccacgccgtgcatagcgccgccgtcgcggctgccggcggcgatgccgcccacgtgagtgccatgcgaaccgagcgtgccatcggaatccacgctcggcgtaccgtcataacggaaaacgtcgcctttttttaccggaatatagggatcggtgtattcacgaatgccttcggtgaccagattgatcaccttattctcaccggcaaattcggggtgcttagcgtagaccggctgatcgaaaatgccgagtttgatgcctttgccggtataaccggcggcgtaggcctggtcggcgtggatcgcccccagcccccattccgcgttgaattcactgctgcgccagctggccggatcgcccgctttgccgttctctatataggtggcagcctgcgccccgccgatcgccgtcaggcagatcagcatcgcgctccattgtgcgcgatgaactccgatttcaggccagccgaaggccgcccgagcggatttgactcctctaagtttcttctccatcccagataccgtccgttgttgtttgcaaatgttttataa

SEQ ID NO: 449617 - DNA, 630 bp, Serratia marcescens
atgccgggctgcagccggtgtggaaagactgggacggttatctgggacgcagcgcgcaataaacggcaacgtttaccgccgcgtgaagaaaacgctggaacggccgcgcaatgccgaacggtggcgctggcgccggcaggcccgccggctatagtgaccttgccggccgccaaacccggcgccggccggggccgtctccctctcgatggccccgccttatcccatcccggatcgcgccggagattctcttgcgcgacgccgggccctcgtccgcggcaacgcgcatgtcgcgtatcacggcttgtaaaagcgtacgggcaggttgtcttgtcggctaatgggcagtcagaaagatggtctagttgcgttcggtattcacgcaggagtgatattcatagggcgctgttacggcagaaaagtgaggaacggggaaaaagaaggtacagcgacgaagagaggttcgaatggtcatccccggtactgcctatggccctggtgttggccgcagagcttttttgccgcctgctccctgcttacggacaagagcaggcggtttattttgtgagactggcacccccccaggacgcgaatcacacagtatgtgcgctaattaaccatacaaacgattaa

SEQ ID NO: 449618 - DNA, 180 bp, Serratia marcescens
atggctaagactattaaagttacacaaactcgcagctcaattggccgtctgccgaagcataaagctactctgctcggtctgggtctgcgtcgtattggtcacaccgtagagcgcgaggatactcctgctgttcgcggtatggtcaacctggtttcctacatggttaaagttgaggagtaa

SEQ ID NO: 449619 - DNA, 1245 bp, Serratia marcescens
atggacagcacgatgagacattccattgaaaaaatacatgttacaaatacgtctaataagtcaagttctttcactataaacttagatggaaaaaatttaattatcaccggcaataatggaagtggtaaaacagtttttctaaataaaatgttcagtattttaaaagacgttattatctccacaggaaacgattatcaaatagaatttataaagagtgaaatagaacgccatagtcacactttagctaacttaagcccaggagatggaaactatagattcaaaaaggaaaaagtcttagagttaactgaaaaactagaaaaaagaaagatgttcgatataacctttcgtaatatatccgaactaaaaaaatcatatcatgagaaaaaatcaatcgtcaggttttttgaggccacgagacaagctaaaatatctagtgacggaaaaataacaagcttagatagcttgtctaacgaatatagcacctataaccttcaaaatgattctggtgtcttttttgagagatacttagtaacgacttggaattatgctttattacagcgagggcttaataaaattcatgaagccgatagagttgaaaagtggatatcggaaataaaaaatgatttacaacagttatttgaagatccaagtttgacacttgagttcgatgttgagtcgttacgtatctacatagaacaagatggaaaggataggtatcgtcttgaccagttatcctcagggttctcatctatattatcggtttacgctgatctattaatacgagttgaacttggaaacatagaaagaaaagacattacaggaattgtattgatcgatgaaatagatgctcatcttcatgttacattacagaaaaaagtatttagctttttcaaagaagcctttccaaacgtccaatttattatatcaacacactcaccttttgtggttcaatcagtttctgacgctgtgattttcaatctaactacacttgaagaaatggaggatttgtctttatactcttacacctccattattcgagggttattgggggaaaaaagcacatcacacttattacaggaaaaaatagaagcattagctaatcttgtaaaaagtggagatttcaatgatattgattatctagagatcatgagtgatttagagccttatatcaacgatatggaccttagatctaaatcaataatacttagtgcaaaaaataagtttattgaaaagcagcaggggtga

SEQ ID NO: 449620 - DNA, 558 bp, Serratia marcescens
atgatttatggctatgcaagagtatcaaccaaagagcaaaacttagaccgtcagttaactgctcttgagcctatatgtgatgtggttaaggttgagaaagtttccgttaaagatttgaaccgtccagagcttcagaagctgtttgaattcatccagtctggtgacacgctcatttgcaaaagcattgaccgtcttgcaaggaacacgaaagatttgcttgaagtggttgattcactgattggtaagggtgtgattgttaagtttctggacaactcaatgagctttgacaatacaccagcttcacgattgattctgaccatgatgggggctgtagcagaatttgaaaggggtatcattgcagccagacgcgatgaagggatagcggttgctaaagaggctggtaaatacaaaggcaagcaggctaatcaggcacttcacgttaaggttgtaaagtaccttgaagcgggaacttattcacctgatgagatagcaaagctatgtgaatgcggtagagctacagtgttcagaatcaagaaagaatggaaaacagcagcttaa

SEQ ID NO: 449621 - DNA, 705 bp, Serratia marcescens
atggactggcttccctatagtcagatgttcaacgagttttccggagagttagcgaacgcactgaatgagcttctaggttacacgcatcagttggctgcttggcgcgacctgctggctctgcaggatcaacagcagcagctggatgccgccgtggatttcgttgacccggtagctactgttgcgctcaatctgccatatgtgatccgttcgcgcttcatttttgcctctgcgcatctgtgccaccaagccaatcaggcgaagcaaggggctgcgtggaaggacgagtttccgctggatggagaggtttggttcgatgcagcagataagtatgggaaaaattggaagcgttacaacactttcaagactcggctggagaaggtcggagccaaggactaccaggtggccaccaacgacttccggaacgcttacaaccaccggttctcgcctaggatcgtgcttgggatttccaagtttgtgacgagacgggtaaacaaggataccggtgcagtgtcctatggctttggggcgagtccggccttgacgttgccgcatgtcgtcgaattgctggaggctcagtgtgagcgcgcccatcgagcgtttgagtctttccagcagttgatcagggaacacgaagccgcgatctgcgtccacaacaccgcgtccctagcttctgtgaaagcgtgctcccgtacaaacggtgcttaa

SEQ ID NO: 449622 - DNA, 2310 bp, Serratia marcescens
atgtttggattcttcaagaggaagataaaacgatcacccgcaataccggcttttttggcaaatgagcctctagatgacacccccgaactgcagaacgacgaagctggcaaggatcaatatatcgctgaccagcccatagcgagcaagaaagacgacaaattcaaccgagcgccttttgcaacgcggatcgctgaaaccctcgccactcgttcggatccgtccagtattgtgcttggcctatatgggccttggggtgacgggaagacgtcggtacttgagatgatgcaagaagaattgaccactcatgacggcatcatcatcgtgcgcttcaatccttggcactttcaaaccgaggatttgctccttcgcggattttttgccaccctcgccgatgcgatgggaaagtcactacccagcatgaaagagaaagcagggaatttgcttcaaaagtatggcagtgtactttctctggcatcactcacggttggcggcatagtgcaagtcaatcccggcgaagctgcaaagggcatgggcgacgcgatgtcaaatgtaggccttgatgaactgaggtcacgcattgagggcatgcttgacgaagcaaagaagcgcctcgtcattctgatcgacgacatcgaccgactagatcgtgacgagacacatgctgtttttaaattggtcaagttatccgccagtttccgacacaccgcgtacgtcctagcgttcgacgatgctgtcgtctcctccgccttgggtgagcgatacggcgcaggaggcgctactgccggacgagcatttcttgagaagatcatccaagtgccacttcacttgcctccagtggacgaaaacagcctgcgccatcttgctttggagggtgtagataaggccttaaatcatgcaaaggttactctcacacagcctcaagttgatgcctttgtaaggcattttgacgatgccctcttacctcacattgaaacgccacgtcgggccaaactactgtccaatgcccttctcttcgccctgccaatcctgcgaggtgaagttaatccgtccgaactgatgttgattgaaggcattcgggtcatttatccagaactatacacggcgatacgagacaacccgatactgttcctccatggtgaacgtgaagcgcgacgcaaccaggggcaggacgcggttgaccagattagtagcctcctccaacaggcaacacccgccctctccgatgatgagcgagtagtcattaggtctcgactgctggagcctctgttcccgcgcattgggagcatgggctacggcagcgaatgggactcaatttgggccagggagcaaaaggtttgctccactcagtactttaagaggtacttcacctacagcgtgccggtaggtgatgtccctgactcccatgtagcagctttctgtgaaggcgcgcctcacgcctcccctgacgagagaagaggcctccttcaagggtttgctgctcgccaaggtcttccgagactgattgctcggctgcggcaacgggaagattcagtaacagttgaacaagcaaccgcactcatagcaacattcgccgcaaatggtgatttgctcccccgggagcgtggaatgatggtgcttgctgacacacgagccaaggccgcaatgctgattgcaggcctattgcgtcaaatcccgtcgcctgaggacaggcaaacagaagcagaacgagcaattcgtatgtcgatgccagtaggattcgcgatggaatgcattcaatgggttcggaactatgaggacacgccacgtgagaagcaggttctttccgatgaaggggaaggtcctttaagggctattctcttggcacgtatagaggaagccaatgcagattcgcctctatacgcctcacaccccaaagatgcacaatcgctctattgggtatgggcatatgaaacatcccctgcacacgtgcgtgagaagctcacggtaaggttcgatgcgcaccctgaagaacttgatgctttcttagcttgctatgtgggagaagcttggggcatggaaagtgggctgcccagaccagctgactttcgacgggagcagtacaacgctgtcacccgattgttgccaggtgactacgtatcggcgaacttgcgccaacgctatgggccagaacttgatattccacaggaatatccgcctgaaactatggtgcaagcacgtcgcgttgcgcatcagttcatgagcgtgcatctctatgtcttggagcacccgcaaacaacagaccaatcttcgcccaatgaaaattccttggaagacgatcagttggaagcatag

SEQ ID NO: 449623 - DNA, 330 bp, Serratia marcescens
atgaaattaagtcaactcacgtttattggcttctatctaaacggagcccaagggagtgggaagcatgattccatctcaattgaagatgtcaaagccgaattggaacgtggcacgttgttcaactatttaaaaaaaaggctaggtcaagatattgatacaagtatcttcactgaagaagaaaaggccatactcaatgcggaatggcttgacctagcacttgctgtcgatgaacgccgtaagatgtgcgttgataaaggcggattatgtctcttagtcgcatatgtatttgagagcattcaaaggctcaatcgcgaacaaaagaatgcatga

SEQ ID NO: 449624 - DNA, 945 bp, Serratia marcescens
atgaccacccgtcgcgataatgacttccgggtgcgtcccagctccccgaaaaaccggagcaagggtcagggccagagcttcgtctccaaggtgctcaagcagaccggcaaggccagcggcggcaagtcctcgatgtgccaatccactgcgggtggtagtggcgcacgcgccggccagcgtcccggctcacgcctggggcggggccatacggcggcacgcttcgctgacacgaagctgacccctatgtcccggcgtgtgagcatcaagacgctactggtgaatcaccagcgggccagcccgcaatcgctcaccaagcacctgcgctacatcgagcgcgatggcgtagggcgcgacggcgagccgggccaggcctatgggccgcagaccgataccgccgacctcgacgccttcaaggcacgctgcgccgacgaccggcaccatttccgcttcatcctctcgcccgaggatggcgcggagctggaagacctgcgcacctacacgcggcacctcatgggccgcatggaggccgacctgggcacgggcctcgattgggtggcggtcaaccactggaacacgggcaacccgcacgcgcatatcgtcgtgcgcgggcgcgacgacaccggcaaagacctcatcatcgcgggtgactacatcgcccacggctttcgctaccgggccgccgagctggcgaccgaatggctggggccgcgcaccgaactggagatgcagcggaccgtgcagcgcgaggtggcgcaggagcggtggacaaatctggataacaccttgaagcacgaggccggcgacgatggcctcgtgcatgtcgaacggctcaacgaaccccgtttgcaacgccagcgccagttgctgatcggccgcttgcaacgcttgcagcacctgggtctcgccgacgaggtgcagcccggccagcttgaaggccgaccttga

SEQ ID NO: 449625 - DNA, 600 bp, Serratia marcescens
atgaccacgatccccacgaccggccccgcgccgcgtcctcgtccgcacacccgttcacaggtacgcgctcgcctcgtgctggcgggcctgtctgccttcggctttgccgcactggcctgggcctcttttggcacaccgtcgccgcgtgtgatctacaacccgtccgacagcgtagcggctggctggtatcacgtcgagccgctgggctacggcaccagcttgctgcctcctccgttgtccgtgggcagcatcgtcctcacccagcttccggtcgacgctgcggcgctggctgcgcagcgcggctacctgccggtgcgcttgccgctgctcaaacgtgtgggggcaatggcaccgcaggaggtgtgcatctcgggcggcattgtctacatcgacggcgtacctgtggccgccgtgctgcctgccgaccggctgggccgggcgttgccatccttgcagctttgccgccgcctcgaaccgggcgagctgttcctgctaagcgtggcgaatccggcgtcgttcgacagccggtattttgggccggtcagcgcgtccgccgtgatcggcgttgcgcactcgatctggctggagacacgtccatga

SEQ ID NO: 449626 - DNA, 867 bp, Serratia marcescens
atggaaaagtttgaaaaaaagaatcatcactacgtcccccagtattggcaacgtggtttcagaggaacgaacaaccgcctgttcggcaaatttgattcaggcatttggcccgtgtctcccaagacaatcatgcagcgtgactggctgtacacggtttttgatgatcaatggaatccatcagacgcgttagaggacatactctctaccgtggagtcaaaagatgcacagctgtttcaaaggctacaaactccaggctaccaaccgatacccagtgaccgcgatcaactttgcttcgcattagctttacaggccagtcgccatcccgatgttcttgaacgcggtcatagacttacgaaggcgcttggagccttcctggcggcggctcattccatgacccttaatgatttcaaacgcgacgctgcggcatttggtatcgatgaaacagaagcacatgattgttatgtactgcttacttcgcgaccggaagagcaattggctgttgagctagccgacttgctagccctttcaccccagtcaccagagcttcccgcacaggaagcacttttggcagcacctaagatcgcggaaattataaaaacactggaattgtgtttgttggatgctccttctggcgaagcatttgtgctcggcgatacgccgcttccacagtccgacttggggcttggtttttcagttccgctatcaaagtcgcttgcagtgtgcgccattccaagcacagctaagcaagctacgatggttcggcgactcgccactgtctccgaggtcgcgaaggtcaatagcgagcagtgggagagagccttgacagttgtcattggccccaccgcagcgcttcttgcgacgctgtga

SEQ ID NO: 449627 - DNA, 816 bp, Serratia marcescens
atgaataaagcacatcgcccgcacggcaaggctcccactgcatgggaagccgacattctcaaaatcagggcctttgagatggtgctaatccttttctacatggaggatttgcggcgtttcatcatgggttccatcgaggccaccgacaaactgcatggtgtcaatcggctgagcgatggcaagaccaaaaccaaggaaggcaaaaagctggaacgggcacgcgccgtattggtttccgatggtgtcattagtcaggccgagagcgatgaactcaaagaactggtggactatcgcaacattattggacacgcagtccatgatctgaccgtagatgtgggtgcctattccgatctgacaagacgtgacccaaaaaccttcaagccaatacctttgtatgactacacggccgccaagagggccaagacgctgcggcagaaggtgagtcatggcatgatgaagaactttgtgatgagggcgtcgctcgactgtctggcctttgaagcggcggaaaagacctacgttgcggaaattgagcggttgaagaagcgcgtcaataagggtatcgcgaaagccaacaaagtgattgtggaagcgaaccgtgtcattggggccatcccggaggctgtgatggagtcggctcagcccggccatccgaggaacaccaaggaaaacggcgctttgagcaagcgtggggcggaatgcgttttccagctctatgaagcccaggcaaccccgttggctgtggcttacttgatgaggatctcacgccgttcggccacgcattggtttgcaaagtggaatgctagcaaggcatag

SEQ ID NO: 449628 - DNA, 510 bp, Serratia marcescens
atgtcgcaactgtccttttcctcgttcgataccacgctgatggtgcgtgatactcagggccgttacctgccagcgacggcagaccagattctggaagccgcgcgccaggtcgttgagcagaagatacaacgcggtacatccttcacttcgccagaagtggtcaaagaatatctgtgcgccaaactggccggctacgaacgcgaagtcttctcggtgctctttctcgattcacagcaccgcctgatcgaatatgtagagatgttccgcggctccatcaacagcacatcggtgcacccgcgagaggtggtcaaacaagcgttgcagttgaatgcggcggcggtgctcctttcacataatcacccgagtggaagccctgagccgagcgaggctgacagtgctctgaccaagaggcttaaggagatattggcactggtggaggtgagcgtgctcgatcacgtcatcgtcgctggcatcggcaccacgtcatttgctgaatgtggcttgctttga

SEQ ID NO: 449629 - DNA, 420 bp, Serratia marcescens
atgtccataaaggataatgttaacggcatgctcgctaacaaattattttttggtttcgtgtccgtattaatgagggtactgctttcatccggtttcattattgcgggcataggcaaaatttcagcgtataacgcgacggcagagtatatggcgtcgatgggtgtccccgctgcgcttttacctttagtgatcctcactgagttggggggcggtctggcacttttgctggggttccagacgagggtggtttccattcttttcttcggattctgcatcatctcaggactgatttttcacggtggttccgaccagcaaagccagtttatgctgatgaaaaatatcacgatgtccggtggttttatagccctgtttctcttcggaccaggcgggttcagtatggataatagaagaaactattag

SEQ ID NO: 449630 - DNA, 837 bp, Serratia marcescens
atgcaagaagaagtcattgccgttattacaggatcaagtaaggggatcggtaagggaatagcaaaggaacttggccgccaaggtgcaatagtttatgttaccggtcgcgatctggaaaccgtcgaagaggttgtcagtgaaataaaacgcgatggggggaaaggcatagcggctgtgtgcgatatgtctgacgatttgcagatagccgatctcttccatcgagtggagcaagaacatgggcacctcaatattcttgtcaataacgccacgacgcttaacagccaaatgggcgtgaaacccttttgggaagccacgtcccaacttgccaatatactggatgtgggtttgcgctctcatcatattgcgacttggcatgcggcgcgcctgttgcttaccggtgagcgtgggctaatcgtcaatgtatctttctatgcagatgcgaaagtacatgacccagcttattacgcgtcgaaggcggggttggataaattagccgcttcctacgctgagcatttctctccttttgacgtttccgccgtctcgctatggccaggtttcgttgccacagagacgatgcttgagcttgcagagtcagatccgaaaacccgtaatcttcgtgataccttgggatttgagagccctgagttttgcgggcgcgttatttgggcgctttttagcgatcctgatttaaaaacgttatcggggagtacattactgacggctgaattaggtgagcgttataatattatcgataaaaatgggcatagaccgaagtccttgcgtcacttatatggtagccctcccgctgagcacgacgctatgaaaaaacaccggtga

SEQ ID NO: 449631 - DNA, 990 bp, Serratia marcescens
atgacgcgggttgttcagttttatcatgtcggtgaaccagatgtactgaaaattgtggacgtagatctccccccgttggctgccgatgaggtcagcattaaggtgaaggctatcggtttaaatcgggcggaggcgttactgcgccagggtaaatacgcgtttcctccagtatttccgcaacgaatgggatatgaagcggccggcgtggtcgaagccattggtgcaaaagtacaaggctttattccaggtgatgcagtgagtgttatcccgtcattgtcgatggctcagtggcctacctacggtgaaactattcactttccagccagctatgtcgttaagcatccggaaaacttgtcctggcagcaggcagcctcggtatggatgcaatacataacggcatatggggcgttggttgatgttgcagcagtgacctccgatgattatgtcttggtaacggcagcgtcgagtagcgtcggcatcgcagcgatgcaaattgcaaacctgcttggtgctcgggtgatagcaacctcaagatcagaatccaagcgccaggcgctgctcgacaacggcgcagcatgggtggtcacttctcagggggaggagaggagggctgaaattaaagagatcactggcggcaggccgccacgagtcatctttgattgtatcgggggagaaggcgtggtcgggttatgcgagctattggccccgggaggtatattgatagagtacggtaacctcagtggcgaacctactcctttcccggccaatgtggcgatcccgaacggcctgacaatcaggggatttgcttatagcgagattgtgggagacgcggttcgtctcgccagcgctaaaacgtttattttgtcagcgctgggccgtggcgaattaaaaccggttatagcgaaatcctttacgtttgatcagatagttgcggcgcaccaatatctcgaagcgaacgcccagttaggcaagattgttgtcactgtttga

SEQ ID NO: 449632 - DNA, 936 bp, Serratia marcescens
atgaatcagcaatttgcagccgttctgtacagctatggtgctgagggcacgattaaaattgcgcccatcaacaggcctcaagtttcaccgggtaaggttattgtcgagattgccgccgccgggataaacccattggattggaaactgcgtgatggactgcttaagaacatgtttcccttgtctttcccctgtattttaggcggcgagttttcagggaagatcattgaagttggggccggcgtcacgaccttcaaggtgggcgatcgggttattgggaaacctcttaatcgtggagcgtttgccgaaaccatagaaattacgccggatgtgttaataccggtccccgatggtctggatgacgccgtcgctgcgacattgccggttgccggctctacggcgtggacgggcttatttgatatagggcaggtaaagccgggccaaaccgttttcattcaaggggcggctggcggggtaggctctttggctatacctttggctcgccgagcgggggcaaaggtcatcgcggcggcttcgcaaaaaaacggtgattatgtcaaagcattgggagccacagatgtcatcgattctcgcgacgcccatgccttggcaacgataaagggcgttgatctggttcttgatctggtcggtgggcgagcgttggaagctctctggaacacgctggcgccacaggggcgaattgtcagctccgtggcggttgatatcgcagaaagaagatctgacggccaagcaggcacagggacttttttccaaatgaaatatgatcgcgccatattgagttcaattgcgaaggatattgccaagggagtgattccagtcactcctccccgcgagttttatttaaaggagacctcgttagcgctgaactacgtcaagaacggaggtggcagggggaaggcggttatacgcatgaaataa

SEQ ID NO: 449633 - DNA, 888 bp, Serratia marcescens
atgaatatgaacgcattgcaggacttcatcagtgtgattacacacggcagcttcagcgcagcaagccgcgcaacaatgacgcctaaagcctctctatcgcggcggatccgtcagctggaagatgaactgcaaacgcggttgtttgagcgcacaaataccggtttcaccttgaccgctgaaggaaccctgctattcgaacggattaagcctttggttaacgagctcaacgacatcaaaactgacatgatggagcagaccggcagcccttcaggaaaattacggattagcgtccctcccgttattgcatttgatagcttgggtaagctggctgctcggtatagagaacgttatcccctggtggaacttgaactcattgctgacagcagattggtcgatcctgttcgcgaaggtttcgatgccgttattcgtgtcaatccgaatgcggatgaagagatgataggtataaaaatattcagagaaacattaatatttgttgcgtctccgcaatatagagaacaattggccttgggagatacgctaacaagactccctttcatcagtattggaacgcactggaaaccgaatcaaattagtaccttgttggatggggaaccacgacatttcaacgtgaacacggaattatatatctcctccccgtttatcacccgttctaccctcattgcggggataggttccgcactgctaccggaagctttagtcgccgatgacatcaaagcacgcaggttgctttacctgggcgtgagtgaacagcctgagttggttttatggtgcctctatcccagtagacgatacgtcaccggaagattaagagcctttattgatttattgaaggaaacattttcacaggaacgcggcgagaagaagtaa

SEQ ID NO: 449634 - DNA, 276 bp, Serratia marcescens
atgattgccaccccacagacctaccgcgagcttgccgatgtcatgcaggcgcactggggcgttgaggtcaacagagtcctgttggacaaagagcggctgcaggaagaagtgctgaaccatccgcgtgacgtcggcgccaaataccggctggctttcgcccggcccgacggcgtggcctgggataaggcgaagaccttcaatgcgcgccagggcatagccaccactaccgccgagcagtggctggcgcagcaatgcccgatcgctcaggacggttag

SEQ ID NO: 449635 - DNA, 810 bp, Serratia marcescens
atgcaaataactatagtgaccccggctttcaactgtgcgcatacaattaacgacgtatacgcaaatttaaaaccgcttttagcctctggcgtcagatggattatcgttaacgattgcagcacagacaataccaaagagtttttggaatctatatcaaagtctgaagttaatgttaatgtattcgaattgcataagaactccgggcctaacatagctaggcgatttggagtaagcaaaagcagcagcgatttagtgtatcttttagattctgatgactttatttatactgatgtttttcaggatttcattgattttgtcacaagcaatattaagtttgattatttttacgcaccactcaaagcagtagataacaaaattaagtttaataacttcgagagtttcccgccggcgcaggtgcgagaaataaacaaacccacagaccttatacggtatggattccctcagccaagcgcaattcttataaagaaggatttctacttagctaacgatgttagtaacacattaaaatggggtgaggattttttcacttttctttgcctatcaagcaatggcaaaggtatacgttggactacccctataagctgctatgtaatcggaggcggaagaggtagtgtcttatcattaaaactaagaatagctttatcaaaaacattgtttatgtattccgttagaaatgaaaaaaataaatttaacgctttgctctacacaggatacttaacgttacggcacattgcttcttacgccgtcaagaaattgaagaagtacagaacagatagccgcgaatattaa

SEQ ID NO: 449636 - DNA, 501 bp, Serratia marcescens
atgaaggagttagacactctggttgtccgtgcgctttttaactacgaccccgatactggggtgctgactaatcgagtaactcgcggtaatagcaagaccgctgagaaaggaggcatctcaactaaccgagttgttggcggctataaaatcgtgaagatattcggcatcacccatatggagcacaccgtttgctatgtgcaccatcacggagcgttgcccgatgggtttatcgaccatatcaacagggatcgaggcgacaacagaatcgccaacctccgtgtcgtgaaccgtaggcaaaacaacatcaacacccggatccggtcggataatgcgagcggatttaaaggagtttctttccataaaaagtctggaaagtggatgtcctacgtctccgtgaacaataagcggcatcacctcggctatttcgacaccccagagctggcccacgatgcgcggcagcgctttatcagcggtgacgctgattttgagtactacagctaa

SEQ ID NO: 449637 - DNA, 489 bp, Serratia marcescens
atggcagcaccaaagggtaaccgattctgggaggcccgcagtagtcatgggcgaaacccgaaattcgaatctcctgaggcgctgtgggctgcatgttgtgaatacttcgagtgggtggaagcccacccattgtgggagatgaaagcattctcgtatcagggtgaggtaacacaagagcctatcgccaagatgcgagcaatgactatcactggcctgacgctatttcttgacgtgacgcttgagacgtggcgcacatatcggatgagagaagatttatctgaagtcgttacgcgagcagagcaaatcatctacgaccagaaattctctggcgcagcagctgacctactgaacgccaacatcatcgcccgtgacctgggcctcaaagagcggtcgcaagttgaagacgtgacacctgataagggagatcgcgataagcgccgctctcgtattcaggagttactcaaccgtggaaagcgaagcgattcttga

SEQ ID NO: 449638 - DNA, 462 bp, Serratia marcescens
atgaagtggccgctagagcattggcaggccgctatagtggccgtggtgctcttcctgctggcgtatttcgctatcagcaatcaggctctgcgccacgaacgcgacaaattgcaaaccgccaacagccagctgtctggccagctcgactggcagaacagcacacagcgcgcggtggcggccatcgatcagcaccgcaccaaggagctaaacgatgccaagaatcagattgatgatctgcagcgcgctgttgccgctggcgctcgcaagctgcagctcgccgccacgtgcccaaccaccggcgccgccggcgtggctgatgctcccaccgccgagctcactccagacgctagacaaaattatttccgtctcagagagcaattagcggtctctgaacagcaaattcgtggtttgcaagattacattcggagggttgttttagatgagacgggcagagataagtga

SEQ ID NO: 449639 - DNA, 735 bp, Serratia marcescens
atgggggcgctgggaatgtgccaggctcaggcggaatttggtcttgcggcattcctgggcaagattggcattagcgaaacggacaaggtgaaagcggtggtgctgttggcaaagtatggcatggcgcactgtgacaaggttgcggcaattcgtaagctgtcgggcgaggtaaaggccagggtcgtcctcacattggcggtgtttgcctacatggattattcccgcagcgcagccagtgaagtgccttgtgatgcgtgcgacaacggttttattgaggagcgcaagtttgttatgaacaagttggcgctggtccacgatactacctatagctttgttcgtggtgacttgccagcgtcaattacgccaattgaaggtcgggagatgctggtgaagcacaccttctatgatgttacgcacaaggtgtgtccgaaatgtaacggtaagcgagtcatcaagacggcgtgcaatgactgccgaggccgctgcgaggttgtcgacaaagctgagtcagaacggcagggggtaccggttaaaaaaccgtgcaagcgctgttctgggagaggatatgaacgcctgccggcatcgaaagcctatagagccatacaggaatatattcccgatcttcctgagtcatcctggcgctgcctctataagccattctacgaacagcttattactgagtgtgataaacaagaatcaattgcaggggagcagttgctcaaagtgactaagtga

SEQ ID NO: 449640 - DNA, 408 bp, Serratia marcescens
atgaacggtttaacgctgaagcaggggaaagtcctgaattttattaagcagtttattgctgagaatggttgtccaccgacaagggttgagatagccgagggttttggttggaagtctcccaatgcagtagagattcatctgcgggggttgtgtaccaaaggggcgataatcatcaagcccggagtgtcgcggggtatccgagtccaggaggatgacaaagaggtcacaatcacgcgtacgcagttccggcaggtgtgcgacgcgctaattaacgccaccaatttgaaccggcagcttttgctgctttcaactgccgatgagcgttcaaaaacaattcattatcaggccttcaagcttttacaaataattcgtcagcaactgtctgaagccgtgggagagaacgcatga

SEQ ID NO: 449641 - DNA, 465 bp, Serratia marcescens
atgaccgatgaaacgaacatccccgacaacagcgacaacgtgctgttgttcaccaagcgctttgacgagaacgcagacatcacggaaatgcggaatttcgttgaggaagacgcgaagcaatctcgccgctgttttcaccagtctgtaggagtttcggaatacgagcgcaaagtgacttgccgtcattgtggagccacccttgaggctttcgattatctattgtctgtggcaaagcgcgaaacaaaactcgattgggaactgcgcggcatgcgtcgtgagatcagcgatcaccgccaggggctggagaagctgaagcgggaagaggtgaactgcaaggcccggatcaaaaacgccagcttcaagctcaacgacctccgcattgagactgagaaggtcgagaaagagcttaaatttctgactgaccgcctggagcaagtgcgtgtgctgcgagggggtaaggcgtga

SEQ ID NO: 449642 - DNA, 1098 bp, Serratia marcescens
atgagctttgatgcctataagtgggcaaccaattgccgggtgggtaacgctgcggcgaaatcggtgctgaaggctttggccgacaaggctggaactgatcacctttcgtttccgtcgatagccgccatcgcttttgaaactgagttgaatccgaagacagttcaaaagcatctgcaatatttggttgagaaggggttcacagaagacaccggcgagcgccgtgggcgcactggtcagatccctgtttatcgtctcattggtgtgccagataaaacgggcgacgttaaacatacccaaaaacgggaacattaccaaaaacggtatcctttaaatattgatgctaacgatcccaaaaatggaattgtttctaacaccaccaaaaacgggaacattaccaaaaatgggatcgttacggataacgttcccaaaaacggtattgttaacgccaatgaaacgatcccatttttggaggttaacgatcccaaaaacggggtacggatcttatcaggaactttaaaaccaaaagaaataccccccatagccccccagaccgaacaaccggcagtgaactttgccgacttggcgggagaggtattggattttctgaatttaaaaatcaacggcagaacaccgaagcgggccgatacgctacgagaaatcaccgaacggctggctgagggaaactcagtgggcgatttgaatctcgttgctgaacaccgcgccagccagctgctgaacaaccccgagttgggtcacatgcttagcgccagaatgattttcgacccaactcgctttggggggtatctggcggcggcgaaagcgtgggatacaaaacgagcaaaaaaaacggcattggctgccgctgtagagcaacagcgccaagagccgccggcgggcgacgtgccgggtatcgactttgacgatgctttcaaccgcttgctggtggaagggcaccccccagaaaacccagcagaaaaatcagcgtggcaacacgttcaaaaatatggatttagcgcgaaggatgaagatggcgcccgccgtgaatggcgcgtcattctgacccgcgcttatgccaagacgagaggggttgaggcatga

SEQ ID NO: 449643 - DNA, 408 bp, Serratia marcescens
atgcaagttatcccacgcatcagcggggcgcgattagcgtcactgccggcaggctcacgtctgagcttcaataaccagattattaccatcaaccattgccggtcaggcatcgtcaattacaccgatgagtccggggcgcaacgtgaattcgccgttgatgtcgtggccgccagcgccacggaatgccttgaagcaacatcttgtcagtgttgcggcgttctgcgcctgcgctccgagctcatcaagaaaagaatcgaactgccatttcggaccccggaaaatcttctggtctgcgctgatggcctgtgttctgcacttcatcaaagcattcgcgccccagggcgctatatgccgtcgcaaaaaccaaagggacgatattttaaaaggagcggttatgtcagaaattaa

SEQ ID NO: 449644 - DNA, 162 bp, Serratia marcescens
atgtcagaaattaaattcaaccggcgtgccggacatattcatcaattgtcagggcaagattttattcccccagagccaagcggcttgaccaatggtgaatttattttttactccatcgttctggttgtcggaattttaacgctgggggtgatatggaattaa

SEQ ID NO: 449645 - DNA, 159 bp, Serratia marcescens
atgagatatttagtagagctgcagccaaccgaagatcagatagcagcgggaattgaacaacttcaagaagacttggacggctacttagatgatttagatgatgagcagctgtcagatgttgtgacctttatctggcaggccatgttagctgcaaaataa

SEQ ID NO: 449646 - DNA, 714 bp, Serratia marcescens
atgaattccactgagttacgcaagattcttgacgatcacaaaatatgggtaacgtcgttacgtgaaagcggatccagagccaacctgcgcgatgccaacctgcgcgatgccgacctgcgcggtgccaacctgcgcggtgccgacctgtgcggtgccgacctgcgcggtgccaacctgtgcggtgccgacctgtgcagtgccgacctgtgcggtgccgacctgtgcggtgccgacctgtgcggtgccaacctgcgcggtgccgacctgtacggtgccgacctgtgcggtgccaacctgcgcgatgccaacctgcgcgatgccgacctgcgcggtgccaacctgtgcggtgccgacctgtgcggtgccgacctgtgcggtgccaacctgtgcggtgccgacctgtgcagtgccaacctgcgcggtgccgacctgtgcggtgccaacctgtgcggtgccgacctgcctgatcacacattcgtaataatgggccatgactacccagtaaccataactaacggcgagtatgtccgcgctggttgccagaatcataccgttgagcaatggcgaaaattcaccaaacgagaaatcgcagagatggacggcaagaaggcgctgaagttctatccgcgactgctgaagattatcgatttttaccttggctctggcgagcatcctgaatggattaacgagccagaaaccgaagaggctgcataa

SEQ ID NO: 449647 - DNA, 507 bp, Serratia marcescens
atgcgttctgaacttgatcatatatatagcgttttaaattacaacaaagacactggtcagttcacatggaaagcaaacaagggaaagatgaaatcaggtcagctagcgggaagcgtaatgagaactggctatgtgcgtatttttgttgatagaaagccttatttagctcacaggctggcatgggcgttattttatggctcataccctgatggatatatagaccatgtaaatggaaatagaagcgacaacagaataataaacctaaggatagctacgcatcaagaaaatatatggaactctgaatgcagcaagagcaataaaactggacttaagggtgtccattttaacaccagagataaaaagttcatagctcagataactgtgaacggaagaaggaaatgtctaggatctttcgaaaataaacacgaagcctacgaagcatatattaatgaagcaagattatcacatggtagattttcaataaccaatagaggcactcaaaaatga

SEQ ID NO: 449648 - DNA, 264 bp, Serratia marcescens
atgaccgaagtattgacctatgaagcactgaaggctgagcgagatgcgctggcagatcgagttaaggcgctaactgaagagaacaagggactgaaattgaaagcggctttcgttgaggcgcgcggcgttgacaagttcgccgatagccaaattgcttacgtccgcaggcatcgcgctgagcttgacccgatgaacagggcggcatattgcggaagcgcgacagatgctcgccgttttgccgacgagctgcgggaggccaaatga

SEQ ID NO: 449649 - DNA, 222 bp, Serratia marcescens
atgaaggggaaagcgtatcgcagcggcgaactgcgtgatgccctcaaccgtcagggcagtctgtatcacttcaatatgaaacaagaaccggtgttatccgtgacgggtatgcagcggccacagattaccggcgtggatatggagctgttacgcagtccggttaagcggaacattctcgccaaaaagcttgctgaaaaagacggaactaaggcggaggcataa

SEQ ID NO: 449650 - DNA, 366 bp, Serratia marcescens
atgagggaagaactgacgcagaccgaacaggcataccgcgaacagcttgccggtgacgcccacagcggccagagcctgcaaatgctgcgcgatattatcgacgtgaagaaatgggatgctggtcgctatatccgttcgcacgaagaggtgcagcgcataagcaatcggctgaatgagtttatgcagacgcacggtgcggagctggccgcagcgcttgcacctgagctgataaattattccgggcaacaacccgccgttcagcattacgctatgcagcactcagttggctatctgtgcgaggcgctcaatgtctggctgaccgccggtgaaaaaattaattattctgcgcatataatgacattttaa

SEQ ID NO: 449651 - DNA, 384 bp, Serratia marcescens
atgagcactgagaagctgagcgaactgagcaagccggtggcatatgactatcagattgcaggtgcatgcattgcagatggccataatgaaaatgggaaatgggttgattgggataacaagctctctcgttattgcccgccagattggatggtggaagaagggaaagtaacagagctcaagcccctctactcgcaagagtacgtctccgccctactggcgcgcgccgaacgcatcgatgccatgctgaccgaatcagtgcaggcacttaaatcagcagagcagcgcatcgccgagctggaagccgaggcgaaggtttgggagtcggcgacgacaaagcatctggagcgagcagaagaggcagaaaagcggctggctacgccgtag

SEQ ID NO: 449652 - DNA, 309 bp, Serratia marcescens
atgaaaataattaaccgaaaagattttctgttgctaccaactggcactatctacaagaaagttagcgatgatcgaggactaatgatcaagcatgacacattgccaagtggtaatgactttttctacttcgatcctctttttgatggggaaatatcagaagagggagagtgcgttccttttacgattaaccagttaagggatggcatgtttgattatggtgatatgttcctggttcttgagccttctgaggctaaatattttgctaactggctcatgaccgaagtgggaggcgacaatgaccaagactga

SEQ ID NO: 449653 - DNA, 225 bp, Serratia marcescens
atggcaacacaacgccagaaagtgatccggaatgacggcggcgtgcaagtcgttaaggttctgagcggtggtggttcaaccattcctccggcaacgcaaacagtaattggcggcgtgaagcaggctgcaactcaggccaactcaaccgcaacagatgccgctggcgtcgttgcagatttaaacgctctgctggccaagttgaaggccgcggggatcatggcttaa

SEQ ID NO: 449654 - DNA, 306 bp, Serratia marcescens
atggggcgtgacatgtcacaactgaaaatgtaccgcgtcacacggaagtcgttcatcaatgggcatctgctggaagagggcgacaccatcgaatacggcggcagggctggcgataacctgatgctgatcgatagtgagggaaatcaactggaagaaaccggcggtggcagcgacgacaacgtgaagttggaagaacttcgccagcagtacgaagaaatctttggcgttaagccgcaccacaatgctggggtggcaaagcttacctccgacattgacgccaagcgcaaagagttgggcatcaactaa

SEQ ID NO: 449655 - DNA, 333 bp, Serratia marcescens
atgaaaaccgtaaacctcaaaattggcactgactctttcgaaggcgaaggtggcaaaactgaaaccaaagacgaatacccgtgggggcttcgtttttcattgagcaacgtcacgctggaaaagctcggcattgatgcggaaaaactgccgaaagttggcgacattttacaggtcgccggcctggtcaaagtcctctctgtttcccagcgatcagatggtggagaccaagagaatacggttgacctgcagttcaccgattttggcattgaaccagcggccacgccacagcgttctgctgcagacactctatatggcgaagccgggggcgagtga

SEQ ID NO: 449656 - DNA, 609 bp, Serratia marcescens
atggcatccgttatccaaatttgtaatgttgccctgtcgcgtctcggtaatagccgggtgatagccagcctgactgaacggagtaaagaagctgcagcatgcgcactgttttatgaagattgccgagatgcagttctttccgacttcccttggcgctttgccaccaaacgtgttgccctggccgacctgaatgacccgccaccggattgggattatagctaccgctacccaatagattgcgtgcgcattgtcgctatagtttctccaacgctgcagcgtttcgtcggccccgatcagcgaataccttacgaagtgggggccgacgaaaacggaacgggtaggctaattctgactaacctgccaaatgcatgggttcgctatgtatcgcgcgtgactgatccaaacatgtttgatgcagagttccgtgatgctctgagctggcgcctggctgcagaaatatctatgcagatcactggcgacgcgaacatggggaaccgcgcagagcaaaagtaccagctcactatttcatcggcctcgacgctcagcctgaacgaaacccaggagcctcctgcgccgtggtctgatgtttccgacgcgaggacttcataa

SEQ ID NO: 449657 - DNA, 2529 bp, Serratia marcescens
atgccaacagtaccgcaatatcaacgacagtcgcagtcagaggctgcgccggttaatgggcaaagcctccgcataccacagggcaacggcctcaccgcgctggccgatgtcggtgctaatgctttaggtgtttaccagcagcagagggagcgtgaggatctggcgttcgctcagaacgcactgctgcagttcaaccagcaggctgatgatctaatgaataacccacaaaccgggttgttaacgaagcagggagccaatgcgattggccagggtgaacaggttgctggacagctcagccaaatggccagctctgcttttgacacaatcccagacggccctgtgaaagaacagttccgtaaccagttcgcggccgccggccagccgattgccaatcgtgcacgacagtacgagatcggccagcgtcagcagttcgaggcaggccagcagcagggactgctggcaaacctgcagcagcaggctgaaaacagctttgacagcaacgaaggatttgtaaatgccaacctgctggccagagagcagatcatggcatacggtcaggcgcacggacaaagcccggaagagatagaagccaactgggtcagcttccgcgagaactcagcgaaagcagctttgaatgctcagcttactgccggccgcttcgatcagtttttagcacgcaacggcgaaccttctgatgttggcggaatgccgcgagtcacagcgcatggtaattcttctgcttctcgtggattacgtaacaataaccccggcaacattgaatccaatgataaaaatccgtgggaaggtcaaactggcagcgatgggcgctttgccaagtttgaaacgcctgagcatgggatccgcgcgctgggtaaaaacctgctgtcataccagaggcagggttatgacacagtggcggagatcgttaaccgctgggcgccaaaaaaagatggcaacgacacagattcctatatcaaggcgctgtgcggcgcgttgggtattggggccaatgatcaggtagacatgagcaacccacgaaccctggcagcattgtgcgccggcatcgtgaagcatgagaacggcagccagccatacaccgatgctcagatcggtgccggcgtcagcgccgcgcttggtctatccgcgctggagtcgtctaagcgtcggaccggtaacgccgcattcgatgctgcaagcccggcgactcagggaacctatctccgccaagcgcaggcgatgcagaacgagcagaggactctgtaccgcgctcagcttgatggtgtggcacgcgacgctggtgcagcgtatcagcgcggtattgaatacccgatgccaagccaggatgcctttaccaatgcctatggatacaacgaaggcttaaagaaatacgctgacctcgataatcaacgcatcgctggccagtacattgggtcattccgcaacatgccaacggcgagcattcaggagtatgtaaaaaacctgaagccaactgcagcggatataaataatcctggtgggttcgaaagcgtctcatctgcatttaatcatgtggagacggcagccaatcaggttatcaatcagcggaagtctgatccataccaggctgcaacagacatcggcgcataccgaccgctgaataccagcaatgcgaatgaggtggcaactgagttgaataatcgcttctcggcagatgaccatttgaaacagcttggcattgacgccccaattctgtcgaagcaggaagctgctggcttaactgaaatggttcgcggtactaacgatgctgatcagaccattggcttgctccagtctatggggcagaaactccccccggcagctatgcgaaaagttgccgctaccatcgcgccaaataatgcatcgacagcttacgcggctctgctgcttggaacgccagacaaccaatacaacaatcgcagcggcgttattgcatatgatcagttcattggctacaagccgaccatgaacaagtacgacgtggccaaaacaattttgactggcgatcaactgatcaacccaactgaggcacagaagaaagcagggattaccgccgtgcaacttccgagcgatgacaagttgaaaaaagcatttgatgatggtgtgggtaatgctttttcgaataacccacaagcgcgccaggtggcttatgggatttataaagcagcttacgcatcgatggtgtaccgcaatgctgatagtgataaatcctctaccctggtagttgatgacgactcagcagaaaaagcggttcagatggctaccggcggggtttataaaggcttccaaggtggtgacgtggttatgccatttggtatggataagagcacgtttaaggacaaatataccacggcagcgcgcatggcatttaccgacgccgggatcccgccggccgggcaatccaactttacgccggtgaatatcggtaatggccaatacaaattactggccggcagtggccgctgggctgtaaatccaaaaacgggtgagccgatcgtcgtgggggttgaataa

SEQ ID NO: 449658 - DNA, 408 bp, Serratia marcescens
atgagcaaggcaggcgtagaagaactcaacttcattcaatcgatgcttgagaagtgcggttatcaactatcccctcacggcgccgccgtgtctctcatgctgatggacagcgattacaacaaggaagaaaccctatcctatgtcggactgatcgccctggctcagaacatgcgcaccgccggtgatgggatgatcaacatcatgcaggctgtcggacgcggcaccaagctggcagccataaccaaaaaccttcacgattatggatatatcagaactgaactattcaataatgatatttctgccatatcaaagctgaccaatttggacgccgaccacaaagcaatgatcggcgtcgttctcggtagtgacccacatgcagatgcggatgacgtggctataaattattag

SEQ ID NO: 449659 - DNA, 540 bp, Serratia marcescens
atgctttcaatacaagaagttgttgaacagactcgtaatgcactgcagatgctgattgatcgcatggggcttaatttggcagtagggccactaaaagaatcagactatcgcctcctttcatcggggatgtttggtgaacttaactgggaatggggtgtcagtaagtataccggtaaagaaaacagtgtagatctctgcttcaaaatcctctcggttaaggaagagtatccagcaggcatagctttatgtgcgttccgcacagatacgcaaactttcgaaatctatatgatagagaatttcgttagggatcaggatgatcatcctctttgtaagcgcatggccttgtttaccttcatgggcgcctacatattcactgatgcggtacaaggtactcatgttgtcatcgtagagccagacgaagagttgcgagagtactattcaaaatttggtttcgtagatgaacctggctgctcatatcgaatgatgtgtactattgaagcgttaagggatatcatcaccaacccagaaaactgggcgtag

SEQ ID NO: 449660 - DNA, 342 bp, Serratia marcescens
atggtaattagtgttgcgcatattgctaaactaatcatttttatatatggttatttatacagtagttacaagctgagcgaggtgcattacgcaatgaagaagtacagctacccggccagcagagggctggctaaaagcatcaacacccgcgccgggatcgcggaactggccagggtttcactacttgaaagactgctgaatgagctggatgcggacggctcagagatcggcggcgctatgcttgaactgaacgctttggtgaactacgtcacacaaaatgaaaaactgaaggaagaaattaaaacccattcgaaatttattactcaccagcttgaacaataa

SEQ ID NO: 449661 - DNA, 1947 bp, Serratia marcescens
atgaccgtatcaacagaggtaagccgagaggaatacaccggcaacggggtgacgacagattttgactatcgcttccgtgtgttttctgcggatgagcttgttgttactgtcgctgacacaacagagaacatccgcacgctggtgctgaataccgaatacaccgttaccggcgccggcagtcgcaacggtggcaaagtgaagcttgtcagcgcgctggccagcaactggcgtatcagcatcgagcgagaacttcctgtcacccaggaaaccgacattcgtaaccagggcaatttcttcccagaagtgcatgaggatgcatgggataagcttacaatgctgatccagcaagcatttagttggcttggacttactctgcgtaaacctaactggctggcaaaatattacgatgcaaaaggaaataggatatctaatctgggagatccgatatcccctcaagatgctgcgccaaaaagttatgttgatttgacatatcaatatggtaaaggctacaccgacgatcagcttaagcgtacgttgcgttcgccagctggcgaggttctcactcagctaccagctgcaaatgttagacggggtaaattccaagcctacgatacacagaacggccagccaatcctcgttaatccagaaacaacgccatcggatatctggataaaattaggcagcattaatggctattcctacatcggggggttcttctctaaggaaaccacaggggcatatggaaacggctcctatgaccttgtgagctggcgcggtgagcgcggacagtttgatcaaacccaggggatggccactcaggtaactggtgcgggtgtttcattcggcggcattcagaatagggggatggtcgttgtcggcccatgtggggcgctattctctcaattaatgcttgagggaaggccgtattctgaccttgttgcgtcggcatataccatagacgcgaaccgcctggatgcgttcggcagagaagttcaggtcgtcaagtttccgacgaagaacaaccccacagacaaccagtgctttgagctggagctttacagtgatgtgaatggccagccaaaaggtgttatcaggaaccaagagaaacgaacagacctcgataacactggcactaccggcgacagggctttgttcattgccgatgaaaaattatttgccacgtctagcaagttttttgccaagatccgtatacctgacgaagtaactaggttctcgctagatccgaattttgggtatagaaatttttcatcattaacagctagtaatgttttacatattgctgctcagtcaagatttatttacgagattacttctatgataaatagcggtaatttctactgctacctgtctttccgctgccgtaccaattccaacggaaatgatacgagcaagtacggtctctatgagcttgccggcaatgcacagtttgcaggtggcactgttgacggaaacgcgatgtatttgcatatagcaaactttttaaaagacccagacggtaaatcagctaacagtgcaaactctcctggcacatcatcatccaccgtatgcaattataccgactaccagctgtatgtttgcagtgaaaagctaactcctggcacagggctatcagatagatataacggttttttaacaaacatttcctatggacctgtacagacgaaagccattcgcgatgtagtggctggctatcgtccctatatccccacagcagtagtcacagctattaataacggcgccgcagtaacaagcacgattaatgcctataacgaagggtttgtaagtcgcctcgattatgacatatcaataaggggcgatgtaaatacgcttaccgttcctttctccactgcgcttggtgattactcaggctatgactttgcgatgcgcatatttaacagattcggcctcaaagggtataccgtatga

SEQ ID NO: 449662 - DNA, 1617 bp, Serratia marcescens
atgattaattattattttgactcaaccgcggctagtggcggtgacggaagtaaagaaaatccgtttaatatgatgtcgtcaatgaatggccttgcgtggccgttcaacatcctcgttaagcgaggaagccattttatcgacaacttcacgcttccaacaatgacaggaagtactcagctttgtgtgatggataactacggcgaaggccctgcacccgtttttgaaccagccgattattccatcccggtaattgactccgtgattgttcggaactttcacattaacggtgagttcgacacgattatcagtgggtttgcgtattcagctcacaggatttggcacctaagagtcgacagcgaaggggctaacgatgccaatgttcatgtcgatggtaagtttaatttcattataaattcaatggttcgctatgaatgcacatccatctacatggatggtcaaggcggtgccaatataacgtaccgaaacgacaatatgctcgtcaagggagttacccagcgcggaggtgacacgtctgtatttatttggtgtggttcaacttatgacctcagcgcagggcaggctaatgcttttaagggtcggaaatgccgaattgagaattgcacagcaattggaattgtcggtgatggtttcaggctgtcaaatgcggaaggtatggttggcaaggaaacagaccataactatgaaacgtcctctaggatagtaaactgttactcatctcaattagggaaatataagcttgatgattccagcgctgcattcgacatggctagatatcacgttggcatatggttatatggttgtgataacgtggcaattgagtattgcatatccgatggtggcgcatggatgcatgactgcatgggttttgatattgatggaaagtgctctggctgtgttgttcgttactgcatttcaacgaataataatggtgggtttatgatgttcacctgcacagagtctgaaaggttagagcctagtgtaacctctctatctgattgggaatataagttaatttcacaaaagttgggtaacgtaaataatagatgcgagtatgtcctcagttataatgatggagttggccgcggtcgatacgctggacgttggacaacgttccagtttgttaaaaacgtaataaatgccaccattagaaactgcactgttattgatatgctttcgcggttccctagtcatttttatctttgcgttccaacattgaaggctatgactatgggattaatggataaatacccgtcagttacagatagtaatattttctatcataaatacgcccacatgaatgctggcgatgcgggctatgcaaactttaatggtgatacaaagatggtatggcggaataatattttttggtgtccgcaggattctggctccagcatgaatcctacaaagggtgctcttgtgggaaatagaaacgttgacccaggcatatcaaacttaaccagttcggccccggctggattcaatgctgctcggttggttgggcttattcagcgctcacaggctaaaggtattggaacaccaaataacatgccagacatatggggtaaagcgggaaataatgtcgggtggaaacaatga

SEQ ID NO: 449663 - DNA, 375 bp, Serratia marcescens
atgtctggcaaaataatatctgtggtagtgatcctgctggcgctggctgccgttgtcggcgctggcgcctggttggctgggcgtcactaccagccaacgattgaacggctcaacgaggcgctgacgcaatgccgcgacactagcaggcagcaggcggcgatgattgataaccagaacgctggcattgaggcactacagcgtaaacgggatgagctggaagccaaggccaaggaagagcaagccaaggcccgcatggaggcgcagggagactatgagaaggccaattctgttatggccgagcgaaccacgggagaggtgtgcgccgcggcgtccgcagcgtttgacgcagaactgcaccgggaacgtgctcaatga

SEQ ID NO: 449664 - DNA, 273 bp, Serratia marcescens
ttgacgctgctcagcgatgaagagtatcgcgagtttcagctttatctcgctgaaaacccaaccgccggtgatgtgatcaaagaaaccggtggattgcgtaaggtgcgctgggcaagcggtggcaaaggtaagcggggtggagtacgggtaatttattatcacaaattgtccgagtctcagatccgattgctggtgatctacaaaaagggcatcaaagatgatttatctgctgatgaaaggcgcgcccttcgcgcgttgaatgaaaggtggtaa

SEQ ID NO: 449665 - DNA, 1074 bp, Serratia marcescens
atgaagaaattctactcagtaataaccactgttggagcggagaggttggcatccgctgtgacatctggcgaaaaactggatatcgccaaaatggccgttggtgatggcggcggcactctccctgccccagacccgaatcagacggccctgatcaatgaggtctttcgcgagcaattaaatcgcttgtccatcaccaacgctgccgcaaatgtcgttgaagctgaaatgattatccctgctcagcgcggcgggtggtggctgcgcgaggtagcgttgttcgcgtccgatggtgcatgtatcgctgtcggtaacatgccggaaagttacaagcctctgacaactgacggctcaagccgcaccgcggctgtgcgtatgcaactgacggtcagcagcactgacaatattgagctgattatcgatccggccgtcgtcattgccacagtacaggacgtcaacgccgcaaaaaacgaggccaaggactacacggacgaagcgattagcgaattggacgaaagcataaaaaatgccatcgctcgcgcagtagagggggcaattcgcgatgcatgggagcaagacaaccccgttggctcgtcgcgcctgttcaaccagaacgtgaaccccaacactaaatggccgtggtcgacatgggaatatgccggcgagcacgtgacgatcagaacggcaaaagcggacggttccgacgtcggcaccctgggcggcagcgatacggtaaacatcacgcgcgccaacctgccgcagtcagtgctgaatgtgtcgggaaacacaagcgagcaaggggcgcagacgctgaaggcaaaaatggcgggccagcacgcgcaccagggcgggatgcgagggcctgggccggactacagttcgacaatatcaggcactgacaacgatggcagacacactcttaactggacgagcgaaaacggcgatcatgagcatgatgttgatgtgcctgcgcacgctcataccgtttgggcgcaaaccgaggcacttggccagggccaggcgatcaacgttgtcgagcgccataagctgcaaatgctgtggcaccgcgtagcctaa

SEQ ID NO: 449666 - DNA, 1185 bp, Serratia marcescens
atgtcacttgtactaaaatcaaataaacgcgcactgagatacatctctagcgatccgaggttaccggcggactactctctgatgctgaatttcgagggcggggagtataagaacggtggcgggataagtgtcaatcccaaatcgtatgttaattactccagaaaaaataccgcgagtatgagaaatgaaaaaggcgcagtggcatcatttccgccagattctttagcggttgtacaactatcatctggtgaacaagggctttacttggcggggttcgatgaagatgcctatgtcccaatattcactcgcccgatggacgacggcacagtaagttacaaatttaacagtttgacatggaggaaatatcagttcgcaatggtgggcagtggtcgtgcgacaataacaataacattaccgactggcgttacaatgaataaatacccgtctgggttggcgtcatcgggtaaccaatttgatatcgacgaggaaaacccaaccgcatgtgaatttagtggttctggtggtgaatggtctattaaagtagaagccaatggcaggattgaccaactttttgtaacccgcaagaatccagcgggcgaatttatgatgtatgaaagtagtcggttggttaagccttctgcggtgaccgcatcaacactgcgagtggcggagttttcatttgattccagtgaatttgactccattttctccggcggagcaaaatacgggacggtagtgttttcgttacacatccctcttgagaggaatctatcagggctcgttggggctaatccagggtggttgatagctatgttactatctgatggttctgacatatcgctcaacgcatacaccaatcctaaaaatgaacctgacaatatcaccagatataggattaatgataagacggcgaacacagaaaaaaccgtcagattcatgccagagagagcactgacggttgccatatcatttgataatggcattgttaaaatcgcatgcaataacaagtattacgatgaaactacactgtcgccgggcattagtctgtcagatatatggtttggcaaaggagtgtggggcaaagaaggttattatggcggcaatctgctgattaaaaaaatctatgcctattcacgtccgcttagtagcgatgaactcatggatgcatcagggttatttctgtag

SEQ ID NO: 449667 - DNA, 1749 bp, Serratia marcescens
atgataatggcaaaaatcaacgaaaatccaaattgggaaacagaaattcaccaaattgaccgcaaagaacgtgtttcggggggcaggaatggcaccgcgaatattcaggctaggcagttggccaatcgcaccggatatcttaagcagcttttggatgggatcgccgctggtgatcgtccatacacgtcagttgatgaatttcaaaatgatattgataaaaacaaaatccctcttaacgcgagagttagcattcgtggtgagaaagacgatatttggttagaagaatataaaaatgagaatggcgtagctaagccaacgggtgcgacagtaaaagatggaagatttattgattcactcgaaaaattagtaagcctcacaaatgaaatcatacattactctaacaattcaaataacccagctctattggagttaacagataagaacggcaatgtatatgcacgctttgacgaaggcgccgaactttggttagcggggttggatttgtctttacaaaattctctttcttcaattcctatttccgaagaatcgaatctaattgaatttcaagatagtgatggaaacacgtacgctaaaattgataaaaacggtgatctttggcttacaggtttagataagccaatacaggaatacttatcgggaggcgttgttaatgaaacgagtcccgttgcagcgttacaagttgatccggcttattcaatgatggcggagtttctccgcaataccggaaagccaatggttaacataccaacgacgctggtaaaacccgttaaccgggttggggctgagtggattaaaaacatcgaggcagaagttggtaaagaacaaaagcatatcgtcataaacacgccatacaggccagatgatggtgttgtgcacccaaatcttgttcatgtgccagatcgcttcatggggtatgagtatttacttgcgattacgccatacacagcgatgaacgaccaagaagagaacccatgcctgtatggttccaatgatctgataacgttcacgcttttgcctaatgtagagcagccgatcgacgacactccagcaaatacagaggggcggccgggatacctttctgatccattttggggatacaaccatttcaccggggagctgatgtgctgctaccgcaagacctatgttattgacgggaacggcgcggacaatgatttattcctattgctataccgctcaacgaaggatggaaaaacgtgggggccgccaaccattctgatgaatgaaaaggtgggaacagaagatctcatgctcagtccatcgattgtttataacgcgaatgaagcgcgctggtatctgttttactggttgcgtgatgatgtgttggtatttcgcacaaacaaaacgcttgatcctgcaacatggtcagatccggttgattgcgggttcaacccatcggctacaggatatcggggctggcacctcgaagttaaatttgttggtaacagacttgtttgtctaataaatgactaccgacaaacagcaaacatctatctcggcattagcgaccctgatgattggacgaaatgggagttttcaagcaagccattattgaataagccagggaataatagaggggcctataagtcaacattcattccgtttttcaatagtgtgggtgagattagcctaactattggatggacgacgggggatttgacgcgaaaccttttcattaacagaacaaactattttgatgcggggaaataa

SEQ ID NO: 449668 - DNA, 600 bp, Serratia marcescens
atgaatagcctgttaccgcctggttcatcgcagcttgagcggcgcgcggcggaggcttgcgccgacatcagcgatctgaacgtcccgctgcgtgacctgtggaacccggcgcgctgcccggtaaagtttttgccctatctggcctgggcgttttcagtagaccgctgggacgagaaatggacggcggcagagaagcgcaaggccgtgacggatgccttttacattcatcgccgcaagggaacggttgccgccatccggcgcgtcattgaagcgatgggatattcaatgtcgatcgccgagtggtgggaggtcgccgacccgcgcggcacgttccgcctcaccattgacgtgaacgacgtcgggatcactgacgaaatcgttaaagaactggatcgcttgattggtgatgcaaggccggtcagccggcacattgcgggaatagtcatcgcaaccagaactacgggcattatctcgatcggtgcgaccgtcactcacggcgacatcatcacgatttatccgcaggacgtagaaattgacgatgcaataatttacgacggtacatacgactttagcggcaacatttattattccggggtatga

SEQ ID NO: 449669 - DNA, 933 bp, Serratia marcescens
atgtctttaggtgagattgtatcccccctcagttcacttttacggcttatcctgactctagggcagaaaaaaaatcgcccggagcgtcagctggaagcccgactaattgctcgtggcattgttgcggagctacctgaagatattccattttatatcaccgcagaagacggtacccgggaaaaaggtatatatatcattggattattaatctggaaccggggaacgctagcagtggtggaaaacgattttcttccaacctctcctcttaccgttaagatcagtgataaagctaaatttgttggcagtcgtattctagcggttgaagacgaggtgagctgttcctgtcagcagcttaacgatcagcaacttaaaatacatttcgattgccttaatcccgaggaatatctagtgatcccgttgtttgtcactggtgacccctacgtcaatgttgaactgagcggacgcattatcgggcagagccatccgatcgatcatactgcggctgaggtgaaagccagtgtttcagagcgtctagcttcgctgatggtcttaatctttgtattaaacatgttaccgggcttcattatcggcggcgtactgatcataaaagagtatggcttacgtgttttcatgaacgatttcgattccatttcccactggtactccatacccttttccttcggcgctattgcgatttttatgtttctatcttcccgtatcgtctactggttcgagcgccgtacctaccctgaaggttacccacttcagtcggactttgagcccccattgcataaatcgataattggcttgtgcaaagccgtttttcaggggaaaaagatacgcttgtcaacatcgatattcagttggggacaacctatcatcatgtcggagaaacgcgtgcgccgccgtagtattaatgattgggtaaaataa

SEQ ID NO: 449670 - DNA, 924 bp, Serratia marcescens
atgcctgaaataacttcaaatcccaccattgcggctgcactagtatctgcattggttacagttttattgtttttaattaaaggtttttgtgctcctttatggagcaaacacttccattcttataaaataaaagtagagcataaccacgaacaaaaaaagaaaatcaaagaagcaatatcaaaatataaaatgccattgcttgactcggctgagtcattgaaccatcgactatggaacttttcagttaactgcaataaaggatggcataatttaggaagcaatgacttattgagtgaaaagtattacttacaaaatttttgttaccgatttttagcactctatgcttggtgtctaaagttcgaaagagagttgatatatttagatgtaacgctttcagatgagggtgatctttgttttgtcaagtatataaaagttatgaaaaatatattttgcgatgcttctatgttgagcaatactggctatgataatgaacatgccatagaccattttttcaaagatgaccttataagcatggctgaaaaaatgctcacctctactggagttattactttttcagagttcaagactaaaaacgaagtagactatgcacaggtttgtaagtatatctctacaattatgcaagataaatcttgcaacaaatggcatttgttcaactgcttccatttcactctaatggctttcttgtcaaggtatggatatgactaccaaagaacaggtttatttaagctatataaattacgctgtagagaacccaaaaacaagctgatgagtaactttaatttattaatcctcaatgcaaagttaaataaatgtaaggaaataaagaaagcaatagatattctcgaatgcaaaccactagccgttcagatttgtaagatcctgaaattaataaagcaacattag

SEQ ID NO: 449671 - DNA, 327 bp, Serratia marcescens
atgaaacgtgaagaaattattgaagcaatcgcctccgcatcagaattacgccaccgcgacggtcgcgatgttgttgctaaccgtatttactccatgattgaggcaggaaaaatcccaggggtaatcctggccacagccgatgtgcaacagtttatgaaagaaaaccacgccatgcgtaaggcaatcgcctttgctattgcaccaggaatatggattcagcgagaggaagaaatatttcagtattgcggcggcacttggtatgcggaagtattgaaacaggctatttgtaaggataataaactcgaagtgaataaaggtgggctgtga

SEQ ID NO: 449672 - DNA, 564 bp, Serratia marcescens
atgagcgatcgtacaatcgacatagccgcagaaattttcaaactggagtcacttgttagtgaaagtggtgaattaactacagaaatgattgccgatactgttgaaggcctggaaggcatgatggaggacaagttcgacgcaacaatgcttgttattcgtgatttcgagacgaaatcagaagcttgcaagaaagaagcggctcgaatggcagaaaggaagaagcattgggaacgccaaacctatgcactaaaaaaatatcttctcgaatgtctactgatctccggtagaaaaaacttcaaaacaacactgaactccttcactgcagcaaaaggtcgagcgagtcttgttattgatgacgttaatctgttgccggatgaattcgttgagtcacatacagaagttgttgacgatgtccagaatgacaaaataaaaaaagttcttatggaagctttaaaaaaagtggaggaaatgaaggaaaaaggcgaagcccctccaccagaacttttaaacccgataccaggtgcacacttagaaataggtgcaacaacactccaagtgcgctaa

SEQ ID NO: 449673 - DNA, 2379 bp, Serratia marcescens
atgtctgacaaacaattatatacagcatgctggtatcccagcgaacaaacagctgaagaaaatggcgctcgtcgtgttgcatattccttctatgcagctaacgagaaacaagcccgagccaaagcaacgcttcattttatggagcaattccctgatgccgacgatgcagagttcgagttaaaaatttacgttgtgcaggaaggaatcccctgccctgaggtcgagacttgggatgaaggcttcttatatgagaataactggaatgacgagctgggttatccagaatcgaaatccgataacggtctcattgatttcagtaaattgtctgagtcacttcgcatcgatgtattggtgaaataccacacgaccgaaattaccaatgaacaactttccggcgcactagaagccccagaggatgcagcgagtaactttgacagtcatattgccgacgccattaaaaagacgccagcagttgcgaaaatgtaccctgagcgaatcttagacgcgatcgattatatccgtgagaaatgccctcctaccaagaagtggcctgagataaaagcggttctggccggttggctgaacaagcgcaatgacgagcgcaaagaagaagcctccacgtcaggattgcaaactgtgagtgcacagcagaacgcgaccgatgaaacgctgcgtgtaccctctggcgcgactgccggcggcggtaatctgacagaccgaggtgaaggttttaagcacgatttcgattccctcgcgcttgaaatcgcccttggccgcatagcacgttctatggatttcgatatctacaatttgcgtagcgcgcacattaaccgtgcacgcgacatgatcaaactaaaagagcgcccatttcccgcgctgttcagtgcataccgcaacacgccgggcgttctggactactcacgcgccatcatcatctactcggttaaaactgcgcctgacaacatcgaggccacacctgggaaattgaccgagtacattaataaaacactggccgaaaccgatcacgcgaacccggacccacacatcgttgcggttgcctgtgggatctctggtgagaaccataacaatgaagaaaccgaacaggaccaggcgggcaatgctgactcactggcaaatgagcagacaaaaaacggaacagtggcagagcaacaacctgacgctaacgctgcgccggaaaagatggaagatgaatcacctgtagagcgtattgggccgttttactaccgcaccgctgatgggcaagttggccgcgcaaataaacttgcgaagctggagcttgtgctcgcccagggatgtgaggagataaccaaagaggaataccagtcgctgaaggacaatccaccggcacagcgtcagaacaacggcgaacaccaatcaccggacaaaagtcgcaatggaatctattccgtcgaagagttgacaggcgaacaacagaaaacgcaaggcacagccacctcaaatgaggtcgaaaaaacggaattagccccacaacaagcggccactgattccgatgctttcgtgcttcgcgcagaccagctggaaaatgaactcggtgacagcgaaaacctttcgctctggaagagcgttatgcgcaccaatcctcgctacacaaaggatatgggggatcttggattcggtggtacctccataaatgctgaatatatggtcatgcgagcaactgagtcttttggccccgccggaaccggctggggatggacaatccttgaagacaaaatggtagaaggcgctccgctcacagaaaagatattcgagggcacaaaatttgttggtaaacgcattcttcgcgatgcagacggctctctgcttttcgaactgaaccactatgtgaggatcgcactctggtatatcaaaaacggcgaaaaaggaacggtcgaaaactttggctctacaccttatctccagtccaccaaaaacggcatttattgcgatagtgaagtacataaaaaatcgctcaccgatgcaataaaaaaatgcctgtcgatgctcggtttctctgctgatatttggctaggtctttacgacgatgcggcatataaagctgaaagcattcttgaattcgggattaaggatgcaactgagcaagcagacgactctacccggatccgtgaagaactggatgaacgtttcaaacagaatgtagagacgatgcgtaatgctgtttcaccgaatgaagtttcgaaaattgccagcagcctgacccgagccgttagtattcacctgaaatctgcgagagaaattaacgatcaggaatacgtgaaatatcttgagggccgattgcgccgtctcgaagaagttaaatccgaatgtctcaataaattgcaggagaaagccgcatga

SEQ ID NO: 449674 - DNA, 264 bp, Serratia marcescens
ttggatattacgcttggatttaaaagactatcactcattaacggtgagaacgtcacattaagtatagcccctagcgcaatgaagaagatgatcatggagttactttccgaaggttatcttaccacggaggatcttgccatttacatgattgagcaattatctgtttgtgatagtgaaagcctcaatcacgtattaccagaagacaccgtaaagaaattaatttcgacttatgaatccgtaaaaaatggagaggacaatgtctga

SEQ ID NO: 449675 - DNA, 483 bp, Serratia marcescens
atgggaacaatctggaagaaaccaaccgagacgccagacattaagcgcggcggtgacattaaggtgtgggggctggtcgatttttaccagtactcgcaaaattggggaggtctcagtgctgacggtaaggccgaatgcagtctgacccttgaaaaagttgaacgccgcgttatcgaaatgcggtatgcgcttagcgctgcaaccaatgctgagcttgctgaattccaggagagcggagagtttcctgaaagcgcccccggatggcttaatgaatgggttaacgaagatggcgagttcttcggaataaacggattttaccgtcagtaccatgatgaaggcggcatgtactacgactatctgaaaccagacaatagcggcagattggtgattaagcgctattacgggcgagaagaaccgagcactgtttttctggcatggaccgatttcatgcgaccttccgttcctgacgaattacctgagtaa

SEQ ID NO: 449676 - DNA, 939 bp, Serratia marcescens
atggctaattcatggctacgcctatggcatgacatgccgaatgaccctaaatggcgaaccattgccaaaatatccgggcaatcgatcgccctggttcaggcagtgtatttgcagctgctagttagtgcttcacaaaaccaggtaactgatgaaacgggcgtaacgttacatgtcgttactgtaacgaatgaggatatttcaagtgctcttgatgtaacagaaatggatgtggccagtgttacagatgcaatgcaaggccgcgttttaagtggcaatacaatctcaggctggaataagcggcaagctaatttatcgggcggaagaaataacggaaaaccagcaaagccggtcgctcaaagagttagagaacacagagaaaggaaaaaacaaaaggagcttgagcaacgtaacgtaacgacgagtaacgttaccgaaacgttaggtaacgatgtaacaccacagataagaaaagaagagataagagaagaagtaaaagataaaaccccacacaacgcgcaggcgcgcgaaggggagttttcgcctgatggtcagccattccagatatttgacggttggtcgccaacgggattatcgcagcagaaatacaccccggaagagctggaagattttgttttgttctggagtgccggagggcaggtatttaatcaggctcagtgggaacagaaatttgctcggagtgttcaacgctaccgaaaacacgcaaaaaccaaaaaatcaggaggtttacatgcaaaacaaatcaccgcgaatgctaacgccttcgagcaggtacggacccggcacaacgagtggcgggttagccaaggcttggctcctttgggagacgatggtggggatatacgccaaccgctgggtgagcaagaacggggcagcgccatccacgatctggggccagacgatttcgaaattctcggatga

SEQ ID NO: 449677 - DNA, 618 bp, Serratia marcescens
atgcctcggctatttcactttgttgttactcatgccagcgcggatccgtgccaacatttccatgccctttcgctgatagcgcccgtccgtgtcagcgacttgtgcgtcgcccggcggcctgttatccagcgctttcgtttttcgcactggcggtatggagaagcccatttccgcttgctttgcccacttcgccagcaaccggccagccagtgcagcaagttcgttatgtcccagcttgcgcccaatgccagcgcggcggagctccgggcaaatctggaacagcacagggtgacgccagtcgaaactttccgcgctgtcgaaacgccaagattcgttacgccagcgatggtactcagtcatgacgtcgtccgccgtcaggccgaacgggttggccgtacactcgccaacgatcgcggtaaattccgcaaggtcaggcggccagtggttaccggcgctgcatcgctccatgcaccgtcgcgcggcgtaggccaattggtcatccgagaatttcgaaatcgtctggccccagatcgtggatggcgctgccccgttcttgctcacccagcggttggcgtatatccccaccatcgtctcccaaaggagccaagccttggctaa

SEQ ID NO: 449678 - DNA, 162 bp, Serratia marcescens
atgtttgaacttgatgtttcccgccactttttgttgttgagctgggctctcaagcacccattcattcccttcactgaacattcccgctcactagcacaacattgccttgactatccttctaaagagcaaaaatcaatcaagcaattgaattttatagattaa

SEQ ID NO: 449679 - DNA, 198 bp, Serratia marcescens
atgatcatacccgaccacttaattcgcggcttgaataacagcacaaggccagtggtgctttacaggaacgaggccggcgattttatttatggttttgtcatgcgacctgatgaatttgtaaccagcttaaagcaaatgggcgaagcgcgaaaaatggcggggttaccgattgttgatgatgctggtaatccgctataa

SEQ ID NO: 449680 - DNA, 411 bp, Serratia marcescens
atgcctgcttcgtggcgagaattttcatgtaaagatatcgacttccccgtgtgggtatcaagtgagggtgaggttagaataggtgcccgggtaatcacacaatcgaacgggaggacggtgtattcacgggtggcccctccaagaaagctaaagccggtgaaaaactcgtgtgggtactttcagataaaaatacacagcagagggaaggcacggcgcttttacgttcaccggttggtggctgctctatttgtcgataacccgagcgagctggttgaggttgaccatctcgacggcgacaaatccaataacgaagttagaaacctgcgctgggtgacgcgtgcggagaacatggctaaatgccacaaagacaacccgcatattttacaaaaccttaaacaccacaggccataa

SEQ ID NO: 449681 - DNA, 420 bp, Serratia marcescens
atggcaagcaataaccagccgagaggcattcgtaacaacaatcccggcaacattcgctggggtgacgactggcgcggtctagttcctaatgcgcaacgcactgataagtcattctgccagttcaccagcccggaatatggcatccgcgcgatgatcatcatcttgcgcaactaccagcgcaagcatggtctaaagactgttaccggcattatcaaccgctgggcaccgccagttgagaacaacacacgggcttatatcaacagcgttgcaaagtctgtgggcgtagaccctgaccaagtcatcgacgttatggatagtagggtgatgatcccgctattggaggccatcatcacgcacgagaacggcgctcagccatacggcttcgatgtattcgtgaaggctatcgacctggcgggataa

SEQ ID NO: 449682 - DNA, 537 bp, Serratia marcescens
atgagcacttcattcagcttccgcacgatggcgataggtctgttgctggtggcgctgattgttgcaggcaggctggcgttttacttccacagcaacgcagtaagggctggtgagcaggttaagcagcttcagagcgataatagcctgcaggcgaatacaatcgccacacaggcgtttcagttccagcgcgccaacgaaatcagcaacgcggcgaatcagtacggcgtcaacaccgacgcggtcacacaggggaaagaaattgaataccggacgatcctcaagaaacagccgacgtgtgatctggctgtgcctgccgctgttgctggtgggctgctcgactacacgtaccgcctacgttcccgcgcaatgtcagccgataccatcgtcgctgacgcaaccggtgctggcgccactgcctccggcaccctgacatactgtcaggcggtactgtggattgatccgctgctggcggcgctcgacaaagcaaataaccaactgctggcaattcgccggcttgacgaagagaaaagacgatga

SEQ ID NO: 449683 - DNA, 1032 bp, Serratia marcescens
atgcggtattacgatattcgaatatttaaacgtggcggtgacccaaataagccatttagatattactcaagtcataaaaaagatgtttataatccaggtgggttgatggttgagtttgatattcaacgatttggcgagtcagcacccaaaggtgaaacatggataagtatttgggggattggtcctaaagaaatgcaacaggctatgcaggatatgcatggaatgcagatcagaatggaagctggtatgtttggcggtttacctttatccaaggatggtaaaaaagggcttgttcttgaggggacaatttggcaagtgttgggtaactggcaggggactgagctacgcatggatcttatcgtaactgccagccccacttcatctactaatcctcaaccgctttcaccgattaatttaacgctgccgtgggatcgtggggtaaaattatcgacggcgctctctcggtgcttccagactctgggtgactatccatttcaaattagtattagtgataggctaataaataattatgacagtagcatgttttgtgggagccttacagagctggcaattgagttaaaaaaactcagtaaaaaaatcatcagggatgataattattctggtgttgaaattgccatggttaatgcgagggctattcgtgtttttgataatgacattgataatcatcctgataaagaagcacaaggaagtgattcatacaggagcgcaaatccaaaaagaataatgttcaccgatcttatcggtcagcccacatgggtgaagtacggaacaatcgcgattccttgtgtcatgcgcagtgatattcaggttggcgattatattttgatgccagaaaagttgcagccaatagttcaggctacatcatattctcagtttcgagataattcagcatttaccgggaagtttaaagtattttcggtaagattgcttggcaacagtaggcaaccggacgccaatagttgggttactgtgttggaagcatcgccggttgaaggacttgccaaatcatga

SEQ ID NO: 449684 - DNA, 633 bp, Serratia marcescens
atgaaaaaactaggttttgtagttttattctcagcttttatgatcggttgcgctagtccgagcatacaacagcaaagagatatccttttaaaaagagctccgaatgattattctgagcctgggaataatgtcccaataaaaataaatgacctcaggaataaaatgttgtcgtcagggtgggaaactgaaggttttttaaaaaggctaacggataagtgttacaaactctcatactataattctggagtgtgcgcgcttgatttttattatggggaaattagagaaaaggaaagtgaacaacaaaacaaaatttgtgataaaaatcccgactgcgtaaagaatagaaatgcatataatgctgcgcaggaattgaacagtgtttattatgttgttatggctagaaacccttatgaccaatcagaattggatggcatagtgcgtcgattgtgtaaatcagctggcattggtcaacgcaatgggttgccacttcgaggtatgttggatgatgtcaatcaacaagagggactttcacctgaaattcgaagtcaatttaaacaaattgttgaggcgtgctggattttaagcaacaacggagttgatgacggaaccacgaagataaacactcagtactaa

SEQ ID NO: 449685 - DNA, 243 bp, Serratia marcescens
atgttgctggagactcaggatcccgacaggaatagtgaagccatattcagcaagcagagaacgaagctggttgaccagcgccgttctcttcgagactataaattcttgagtaatagtcggttagcttccttcgacgaatttctgcggcgcgagatcgtggccgactggaggctcttcgcgcaggagatcccggctctcatgggccagtcatggcgagttgttaagtatggctgtttgcgataa

SEQ ID NO: 449686 - DNA, 1230 bp, Serratia marcescens
atggcttatggaatgaacaagctaacggacaagaagctcaaggctctactgggtaggcagagcgaacgagagtccaagatctctgacggtgcaggactaatgattcgtgtcagcaaggcgggctcaatcagttggttctacaagtatcgtcttggtgggcgcgacacccccgccttgactcttgctttggggaaatatccagacctcacccttgccaaagccagagaaaaacgtgaccagtgccgcgcctggctggcagaagggcgcgacccacagcggatgttcaaacttggcagggaagaaactttaaggccagtgactgtgaaagaggccctcgaatactggctcaccgagtacgttgatgggaacttggttaacgacgttcgctatcgtgagcggttcactaatcacatatacccctatatcggcgatatggcgctctctgactgcgaaactcaccattggcttacctgcctagccagaacgaagaaaaacgctcctagcgtcgctgggatggttttacagatgggtcagcaagccttcaagttttgccgtatacgccgttatgccgtttgccatgttctcgatgggctgactatgcaggatattggagtcaaaaccagtaagcggaaaagggtactgacgagcagggaacttacagatctgctcgtagccttgaaaaacgattcgttttcgccgtactacaccaacctggtatcgcttcttatctcgtttggcgcccgtactggcgaaatcaggctttcggagctcaaggagtgggaccttcgcgacaaactatggaccgttcctgaagagcacagcaaaaacggcgagaagataatcaggcctattccagaccgcttatgccctcttatcgagcagctaaaacagcaaaacaaagagtccgggttgctgctgggtgaagttaaaaccgattccgccgtgagccagacagggcgaaaaatgtgccagcggctggggcactctgagcactggcgacttcacgatctgcgacgaactttttccacaggaatgagcgatctcggaattgcgcctcacattgtcgaactgttgcttgggcacacgctgggcggcgtaatggcggtatacaatcgcagtcagtatttgccagagaaacttgatgcattaaatcgctggctagagcgcttggatttgctcgccggcaatcacgagaatgttgttttgctctcaaggaagaactcggcatag

SEQ ID NO: 449687 - DNA, 1005 bp, Serratia marcescens
atggctaacgtagatacaaaaataccatttacatactgccgaatcggtagggccgctgaatttttggacatgcataaatttgatatccttagcttgggtgcctgcgggaaaatagctttatgtgtaaggctgaatgggatgagctcgatactatctctcgaagggaatgttaaagatatcgaggattggtattcctcccttgattatgatcatgctgtattggcgttagcaaaaaacatttcaaaatacacatcattttctatagataatatgttcgaaaatgatgattttacgacgggtttttatcctcggttctataaagcaaggcgaggtgatgacactgaagatgaacattggacacaaagtcataagggaagagcttatggtctttggactcttccaacccgtattattaacaccattctgagtgatggtagagcatctgccgaaggggttgcattgggttttaataaaatcgatgaaaacacccctgctggatggttatttcctcttacaaaagcagaaattagtgaggatgagtgtgaagaaagtgctgacaatgtagaaagcgatgaagattacgaagaattgtatgaaaaaatcgaattaacagaaaatgacttatggataacagcagacaccgttcgcagattgattgattttaatggggattatcataatttggagcagcgggatatcggcatagctggtgataagagtcatgaaattaagtgtggggaaatagtacaccatagcgctgagcgtcatgctggaaatcgagagcagatattaatggccgcgctcagacttagagagcaacaaaatagtgttttcgaagagtattgcagaaaaccaaatggagaaattaactattcagcatgggcgagggagctaattaatcggccagattttttcattaatcaaacctctcccataaaaaccgaagcaaaaattgcggagattttgagtaacgcccataaatcgccatctgaacgaaagacctaa

SEQ ID NO: 449688 - DNA, 285 bp, Serratia marcescens
atgtcagacaccatctttaccccgccgaccccagagcagcgccgcagcattttagcggagtatgggttcacctatgacaaacgtatccgtgagcgtgagtgtttggatataaccagcctatcacgcaccacccgctggcagtttgaaaatgaaggcaaattcccggcacgttgccactttggccgcaattcatgcgcttggcttctcagcgatgtgttgtggtgggttcgcaatccaccagcagttacagacgttaataccccttataaccgacgctctgcttaa

SEQ ID NO: 449689 - DNA, 621 bp, Serratia marcescens
atgaaactgaaagaaatggccattcttggtcagggcaaaactcactctgaattcactgccggcgccaatatcgccgagctgaagttccacgaccaggtggtaattccgttcgataatggcgacgggaaaatatggttcacggctgagcaactggccaaactgctcggttatgcggatgtgaagcaggtgaacaagattttccagcgtcacaaggaagagttcactgaaagtatgactacgctggccaaagtgacggtcagcaataaaaacaatgagttagaatatgttcaaatccgactgttctctattcgtggtgcccatctgatcggcatgctttcacgtaccaagatcgccaaagagttgcgtatctggttgctggaccttgccgagcaagaaacttcggcacctcaaggcggtgttcatcacacaattgaacagatgcgaaacattgttgcgacagctcggaaagcctcagacgaggattcttcggacgctggccggcgccttcgtaagcgccaggatgatttgccggagttgctaaaagccgaaagactagtagatgtgatggggcagatagcattcgatctgattggcggcggtaagaaagaggtgcttccatga

SEQ ID NO: 449690 - DNA, 843 bp, Serratia marcescens
atggctaagatctatgaggtgtgtccaaagagagccgcgccgcacaagggctaccacgatgttgtccagcagcttttagacaaagaaaaaggcagcaccgcaaatgctgccctttgggacgactgctttctcaatcagaagctctatcagtatattgcagaaccgcaggatcggcactacgaaagtttcgtaggtcagccctctggtgattccttggcttttctccgctgccgacgtttgatctcaccgatcgcagcgttaacaaaaaaagcagcggtgctttcgctatcatcttttactgattcgatttcttgtagcacttcatgtggaactctgacattcacttgttttgacttgttgtttattgaacccgttgccatttctggactcctcggtaataggtgcgattcagtatacgcaaaaaaaagagctgttcaatgcttgacatgctattcacctagccataaagtgaatagcaccttgagtatgtcagggtaccaaaatggcaacgccccagagtgctggaacactactgaggcgtctatccacaacgttatcggagctaacactatggaattatcacatagtacccaaactcgtcctaaatttgtatacctgttcttaggcacacccaacgaatttccggattccacaccgacggtgcttcgtgctgaggccgatagtgaagatgacgctcgcgccaaattccctcgttggacgttgacctttgccgctcaaatccgcacagctgccccttgccgcctgcaaatcttctccactgacgacggctttatgtgggtttacgagcagcgccaggcagcaccggaggtggctcatgcataa

SEQ ID NO: 449691 - DNA, 246 bp, Serratia marcescens
atgcataacatttcccctgaaatactaaccttgcttggcgtttacccaggcaccacaggccgcgtgatgttgtacgtggagaaaggcgtcatcacatcgagcctgccgatccccgagcatcatttctgctgttcggtagagactttcatcgaactggctcagcgcgccgggtggaatgtcacgccgaatcacgacgaagtcacgaaaagtcacgctactgccgaggaggtcgctcatgtcgcatga

SEQ ID NO: 449692 - DNA, 171 bp, Serratia marcescens
atgcgtaacgttcaggttctggatgctatcaacgctctcggcaaaatccaggctctggctgccgctgccggctatctcacatcgagcgggaaagaagagcaaatttgtttcgagcttatcgacttgattgaagaaatcgcccgacgcgctatggaggccgacgatgaataa

SEQ ID NO: 449693 - DNA, 234 bp, Serratia marcescens
atgaataagacccatacctaccagacccatgaagacgtgttgctgcacgtgcagcgcacagctgatttgttggactgtgctcagcagatgttggcttccggcaacgatcatcttttgagatatgtcggctcggtagttgacgccgccggtgattatgcgcagcgcgcggctaatgcgctggatcttggtgaacaaccaacggtgaaaaatgaacagggggtgtgcaatggctaa

SEQ ID NO: 449694 - DNA, 786 bp, Serratia marcescens
atggctaagaaaaccgaattgatggccgtcgaggctaaagacctgcagatcatcgaatatcgcggtcagcgcgtggtgaccaccgagcagatggcagctggttatggcgccagcgtcaaaaacattcaggataatttccagaacaaccgccagcggtttgttgaaggtaagcacttttttacagtggaaggaagtgaacttcgcggcttgaagaacagacccgaagttatcgggttagttggtaagaatgctcgcagcctgctcctctggacagagcgaggtgcagctaaccattcgaaaatgttggtcaccgatcaagcctgggactacttcaacgacctggctgaattctacttcactcgccgtgaagcactgccggccccagccgacttgtcgaagctcgaaatcctgcagatggcgatcgactcagaacaggggcgactggctgaaaagcaacgtgccgataatgctgagcgcaccaagtcgcagatcagccgcaagcgcgaagcctcagcccttggcaaactcagcgcggccacccgcaaatgccgtgaccttgaggaacgcctgggcgaaagcgtgaagcatgcgacgatcaccaaggtagagaagaaaaccggcggtgagtttaagtttgcagcgcttcgcaaatggtgcaaggaacgaggcgtaacggcagtggatgtgccagacccgcgctacggcagcgtcaagtcatggccggcgggcgcgtggttggatgtgtacggcgttgatctgcgcaaaatcttcggaggtgaggcatga

SEQ ID NO: 449695 - DNA, 159 bp, Serratia marcescens
atgtggctgcagtatttatttttttataaaaatcatgtggctaaaatggatggggcgtgccgtttttatctgtggcagagggtattcattttaattgcgagatttctctatgtttctatgatttttaagactgaatcatgtttacgaagtgatggctga

SEQ ID NO: 449696 - DNA, 465 bp, Serratia marcescens
atggatacggttgaggagttgggcgggacgtatttctacaaaggttatggcaacctaaacaaccagcaattgttctggcttatctgggtcgatgcctttagccagcacactggactggagttctcagcggcggcgatgatcttatcgggttatccattcattggaacgagaggaaaaccggggccagccaccaagggaacgtcgatagcctctgttgtatccagaaaagtgctaccaaacatacggctgccaacaggtgtcgtcataccgacgctggtaggacgttctttaaaagacctgcatgttagctatacgaatcaggtacggacggcggtaggccgaaatattccctggattggttatgctatggcagcatataccgtattcgctattagtcgcgatgtgaaagaaacctataaccgcatcgcaagacctgaacatcggattgcgtggacgtacttttga

SEQ ID NO: 449697 - DNA, 243 bp, Serratia marcescens
atgcgaatttatgttgaggttcgagtggacaagagcaagcagcttccgccaggcgcagcttcggcattagctatcgagctgaacgaacgcttgcagcggaagtttgctgatattgaagctaccgttcgtctagcaggcatggatggcttatcagtccgaaacggcacgccggccgacagagagcagatcgaggaaatactgcaggagacgtgggaaagcgcggatgactggtttcagctttag

SEQ ID NO: 449698 - DNA, 156 bp, Serratia marcescens
atgactgcgctcatatttcgttgttgtcttaccgtcgatagcggtcttcaacatttcctgatacgcgccgccatccgtcgcaacgtcgatcgcatattcgatccggtagccgactacatcaccgttatccaactgctgctgcaactgctgccatga

SEQ ID NO: 449699 - DNA, 354 bp, Serratia marcescens
atggcgcaacttaagacattcggattcccaccccgttatggtacagcgggggagtttgaaccagttatcagggaggttcagtttggtgatgggtataaacagctgaccggtgatggcatcaacagcgaaaaggagagctggccattaacgtttaccggccccgggtcattcattgagccgattgtagagtttttgcgggagcataaagggtatcgctcattccggtggcgtaatccgctacataaattggggctatacaatgcgggggcctttaccttaactcccacattcaccaatgctcggggccgtaattacaccctgacagttaccttcacccgagcctatcatccatag

SEQ ID NO: 449700 - DNA, 738 bp, Serratia marcescens
atggcaactccgaatccgttggcgccggttaaaggcgccgggactactttttggctttatacggggaataacgatcccttctataacccactcagtgatgaagggtggacgcgattagcaaagattaaagaactacaacccggtgagatcacggcagattcatacgacgataattatctcgacgatgaaaatgctgactggaatgcgacagcacagggtgagaaatcggcaggggaagccaatatcacgctggcctggaaacccggagaaagcggccagaaagggctggttcaatggttccattccggtgaagtccgcggttacaaaatcaagtacccgaacggcaccgtggatgtattcaaggggtgggtgagtagccttggcaagacagtgacggccaaagaggttatcactcgaaccattaaagtaaccaactcgggccgaccatttattgcagaagatggtgattccccgattgttcctgtgacaggcctcactgttgcaccggctaccgctaatgttgcggttggggcgacagttgacctgacattcagcgttttaccggcgaacgccacggatgcaacgttacgagtttcctcttcagcgccagcaacggcaactgtgacgcttaatggcaaagtggccaaagtgaaaggggtaaaagccggtagcgttgatgttgttggcatgacgaatgacggactgtttgtggcgctggccaaagtcaccgttgcttaa

SEQ ID NO: 449701 - DNA, 339 bp, Serratia marcescens
atgaaatacttacccctgagagaagtgatgagcaacctcggcttaaccgtcgccgatgacggctatgagttaagcaacccggccggcactgcgcgctatgactttcatggcgtgcgcactacagtaagcggcatccctgaatacttcccgatcacgctgtcggttaaaggtttcgttgatcctgatattgaggaacttgaatccttcagtcggaccaaacgaaaaacgcctgtcgagtctatcgggactatgactcccggtatcaacgttgatagtacgtccctgactgagctggagaaccagcttgcgcgcattgctgacctgtgtgagcgaatctag

SEQ ID NO: 449702 - DNA, 531 bp, Serratia marcescens
atgtcgattagcaaatcaaaactcagcgccgtgatgctggccctgatcgccgccggcgcatcggctcctgtgatgatgtcgcagtttcaggacgagaaagaaggccagcgcctgactgcataccaggacggtgtcggcatctggacaatttgcggcggtgtaacgatggtcaacggccagaaggttgtgaaggggcagcgcctgacagccaagcagtgcaagcagattgacgcggccgagcagaaaaaggcgctcgattgggtggatcgcaacgtcaaggtaacgctgaccgaaccgcaaaaagttggtatcgcctcgttctgcccgtggaacatcggccccggcaagtgcttcacctccaccttttacaagaagctgaacgccggcgaccgcattggcgcctgccgcgaaatccgccgttggatatacgacgctggacgagattgtcgtattcgctcgaacaactgctatgggcagatattgcggcgcgatcaagaggccgagttggcgtgctggggattggacaaatga

SEQ ID NO: 449703 - DNA, 369 bp, Serratia marcescens
atgatcgacatggtcgagtaccgtggtggatggctgaagatttatagcgatgacccgaatgcatacgggcttcgcgttcggggcgatagcatgtggccacgcattcagtctggtgagttcgttctcatcgaaccaggtacctcagtacatcctggcgatgaagtgtttgtacgcaccaaagatgggcacaacatgatcaaggtgctcaactacactcgtgaaggggagtaccagttcacaagtatcaatcaggatcacaggccagttactatgaactgtgatagtattcaaaaagttgaatacgttgcaggcatactcaaagcctcgaggtatgtagacagtgatggagttaacgacacttcactataa

SEQ ID NO: 449704 - DNA, 336 bp, Serratia marcescens
atgtcagttaaattaagtaaaattaagaaaatagaaaattatgccgaatacagagccgacttcgttggttttgcacctgtagctacaaccaatgagacaacagttgatgtgcacttcattagcactagggcggtcccagcaatcattaatgaaggtaatgaatcagacagccacaatgaagacgagcatatcgtgaaggaaaaaacgttacaaattggctcaacaaacgaactagttcactcttgtacagtaacaatgccgctagtacagttgaaaggcctaagagaagctattgactctctcctcctacagctagaacaacaaaaacaaaaataa

SEQ ID NO: 449705 - DNA, 687 bp, Serratia marcescens
atggataaatcacacagcatgtcatgtggaaccatgaacatttcttatgagatgcctggagagtccacaccctacactataaaagttgacggtttaccacataatagctttatgacatttgtgaaaactggcacaaatgctgtaaaacagtataattcaaaacaacccaatagtattgtcatcactgagcaaactgagcgtgagatactgcctaagacttcggaaggtaatctaaacatacgattagattcaccaagtgaggatccagaagctatggatagtaaaccaagcgtggaaaatgacatgtctgatttgagcagaaacgagattcaagcgctgcttaaggccaacaaagctgaagtggatgctgttgcatccagtatgcaagctgacatggccaaatggcgtgagcttatgtcctccgacttaaaggagatcaaaagccttgtttcgtcacaacatgcaagtattaacagtaggcttgatcttcaatcagtgcgtatcgaaactgctttagagtctcattccaagaaaattgatgcggctctgtccatacaagaagcaaaactcgaaggtaagcttagtgatgtaaaacttgaaattatcaaatgggcgcttggcttacctgcattagcgtttgcgctttataaaatttacggggtaatgtctggaaatccaaccccatag

SEQ ID NO: 449706 - DNA, 516 bp, Serratia marcescens
atgactaccatcaagcgctttacccctgactacaaaatgcacgccgttcggtttgaggcttttgcgcgtgaagctgagcatggcgagttagttcagtttgatgcccaccagcaggtggtgagcaccctggaggctgagcgcgatgcgctggaaatccgcctgagaaatgctcttatcagtgagcaagaagccattcagcgtgctcatgcagccaatcaaaccgccgatgacctgggtgtggagaatcaggcgctggccgacgcgctttctttgatttcaagttgctacgggctgtctccacacattcaaagcatgtgtgttgttgaaaccccggccacctccgcagcacttgcagctgtccaggcgcagggagttgagaagctcatcaagctgaagatggaacagcttgccagcatgcatccagacacccacgcatttggcgctacagccgagtctctgcgcgctcagcttaacgagttgcaagcattcgccgccaacattcgggaggccaaatga

SEQ ID NO: 449707 - DNA, 441 bp, Serratia marcescens
atgagcactgagaagctgagcgaactgagcaagccggtggggtatttcactaagcagagagacggcaattattggccgctgtcgaaaagcacggcaaagatgaacatggaacccctctactcgcaagagtacgtctccgccctgctggcagagctggaagcgaagagcctggaatgcagaggtatcgagcaagagcgagaacttttccgcattgagcgcaccgctcatcagcagtatgcgcaagagcttgagcagcgagtctccgagctggaagccaagctggctacgccggtgcagctacaaaattgtgacttcgagtcagtagccatcatggctcactggtgcactgatgagcagctgaaagcctgggtgaagggcgtcgagcacgccaaaaagcaaatacgcgccgctggcttcaccgtagagggggatgaacagtga

SEQ ID NO: 449708 - DNA, 258 bp, Serratia marcescens
atggcaaagctgaacaagaaagagcgcgcctggctggacgagctgcaagaagtgctgaaccgctgcccatccgagcgtctgggcttctataccgtcggcgaccctcagattaatgtctatgaccggtcaaaggagttagagatagagagggtgatggacgcttctgaaaaagactggtgcgggtgtgtcttgatagccggtgcgaattttgacgagtggctggatttcccggcccccgttcactctacagcaggttaa

SEQ ID NO: 449709 - DNA, 405 bp, Serratia marcescens; identical to SEQ ID NO: 59973

SEQ ID NO: 449710 - DNA, 3009 bp, Serratia marcescens
atgcccgtcgattttctgaccactgagcaggaactgaattatggtcgctatgttgcagaacccaatgacgtgcagctggcgcgctattttcatcttgatgagcgggatcttgccttcattaaccagcggcggggaaggcataaccggctgggaattgcgcttcagctcaccaccgcccgttttctgggcacctttctgacagacttaacccgggttctgccaggtgttcagcaatttgtcgcggtgcagcttaatattcgccgtccggaagtccttacccgctacgcagaacgggttaccaccctcagagagcatactgcgctgattaaggaatattacggttaccatgaatttggcgatttcccctggtctttccgcctgaagcgcctgctgtacacccgcgcatggctcagtaatgagcgacccggccttatgtttgattttgccaccgcgtggctgcttcagaataaggtcctgctgcccggagcaaccacacttgtacgtctcgtcagtgaaatacgcgaacgggcaaatcagcggctgtggaagaaactggccgcgttgccggacagctggcagaccgcccgcgtgacggagcttctggacattcctgaggggcagcgtacttcaccgctggagcaactgaaaaagggaccggtcaccgtcagcggcccggcatttaccgaagcgctggagcggtatatccggctgcgaaacctggaattttcccgactgaattttaccggtctgcctgctatacaactgcgtaatttggcccgttacgcaggcatggcgtcggtaaaatatatcgcgcgaatgccacagcagagaaaactggccgtactcacagcattcgttaaagcgcaggagactgcggcgctggatgaggccgttgatgtgctcgatatgctgatactggatatcactcgtgcggcgaagaaaacggggcagaaaaaacggctcaggacgcttaaagatcttgatcgtgctgcgctaatattggcgcgggcatgttcattgttgctggatgaacaggctgacgatgctgaactgagggagaccatattcaacagcataccgaaaagcaggctggcagaatccgtcagcaaggtaaatgagctggcccggcctcagaacaacaatttccatgacgaaatggtggagcagtacgggcgggtaaagcgctttcttccggcggtattgcgcgacctgcatttccaggcagcgccagccggagaacatacgttgtccgccattcattatctgaccgaactgaacggctcgaaaaagcgcatcctggacaatgcgcctgaacatattattaccggcccctggaaacgcctggtatacgatgcggagggccggatacagcgtgccggttactcgctttgtctgctggagcgccttcaggatgcactacgtcgaagggacatctggctcgaaaacagcgatcgctggggaaatccccgcgagaagctgttgcagggggaagaatggcaggctcagcgggtccccgtttgccgggcgctgggacatcccactgatggacataaaggcgtgcaacagttggcggtccagctagatgaaacctggaaaaccgtcgcatcccgctttgaaggaaatgcggaggttcatatttgccatgacggtaaacatccttccctgactatcagcagcctggagaaactggaggagccaccatcgttgcatcgtctcaacagtcgggtaaggctgctactcccgccagtagatttgacggaactgttgcttgaaatagatgccagaacgggatttacacgtgagtttacgcatgtcagtgaatccggggcccgggcacaggatctgcacatcagcctgtgcgcggtcctgatggcagaggcctgcaatatcgggctggaaccgctgataaagcacaatataccggcgctgacgcgccaccggcttagctgggtaaaacagaattacctccgggcagaaacgctggtcagcgccaatgcccgcctggttgattttcagtccacactggagcttgctggccgctggggtggtggcgaagtggcttcagctgatggcatgcgctttgtcacgccggtgaaaaccgtcaattcaggacctaacagaaaatattttggttccggacgtggcatcacctggtacaacttcgtctctgatcagtactctggattccacggcatcgttgtccccggcacattacgagattccatttttgtgctggaaggccttctggagcagcagacagggctgaatccggttgagatcatgacagacacagccggtaccagcgacattatttttggcctcttctggctgctgggataccagttttccccccggcttgccgatgccggtgaagcggtattctggcgagtggataaatcggcaaattacggtgcactggacgaactggcacgtggttgtgccgatctgtcgaaagccgaggatcagtgggatgagatgatgcgaaccgccggttcgctgaaactgggcaccattcatgcttcagaactcattcgctctttgctgaaaagctcgcgcccatcagggctggcacaggcgatcatggaagtggggcgcgtcaacaagacgctgtaccttcttaattatattgatgatgaggattatcgtcggcggatcctgacgcagctaaaccggggggaaggccgccatgctgtggcgagggcgatctgctacgggcagcgcggtgagatcagaaagcgctatcgtgaaggtcaggaagatcagctgggggcactgggcctggtcactaacgcagtggtactgtggaacacactttatatgcaggaagccctgagctggatacgcagtaatggagaagaaatcggggttgaagatatcgcccggttgtccccactgatgcacgggcatatcaatatgctggggcattatacgtttacgctaccggaggatattttgaagggggaactaagagaactaaatttcaatttaaacaatgaattaacttcttag

SEQ ID NO: 449711 - DNA, 849 bp, Serratia marcescens
atgaaagcgcagatcgacggcagagctaattacattaaaaaaattgaaagtgagttaaatcaagaagagtttgaggagtatgttaatgagtttgaggtgaccaaggaactcattaattcatcaagcatacaggaatacaaccaggttgtaattcagtcttacctgatatcgttcatgcttgataaaaccattacctattatttacgtaataaccctagggaattatctcgctttgaatgggtttttgacctaaaaaactccgcacctgctagatttgaacttctatattctaaatttatgcctgagaccgttgagtcacattattacagcgaaccaagaggtataccatatataccagaagcaataaaatatttttatagaaactacggagcagaggaagttggattaggaatgccactcgaggaaatagaacgtcgtaaaaggctatttaacgtagaccattccactgtagctggttgttctatgccaatcctatttgggaaaatacttaataattatagtgttttcctggactcaaataaatctgacgggctacaaatagctgacttagttgtatctgctgttaaccgctttttaaaggggaatgttgatgatgttgtcaagacatctaaactacttggtccgttgtttgttaactcgccgagaatagatgttcctgcaattccacatgttaattttggtgaatcaagcgaatcaatcaaaaatatcaattttgacaatcttgaattgcttaactttgaagcaagagaattgtatacgaaggtttttaggagcggtttcacaaagaacatccgtaagttattagagcgtcaaagcaacggtaattaa

SEQ ID NO: 449712 - DNA, 4128 bp, Serratia marcescens
atgaatattgatttcagtttaattcgcagcgcccccaaaagccgtaacgatagctttgaagcactcgccgtacagttattcaggaaaacctgtcgagtaccgacaaattcaacatttattagtttgcgtggagatggtggagacggtggcgttgaggcatatttccgctcaccggacggtgccgtattcggtgttcaggcaaaatactttttccagcttgcttccgcagagcttacacagattgatagttcccttaaagccgcgctaagcaaccatcccacactaaccgaatactggatttatataccgtttgacctgaccgggcgtgttgctgcgggaaagcgaggaaaaagccaggcggaacgctttgaagaatggaaaagtaaagtcgaatcggaagcgtcagcgaaagggaagtcactttctattgtcctttgtaccgctactgttgtctgcaatcaattacttgagatagacccttacggagggatgcgcaggtattggtttgatgacacgttgctgacaacagctcaaattcaacaatgtctggaggacgccattgcttttgccgggccaagatatacttcaatgcttgatgtggtgacgaatgctcatgtcggcctggatttctttggtgggactggtgacttttgcgagtggtacgaaacatcattaacaccaatcgttcgagagttccattcactgaatggatacggacgcaaatcgctggatatacttggcgaaacccgtgctacatctgccacggcattgattgaagaaataattgtctactgtgagagcatgagagataacaatgtcacggccacatcggttacagatctttgcgtcgctctgtcatccctattgacacttttcgctgatgcccgccatgctcaagaagataaattttatgaaaagcatggcaagcatagtgatacagaatcgttccgacagttccacgcagagtatatgtgtgcatttcctgccggagatatggatgcggcgagaaaatgggaagagcaggcgcagcaactgcaaaatttgctgtcttctcaggtcattggtgccgcaacagcacattccttactgctggttgggccagcgggtatcggcaaaacccacgcgattgtcagcgcagcattgcgtcgactggaacatggtggtttttccctggtcgtctttggagacgactttggcaaagcagagccttgggaagtgctacgcagtaaaatagggctgggtgccgccatcgatcgttcgacattatttgaatgcatacaggcctgcgccgaacatactggcttaccttttgtcatttatatcgatgccttgaacgaaagcccgcgagaagtgcgctggaaggacaagcttcccgaattgctcgctcaatgcaagtcttatccagacatcaaaatctgcgtttcaacccgagatacctatcgcaatcttgtggtcgattcacgctttccagggtttgctttcgaacacatcggcttttcaggacatcaattcgaagcggtacaagctttcgcagcctactatgggctggatgcagagattacaccacttttttcacccgaactcagtaatcctttatttttacacttggcctgtaaaacgctaaagggcgaaggccgtgacagtctggatatttctttgccgggttttacctctctgtttcaaggacatctcaaacattgcgatgttttaattcgagaacgcctccactacgcaaatcctcgcaatctggtaagggctgcaatgatggcactcgcgaataccctgacgcatgagttgccgcagaaccgaacctgggaaacctgttgcgaagcactgagcaaaatagtgggaactgagaccacacctgaatcctttttaaatgcattggcacatgaaggcctcattatcctttctgttgtagatgaggataccttcctgatccgtctgggttatcaacgctacggtgacatactccgtgctatcagccttgtggaagctcttgattcggatacagcaaaactagcggagaaaattgcagcgttaacagaagaagatgctggattgctggaagctcttgccgccgtgctgccagagaaaactgctcttgaaattactgctgaagaagtaggattaccatccgaacaagcccataagctgttcatccagtcattggtttggcgctcccgacaaagtgtagtggaagaaattgatgaacacatccatgcagcactgcatacacctggattatgggagtcggtttatgaagcgctgttttcacttagtctggttcctgaccatcgtctaaacgcaactaactggctggggccatttttacggcagtcatccttagctgaacgtgacacctacttgtcattagctgcgctgggatcatttgataacaagactgctgtctattcactcatccatgcagcactatttgctgacataacccattggcctgctgaaagccggaggctggccagtctaacacttgcctggctcacttcgtgtgctgaccgccgaatcagggatttatcctcaaaagggctaagcagaatcttggcaaactacccggagaactgccaaacagtaatcagtgaatttgcatattgtgatgatgattacatattagagcgtattagccttgctatctacagtgcatgcttattgtcacaccaacgcagaaatgcgtttatgccagcgctccctggtctattaagcattgcgtcagatagcaagaatattctgatccgggatacggttcagctattagtaaacttgttgaaaacaggagaatttcccacagccgtaacaagccaattacagcattaccagacaaacgtatcattaccatcacgatggcctgtactggcggatgtcaaacccctcctagatctggaacatttaccatcaaacatggtgctctggggagaatccatggccccggatttctggcgttatcaggtggaatcgaagatttccggctttgacttggagagcgccaatatcagccatgaaaacattgcctgttggttaatgcgagaagcacttaatttaggatatcccggttataaccactgcgcgctcaattatgatcgccatatcgggagtcagtatggctcgggacggggtagaaaagggtatgctgaccgactcggtaaaaaatattactggatcgccttacatcgactactgggcattctggccagtaatgttcccgcacttgaagacccatattccgactacgaacctacaagtgatcatctatggtcagtcgacgtccgtaaagttgacctgaccgatgtacgcgatatcaccgcagagggtgtctatccagcactgatggaggaaacaaattatgcattccctgaccacaattcagatatcaaaggttgggttcggaccgatgattttccaccttatgaagcttgtcttattcgaactgacgaggaaggagagcagtgggtagcgctttcacatagctattgggatgacgataaagcgccgaatgaaaatagctgggattccccgtacttgggagtgcatgcttcctactcaagcgcactcataaatgaaagcatccagaactttaaacagaaaagagcacgcgatattttccaatataatcagggaagtagttgttatcgcggttatcttgctgaatatcctgacagcccggtatacaaacaacttcttaatagtgatgaagatagtgaagcgtttaattttacagaagtcagtttactgcgcggaaacgaatgggaatacgactactcatataccatgcccgagcgccaggataacctcattgcgccatgcctgggaatcattcaaaaactcgaacttttatgggattgtcaaagcggttgggttgatcattctggcaaacttatcgccttccatcaaaaaggtgtaaaacaacgcggacttttcatccatcgttcggcattgaacgcctatctgtccataacaggtgaagagcttatacatcgccgttttgctaacagaggatattttgatttagctggtcgtaataacacgcaaatagacctgaaaacttggatccagtaccgggcagacaaggcaccggtagttttacgagaagaggaactgccgtttaactgctga

SEQ ID NO: 449713 - DNA, 1143 bp, Serratia marcescens
atgaacgaaaccatcgaaaaactgattgccagtggcaaggaagggccatggtgggactttaaacaaacctaccaccaaaacaatgcagcccttgttcacgatatcctctgcatggcaaacgtcctgcatgacggtgaccggtatctgatttttggcgtgaatgatgaaggattgattactggcgtgccggaagatggtaagcaacttaaccaggcaaatttaatcgatctgttaagaaaagtcagttttgcagagcaccattgtccggatattcagctgcaccgcatcacactccagcataaggtgctggctattctacaaattcgtaacgtcagaataaaaccctactatctgacccaggactatataaaagagggaaaaactgtcagagccggtgtcgtttacacccggcaacaagatgccaatacgcccgtaactagctgtgccagccctggagatgtcatggcaatgtggagagagcgctttaacctggacctggcacccgctgaccgcatagtcagactgcttctggattacgacaattgggaatatgacggtatcagcgaggcctattatcggttggacccggattatgccattcatattggcgacacagaaaaagatataggaggacaacactggtggtcaacgattagcattgagcaaccttgtcactatgaatacatcctcaaataccgtgggcgtgtacttgaacgagtgccaatcgtacattacagaaatgagggtttacagtttccctttccagagatggatacgctggcttatccagggaaaagggatggattcgtaactgattattatgcagacgttttttacttcgtaaaaaacacattaccctacaatctgttgagtcatatcagagaattatactcactgcctggccgtaattcaggcataaccatgccgttaaccacccagaccaaaccgccgattatcgagctgccattcatggtgtttgagaacgcaggggaaaaagaagaaaagctaaagtttattcaaagtcagcttgctgatttttgcccggatggtatgcctgatacagcatcgatgaaaactgacccagaactaagaatggaagtagagagacaattttcctggtgggtttttaaccatatgcgttga

SEQ ID NO: 449714 - DNA, 1728 bp, Serratia marcescens
gtgctgctgtgccagccccatgacaatgtccgtcaactggaggcgatgactggatttcagcgtgaatcgttacagggatgggatatcgacacagtggctgccgcagtggccgacctcggtgggcacgccagtgcgctgggatatgagcagctacgaagctacaccggagggttgccgctgtatgtcgaaagcgcggcgagagttgccgcagaggaatacaaaggggatatagacacgctgtgtgctgaactgcggcaacaggaaaacagcacggaaaccgcgcaggacgtcattctcagccgggtctatcagggattcgagccaccggtccagaacgcactggcgttgttcagtctgtccgatgtgggactgagccgtgacgaagtttcagggtaccttgcccgttcattgaatatcccttcaagcggagcagccacattaattaaaaaaatgcgagccaccggaaccattgaaaactatggaaaccagacgttaaaggtacacgacgctgtcagggcgctggggctgcagcacctgaccatgatggacgcggatatcacaaacaacgcgttactggcgttaaaagatcttttgatcgagagtcttcaccagacacgtgacacttcgcgattttctcttctgacacagatatacatcaagcttaacgatgtcatgacgctcatcggtctatctggtgaagagctgttttatgagatgggcattactgtcgacattatggaaagcctgaaacaggcgacagcttcagactctctggcgcccttacaaaaattctgggcactcgatggactggttttttccgagcttaaagacggtgtttctgagcaaattgcgctatggctggaagcgatgggagccttgcttacagaacatgagtttggctaccgggaacgcacagcctacaccatgaaacggatgcttttcttatccgaaaagggagaccttagtgaagtgcaaaggctggcagatgaagcccgccccagtcttccggacgaagagcatgcgcgtatttttgactacacctgtgccatcgcgctctggagactgaaaagatacaagcaagcagaaacgctgtgcctgagcgtagtaaatcgctattacgcgctatttggtattaccccacaggatgtcatgggtaagaactcggatgtgctgtggacaatcatcaaccagcctgaaaatgttcacgaacacatcaaacatctggccgatgccctggagttactcgccaggattactgacgcacagcgaaaagtgtcaccgcttctgcgtattcacgcgatgaaattttacaacatgaccgcggccccggaatctctggtccgggtcggacaggatctggcagacgagtttgtcgcaagaaaggactatgtcggcgccagacaggtgttggagcaacacgtcctgcccgtggttaatgaagccggcctggtacagcgactggttcaggtccggagccagtacgccgtcatactggcacttgcaggcgaacatgggcaggcagaagcggagatgcgtcggctagcccccttttttgaagggttaacaggtgagcagcgacaggaggttgaaaatcaatcgaactacatcgcgcagcttgcttacaaggcggctaaatccgaagtaacgcgattgttcggggcggtaggcagaaatgaaccttgtccctgcgggtcgggagtaaagtataaaaaatgtcatggagcctga

SEQ ID NO: 449715 - DNA, 852 bp, Serratia marcescens
atgaggggaagcaaagaaaaatctatgccggatgttctggactctgcccagttggtacgtattgaagccgtacaccggggattcctttatcagcacttgtatgccgttggctgcttgctgctggcacagaaagcaagcgtggagacagtaaccgttgagctggatgaggatattgaactcaactccaggcaggagcgcatttacgttcaggttaaaacccgcctgaaacccatcattctcagcgatgtgtctggcgcgctcgcgcggtttgcggagctgcgtaacgagcacactgatgggcgccgccagggaagcgcttctttcgttatcgtcgccaaccaggcgccaggtccacatctgcagaagatgattgaggataagacgcttcctgcggatgtccgttttatctggccccagtcaaccgctgagcgctatcccgcacttccccctgcctgggatgccgtggctgatgcggccgcgtggtgcatcgcgcaagcagagcaactgaatttttcgttattgtcgccagaatccctgatctggaagctggccggtctggtccagctcgccgccaccggaggtgatgccgacggacagcatgcgttttatacccgggatcttcctgccctgttcgaacagctcatcgttcagttacaggacttccctgcaccgccgacactctaccggccacaaagagaggaaccctcttttgtttcggatgagcgaatacgcatcatttgcggcttgtctggtgcaggtaaaacagcatgggcagcacaggccgcccagcacagtacacaggtgtgtgcgtattacgacgcgtcctgcacttgccagtacgctggttcgtga

SEQ ID NO: 449716 - DNA, 1737 bp, Serratia marcescens
gtggtcagagtttgtaaagttgaaatccagaacttccgatctattcgtttgctgacctggctgccttcgccagggctcaactgtctcattggccctggggacagtggcaagaccacaattcttgacgctatagatttgtgcctgggggcgcgacgtaatgtcagtttctgcgacaccgatttttttggtctcgatgtgactcagcccatcagcattaccttggccctggggtcattgccggatgcactgaggactatagaaacctacggcaattatttgcaggcgttcaacagcacgactgggcagattcaggaagagccccagttcgggctggaaacggttttgtgtctgcggcttagcgtcgacagtgaactggaacctaactggacgctggtttctcagcgtgccgaagcgctaggtcaggaacgcaatctggcctggaaagatcggctgctcatcgcaccggcgagacttggcacatatgcaagctcaaatttatcctgggcacgcggatcggtgcttaatcggctcacggaggagcgccctaatctgggggctgaactgtcaaatgctgcgcgtcaggcccgaaccagtttcggtggtcaggctgcagtacaactcgcggcaacgctggacgtagttactcagaaggccaatgagttgggtgtgccggtcggtggtcggactcaggccttattggatgctcacgcggtttccatcggcgatggtgcaattgcgctgcacaacgccgctggtgtgccgctgcgttctcttggtaccgggtcgtcccgtcttctggtggcaggaatgcagcgtgctgccgcgcaacgggcctccgtggcgctggtcgatgaagtggaatacggactcgaaccgcatcggcttacccggttactgaactccctgggtgccagggaaacaccgccgccacttcaggtttttctgaccacacactctcccgtggcagtgcgcgagcttaatggcaatcagctcttcgttgtgcggggccacccgacagctccccaccaggtgctgccggtgggcattgccgatgatattcaaagtacggtccgggtcgaccccgaagcctttctggcgcgtagcgtgatcgtctgtgaaggggcgagcgaggtagggttaatccgcgggctggatcattactggaccgccctcaacggtaattccatgctgagtgcaggaaccgcattcgtgaatgttggtggaggagagcctgaccgatgttttgtgcgtgggctagcactgcgtcgacttggttatcgtgtgctggttctggtggatgcggataagccgcccaccccggcgacggtcgaggccttcgaggccgcgggtggagaatatatcacctggcgagccggtcatgcgctggaggatgaactgtttatgagcctgcctgatgcaggcgtcgacgcgctgcttcagcggggtattgatcttatggaggaggaactggtggcggcacatatccagacgcagtccaacggtcaggttacgcttgcccatatccggaaccagcggcaactgattgggggggcttattctcctgaaatacgacaactattgggactcactgcgcgtaaccgacgcaacgggtggtttaaatcggtgacccggtatgaagatgtggcgcacgatatccttggtcctcatctccccgcgtctgatgccgggttccaggcgctgattaaccggctgtacgggtgggcacatgccgcctga

SEQ ID NO: 449717 - DNA, 1425 bp, Serratia marcescens
atgccgcctgactacaacctgctagaatatcatcgggggacgattacggccccggccgggtgcggtaaaacacaaatcatcgcagataccctggccctgcataagggaggaaggccggtgcttatcctcacgcacaccaacgcgggtgttacaacactgcgtctgcgtctgcgtatgcaacgcgccggtgtttctacagcggcctaccgtatcgccactattgatggatttgccatgcgtctagtggcgatgtttccggcgcgcagtgggctcaacgttgaagttcttcaactgcgcaatcgtggggctgactatcctgctatacgtctggctgcctgccaactgctgcaaggagggcatcttaatgaagttctggctgcaagttacactcacctcattgtggacgaatatcaggactgcaacctagtgcaacatgcaatggtaactgcgttatcaatagtgctgcctgcctgtgtactcggtgaccctatgcaggctatttttggctttcggggtaatcagctcgtgaactgggaccaacatgtactcgctaactttccactgattggtgagctgaatcatccatggcgctgggctaactcaggggcgccggaacttggtcgctggcttctggactgccggaggatgttgctgaatggcaatgccattgaccttcgccaggtgcctgctgaggtagtctgggtaccgttacaggcagaaacggctgcacagcagcgtcttactgccgcccagacccgagcggttaccgctaccgggcaggtactggtgattggaaacagctacgacactcgcgggcgccagcagatggccagccagaccccgggtgcgacgaccgttgaagctgtcgatttggttgaccttaccgactttggtgcagggtttaacctggaggctgcggatgcgttgacgcgtctggtacagtttgccgcaggcgtcatgacccaggttggccccgcagcgttgctgccccggctggaaacgctacgaagagggagagcccgcaatccgccgacggctgcagaagctgcgctagtggcatttgcagagagaccaggttttacgctggccgcagaggcgctgcgccttctgagtcgtcaggacaatgcgcgagtctatcggccagaggttttgcgctgttgtttgcgcgccctgcagtcggctgctgccggaagctgcacttttgcagacgccacggtaaacgagcgcgaacgcaatcgccacgagagtcgaccgttggcccggcgtgtaatcggcagcacattgttgctaaagggactggaaggggaggtggcagtcatcacatccccggaagagatggatgcacgacacctctatgtcgctatgacgcggggatcttcgcggctggttgtgtgctcgctaactcccatattgacggcccgctaa

SEQ ID NO: 449718 - DNA, 288 bp, Serratia marcescens
atgagactgcaagatgttgctgttattgctacccgcttccctgatgcagacttttgggtagtgcgtagaggctctttaaaatccgtgggggaaccaacctatacgttcaatccagagcatataggaataaaggttttcagaacagatattgttctgcctagatacctttactactgcctgatgcacattcactcatcgggcaaatgggaatccttagccacgggtacgctggagctggtaaacatccgtgtttctgatattaagcatatcgcgctaaaaccgctctaa

SEQ ID NO: 449719 - DNA, 429 bp, Serratia marcescens
atgcatcgccagatgcatagcaaagctatgtctcagtgttttgggggtgatccccggaatggagaagcgtattccgcgctgctggcattcatccagtgcgatattcatccagttccgggcggtgtcgtccgtgatcccccataccggtttagtccggtggcgtgtaaatgtcgccagatggtcacgcaatcttaccgtaaaggcttcatccagcagtggtacagcccgttttaccggctgatttttgcgtggccgtccggggcgcggctgctggcgctgcttgagggtgtgcagtaccacgaacggccttgcggcatcgagaacaatatcttccggggtgacggccagcgcttcattgatccgtgcgccggtgttccagataaggtcaaacaacatgcgctggcgcaggtctgcaacggcatcgagtaa

SEQ ID NO: 449720 - DNA, 741 bp, Serratia marcescens
gtgcaggccgctttcgtcgtcctgatattgcccggcgtagcgcagcggctgctggtattgcgcaccctgccgctgcgctgcgccgtctaccgtctggccctgcagcttgccgaaggtgtcgtattgcccggaccagcacaggttgcccgccgcgtcggtcacctccagcggtgcgctgttcagatcggtgtgataccagtaaatatctgccgagcggctgtcgcccgcctgctccagcgccgccagcgggctccacgggctggccggatcgtagctccagctgcggcggctgccgtcgtcgcgctgctcctgcaacaaccggtaaccctgccacaggaaacgggtcgtctgttcggttttacccttgtagcgcaccgccttgcggctgcggcggcccagcgcgtcgtaatggtactgcgcctcgaattcgccctgcgggccgcggccgtgcgcctgcaccagccgattgtcggcgtcgtagcggtagtgctgttcgtacaggccgttgcgccggctgatcaggttgccccaggcgtcgtaacggtaaaacagtttttgccagtgcgtcagccggttatcggcgatcggcgccagcggcaggtgcgcgtcgatgtcgctctgcgggctgcgttcgcccagcaggttatccgccagatcgtacaccagccgcgcgcccggtttgccctgattgggctcgcggtgttgcagcaggcggcctgccatataatcttaactatttga

SEQ ID NO: 449721 - DNA, 132 bp, Serratia marcescens
atgcgcgacttcaatttcccggcgcagctgctgatattgtttcagcgcctgctgaccttttttatcaaccttgctagggtcttcgccaccccacggactaagcggcttatcactcaggctttccgtttgtga

SEQ ID NO: 449722 - DNA, 132 bp, Serratia marcescens
atgttcaatgtgcaaatcaccgtcacccgcaacagctttgtatgtccgggtatacgagctggttacaagtcccgtgaatttatcttccaccagcaattgatcctgctggaatactttcacgtttacctctga

SEQ ID NO: 449723 - DNA, 219 bp, Serratia marcescens
atgtttgttgcaaatggcttgaagaacgacccggacaatgatggttgggttttaggttggggagtggtgcgctcggctccttggcaccttgctggtgtgtatgccaccaaagaagtcgcagagatgaaagcatcagaaattggtagtaactatgaagtcagatatggctctcatcggcttgggagcgatgatttcgtatctgggattaaatttgaataa

SEQ ID NO: 449724 - DNA, 561 bp, Serratia marcescens
atgaaacagttacctctgcgagaagtgatgcgcaacctcggcataaccgctatcaaagacggctatgagttaagcaacccagccggcactgcacgttatgaccttcatggtgtgcgcactatggtaaacggtatcccggaatacttcccgatcacgctgtcggtaaaaggcggccatatgcctgtcttcgatgaccaggataatattgatgccattcttggactcaatcagtctaagacagtcgagaacgtcagtaccataactatcggcatcaatgttgatagcgcatccctgactgcgctggagagccagcttacgcgcattgctgacctgtgtgagcgaatccagaagactcagcactttggcgagcctgccgagtatgtaggtcaatcagctttcacgcccagcgtgttccaggtattcatcggtgatgctcagattaaagagggcgctatcaatcattctgacctcatgaaagaagtctccatgcaggcaaagaaaaccgttgagaccgtaatcgaaagggaactacagcccggcggtaagatctggcggggttag

SEQ ID NO: 449725 - DNA, 282 bp, Serratia marcescens
atgcagttattgaaaggtgcaattattctcagaggtaggcatgattcactccagagcgataataataaaataaaacagctagaaaaagaggtcgaagactgctgtaagttcgatgcgaaggattggagtaatccactatggacggagtataataaagtgcattgctggaggaattacgcgcctaagcagcttagagatatatggcacactttttcagatgagcagaaaaaacacatagccttcaccttgcaaaccattgcagataacgagcattgggattga

SEQ ID NO: 449726 - DNA, 201 bp, Serratia marcescens
atgaacgatccccgctatttgacggtaatgacattcaaggtcggcccgagcaagaagcatcacatgaaggcgctggcgcaggagttcggcacggttaagcaggttgccgcaccgtttatccgcccggcgctggattaccacaaaacccaagtattacgcatcctggcggcagaactccgctacggcatcgaaaaccggtag

SEQ ID NO: 449727 - DNA, 513 bp, Serratia marcescens
atgaaaacacgacactacctcgtggcactgggtgcgctgttgctggcgggctgcagccagccgacggcgaaggcgggaaccatagaggcagttaaccacaccaaatgggcgatcaaccatttcagcgtcgacggtcagtcggggatagacattattgggccctatcagggcggcggtggcggctgctgctatggtgtgccggcgaaatggcggccgggtatgacggtgagggtggactgggaaacgggagtgggtggctcaaagggatttccaggctttgctgattgggaaaagtacttggcctgggaaaaaaaaatgaaggcccagaataagcagcacagcaaggtggtgccggtgcctgactatacgggacaaaagacctgcgggatcacggtgcattttatgccgtgcgatgaggtgaaggtgacgaccagctgcgccaactatggccatccggaacacccgatcaaagaacctcttaagatgccggagccaaaagtatgcccgaaataa

SEQ ID NO: 449728 - DNA, 2625 bp, Serratia marcescens
atgacaatattgcaggaaatctttacttggacgcagggacttcctgcgtggcaaagcgatgcagtttctcgcttattagtaaaacaggcgcttacaccacaggatcatgaggatttgtatgcgttactcaaacttaattttggaattcctgacccaaaaaatcgacaagctaagccgctaactgtcgatcaaattccagtacaagctaagaaagacacagatatcaaattatccaccatcaaaaatcttcacaatgttaatgctattgcagaaaatcagcagttggtgataagcccaacaggcatgactgttatttatggcgataatggatcaggcaaatcgggatactcacgagttctgaaacaagcctgccgtgctcgcgatcagtcagaacctgttcatccaaatgccaatttaccagaaataaaagctggcaatgctcaagcatcattcaacatcactattgatggtactgacaaggaggtaacttggtatcaaggaaaagaagcgccacctgaactttcttctttagctatctttgatacgcgttgcgctcgtgcctatttagataatgaggatgacttttcctatgtgccatacggtttgggtgtattcgaagctcttgcaaaagtatgtcaacaactaagaaccgctattgaggcagagcaaaaacaatcagcagtagatctcaccgcatttgctcacctacatggtgaaactgctgtgggcaagttgatttccgcgctctctgcgaaatccaacattgtacaaattgaagccctcgcaactctcaaaccagaagaacttacattactaaatacattagagaaaagcctcaaagagaacaacccaaaagaaaaagctggtttattgcgcttacgcgcacgtcgcgttacagcacttgccacaaatgcaatcgaaaaagggcttatcgtaggcccagaagctattacaaagtttaaagcccttgctgataaattccgtacagcccaagcagccgccgctctagccgcaaaaaactttaaggagggggaaaaccttttaccagggacgggtggtgaagcatggcgagaactattcgatgcagcacgaaaatttgctttagaagcccatccaaataagccgttccctaatcttggacatgaagatgcgtgcccgttgtgccaacaaccactggctgaaggtgcggaaagattgcttcgatttgattcttttattcaagcagaggctgaaaaaaatgctcagacatgccgcaaggcactcgctgatgaatatcgcccattcattgccgcagttatcacgttgaattttgatgaaataacacaggcggagatagccgaaatttccccatcattagtagtcgatattaagtctttcgaatccgcattggcagttcggcacgaagcaatcaaaacggctattgtttcgcataactggactggactaaatacagtattagactctccggtaagtgagttaaaagagttagcaagcaaattgaataccgaagcggaatccttggaaaaagcttcgaatgaagaagctcgcgctgctttggtgaaacaatttggagagttggatgcacgactaagactcagccaagtcagggaacccgtacttgctgcagtgacgaaacttggacacttagcaaagctcaaaagctgtcttagcgcggtcagaacaaatgctatatcgaataaagcatccgaactagcggaaaaagtcgtatccaaagaactagccgacgcattgaaccgggaatttagaatattgggggttggtagtttgagtgtttccctgcaaagccgcacagatcgggggaaagcactgcacaagcttaaacttcatttgccgcaaagtcgctctccaggagaaatattgagcgaaggtgaacaacgagccattgcactcggatcatttctagctgaagtagggttaagcggcagcaaagggggggtagtcttcgacgatcctgtatcttccctagaccatcgccgacgtgaacgcgttgccaaacgcctcgcaactgaagcgttgcagcgacaagttattattttcacccatgacatctacttcctctgtttgttgaccgaagaagcaaagcaagccggtgctacggtgtttacacaaagccttactcgccgcgcagaaggctttggtattgcagatcctgagttgccatttgagggaaaaaatacaagtaaacgcgttggagcattgaaagcgcagcaacagttaatcgccaaactatataaagaaggcaatgagcaggagcaccaacggcagacagttgacgcgtattttcgcttacgcatggcatgggaacgagcagtagaagaagttctcctgcgcgaggttatccttcgcttccgcaagggcatagaaacacaaaggctcattggtgttattgtagacgataatgactatgcacaagtccatgcggggatgagtagatgctccaattacgcccatgacaaagccatggcgggcggcgttgcagttcctgatccagaggaacttcttgctgatattctcgctctagagaattggcgtacccaaatacacaaacgctcagaagatacagccaagaagcgtaaaatgggaccaactgttactgcagtgtaa

SEQ ID NO: 449729 - DNA, 273 bp, Serratia marcescens
gtgaaaaaacaccacctcaagatccaaccggcgcatttttccgccatcaccagcggcaagaagaaagccatgtttcgcgttgatatagatcgcgattacgccgttggcgatttgctgtgcctgcggcttttcggcgaatgcccggaattcatgcaccccgcggcatttgctaatgcccacgcctgggtgtgtatcacccacatcaccgaactggacgaatgggcgccgggttacgtgatgctgagtatcgagcgggggccgttcaaatgctga

SEQ ID NO: 449730 - DNA, 303 bp, Serratia marcescens
atgcatatgagcattggcgtcaaacttaaacttatgcgtgagagtgaacgcctaaccagccggccagaggtagccaagatgcttggcattggcaatgatgcgctatggcgttatgaggaagataaaaccgttcctaacaccgaggtaattaccaacattttgaaccatccgaggtttgagaagtacgccctatggtttatcaccggaaaaatcgcccctgaatccggtcaaatcgcaccggctctcgcacactttgggcaagaagaaacaacctcaccacactcagaccaaaagactggctaa

SEQ ID NO: 449731 - DNA, 1038 bp, Serratia marcescens
atgcctccagttcatccgatcaccattcgcgacgtggcgaaacgcgccggggtctccgtggcgaccgtctcacgcgtgttgaaccacagcgcgctgaccagcaaggagacgcgcgagcaggtgctgcaggcggtggcggatctgggctatcgccccaacgcgaacgcgcaggcgctggcgacccaaagcagcgataccctgggcgtggtggtgatggacgtctccgatccgttcttcggcgcgctggtgaaagcggttgacacggtggcgcagaaacaccacaaatacctgctgatcggcaacagctatcatcaggcggacaaagagcgccatgcgatcgaagtgctgatccgtcagcgctgtaatgccctgattgttcacgccaaagccctgagcgacgccgagctgatcggctttctggagcaggtgccgggcatggtgctgatcaatcggattatccccggctatgagccacgctgcgtcgggctggataacgtctgcggcgcggaaatggcaatgcgtcttttgctgtcgcagggccatcggcgcatcggctacctgggctccaatcacccgatcgaagacgggccgctacgccagcggggctatgcgcaggcgatggccgccgccgggctggccacgccggacaactggcgcgcgtacggttcgccggatctgcagggcggcgaggcggcgatggtggaactgctggggcgtaatctacagctgagcgcggtgttcgcttacaacgacgccatggccgccggcgccatggcggtgctgaaagaaaacggtatcacggtaccgcagcatttctcgctgatcggcttcgacgacattcccatcgcgcgttacaccagccccaaactcaccacggtgcgttacccgatcgtttcgatggccacgctggccaccgagctagcattgcagggcgcagcaggcctggcggagccgcaggccgctcatctgttcatgccgacgctggtgcggcgccattctgtcgccccctggcaaagtgaggcgacggtcactctctga

SEQ ID NO: 449732 - DNA, 159 bp, Serratia marcescens
atggatctgacccagcttcgcatgttctgctgcgtagcggaaaccggctcggtcgcccgcgccgccgagcagctgcaccgcgtgccgtcgaacctgaccacccggctgcgccagcttgagcaggagctgggcgccgatctgtttatccgcgaaaaatag

SEQ ID NO: 449733 - DNA, 594 bp, Serratia marcescens
atgaccgacgaaatcagcattatgaacttgccgccggtcaccgagctgaaacagggcggcgtgttgccagtcagtcagtcgggcagcggcggcgaaccggatacgttcaaggtatccgtagagcagttggctgcaatgatgccgccggggcctgccggtaaggatggcaccaatggcaccgacggcaaagatggcaaggacggcgtaaacgcactggcgaattgggcggtgaagggggggaactggtcatccagctacggcccaggacttgggagcgcaaacgctcacggccatatggggatctgcgagtattggaaaaccactctcacactggacaaagcagctaagggcgagcgcccgccgctacgctgcgtgctgcaggcggtgccttgtacagctggcggggaaatgctgccttatgacctgtatgtccagtacaaatcatcgcaagcggctccgcaggtcatcattgtgttgatggtgtttggcgaggctaagcaggtgcttgacctcaattccggtgaatacagcccgttaggcatggtcggcgaagtgagttatgaacctaagtactctctgacgtactggtattaa

SEQ ID NO: 449734 - DNA, 222 bp, Serratia marcescens
atgattaatatatctaaccacgcagccccgccagaagtttaccgcaacgccgtgaatataatacgcggctttcaacgcaagaataagctggctaaatctgccagtgataccaatgttttaaaaattaatgtcggccctaactggcggctcctgagccgcaatagtggggccgattggtgtttgatgagccggaaagaattcaagcgggagtttgcacaatga

SEQ ID NO: 449735 - DNA, 510 bp, Serratia marcescens
atgtcgaataactttccatctgtatcactccgtttaaatatgcaggttctcagtgagctttttccagaaggttctcaggctcgcgtagatctcaccgctgcaattttgaatcaagcagcaaaaaaatatgttaaggggacattgactcaagatatccgtgagtacctcgagcttatcacctccaatgttagcaattcactctcttcagatattaatagattgattcgtgaacactttgaagcaaaaggcggatattgggaacgcttaaattatcacgtcgggccaaatggcaaagtaaatgaagcaatctcatttgcagtgaaaagagcctttgacgatatcattgcaacagcagtgcaagagcaagtttcagatgccattacaaactatagagacaaggtaaaagaacgcgttgattatgaagtgcgccagcgtatggatcaaatcacgcgggctgaagtttccaaacgcgttagtgaagcgttaactattgctggattggaaaagtaa

SEQ ID NO: 449736 - DNA, 333 bp, Serratia marcescens
atgctgcagctccccatcgagggcgaaatccagtcgtttcgtatcggtaaacggctgcgcaccgataacgcttttcacctgttggcggcggctaaagccggtttgggcctcgccatcctgcccgcatttatcgccgccgacgcgatacgcgcgggggaactgcgcattgtgttggccgcctattcacccgacggcggcgacatttccgccgtctatcgccgttcaaaacgcgcatcccccaagatcaaggcgctggtggactttctgagtgaacacattggccatacgcccagttgggaaaccgcactctcctctttcctgacgtcaacctga

SEQ ID NO: 449737 - DNA, 216 bp, Serratia marcescens
atgccgcctggctatttaagcctgcccttcaatgatgacgacgacagcccttctatagctgtttctaacaagcaagaagagaagctcatcaagctgttccgtgaactccccgactctgaaaaagagcatatggttgctctatttgagtcaaaagttagagaattcaacaagttatttgacgaactgttaaaacttagaaacggtgaacgtcaataa

SEQ ID NO: 449738 - DNA, 468 bp, Serratia marcescens
atggataaattcagtgaactgaaagcggccgcaatggccgctactccggggccgtggggtattaatcgcacaggcaatacgattgtcagcaaccaatcccatcctgtagcaacggtatctgatgcgttccatcggcaattagctggcggcggcgttggtaaggatgctgaattcatcgccgcagctaaccctgctgccgttctcgaactgcttgctgaacgtgatgctgacaaaaagcacattgccgaacttgaacgtgccaaccaatcacaggacgaccacataaatcagcagcaggacagaatcgattctatggagaagacaaatgccgttttaggtcagcagcttggcgatgcaaaaaaacgcctggctacacaggtacagtcgcctgggttctacaaagacgcggatggaaatgtctggctaaacccggttcatgctggcttctcagtagagggggacgcatga

SEQ ID NO: 449739 - DNA, 369 bp, Serratia marcescens
atgaagttagatatgtacgaagtgctatctcgttggggggtatgggcgcgagaaagcagtggcgttgattatcctccgatcgctgcgggctttaaggggttgctgccaccggcaaactcaggaaaagagtcctgtaatgatgatgatgggttgcttatcgatggatgtgtggccaggttgaagaagtataagcccgatgagtacgatctggtgatagtacaccatgtttatggcgtttcgctgcgcaagatagctaggattcgtaggtgctctgacggaaccattcggaaggaaatgcaaatagcagaagggtttataatggggatcctgtgcatgttaaatgtacagtttggttctatctttaactaa

SEQ ID NO: 449740 - DNA, 204 bp, Serratia marcescens
atgatcggcgctggcggctgcggtatccgttccgcgcaagatgccaagaacagcaccaggagcggaacggcgggcacactcatcatttttgatagcttcacggtatttcctttgatagatttcgccctgctggcgcagctgctgctctctccgttgttgttctgccatcaatgcgcgattgcgggcgtcatccgtgcgcaatga

SEQ ID NO: 449741 - DNA, 606 bp, Serratia marcescens
atgagtgtggccacccggattccgcgcagtaatcaactgaatcagattacgccgcgcagcgtcctgatcggcagtcattacctgaattccgtgttgggtctgctttataccggcgtacagccagcgggcatcactgcctatgtgatttcgcgtatcagaaatgaacgtatgcccttccccctcacccccgcagatcgggcattcggggtttggatcgagattttccacgaagccgaggccgccataatccggggcaggtttcccctcgtcattcgctttttctgccgccttgtcgaattcggcaatatctcgccactggtaaagattattttcgccccagcagcaccgacaatttacccggcgatattgaacgaggtcattcggatccgcgcgggcgatagaaaccagttgatgaacgatttcgtccagctcggcgccatagcgtttttgctggcactccaggccgtcccggattgcccgctgaacgttaatattccgatatacctggctggcggccgggtagatgttattgccctggcatttgtacccagctttccggtatgcgtcgacgcggcttttcgtgagcaggaaccaatgaacgaataa

SEQ ID NO: 449742 - DNA, 216 bp, Serratia marcescens
atggaaaagaaagagggggctttaaggctattaacctccggggagatcggccttgcgaagtcggtatttggtggttcaattatttatgggaaagtctgggttcatcacgatagctatttcccctttggcttacaaaatcgaaacactgcgatgtcacccaatggtgagctgtattttagagactggtacgtgcccgatttctcaaaggaagggtag

SEQ ID NO: 449743 - DNA, 465 bp, Serratia marcescens
atgagcactgagaagctgagcgaactgagcaagccggtggcgtggcctaacagctgcgatgaaaccgccgttgaggctttacgttatctggctgagaaacctcgtcctagctacgggaacagcccattcaatactgagcatctttacatgattgccagcgagattaagcgcatggctgaccagccgctctactcgcaagagtacgtatccgccctgctggcagagctggacgggatggcgcagacgctaaacgttgcgaatgatgccactcggatatggaaagaacgcgccctagcggcagaggccaagctggctacgccggtgcggttgactgatgagcggacactctgggcaggtgaagatgattatgacaccggtcatgttaaaggctggaacgccaaccggattgagcaagccgcgctgctgaaaaagcagggcttcaccgtagaggggatgactagatga

SEQ ID NO: 449744 - DNA, 303 bp, Serratia marcescens
atgactttagaagacttgcttgaactaaccccggcgcagcttaaggcgtggaaacagattgaatcaggggtgaaagccttcaaaaaagccggtggagaattctatacagtgcttgagtcggtaagcggatacaacgggaaatacgtagacgagatcaccggtgacgaacgtaaatcacattttccaactgctgctgtatatatgcattctattttagatgctggcctttctgggttcgcagatgatcctcactttattcacctgaccgacaaaggcgaagcattgctggagggggatgaatga

SEQ ID NO: 449745 - DNA, 261 bp, Serratia marcescens
atgacaacaaaaaacggcctcggctatcaagtcgtctatcgcggcgaaactcttcccaatttcgtggagggtggctgggtgttcttccaacgcctgaaagagtatggcggcggctactggctcgggcgcacatacaacgatgcgttcatattcggacttgagcggccaacatctctgtttgaaggtatccaattcatcctggcctcaaggtcagtcgagagaaacgcagatcagtttgacgacaatttcgagctgttctag

SEQ ID NO: 449746 - DNA, 270 bp, Serratia marcescens
atgagctatgtccgagagtcctctattgaaaataatctggtgaaacaggttaaagccgccggcggggccgcttataaatttacatcacccgggcggcgcggcgtgcccgatcgcctggtacttctgccgggcggtcgtgcggtgttcgtcgagtgcaaagcacctggcgaacgcccgcggccagaccaggttcgcgagcacaaccggctccgtgcgctgggcttcgatgtggtggttttggacagtaaaaatctggagggcattatatga

SEQ ID NO: 449747 - DNA, 129 bp, Serratia marcescens
atgaaagggttgaacgttttgaactggacacggcgcgccacatggtgcgccgttttagcattatgtgccagcttctggctcggcacatttgggctggtgctgatcgctttcaccgagtggattaaataa

SEQ ID NO: 449748 - DNA, 216 bp, Serratia marcescens
atggtcgagaagggctatgggatgttaggtgttaactccaccgaggcgaaatggatgcgtttttgccgcgaggagcatgggtattctgttgaaaagttaacggagattttcaagcaacaaatctcggctaaacctgacgatgaaacaatacggttggtaatcgaagtatatttagggttgaagccgcaaagtgcagttgaccacctgttgcagtag

SEQ ID NO: 449749 - DNA, 594 bp, Serratia marcescens
atgatgccggtattaatcgagatgatgacccgctacccggccctgcgtctggcgctcacgttcaatgaccgtcttattgacccggtggaggaaggcgttgacctggttctgcgcctgggagagctacagagcaccgatgagctgatcgcccgtcggttgagccgacagcggcttattctgtgcgcctctccggcctatcttgaacagaacggattgcctgccgatatggaggatttgaaaagccactactgcattatgggctaccgtcggggcgccccccttgcctggcggctgcgaaaggtcggggagcgtgaagtcaaatttatatcccccactgcacatcagataagcgacggagatgccatgattcaggcctgtctggctggcgtggggatagcgcagtttcctgagtctatggttaacagccatatcgccgcaggcaacctgatctccgtgatggcagaccatgcccccatcccggttgagttgaacgtcatctggccccgaacaaggcacctcataccgagagttcgcctcatcgttgacgaactgctgaaaaaggccggagaaggctatttcggtactctgaggtag

SEQ ID NO: 449750 - DNA, 567 bp, Serratia marcescens
atgtcatatgaaaaaccactcaaatttgtgactcttctgggaagccttcgcgaagggtctttaaacgccattgtgtcgcgcaatcttgcctcactggcacccgagcatgtggagattagtgcactgggctctgtaggagaggtaccgcactatgatgcagaccttcaggcgcagggcttccccgaggcggtggtggcaatgggaaaagcaatatcggcagcggatgcgctgattatcgtcacgcctgaatataactattccgtcccgggtgccctgaaaaatgcgctggactggctttcccgcctgccggacacgccagttgccggcaagcctgttgccatactgacggcctcacccggggcgatcggcggtgcacgtgcccagtatcacctgcgtcagattctggtctttctggacgggcgggttcttaacaagcctgaagtcatgatcgggcatacatcatccagactggatccggaaaatgacagcatcacggatgctgactcccgcagcctgatatcagctcagctcgctgcactggcaaaaatgacggtcagtctgggctga

SEQ ID NO: 449751 - DNA, 525 bp, Serratia marcescens
atgtctactgaaactattcgcggtatggaccacgttggcatcaccgtttctgatattgatgaggcgacccgcttctttgaagaagcctttggtgcagaagttatctatgactccgtttcacgatcggatgacgacgtgaaaggggaagagacggaaaacatccttaatttatttccgggaacacgtatcaccacggtcaggatgatgacgctgaagcacgggccggggcttgagctttttgagatgaaggggccagagcagaatcaacctgtgcgtccaagcgactacgggttacagcatttcgccgtatacgttgatgatattaatgaggccatcagcctgtttgagcgtgccggggggaaaatgtttacctctcctcagccgctgatgtttccaactgaggtcggagacaataacttcttctgttacggccgcacgccctggggcagcgtcattgagctgatctctctgccctcaagaatgccatatgaagatcacacatctctgcgccgctggaagccctga

SEQ ID NO: 449752 - DNA, 489 bp, Serratia marcescens
atgccggaatattccagcttactcaccacaagtaagaaggaaatcaccaacatgggcttatacaggagttcatcacatgtgttctggcgttgcaaataccacctggtttggacgccgaagtatcgatttaaaatcctccgcgacaaggtgggtaaagagctctaccgaacaatttatatcctctgcaacatgaaggactgtgaagttcttgagctaaatattcagccagatcatgtgcatctggtcgtgatagtctccccgaagctatcgatttcgacgttgatgggcgtcctgaaaggacgcagtgcaatccggctttacaatcgtttcccacatatacgaaagaagttgtggggcaatcatttttgggcaaggggatactttgtcgatacggtaggggtaaacgaagaaattatcaggcgatacgtgaagcatcaggataagaaggaccaagagatcgaacagcagatggggctgttgcaggattaa

SEQ ID NO: 449753 - DNA, 921 bp, Serratia marcescens
atgtccctgttacaccagattcaagaggcggtcttacaagatgggtcaaatttgggctcagtactactcaaacttcgattattagctgcaagattaggtagtaacgatttagaagagtgggtaaggcatgagtcagagggctacccacatgacgctgtactacctgagtatagagttgtaggtgtgatttataagggaactttttctggcccctttggctccggaattaaaaacgcccccatcccaccaatattaatacaaaagtttgcaggcgatgattggaatactgtatccgtgcgagaaagcattgctgctgtaggtgaacttgttaaagccagcgcagaaggtggatttctgggggtcaacgcttcgaatttaattcttcttttacaggggaaaatttataatggttacgcatgtaatgatatttcaggggaaattccaacagtatcattgtcagaaatttctcaagccgttcgcagcagagtgcttgaactaactattgaaatagaaaagtcaatccctgcagcaactcacattacttttggtactcaaaacatggataaagacaacgcatcaaaagctcagcaaataacgcaacaaataatttacggtaatgtagggaacgcaatatctggtggaagcaagtcaaatattaacgtaaccattcaatcaaacgatagagagtcgatagtgaattacctgaaagagtcaggtatttctgaagaagatgctagtgagtttgcattgattgttgaatccgaaaagccagcgagttctgaagaacctttcggagacagtgccaaaaactggatcgcatcaaatataagaaaagctgctgatggaacttggaaagcaggggtagcagtagcaactaaagttctcacggaagctgcgctaaaatattatggattgaagtag

SEQ ID NO: 449754 - DNA, 921 bp, Serratia marcescens
atgatgaacaacacggaagtgaaaatgagtaagaagaatctcttattggccacgcggcttgcggatatcttgctacgtttaaaccgtggagagacgttaacgcttagcggtctggcagaagaatatggtgtgcatcaacgtaccatccgtcgcgatatagaggaacggctcgccgttgcggggatagaaaaagacgtagagctaaatggctacactctgcggcctgagtatctcggcaagtttgatgcgtcaagtattgatacttttgccaaagtagctggggttaaagggctgtttcccgtgatggacagaaaaatgctccagtccatgttttacccgacaatagcaccgaatattctggttaaaggccatcattatattaagaatgagcagcaaaccgagaacttcgtgcgtttgcagcaggcgattgatgagcgccgccgcgtatcatttagtttttataagcgtgctgagcagaaaatctacaccgtagagccttaccagctgattaaccataacggagtctggtacctcgccgccaagcatcaacaaaaaattaagaaatttacgcttggtaaaatatcagctctcaactgcacctttgatctttttgaatgttcacctttgttgctcaaagagttggaaaacgaagaaagcgtgtggagtaatgagcagaaatttgaagtggtaattaaagtttcccccgctgtggctgaatattttcagcgccgtgctcttgtggttggacaggttatcgaaaaagaactacacgatggtggattaattatctcaagtaatgtttcgcataaaaatgaggtttttcctgtggtgcaatattggctccctcatttgagaattatttcacctgaaagtttacagcaagaaatggaaacagagattaaaaaatatctgggtatataa

SEQ ID NO: 449755 - DNA, 975 bp, Serratia marcescens
atggcaggaaagaaaaagggtaaaaatgaatttaccaaaaaaatattaaaggtggctgagcattacaatgtgattgttgcggccacgatgagtgcgggaaaatcctcccttattaatgcgctattgggtaatgaagttctttactcagccaatgaagccgcaactgcgacgctgacgcgtattacccataatagaaatttacgcaagcgaatagaaggggtgagctacacccaacagggtgagcgccatgaacgtagtaaaaatgtgcaaagtgcgacccttagggagtggaacgacaatcaggcagtgaagtatatagagctggattgccgtattgagggcctgtgtaaaacgactaagccgctggctatttacgacacccctgggccgaacaacagccaggatgctagccataaagccctgctagaggcggctctgacgctaccggggaaaaaactgctggtctacgtgctcaatgcaacccaactggcgactcaagacgacaaaaaactgctacaggagattaaagatagtccggccttggcttcaggtaaccagattatttttatccttaataaagtagatcagcttgatgacgaacgtggcgagacgatcgagcttttccttgaaaaaacccggaactacctggagaaaacgggatattcacggccagtgattatcccggcgatggtgcaaatatccttaattgcaaaaaaagtgctcaacagcaaaaacattacccgtaatcaaaaacatcgcctgcaggctgagcttcaacgatttagggagagtaaatttaacctcaatgaagcgtcgcatgtacctctcgctattaaacgtcaggttcgtgctgaattaaaaggaagtcagcctgtaaatgcgcagtccgacatttttgataaaactgagttgacacagtttattgcctgcagcggtattcgtaccctggaaatttttctttcacagcataattaa

SEQ ID NO: 449756 - DNA, 2259 bp, Serratia marcescens
atgaacagtatttatctggaacataacccctttaccgttgaaacaatatttctggttaacggtgtagagcctgcgtcaggctgtaaactctccagttataaagaagcacgtttgcagctttgggtagaatcattgtttgctgagttgcaggcgctgctaaacggcgaaacgcagcttgacgtggagttcaaaggcgttgaatccgactttatggatgtgcaggatgctgctgctgtagcccgcgataacggtatggaaatcaatctgcgctggcagccagtgcgggcaacagaagatcgcctggacgagattaacgcgctgatggaggaggctaagctcaacccgcagttcaaggactacatcgttaacaatgaacaggtgcgtaacgattttcatgagacgttcaacaacgattttaacgtgtatgtggttgcgaccatgtcgtcgggtaaatctacgttaatcaatgccatgctcggacaggatctactaccagcggcgaacgaagccaccacggcgactattgcacaaatcattgatgataaaacgacggggaatagttttgccgcgcgccgtttttccagcagcggcgaggaagaatcgcggcccgaaatcaatgccgatacactcaaagagtggaaccaacggccagatacccaggaaattgagctacgtggcaatatcgtggcgatgcagccacgtgatcatgttcgcctggtgctaaccgacacgccggggccaaacaacagccaggatgcggatcatgcactgaaaacgatgagcttcatcaaggactccaggcgtaacccgctgatcctctatgtgttaaatggcactcagttaagcaccgacgatgataaacgattgctgagcctggtttcggaaactatgcaaaaaggcggtaagcaaagtaaggaccgctttatttttgtggtgaacaagatggacgcctttgacccggaaaaaggcgagtatgtcggtgccgcacttgagcgggttaaagaatatcttgagaataatggtatcaataatccgcaaatttaccctgtctctgcacagttaacttacctgttgcggaaacatcctgacagcttgactcgtaaagagcgcggagatttaaacggcatgacggacctgttccttgaagagtctactatgaacttcccggaatacatgccgctcacctcgcgtgtgcgccggagccttgaagaacgtggccttaccaatgctctcaaacgcagcggtctgccagccgtagaggtcatgattgatgaatatatcgataaatataacgttcccacgcgtttgaatcgtgcttatgctgctctgcgtcgtgcaatcgagctggggatgaaagaaactcaactggctgaacagcttaagaaagatgagaaagagctgatgatgattaatgatgaaattaatcttctgcaggaacggcataaaaaagggctggatactgaagcgtataaagaacagattcaccgtgaagggaaaggattaccaccattcgttgctgataaaatcacccatgaggataacaagttccgaagcctaataaaggcattgactaatgacatttcccctctgggcgaggtggatataaaccgagcaaaaattgaattagaaaatgccgagcggaaactgacctttgccagtaatgatgtgatcggtaatcttgaaatcgccttctcggatgcccaacagtatatcaaagatgaattgcaaaaagagtatctgaattttatcgctgagatattcgatggagcccgcacgctggctttgcctatgctgcagggactcaaagagagtatggaggatatgtcgcttaacctgagtctcaatgagcgcaatgttaagaccaaagaggaatgctataacggccgcggggtcagtgattccaactggtataaccctttctcctgggggcgcacccgtatcgtgtacgattatcgcaccgttgaatatgtcgatatgaatgaaacctggaaagagaaacgaaccattatcgaaagtgagtttaatgacttccgggcgagcgcgctgaaaaaagtggaatccgataaagacaagctagtggaaagctatctagcctttattgagcgtgaattcaatgaaaagtttgacgctttaatcggcactatgcaagagcagctaaataataaagcagttcgagagcagaccatcgcagaggcgagagagcagcagcgctggattattgatttcaaagcgaagcttgataacacgctggccatttaa

SEQ ID NO: 449757 - DNA, 867 bp, Serratia marcescens
atgatggacgataaagcaaaaaatcggcaaaccctgcgccaaaacctactggaacagctaacccgtaatgagctggaaagcggtgaaatacgtcagattgttgcttccagtgtcgctattgccgatttttttgatgactaccaggtcaacgagatcttcgctgccattgagccagatgaacttgactggaacgcaggttatttcgaccgccaacgcaaactggcgcagtacaacttcgctgagaagcgggtcagtcatcttattgatgtccgtgagtatcttattagtaatgggattgctggatttgcaaaagccccgcttgcagggcgcactgaggaagcgaaaacaatgaatatgcaaggttacacacctggtgcaacattagcgaaaatggttgaacacggcactaccagtcaggctcgttcagcgcttattaatgaacttgaagataatagacttgatgatgctgaaatcgaacgagctgtcgtatgggctcagtcacaggtcgccgatttgtttgtcgattatgaagaaaatacgttggctgggaagatgaataacgatcctgaacaatgggatgagaattactactaccagcaaacttccaatatcaatgtcaactttgccaaagttcgttttgaacatttgattacagtgcgcaatacgctgcgccagcgtggagtgaaaggctttgagcgcattatcctcaagcccaaagctcaaccacaaccccaacaggcgcagacaactcctcacccgcgccatgattcctcttctgctcccactcagccgggcttcttgcgcgttgcgctgatggtggggggggcgcttgcggtgctggcggcgctggtgatttctttactctaa

SEQ ID NO: 449758 - DNA, 3255 bp, Serratia marcescens
atgtcgcaaaaaatgatgacaccgtcgcgcctcaaagagcttgagcagcgcacagatgtgactttgcaatcggcaagagtgcttatcaaccgcagttatctggcggagatgaaaaactaccctttgcagtccgtttctacccagacagggctgtccgtcaaccgtgccggggatatccgtatattccgcattgagcgcatcgtgcaggaaaacaaacaatcggtgcttgaaagcaccaccgctgcctataccgcgctgggagcagccggttatgccgtgtttctgttcctgaagtccgatggacgcgaaaccaatttgtacattggtacgcgtggtacgccgggcaaaatgctggggcataattctggcgagctgcttaaagaaacctttaaagggcatttttccggtagtagcctggtgccgctagcggcagatgaaaccgacgaactccttgagggggcgctggcgcagcaggatgagccttcggcaaccatcaccgccgttaccggtgtaccgtccttgtccacggataatcatgaacatttcatgcaggggctggaacattttatcgacgctgcggaaagccgggtttatcaggctctgatcctcgcggagccggtttcgccacaaaatctggacgtgattcgcacaggttatgagcaggtggcgacccagctttccagtctggcaaaaaggcagtactcgtttggcgttcaggacagtgaaagcgtaggtttgagcatcagcgaggggttaagccagtcgctgggcgaaagtctgggaatgaccgaaactaaaggtacctcggatactaccagtaaatcgaccagtaaaagttggggagagtcgcaaaccgtcagcacgtccgatgcttttactcgcacctatgatgaatatcaccaggcacgtgctaagggcgatagcatggggatggctcgcggtattggaagcttgctgaaaaacgcggtgttaccaagaaatatttctggcagcataaatagcggcggctcggaaagtctttccgaaagccatactgacaacctgtcgcaagccagcagcacaacgacaagcaaaaccgatactaccagccgcaccggtagccactctctgaacaaaacccagggcagcagccagcaaatctcgctggaaataagtgacaagaccatcgaaaagatgttggaaaaagttgaccaccacctggagcgcgtaaacgaagctcgtacctatggcggctggcaaaccgcggcctactttatcggtgacagcgccgcctcgtctgaatccttagcgagcattttcctcgggctaatgcgtggcagtcgctccagtactgaagactttgctctgacgacctggcagtctcaaaacaaaagggtggttctcgattggctagctacgcttacgcacccgcgtcttactccagccttctctgaaggaatcaatattgattacctgacgcccgctacgctggtgtcgggtaaagaaatggcgattcagcttagtctgccgcgccgctcaacctccactgtggcggtacttcaaactcaggctttcggacgtaaagttcagcgtcttgatagcaatagggagagaacgcgtgccgatcgtgaaatcagcctcggttctatacgccacttgtggaatgatttgccgcaaaccatcaatctggatgtcaaccaactggcgagccatctttttgttacgggctcaaccggggccgggaaaagtagtaccatttatgagcttctttcccaactaggccgccatcaggtgccgtttatggtgattgaaccggcaaaaggtgagtacaagcatatgtttggtcaccgtagcgacgtccgggtgctaggtagcaatgcgaagtacagcgagctgctgcgaatcaaccccttccgtttctcggatgagacgcacgtccttgaacacatcgatcggctggtggagattttcaccatgtgctggccgatgtatgccgcgatgcctgccatcctgaaagaggccattctgcaaagctacagcgaatgtggttggaatatggtcagttctgttaaccgtttcaccccggctttgttcccgacgttcaacgatctgctggtgcagttgaaagccgtgatcgatgattctgcctactcccaggagcttaaaagcaattataccggctcgttggtgacgcgagtgaaatcattgaccaacggactaaatgggctgattttctgcggtgaagaaattgataacgcagagctgttcgacagaaacgtgattgtcgatctcagccgtattggttctcaggaaacgaaatccctgattatggggatcctggtcatccgcttgagtgaacatcgtgctgcattttcaggcatgaatcagccgctaaaacacgtcaccgtgctggaagaggcacacaatatcctcaagcgcagcatctccggcggcggtggggaagggaatgacattacgggaaaatcggtggaaatgctttccaacgcgattgccgagatgcgtacgtggggagaaggatttatcattgccgatcagtcaccttacgccgttgatatttcagcgattcgtaataccaatacgaaaattattatgcgtctgccggatgaagccgaccgacgtatcgcggggaaatccgctggattaaacgacgatcagcttgatgagcttgcgcgtctgccaaaaggagtggcgctggtttaccagaatgactggcttgagcctgtgctgtgccggattaataagtttgccgggaaagaagtggcctaccgctatgaagccgccgcggtgagttcggacggcacccaacgttttaaccagcaactgattgcctggctgatgtcttcgcgtctgcggcagccgctggcgatctcgctggaaactctggaggccgggttggaaggtagcccgctggcaaccgggcaaaaaattgtgctgaaagcactatttgaagagttccgtgcaactggagaaatcagactccaaaacgaacagcattttgccagcctggcaaagctagtcgttaacctgctggattgcacctccgctattgaacgatgcgttcgtactacgtcgggctttgatgaattggcgcagtcgttccgtcaacttattgttaagcaaaccggtgaattgtctacggggcttgaactggcggtacagcagtgcttcatgcgtgagctggctggcagaaatgatgaatacctgaaggtatatgccgcatggcgtaaacacgtcatcccggagactgtagcatga

SEQ ID NO: 449759 - DNA, 600 bp, Serratia marcescens
atgattgagatgaccgttttaaaagaactggtggcggagtcgctgggggagctgttggaaagcgtgaaggatatacgcattgaagacattaatgtcgaagagctcgacaagcctgttgatctggaactgccgcgtaatgagttgactccgctatccgaagaaaccaaagaggtcttaagcgaggaagggtacacagatgaggtggtcgaaagtatcaacagcgaagaggaggcagcaatttatcgggatgcaggtctggaatgtcagactgttaacggtaatgacgcattaattaatactgaaatcgacctggatcaaactgatgcgttgggtgacaccaatctcgaacgtatggaaaaaggcaagtcgccgttggatgcaaatggtaaaccaattgagttacatcacgttgggcagaaggctgattccccgctggcggagctgacgcacgcgcagcacatggaaggtggcaataacaccattttgcacgacacaacaaaagagtctgaaatcgatcgtggctcgtttgccaaagagcgtgaggcgcactggaaagcacgagctgaagagattaaacaacgtcaggaggaggcagcatga

SEQ ID NO: 449760 - DNA, 411 bp, Serratia marcescens
atgaagaagttagcgcaacaagttgcggcgcaaggtgccgatattcgccctgccgaagagaatgaaattaccactgcggaacaggtgttacggatgcaattttccccagagtataaagcctatttgtctgagttcggtttgattgcctttggggcaactgagattagcggccttggggttcctgcgacgtcgcatctgaatattctgagcgcgatagagccgcttcgtgagggtaaggactatccgccccaggctgtaccgctttgtgatattggtgatggatactattacctttatgataatcagcagcacaaaatcctcacttggtcgatgattaacggagtagtagaaacgagtgaggagaagctggaagcctttctgctgcgtatcatctttgacgttgagtcataa

SEQ ID NO: 449761 - DNA, 591 bp, Serratia marcescens
atggcaagacaaacctctctccgttatgagcacattgccatcccgaatcatcttgaacgacagttcgccgtaacggagccaaaccaggtgtggtgcggtgatgtgacctatatctggactggtaagcgctgggcgtacctcgcagttgttctcgatctgttcgcaagaaaaccagtgggctgggcaatgtcgttctcgtcgggcagccgactcatcatgaaagcgctggaaatggcatgggaaacgcgtggtaagcccgtcggagtggtgttccacagcgatcaaggcagtcattatacgagcaggcagttccggcaattactgtggaaataccggatcaagcagagtatgagtcggcgtggaaactgctgggataacagcccaatggagcgcttcttcaggagtctgaagaacgaatgggtgccggtgacgggctatgtaagcttcagcgatgcagttcacgcaataacggactatatcgttagatattacagcgtactaagaccgcacgaatataatggtgggttaccaccaaacgaatcggaaaaccgatactggaaaaactctgacgcggtagccagtttttgttga

SEQ ID NO: 449762 - DNA, 411 bp, Serratia marcescens
gtgttctggcgttgcaaataccacctggtttggacgccgaagtatcgatttaaaatcctccgcgacaaggtgggcaaagagctctaccgaacaatttatatcctctgcaacatgaaggactgtgaagttcttgagctaaatattcagccagatcatgtgcatctggtcgtgatagtccccccgaagctatcgatttcgacgttgatgggcgtcctgaaaggacgcagtgcaatccggctttacaatcgtttcccacatatacgaaagaagttgtggggcaatcatttttgggcaaggggatactttgtcgatacggtaggagtaaacgaagaaatcatcaggcgatacgtgaagtatcaggataagaaggaccaagagatcgaacagcagatggagttgttgcaggattaa

SEQ ID NO: 449763 - DNA, 390 bp, Serratia marcescens
atggcattcacatttagcaaacgtagcgaggacaacctcgagggcgtcaattctgcgctggtgggcgtcgttcgtcgcgccctggagctatcgcccgttgattttatcgtcatcgaaggccgccggactcaggaaaggcaaaggcagttgtataacgccggcgcgagtaaaaccatgagcagtcggcacctgtccggtaatgcggtggatttgctaccggttggcgccgattggaacaactataagtgttggctgccggtgctggtggcgatgcgccaggctggccaagagctgggcgtaaagctgcgatttggtatcacctggactgataatccagaagaccggccggcgaagttcctggacgctccacacgttgagatccccgcatga

SEQ ID NO: 449764 - DNA, 348 bp, Serratia marcescens
atggctaaactcccagctaaaaataaaacagcaatagctcccgtggcggtccctcagaaaaccatcgataaagttaacagcttggaaatgcaggatttcaaagtgaccaggaaaggcgggttaaccactatctctggtttcagtgagttacatcagcaacacgtacaagttaaagaatatgtggcacctggtattaaacaacgagcccttactatgatcggcgacttagccaccacacagcgtattgttgaatccaaacgcctttcatcagagggctacactcaacaggaaatcgccgatatgctgggcgtatcacaggcaacaatcggccgggatttaaaaaaataa

SEQ ID NO: 449765 - DNA, 216 bp, Serratia marcescens
atgaatgaggaaagacgagtgatgaacgtatttatcagtgttattcgcaccttaatttttgtagcggcggtgcttgttgtctctgacattaaagttacagggtctgggccttttggttacttcatcgctggtgtgttactcagcctctacggttggggaattctgaaggcgttggactacataaagggctatcgtgagggagccgcgaagcaatga

SEQ ID NO: 449766 - DNA, 303 bp, Serratia marcescens
atggccaagccaatcaattttgaaggggctgtgcttaaaggcggcggcgggttgacccggggggatatctatgtgcgccgcagctggatgatcatcttagccgatggcactacttatcatcgcgaaacctatggccggcgagacgagccaggcctggaaatgtgggaaaggtggtgtaaacccgggccggacgtttaccagtcgccacactggcgcaaggcatcaaaagcggaccgtatgcagctgcagcaatggctgcgcgcccatcctgattatctgcctgatggtggcccctgtggctaa

SEQ ID NO: 449767 - DNA, 747 bp, Serratia marcescens
gtgagcgtaaaactttcagaggtgattagcttgctggaggatcgggggccgtcgtcactggacacgctggcgcacgtcctggacgagagcgaaaccacgttacgcgcgctgttaacgggggcttatcgccggggaacgcttggctttgataacgggctgtattcagtcctaagcgcagcagagcaagaggccgttaggttaaccatgtctccgccggccgcgccggcatcgaaaccaaccccggcagcaaaaccaacagcgccggctaagccaaaggtgacatcggcccagctgcgtgaactgttggcgcaacgagggaaaatgaccgctgcggagttggcctctgcagctgggataagttcggggcatattgggccgctattggctcatgaccgccgcgccggccgcgtgcggctgatcacactggatcgagtgaattactacaagctggaagaaaagcgcgatagcgtgccgcctgccgcgcctgccgcgcctgccgtaacggatgatagcccgccggcgccgccggtagttcctgcagctggtggctcaggcacaaatgatgtgacgcaggccagcgcgccggcaatggcaaacatggaaacgatcacggttccgacggtggagtttatgacgtcagagattcaccgcctgatcggcgaactgcgccacgcaaaagagttgcgcgcggcgctgataaacctgaaccgtttaacaaaaggcgagctggtggaggatgtgaactga

SEQ ID NO: 449768 - DNA, 489 bp, Serratia marcescens
gtgactctttcggaatgggttaaacagcagggcgggattaaaaagtgttcggaaaagcatggtttttcaccgtctgcacttggggcctggtcgcgttttgagcggttccccaatcccgataaccaggaacggattatcgaggctacaggcggccaggtggcgctcaatcaaatgcgtgaatcatttctaagcaataaaaaagacagcgaaattaagactccacgccagcgccgtttgcagggttcgctagtggtccgcgatctgggccgtttgaaaaaaatctttgaagagctggagctgccagcgcatcgatgcaacttgaacggtcccggcattgtagctcgctggacaacgactaacgtaacggttcaggaggtgcgaaatgcaatctcgacgctggaggaggtcggcaaggacgcggggagcgttgaagagattcacgcggcgatccgcgatgcacgccgggactcactgaggggcttatcatga

SEQ ID NO: 449769 - DNA, 639 bp, Serratia marcescens
atgaaaacgagagacgaacaaataacgcaggtaatcggcttgcgcttgcaacagaagagaaaccatgcagggaaaagcgtggtcgatgtgcagaacgaaacgggaataccgcgcagcaccttacagaactatgaagcaggaattaggcaggcgccgttaggtgcaattagaaaattggccaatatttatagaacctctccagcctacctggccgggctaactgattatgaaggcgataaagactccctggcattctctactgctgatcctttcttaactggaaagaccacaaccatagaggatccgctggcattcaataatgctttactcaatagcaaaggcttgtcgccaacaaagctagcactaatcgaatctccagataatcttctagaagaggttcctaagggcgctaacgtattggtggacacatctgtaacatcagttacagaaacagacatttacgcgtttagggctgatactggaagaatcctaattagagccgcgcgtaaagaaattggtaaagaagggtttatcatctacgcgacgaaagacatccacttccctccggcacatatcaccgaggaaaatgttgacctttcggtttttggtcgtgtcgttttcgtgggggtctggcggtaa

SEQ ID NO: 449770 - DNA, 411 bp, Serratia marcescens
atgcaaggccatgataataattcttatttaaactacactaagatattgaatgatatattgtctaaaaacaaagcattagaatctattctgattaaattgttaaacaatgtaattatttcgaactctgacgatgtggttggaattcaaaaggaataccttgaagcagggttgtcgttgattttagaacaagaaaccgaaatagataggctccgaattatgatcgaggatataccctctttaactttagtgatgcttcgcatggtcgccaaaaacgtcggggccagtgcgattattgagcgactattggatgaagaagatcaatccgatgatctaaccgaggctttgctctcactagttaaaagccaagagattgatattaaagaaatcacaaacatagttttatctccgtag

SEQ ID NO: 449771 - DNA, 777 bp, Serratia marcescens
atgacaattccaaccccacttttaaccacccctgaaaaattcataacagcccagaacggcagcctgatcaccacatcattagcagttgctgaagccttcacccgcgaacacaaaaatgttatgcaaagcattgaggcgttagaagtaccgtctgatttttcatcagctaacttttcagcccatgatcactttgtaaccgttggcggcggcgcacagcgaaaatccaaaatttaccgcatgaccaaagacggctttatgctcctggtgatgggcttcaccggcaagaaagcgatggccattaaaatcgcctacatcaacgcctttaacatgatggccgaggagctggccaggcagcagaaacaagccgaccaggtgaagcaaaagcagctgcaggagatcgccgccaaaagcgcccaggaacacgaccagtttaaggcggcgccgacatatcggaacgaggcccgtgattatgtgttaagtgtcctggcggactgtaggacgttcgcagaggagaacgggatcagcacggctgattgggatccggtagacgtaaataaggccacctcgggccttctggccgatctgctgtatggtatcaaggccgagctgacatttagctccaggctcgagccgcaatttaaaatcctaccacctggtgccctgtacatcatgccaacagatcctgaatgtatgaaggcaatagtggaacgagtgattagcgacgatagcctagtaacaatgttacaagttggtattatgagattagctaaaaaataa

SEQ ID NO: 449772 - DNA, 903 bp, Serratia marcescens
atgttaaaaaaactgtttggactattatcggttatggtttcaatatttagtggcgcatgtaatgctagtaatacttacatgattgattttagtacgccggaaaaatatgtggcttcgctaaataacattaggaaagacttaggtaagcctcttcataattttgagggtttaccagcacaaatatttgaactttctccacaaactgggggtgaacgagacggcattatagtggctgttcgtggtattgactattatggagatgatgaagtatcacctgttagttttgtgttggatccaactaatttatatgtggctggatttatagctaatgatgtctatcaccgtttttcagatacggcaggaattaatgcgcctggagtagatagcacagttcaaatgactcatgaatcgtcatacacagcacttcaaaggactgcaaatatgtctcgccatgacatggaaataaatagagcgcttctatctgagggatatgcacatttagctagactctctgggagtactcttgatcaatctgcagcaagagcgattttgcgctatgtgactgtaattcctgagtctttgcgttttagacaaatccaaagaaatttccgtccttcgctgggtttaggcagtgcaggatatgttatgggtgattctgatattggcttaacgctaaattgggcagcaattagttccgctattcaacttgtagatgacgttgaatccccggggattcgtgttggtgctattgatttacctgatgtctcagcaatccttgccacaatcgctatttcattaaattgtaacgctggcactcgagtcgtggatgagtgctcaattaatgactcggttgttgttaataaggttgtttgggatagaagtactttagcagtcgttatgtga

SEQ ID NO: 449773 - DNA, 948 bp, Serratia marcescens
atgccaaacagttatgattacactgaaccggcacggttgctaagcaccgcgcgtttaagcagttataaagtttctcttgcgacacaatcagatgctcaacttttcggcgcttattgttggaacttggctatcgtaggagcattttatcccctgatacaaatcattgaggtttctcttcgaaacgccataaaccatgtcgtttgcacgaaataccaacaggaagggaagtattggttcgaattaataccggtcactcaagataccaaccttcaaggggatttagttaacgctgaccaagttaaaaaattcaaagataataataaaaaagcaaaaaaaagtgctaaaaaagcactggaagaaaagggaatagctcaacctataccaactattgatcagattatttctcaaactgaattctctacttgggaatacatttttgacaaacacttttataacggtgcggaaaaaaatttcctttggccccatgagttaacaaaagtgtttaagaagctcccacgagttactgataaaaaccctagttttcatcaacgtgacgcgattcgacgtaggattgaagaaataagagcattcagaaatcggatatctcacaatgaaccagcctggcatgttggcagcgcaaagacgaagcaggaagttataagcagcttgatggaaaaactaaataacatgatggaattgttatattggatatcgcctaaatttgcaaaatacgttagggatgtaggtattgaaacaagaattaaacaagtgctacatataaatgaaataaatagatatatgcacacatttgaacaatatgatgttgccgatttagaacaattgatagccgtaacacagcgggcaaacacagaaaatcatcgttgttatttcagcgtaaacggtgaaatgggtattttattacctcggaatacattgcttttacaataa

SEQ ID NO: 449774 - DNA, 267 bp, Serratia marcescens
atgacttccaatcaaatccgcaaagttcttaccctagctaaaattaacttggaaaacctgacgatcggccgtgactgcgttaaagtctatgtgcgtgataatgaggggtactgtgattttgaggcaatcggtcagttggttgagcaagttaaaggggttttgaactggggaggctattcgactggttctggtgcctgggtgcttgataagtcctacaccgtggccacatctgaatattgttctatgacttcatcgcatcactactga

SEQ ID NO: 449775 - DNA, 183 bp, Serratia marcescens
atgacaagcgatgaactaatgaagaaaatcaaggcgagcggttgggaattggtgcggatcaatgggtcacatcatattttcgagaaatcaggggaacccctaccgttagtaattccgcatccgcgcaaggatatggcgatcggaacgctcaataaaatactaaaacaggcaggtctgaaataa

SEQ ID NO: 449776 - DNA, 927 bp, Serratia marcescens
atggcaataataaatgatgtcaataaatttgtttctgtcagaaaacaagattttgatgcgtgtattgatgttgttgagcacaccttatgcatcaagtcactctgcgcagaggttcgatttcatcatttgaaatttgatggtaatggtaggcctatggtgaaagctttagctgaaaaactatatgaatatataattgactactgtttttcgatgcaagatagaagtgagcctctctcttctcaacaatggctagctttagcaaaacaggctagatctttgtttagacaccctaacgttactgatgattcacctgataaaacaggtgaggcaggagaaacattgttgttttttcttctggaggctatagttggagctcctcagttagttgcaaaaatggaactaaaaactaattctaatgatgaagttaaaggctctgatggaatacacatcaagtggaatgaagaggacaaagttgttgatttttactttggtgagtcaaagctttataagcaaatatcatctgctatggactcagcgctaaaaagcattgatgattttcataccaatgaaatgtataagcatgagtttggtatggcgaccaagcattataaatatgcaaaagacgaggttagggagtctgtacggaaattatttgtttctggtgagccgggttcggacgtgcgtataaatcatgcatgcttaatcggtttcgactggagtggatttaataaatttgattatggctcttcaactcctatacatgagcagtttcttgccaacttgactaaatcgatgccgcaatggattgggttattagatgataaatttagtagatttaatagaaaatatctacggtttgatgttttctttattccattcccttcggtggttgagttcaggaatgaatttaatagagcgttggattaa

SEQ ID NO: 449777 - DNA, 927 bp, Serratia marcescens
atgtcagaaaagcccacttacccaaacattagagatggaattccagattggataactatcagggaggctgttagactcttcaacggattgaatgggtgtaaaataaaaaaaagtgatttttatcgattcgcgctacaaggtaaaattcgtctttcaatatattttcaatccccagtaatattgaggaaaattaaatcacgaaatcataaattaaagctaagaccaataaaaagctcgtcaacgatgaaatcattcatgcttgccgaaagttcctttgtcagcgaaaacaatttaactttcagtactgaaggaagatatatccaccctgtacagagagtcatcgacacaacattgctcggctatgaatatgtccttatacagcgtttacttgcacaatcattaaagattccaccacctgtaactggagcaaggtcgaataattatggcattaccgtttctttattgggggaagcgtttcaagttttcgaaaagatgacatggcatgaaagaatcgaacgacaagtaaaaaggctacctaaagatatttcatcggatgattacgaaaaaatagcactaaacgacctaaaaaaagattttaataaatgttattttcctatgcatgaattaccgagtgatgcctgctttgtcctcagaaaaagtgaacttgataagttgatcaacaaaccgatcgaaaaagaaatacttccaccctctccaactcggatatccacccctctatcacgcctcttctggcttgcctgcaaaaataatgaaactatcagtccgctaatcatgcaaccgtataaactattgtccatttttgaacaatgggcatcagaggaaggcattaccgatcgattcagtggcgacacgctcaaggctgcgcttgagcgcggctcgcccccttccctgccaacacaaaagtaa

SEQ ID NO: 449778 - DNA, 141 bp, Serratia marcescens
atgaaattcagcatcttgcttctggtgctgtgcgcgctttcgggctgcgtgcatcacctgggccacctcccgccagtgtccggcgatccccagccggtgaattcccccgccatgatccaggagctgactcaccatgtctga

SEQ ID NO: 449779 - DNA, 1803 bp, Serratia marcescens
ttgagaacaatcgttcagcaggttccagcagagctgcaggcagttttcacccttatcaataatgatttaaggatgcggacgaacaatgcttgggtgctctctgctgataaaagatggtcgcttaaattcaccgcagagctttccgtaccagcatcccggtttatgccagacaacagcgtttggcatctggtgctctggcaggaagaggcccagatacgtgtagaggtttatcccgataaatcggaaggtatatcggtaacttttcagcaccaaaactacaacttttccgatgcgtctccccgcgcatggacatcaggaaatccctgccttgagaacacgccagccgcatttggtcgtaacttatggggtcaggaacctgaagctttacacgacagaattagctggcgactcagcaggttgctgctgtggattgacgctgctgctcaggataaactgaccataacgggggatgcagttgagttacccgccttccctgaacagtcgccctttgccgtgatcggttttagcgaacagatggatgacctgcctttctgggcatcaaaaacaggagaatgggggtttgcgagcagcagtggattgtccagcgcgcacaggacccgctttttacgtgagttttttgataacaagggaaagcttatccgggcaaccaaatggtctccgtttatgcgtaaatgcgcgagaacaacaaacgcagtgtggtctattttgcccactctccccgttctgtccccctggcaggcaccgagaacgtggcaggaactgagccagtgcttcgagcaatgcgggatatcattgccggatctcttttcggatattggccgttctgtcagagcccaacggaagcaacgcatgcccggattgttcttgctgggcttcccgctggaaaacaaagttggagatgctccagcacgcatccactggctggctctgcgtttaacgggcctcagtgatgaaatgacgaaacgccctggattccgcccaacggaacggaatcgaagagcatgggatcgcgaacagccagcttcacaggaccccatccggtgggtgcggacacaaaactgggctgctgaccagctcagaacgcggggcgaagcagccaacgacatccgcagcaaaaaggtgctgataatcggcgcaggctcactgggcagtatgattgcagaaaaccttatgcgcattggtgttgtcagacagggcattctggacgcagaccttctacaggccggaaatctgagccgccactccctgacgatgacgtcagttgggcataacaaagcgtctgcgcttgtcgaacatttgaatcgcattctgcctgacgcgagtgcgcgttcattcagcaccgcctttccccctgatagtgaggttgcaaaatgctcactgcgtaagtatgacgtcatcattgattgtaccggtgatgatggtgttcttaatgcattggcggcatttgactggcaaagtgaaaaaatatttatcagtctggctatgacatggcgagcagaaggtttatttgcctttgctgccagtgaaacaacttttcctgttacggatgcttccagccgcttcgacgactcggcgtcacctgaaatcgacatggatgaggccagaatagaagggatcggttgctggcatcccgtctttccggcccgtgccgatgacgtacagttatgggcggccgttggaacaaagttcatctgcagggtggtcagtgcgccagggagaatctatgaatattttaagcagatgcctgatggcactgtcgagcgagaaccgcatgagtattaa

SEQ ID NO: 449780 - DNA, 1146 bp, Serratia marcescens
atggaacttcaaccacagttcagcgaattcttagcaaacattaggccgacagataagcagaaggaagactggaaaagcggcgcaaggacgcttcgcgagcgcctgaaaaatttcgatctactcaaagatatcgttgtatcgacgtttctgcagggcagtattcgtcgttcaacggcaatccgtccgctgggcgataagcgccctgatgttgatattgtcgtggtgaccaaccttgaccatacccggatgccacccactgatgcaatggatctgttcatcccattcctcgacaaatattacccggggaaatgggaacctcagggacgctcctttggtatcaccctctcgtacgtcgaactggaccttgtgatcactgccattccagagtcaggcgcagaaaaaaactatcttgagcagctctataagtcagagtcagttctgacggttaactctctggaagagcaaattgactggcgcctgaacaaaagctgggcccccataatgggtggattgtatgaagctaacggagcccaggttgaagacgcccccgcttcagaatggaaagcccacccgttagtgcttcctgacagggacaagaacgagtggggtaggacgcatccgctcgcgcagatccgatggaccgctgagaaaaatcgcgtttgcaacggccactacatcaacctcgtcagggcggtgaaatggtggcgacagcagaacagcgaaaaccttcctaaataccctaaaggctatcccctggagcatctgattggtaacgcgctggatgatggtaccacctcaatgggcaaaggtctggttcagctgatggacacttttctgtcccgctgggcagccatttacaatcagaaagccaagccgtgtttaccggatcacggggttgaagaacatgacgtgatggcgcgcttatcggctgaggatttttgttcattttatgagggtattgcgggtgcggcggaaattgcccgtaacgcgctggcgtctcaggatcctaaagaaagcgcagaactctggcgccagctgttcggctccaagtttccagtgcccggacctcagggcggcgaccgcaatgctggatttacagcgccaagtaaaccagcagaaccacagaaaaccggacgcttcgcttga

SEQ ID NO: 449781 - DNA, 1500 bp, Serratia marcescens
atggcgactgctgtgttggcaaactggcacggtcatgattatcaggctcgatatttctggattcaggcatcccggcttaaaaatcctcaacaggattttgtcgcagaagtgtcctatgaggccgacggccctaaagcctttgatgacgtaattacacgttataaccctccccgccgcagcactgggcccgagcggattcaagccgattactatcaaatcaagtttcacgttacacaggctacaagttttggtttcgaagacttgattgatccggccttcattggcgctgagaccttctcaatccttgaaaggctacaacaggcaaagagtaccgtgcctgccaactctgcttttaatcttgttacgacagaccgaattattgatgaagacccgcttggtgagataatcagcaatgtggatggctccttacgactcgataagctgttcgatggcacgactgacaggagccgaaagggaaaggttcgcaagctttggcgtgaacatctcaagcttgccacagaccaggagctagagcaggtactgacagggtttcacatccaccaatcacagcccacgcttgaagcgatgcgtgaaaaagttaatacctgcttccagatcattggcctgattacctgcgaaaccagttctgacttccagttcgatgcagctgcgcgtgcattacgcagtcaggaacgttatagctttacacgagaacaattcacagccctgtgcttagaagagaactggctcaggcccgaaccacctgaaaagttcagaagtgttgcgctgcgctctttcagtgatggaccactggaaatcatggatgcgcttccggaacatactctctcccttctctcactgttcgatggtcgttttccctcccctggcattgcgtggaatgatgttattaagccccaaatagaaaccttcctgacaggtatcagacagacggagcgtaaagtgcgactgtatctgcatacccacagctcaattgctttgcttgccggcaaatgtatcggtcacaagtcaggtgtggaaatagagctggtccagaaaggaaggtcgggtgactccatctggtctgaaaacgaaccgcacaatgaacctgatgcggttatcgagaccgagactgtcggaagcggtagtcatgttgctttagtgctcagcatggcgagaaatgcactgccaaaagcacgcgcgtacatactcgcaaatcagcctgacataggacggatcattcacgccacccccgcaaacggatgtgggccacgtgcggtgaaaaacggttcacatgccgtagcgcttgccgaacagatatccgatgctgtcacggatgcagatttacctgttgaagcaagtctgcatattttcagcgctgcgccaaatgccgttaatttttatcttggccagcacaccgattttctgggtacatgcatcttttacgagtttgactttcaacgccagcgagatggctcttaccttccttcatttaaggtttaa

SEQ ID NO: 449782 - DNA, 2295 bp, Serratia marcescens
atgtacatccagcacatagagatatctaatttccgaaaactactttctgtgcgaattgacttcgctaatgagaccacgctgcttgtaggtgcaaacaacagcggcaaatcctctgccatgctggcactccggagatttttggtttctaaagcttcagcttttcggctccaggatctgactctttgtcatctcgccaagctggatgagattggtaaagtttgggagaacgcgccggaaaactttgaaatccctacagccaaggactgggctgactggctccctagtctggatatctgggtgtcagcagatcaaggggagttccactacatccgggacctcatacccaactttgcgtggcgcggaggactagtgggaatgcgttttctgcttgaacctgatgatatgaatacgctgtacacggactatcgtaaagagcgcacgagggttgtagagcttgaagatgctctagagaaggaagaaccacccggtagaccgctgaagctatggccgcagagcctacatgattacctgagccgtcggctgggagataaattcaaaataggttggtaccgcctagatccgcaacaacttaagaagcctgacaagtcgaccagaatggcgcaaatgcagcaactaagccctactgccctgcccttggaaagtaatcctctcagtggattaattcgaatacatgaaatcaatgcacagcggggattcggcgaccattcggacgacaaacaaggagatcatactagacccagcggcactcaaaaactctcggaacaactcagatcttattactcccgacaccttgacccaggtgacagccctgatgtctcagacctcgaagcgttgcgggcgatagaagcagcccagtcggcattcgatacgaagctaggtagcagcttcgaacctgctattagagaggtcgagggattgggttaccccggccgtaatgacccacgcatcaaagtcgcaagtcgcctagcaacaactgacggcatgaaccatgaagcggccgtcctttttgagttggattcaatccagggtgtcctaggagcccctcctcttcatttaccagagaccgctaatgggttgggatatcaaaacctcatatctatgattttccggctgatgggcttcagggacgagtggctgagaaaaaccagggctgccagcacggaagtaatagaccgcgtcgagcccatccacctcgtgctcattgaagaacctgaagcccaccttcatgttcaagtgcagcaagtgttcgtgcggcacgcctaccaagttctatgccgagacgctttgcttgaacgctacccaaatctgaagactcagcttttggtgagcactcactccagccatgtaacacatgaagtggagtaccagaaccttaggtatttcaggcggcttccagccgggatgtatggtatcggtgtaccggtgtcgacggtctctaatctctctaacgtgttcggcgaaggaacaaagacgaaggagttcgtaaccaggtatctgcgggcacagcatgcagacatattcttcgccgatgccgtcatcttggtagagggttcagcagagcgaatgatgctgccgcattttttgcgaaataagtttccattccttgaccgctgctacatcacaaccctcgatatcggtggcagtcacgcacatcgattaaggcctttaattgacgcccttggcatcctcactctggttattacagacctcgatgcagggcttaataaagctgcaaaaccggtgcaaagaaactcagatcagattacgaacaatccgacattgcgaagctggatgaaactgatgcatctgggcagcacagtggatgaactgcttgagttaccagcgaaccaaaaagagcacaaaatcgacgacctgtactcggtacgtatcgcctatcaaactcctatttccacccacctgcccgctactggtgaagtaatacaagctcttccaaatacctttgaagacagctttgtgcttagcaacgctggttactttgcggaaaagacaaacggtactggtctgatgaaggctttcgtaaaaattttgaatgacgcgcaaacatcagaagccgtcggagaagggtttttcaacgaattacgcgaaggaaagaaagcagagtttgtgttgctcgttttgggcgacaaaaactttcccagcctcgaaatccctgagtacatcattgaaggcctcaactggcttgagtccaaattgcgaagcaagcaaaaagagcttctggtaattccgcccgagggcgcggaggtgacgtcatga

SEQ ID NO: 449783 - DNA, 1848 bp, Serratia marcescens
atgagcgaggcagttgtcgcagatgccgacaccattatgcaggcttgcctgaatctgtcggatccgaagagtttttttctttacgcaggtgcgggctcaggaaaaacccactcacttgtcgaggctatccgcgaactcaaaagtcgcgagcgagaacgcctgacgttcgaggggcggcgcattgcggtgattacctatacaaacgcagcatgcgaggagattcttcgaaggctagagtttgatccactcgtggaagtctcaaccattcacgcgttcgcctggcgcctaatccaaggattcgacaacgagatcagagagtggctaaggatcaaacttgcccaggacattgagaagatcgagggcgagctagcacgctcgagaggcgacaataaaacatctcgagcaaaccgacggaagctacaaagcaaaatacgcagacttgagactctcgacgagattactaagttcacctatagccctacaagtaacaacagagaacgacaagcactcaatcacgatgaagtcatcaagttgaccgcagcattcgctcctgagcgccctttgttggatgttctagtagaccgctacccagttgtattgatcgacgaaagccaagacacccacgcgccagtaatggaggcttttctgaaagtccagcaattggcgcagacacgcttctgcctggggctactcggcgacaccatgcaacagatttacggccatggggtaacgcaccttgataaagcaatcccggatgactggcggaaacctgaaaaggtcgttaatcgccgctgtcctcgtagagtgatagaccttataaacgtgattcgaagcgccgtagacaatcatcagcagaccccaaagcctgatgccattcaaggtgtagtgcgcatgtactgcattagccaaaaccaagaacaggcagcaaatcttgaggaaggcatcgctcattcgatggctgcaatcaccgacgacggagaatgggctaccggccctgaaggccgaaagaccttgatcctcgaacataagatggctggacggcggatggggttcgagaagctgttcacgcccctctacgcggttgagcaccttcaaacaggcttgttggatggaaccctgcccgcacttcgcgttttcagcgaaggcgttcttcccatccttaccgcaaaggacgatcacttccttctgcttgaagcagtacgctctcgctcttccttgctcagcaaggacgctatgcaatcaacagtggatcaatcggcccacatgcagcgtgtagaggacgcgacgcacaccctgctctctcttttcgaaagaaacgatccaacactgagcgaagtcgcaacgcttctgttgaaaacccaactgcttgatgttcctgaaaatctggttgaggcaatggtgttgggatctcctggtgaggcgcccgatcctgaagatacgaacgcgataaccaattacgcctatcagctatttcttgagcgcccattttcggagctggcagcttttgcgacttatacagatggcctttcaccctatggtacgcaccaaggcgtaaagggactcgagtaccctcgagttatggttgtcatcaacgatgatgaggcagacggctttttgttcagctacgacaaattgctgggtgtgaaagaaccaacaaaaactgatcgagacaatgagcgtgagggcaaggaccacgcactagctcgtactcgcaggcttctctacgtaacgtgtagtcgtgctgaaaatagcttagcgattgtcgtatatacacctcagccgacactggccaagcgaaacgttgttgctgctggctggctccaagagagcgaagtcgaaatcctatga

SEQ ID NO: 449784 - DNA, 1587 bp, Serratia marcescens
atgacaataaaagaatgcgcagaaatccacagagcactgtggtacaccgaaaatcttggagtcgcgcaggggtatggcccttctccacgggatcgtgaattactggttgtacttgctaataaactaggtataccagacgagaaatttatcacttccgacgagagtaaaaaaatcacagctcagaagtatctgacagctatgattgagacaatggaaccgctttctcaaatgttccaagatatttggatttattgcgaacgtacattaattagaacgtcaaaaaatgccctcgatattgaatggaatttcaatattaatggggagtcgatagcaataaatttcgaagcattcaggaaatatcaaaagctgctcaacaagacccttgataaagacaaattcaacgaggtttgtaatgaatttgctactgtttgctgtaaacataatgatggaaagggttatattagatatgccccgatgccactaaaacccgatgatgcagacccaacaagtgttgcttcgagaattcatgatatgtgtaagcacgtcaaagaagaagggttaattgacgatggatattatggagcgacagacgcaattccttacctgtcagccatacggagcaaaaacctctggcgacaagaagactttgcagaattaaaaccattagtagaagacttttataatagtacaaagctagaggatattctatctttaccattctggacatttcgctggcaaatttacgaactatggtgtttgataatcaccctacaactctttgagtctcgtggctttacactagtacagtcctctgacggtgcttccttgcttgaactggggcaaaaagtagtagttgctgaaaaaaattcgaatccactagggcagattatttaccaaccttcatatcgcaggacgacagggcaatgtgttcatcctgacattgtagttgttcaggggcacccggaagctctcactcctaatattgttcgagcaatagttgaatgcaaacagcataagatgcctgagaatgagaggtttttgctccttaaaaagagatatttcgatggtgttgctgaagcttataatgattctatcggtcccgacggtaagctgatactattaaactatgataaagtcgattttactacaaactatgcacttcttgatgatttcaaaccacaaaatatttcgcctttaaaaggggcactcagctcaatacttgatgagtattctgcgaatgaagaacctcgtcaaattgtacttgtagttgatggctcacagagcatgctgaaaaccctcgtaaaatctgaagagtatatcaaagaactccataaagtattgggcgccttcgatgaagtcatatggctcagagggggtaatgttcatgtcgagaatataaatctttttgattacacatcattttataatatcgagagtgtggatctttttctggccggaatagatagagcaaaccagtttggttcaaatattagcatacatcttatcactgacctaaaaccacaatctgaaatattgaatgaagtgctaaaagaggcccccaaactgcatatacattatatttcttga

SEQ ID NO: 449785 - DNA, 840 bp, Serratia marcescens
atgagttggtacaccttctcgcttttgattctagttcaatcgttgagcaccgcggcgaacggtgcggcctggccctacgttgataatccccggattatccactgcaccaatggcagcgaaggcgagtgttcaaacagcgtgttctaccagagtgatggggtcgtcttcatagacatcgcgcccgtggggcgtcccgacccggcgctcgggactaaaatacgggcactgggtattcattgctactacgggaacagcgtcactggcaaacccttcagcggctgctcgtgggtcaatccgtggcaggtaaggcacgctccccaagtgacgggtaagtgcgagctgaaaaacacaaacgcgtgggagttgacgcctgactccacgtgctcaacctcgcattgggcccaacacgcgggcgcggggccggggggcgagtgcgtgatcttcacccaggtaccgaagatccagggtcgtctgctcaatacgccatttgggatgcttgcccctgataccgtcgcgaactcgggcaatcgattctgtcagaaggcactaccaccggacgttcggtgtgacctcgatatcccaaatagtattgaccaccagacgttacccccgcggggctcgaattccgtcaccgtgattggttctatcgcctgtggtgccaagcccgttgtggagatcgttggaggggatgtagttgtcctaggcgcaggggtgaaaagccggctgtctacgaacgttacgtctgccgcagccgtggcgctgacgtcgaagctgacggtgaccaacgccgctcctggggaatatcggggcgcggcggtcgtacgggtatcaccatactaa

SEQ ID NO: 449786 - DNA, 990 bp, Serratia marcescens
atgaggatggtaagtaagaaaacgattgacattattgttcccgtgtacaatcagataaatgtgattgaaaatttcttattttcggcttcaaagatagataaggaaaaagttaatataatattagtcaatgatggttctacggatggtacggaatctaaagtattggaatttatttcctccgaagataaaactaacttttttttaataaataaatctaatggtggcgtttcgtcggcgagaaatgctgggctactggcgtctacatcgaaatatatttggttttgtgatcctgatgatgttatcttagataatttaagcaatgtgttttctgttatagaaaacaacccggatgctgatgcctttattttttcatacgaaacttactatactcaaaatggaatcctaaagcaaaacatcagaagcaatgaggtcttaagtggcattagctttttagtgaaacataatagtttaagtaatgactattggcatccggcatcagatggcactttatgggacaaaatatataaaagggaacctattttagatgtgttgtttaacgaaggaatgatttgctccgaggattttaactttaacctcaatgtatttaaaagaataagaaaggtgattgtatcgaatgagttgctgtataaatactatgtgtacgctaacggtacgctgtcatcaacatttaacaaaaaaatatttgataacagattgcaggcagagcgggatacaatcagttttttgatgacgcataagggtagtgtaaggtcggaaatcaaaaagcatattttaaaaaatgttcgcttgctatctcaatattcagatggtgatttattttccttctataagaaagagcatgaatttttcgaggagagaatatatcccgtaagttctttccgtgaatttattttcataattttatcaaaactcaatgcatatgtgatttgtgtcaagctttacaggatgataaaaaaataccttagataa

SEQ ID NO: 449787 - DNA, 1302 bp, Serratia marcescens
atgctgttacgacaaagaaaagcaaccctcataaaagtagcactaactgtaatgttttcgactatatctattcaaaacagttacgccttcgagatgggtattaatacgcacttgcgctggtaccctgaagaacaagatcactatctagagttgattaataactatggtttcaattcatttcgtgatgattatctctgggcactaattgagcagcaaaaaggcgtttatcaaacaatttcaaaaatcaatcgagtagacacgtcttttttaatatcaaaagaaaactatggaatgaaccccatcgcagttttagcctacggtaatgatttatacgataaaggtgggtatgcgagtaatgatgaagctatcgccgcttacgcaaactatgcatattggactgcaaagagatttaaaggaaaagtcaagtattacgagatctggaatgaatggatgtcgggaacaggcactcataataaatcaccacccccccctcctgttcagatatatttcaagctgatacaacaagcatccatagcaataaagagagccaatcctgacgctattgttattgccggttcatttaatcccttagtaagctatggacaaaaatggtcgaatgacttgataaaacttggcatgctgaattatatagatggcatatcaatacacccatatagctttaaatctactgataaatcgctcaatactccggacggaaatattgagaagatagatgaataccaagcagaattgaagagactcgcaggcaaggaagtccctatttacattacagaaattggagtgccaaccagtacaggaaaattcggatacagcgaagactatgtcgcccaatacatagttaaatatacactccttgcaaaatccagggggtatataaaaggagtgtggtggtatgatttaagcgatgatggcgataacagcaaaaatatagagcacagatttggattgctcaataagaatgagagtaagaagcctgctatggaatcttatgggaaaattgccgacttgataaaaaactatacgattaaaaattataatgtaacaagcgatggcaaagtgaatttaatcttcagtaatggaaagagagaggctcgagtcacttggaaaagaaattataatcaggaagggggaaattcaacgatgagcaaaattatgccactaatgaccagcgacaatcaatcgcctcagaaaatcactgcacttgtcattgaagatgcggcacagaaaaatccaccatcagttagcgcagacacgcccataataacatttagcaatcagtaa

SEQ ID NO: 449788 - DNA, 861 bp, Serratia marcescens
atgagatataataatgcgatagtggtcgttgtctacaataaaaaaattgaggattcagccactctcaatacacttgttgagcatgacttttttaacagtaaactagttatccataataatgggccagagagtattactctgaaagggaaattggcagaaaaaatagaggcaaagtttaaatgtgttgaattgataaatagtctaaacaacttgccactcagtatgctatataacgattttattaaaaataatgaaaaggccgggcaatttatcatattggacgatgattcgacgatcactgaagcgtttgctagagcagtgaattgtaacgaggatgatatggagcttcctcgtattatttctagggttgatggtgtgacgtattaccctattgaagcgaaaaaagttgtcacaaccgagcgttatctggaccataaaacgtcctattctatcggttctggtatggtcatcaataattctttggttaaaaaatttaaaaaacataacgtagatttattcgatgagaactatgctctatatggggttgatgtaagcgtttttcgcagaatttatcaacttatagataaaggggaggattttaaaataaagagttcttcttacatctaccattctctttctcgtgcggaaggaaaagaaagtccttttcgtataagagagcgacttatcgatacagctataacaacaagaagatatcctacggtgcgtttgcatattcatttgatgaaaaaattcataattaatgtcataaaacttaatggtaataatgcggcttcaatagtcaaagcttatctcactgggatgcatcctcgttgtaaaactatgggctcgcgtcaacaataa

SEQ ID NO: 449789 - DNA, 810 bp, Serratia marcescens
gtgggtagtgaccaagtttggcgccctaaatacacaccaaagattggcccgttcttttttagttttctgaaagaagatgatgacataattaaaatagcatatgctgcttcttttggctctgatgtgtgggaatattcaaacgaagagttgaagttatgtaagaccctagttaagcgttttgatgcaatatccgtacgtgagtctttgggggtcgaaatgtgccgtgagcattttgatgtcttcgcagagcatgtccttgatccaacactcctactgatgagaaacgattatatcgatgtttttaaaaatagcggccttcctgataattctggaaaaatatttaattatattctagactcgaatgatgataaagttaactttatgaaaggcatatccgagtccttgggaaaagagttgtttacgacatatccaaagaaaacaaaaaaagattcttttgacattcatgatatggataactaccaatatccgccggttgaagcatggcttaagtcatttcatgatgccgattttgttgtaacggattcatttcatgggacagttttttcaattattttcaataaaccttttgttgctatttctaacaaggctagggggtcagcaagatttttatctttgttaaagatttttggtcttgaaaatcgattggtaagtgatttggctgaagtcaatgttagcctccttaatgcttccattgactaccgtcatgtaaatgagattttagcgtctttccgcgccaattccattgaattcattaaaaactctctttctcaaaagggtagggttaattaa

SEQ ID NO: 449790 - DNA, 171 bp, Serratia marcescens
atgttgatgccgtttgcagactcgctccagaagtcagaggtaaaacgatgttatttgcccattggcttggtcaacaagatattccagatccttatcgcaaaagtgctgaggcttttgaatttgtctatagcttacttgctgaaggtgctcagaaatgggcgctggcattaa

SEQ ID NO: 449791 - DNA, 2244 bp, Serratia marcescens
atgcccaagaaaacgagaacctcaaaaaaaaatacaccgcataccttaactagtgcagatcgagttgatatcctaacctttggtgtcggccacggagattgtcagcttatagagttctggctgcgggatacgctcactttccgtcttctatacgatggaggattagctatgtcttcagcccttgtttctcacctaaaaaataagcgtgctgatggcaaaaacgatctggatattgtcgtgttgagccatgttgacgcagaccataggagagggataaatgagctgctcaaaaaccgtagtatttctattggagaagtatggttaccttgcctgcctgcctttcggcgattaaagtggctttttgcaccgcatgtacaaagtgcagtgacattagctgaagagattgaaaatctggccatcgcacgcgatatacctgttatctatcctctccaagatcatattcaccgtacagaaagcggttccgtaagtgtcatatctcctgcgagaaagctgatgaaaaaactctatagcgcccctctatcagagcttcagccactactcacccacacaactttgcctctggagtggttaatccgctcccaaatacagcccgatgaagaaattactaatcatcaagatgtaaagcttttcgacagccaaaatgcactattgcccaagcaattacagtttaatggccatgaggttaagagcgatcaagccgcactcagcgtattgaacaaatataaaaaatcaatggatgaacccgatttcttcggtcagcatcttgttaataatacttctcttgttctggtgatagatatattgcttgaagagcaccatcgtcggcgtatcgttcttactggtgatcaagagaattgggtgtggatcgcttcagaacatccgatgggattggctgcagacgtgatgaaggctccgcaccacggaggacgggtatatctgtcagacaaaagtgacgaaataagcgatgtagagcaattttggctatggactcgtccacgtattgtcacagtcagcgccaatggcaagcactcacttccgcactgccgttttcgcgaatcggtgcgtatgattggtgccacacttgtttgccctaacaagcgcaataaagaattgtttttttcagacatacaacctgagggcaaaacctcttgtgcacagcattttgattgcaacaccacagatcaacatcctgttcagcggattagtctttcgacgcgctgtgaatcactgaacgctgcagcctgcctgagcggcaacggacaccgtagcccggcaccgatcgtggtgatgcagcaaaagctaatagaaccagatgaatcattcattcgatggactcaaactgaagtaagaaagcatgcgcagtggttgaacaaacagcttaatcgaagaagagcagagcaattgaaaaagctttcacttgctgaacgtgcaaatagttgtttcgaaaagtatagtcttgatgaaattataggaatatttaacggccatgaacgttttgaacttattaatgatcctggccctgtagtgctttatgcacaatcccatgggctgctatgggcagaaacacctcaccgacagttcgataaaagcgttaaaattgttgcaccattgacagaaaaagagtaccaagcggcgctaaagcgcatctcgaaatttgagcatctaatttttattgccgatgaaaaaattgatgatcgaactttgcatttacgcgataaatacgattttttgaagagtgttaatactgaagcattactaacattgtctgcacgttgggctggcatccccgatggggattttgcaatgtatcttaaatcaaaattatttcatgatttgatcagtctgtatgatttcagagcagtgaaatggagctatggccgttataaggaacctcatttaattttgcacctttataaaaaggatagtttaccattaccaaacttcctgccaagtgaatgggggattaaacagttttccataaaccattatgaaaacgaaataattactcttgacccagctaagatggttcgtctttttgatgatacatcccagtcagtaatcccaccaataagcttcgggtatgataaaaattccttttgtttacgtacgaataacttaaaggatttttatcagaaaaatacaacaataaaagaagatggagagctcgatgaacaactcaattttatgcctgatgagcagcaccttgcgtggtttgaactctag

SEQ ID NO: 449792 - DNA, 729 bp, Serratia marcescens
atgatagatatagaaaaagatgatgatggtcgatttgacaactttaaaaagaaatcagcgaaaatagaagttgattattactttggtcatagatgggatttgtctatacggaaagctccagttttgcaaatccttaagtatgaaaaaagactaagaaaatgtaagttgatatctaacataaagacatcattagttcgagttaacgattacatcccaacgtcacaagtaagttccggtgaagccagttacctaacaacacttgcttttatactctcgaacttagatagcaataacgtaataattatagatgaaccagagaatagcttacatccaagatggcaaaaaagttacacgtctcatatcttcgatgttttggactacttcgaaacaaaattaatattggctacacactcccctatgatcgtgataggtgcatctgaagatagtaaagatttaaatttaatgaaagctaaggacaacattattacttaccttgacagcaatgaggtaaatatagatgaggtaatggttgacgtgtttggagttcttacatcgagaagtagattttttagttacagaataaatgaaatacttactaaatacaatgacaataatataactcatgaagaagcagaaaagaacctcaatgatttagttaaattgggcccagatgaaaaacagggagatataatttcagcagcattacttatccttcaagagatgaaataa

SEQ ID NO: 449793 - DNA, 534 bp, Serratia marcescens
atgacgttgctattctgggcgataaacaacgccatctttgacaagaatacgccagagcggctcaagatcattacggatttggtcaaggcgggggcagatccactgcagccaagaccggaagggcgaagtagcccggctgaatatgttatgaaagcggataaaggcgtctggatacaggctatgcttgaaggcggactatcgcctaatgcaagggatgaaataaacaatcaaccaataattttcaagagctttcaagcggttaatacagagacgctgagtactctaatagattacaaagttgatgttaatatcaaaggtgctatgaacagaacgccattaattaatgcgttgtataatagttgcccagaacacattgaggttcttttggctcatggcgctaacccattagccaaagatgattttaatgacagcttcctttctttgatttctgcggaaatagccaagggagacaaaaataattcttatataaagaaattaattaaaattaaagagaaaataaacattatgaattag

SEQ ID NO: 449794 - DNA, 564 bp, Serratia marcescens
atgacgttgctattctgggcgataaataacgctatctttgacaagaacacgccagagcggctcaagatcattacggatctggtcaaggcgggggcagacccactgcagccaaggccggaagggagaagtagccccgctgaatttgttatgaaagcagataagggaatctggataaaatccatgttagatgggggactctctcctaatgcaaaagataaaatcaacaataagccaattatatttaaaagtattcttgccaagaatacagagacattagaggtcatgctggattatggtgcggatataaatgtaagaaattcactgggtgatacgctgctcatcgatgctttagactatcactcctatgaccatgtcattcttctattagaaaaaggcgccgatagcgatataagaggcaactcgggttggacgatgggcaatcaacttcaacggctgattaatatgagtcaggacggcagtgaggcgaaagagtctcttgagcgcatcagagacgagctaattaagcgtggcggaaaatggccgcctgctcctgtcagtcaatag

SEQ ID NO: 449795 - DNA, 321 bp, Serratia marcescens
atgggctatgcttttcaccacatccactttgcgccaaacgggcgtgacaaaagtgcgacatgtcaggccaggttgaagctctctatcgaacggctcttcacaggagtggctaaattgaaaatcgattggcatagcgcattgttaacacgcgccacgatcgtggataaaagctacaaaaatacgcaaaacgtccgtcgtttcatggttgaggcgtgcggagaggattttcgcttcgatcgtgaattcatggcatggatacgcaatgacgtgccaaagacgctaggtgatgtggttgatgagtggcagcgtaggcactcatag

SEQ ID NO: 449796 - DNA, 1005 bp, Serratia marcescens
atgtatgacacctgttattataagtattttagagatgatatatatctagataaatcaattcgctataatgaattgtttttcgcccataataatttactaaacgatccaagtgaccttcggaatgaacttaagtttttcgactcagctgcagaatgggaggtttttttcaaaacacacaaagtgagcccaactatatttttaagtgattatctcacccttgataataataaaccactttttgatgatctaataaaggaggtaaatgcaagcacattatctgacgcattaaaaaacagggttgctctagaaaaaaaactgcgttttgttttaactaagaataacatttcagaaggggatgatttaaataccgccattaaaataattttggataaatttgatgatattcaatctgagtgctatctgtcagcatcgtttagtgaaactccattaaattatttaatgtggtcacattatgctaatggatttaggggttgcgttcttatctacacctttaaaaacgaagttgttaatcttaaaaaacagccacatagcaaagagctacatgccgctaggtttaaaaagataaattataaaaaaaacaaaaaactgaggaatttatcagaatgcgtgggtgtgaatagtaataattttgacatttttttcgagaagcatagtgtttggcaatacgagcaagaaataaggctcgcgctcaaaaaaaatggaaggacaaatggagaagttttttatttacccgacaacgcaattaaaggtgttatttttggagttagaagctccgaatcctttatcaattcagttatagaatctgtctataatggtggctttgaagaacggagtgattcattcttttcattctacagtgaaattaatgaagatggccaagtctctttaagtcgagggcagaatcacaaaaagagtaaaacatggatcaccaatgatctcagcaatgatgaaataaaaaagtggaatgaaattcttactaagtga

SEQ ID NO: 449797 - DNA, 126 bp, Serratia marcescens
atgtggcatcaccgcctgcaacggcgcatccgtttcagctactggaacgaactgtgcgtcgcaaaaaaaaacatttatctcggaactaatttcatattacacatccaaataacaagaccgttttag

SEQ ID NO: 449798 - DNA, 1605 bp, Serratia marcescens
atgcggataaaaaaattaagattattcaatggatacaagcgctttcatgacttgaccattgatttgggggaaaatccctccagaattatcgcgttggtaggacctaatggatgcgggaaaagcagtgttttagatggcattctttttcaccatagtgcgttcggtttattgggtaacaaaggaaataaagaccacgtttatcattctatgcataatgacccgtcgtttaattatgaaagcatctcaattgaatttactagcggtacttattacaatgcaagggaaagtagaaagggtaaagaaaatactttattttccttccggagtccttatagatacaattcttatttgaacgtaacggaaagcagagcagttggtgagatatatttaaataattatggtgcatcttctgcttcagatctcgacgataagatggaagaaaactatcgcaggctaaatatcaagcttaataaatacatgcatgatcaagattgtaaacctagcgaggccaaggaaaaaatcataggggatttgaatcaatcaataaaaaactgcttaagtcttgagatcgataatctagggaatattgaaagctctcaaggaatgatttatttcagaaagcatgatcatccaaaaccgttttcatttaatgtactgtcatcaggggagaaagaggtcgttgacatcctgcttgatttatatttaagacaagatgaatataacgataccatttatcttttagatgagcctgaattacatataaatacttctattcagaaaaaactacttatcgagatcaatagacttattggtaaagattgtcagatctggttaacaactcacagtatcggttttatgcgtgctctacaggacgaactcaaagacgaatgccaaataatatactttgatgagagtaacaatctcgctgctgaagttaaaaaattaacacctactaacaaaaactctgacatgtggcgaaaaattttcagtgttgcgctggatgatcttgttcacctattaagccctaaacgaatagtctactgcgaagggcgtgatagtccgggtcggggtggcatggagagaggcttggatgccaaagtttataatactatcttcaatggaaaataccctgacacattatttgtttcaagtggtggtaacactgaacttgatcaaagaagtgagatcgccatagcaatcttatctaaagctttaccacatttagaagtgttagttttaaaagacagggattccggttctggtcgttgcatttctgctgaggaaaggaatatatatcttgaaacaaaccctaaaaatcaccgaatgttaaatcgctgggaaatagaaaactatctatttagtaaagattctttgatgagtttttgcaaaaaaaacaatctcatctttgacgaggctgaatatgataaaaccgttaataatattaatgacgacagtgtaaaagagctttctagttacatgagaaatttttgcggaataaagacgaacttgaatcctgaagtcttcaaaataaaaatatctgagtgtatggataatacctctgatacatatattgatcttgagagatctatatttttactcgagtga

SEQ ID NO: 449799 - DNA, 1107 bp, Serratia marcescens
atggatgtcaatgaacttagagagttacttatcaagtataatggtcttcaaaatactgatgaagtctatacgttttattatgatgaaacgaataatatccgaaaactatatttaaaagattctggctttaatgttataaaggcggataatttcatccttgcaggaatactacacaaagggttaagcactggcagtgattattcaactctatttcaaaagcttaatcttcaaaaaagtgcccatgagttaaaactcaaacatattgctaagggtggttttttggatatgcttaaatctgataagcttttaattattctaaactggctcatcgaaaacaatttctacatccattactttaatcttaatatcacatactggtctattattgacattgttgactctattattggagagctacataatcctttttacatcatggaccacatgtcacttaagagcgatttttatgagcttgccaatagcaatcctgatgttttcctgaatgctctacataaatttaactaccccgatattccagaagaaaaagcttatgagttttgcctctggcttatcgattttacatgcatgcacagttgtatactgccagattttcgagcacatgtactcgaaaatttggttaaagaatctctgaaaatcgaagaactaccgttcatatcgggatttcatggtcgagaactgattgatagctttatggtattttatttaagaaacttgtatctatttaaaaattccattcacatatttgatgaagaaaaaagcattcaagatgaagttaaaaatttcccgttaactgaaaatggcataccaatacagaatcatgagttcgttaaatcccacaactcagaggctgtccaactatctgatgttatcgcaggctttttgggtaagtatttttcttacttaaaagatgtaaatgacgagcaattagcgattgataagtcagccttaacgagcaagcaatttaagaccctttctgcgttaaaacacattattgatgtttctgatgatgttagcagaggattttttaatgaagttagcagcgagggagagcgacgaagaaataaccgttttttacatggtgtataa

SEQ ID NO: 449800 - DNA, 945 bp, Serratia marcescens
atgactaatactgtattatttttggatgatgcctctaaatttattggcgatttagacaaggttgaagcggaaaaattagctttgtctatgataaattcattgagaaaaataaagaaagcaaataatagagtctcagtgaatttaaatgttccaataggtcaatatccagtttccgataactgggttttacagaacattttggttggcaatggctatagagaagaatgggagtttatccgactattaaatagccgttctccactatcttcagaaattgaagatctgatagtgcagcaattgaatgacaaggagtttagaactgctaatggaaataaaaaatctatagccttggcatatgcctctctgttagatagtgcaactgttagttatgatattattcctgattggtcaaccccaatagttgaggttgtttgcgatactcttgaagatgacggaaatattagctcattaaattataatgtgaaaaatgtttcttctcctaatcatgtcactattcacgaagaatggttaagatctttaggtcttgtggagtcccctaccgtagatgatttctggaatgagcgaaacgaacgcttccctatgttacgttttctaaaaagaacaaagaaagacttatttgatttatatggtgcaagtatgccgtataatcaagctataaacgcaattatatctctttcacaggatgccgaaaattgggaacatgatgaagcatggccaaatttttccagatatgcaactgatgaatctgaaacaagacgtaaactttgctggttggatgatgaagacgatggagagagtaaatgctttgggtggcatgttcgtttcacaggaagttttgcaggaaggatacatttctttgttgattcgaaaaatagaaaaataataattggatatatcggtatgaaactctcaaaacctatatga

SEQ ID NO: 449801 - DNA, 225 bp, Serratia marcescens
atgatgggacgcgaaaaccgctatctggttatcaaatttaaagacgcaatcgaggcgctgacagtcgagcagcgcgaggcgttgagaagtatcgccattgcagttaccacgcatcgactgaacaacggcaagcaaccgttggaagctgttgtcgtcgaagccgactggactgaatacgaacaggtctggggaatgattgaagcgcgcgttaagggggaagcatga

SEQ ID NO: 449802 - DNA, 432 bp, Serratia marcescens
atggacaataagctgagcgaactgagcaagccggtggcggaagtggtttcaaagtttggcgaccccgaggcatttggcgagcgcgaaattaagctgctgaccggcattcaacagatggcctacgacacgagattatactcgcaagagtacgtctccgccctgcttgcagagctggaagcgaaggatgaacgcatcaaatggctggaagacgataaacgtcagttgaatgaaatcatcaacagcgaagctaatcgcgctgatgccgcagaaaagcggctggctacgccaaagccaccggagaagtgcccgacctgcaatcgtagatacacactggagagctatgcccacggagagtgcgctatttgcggagatccgtttgacgctggcgatgccttgcgcgccgctggtttcaccgtagagggggccgaatga

SEQ ID NO: 449803 - DNA, 468 bp, Serratia marcescens
atgacaaccatcaagcgctttacccccgactacaaaatgcacgcagttcggtttgaggctttcgcgcgtgaagctgaacacggtgaatacgtccggtttgatgcccaccagcaggtagtgagctccctgaaggctgagcgcgatgcgcagcagaaacgagccgatgagctggctgtggagaatgcggcaatgcgcgcagcgattgacgacattgctgccacgttggaaaccggaaccgatggcatgcttttcactgcagtagagaatgcagtcaatttggaggttacccagactgacgcagcacttgcagctatccgcaaggagtcacacatcgcgggtattcaagctgctgcagatcgtatcggtgtcatttcactgaagtacaagcctgggcaaaaacaggagctgattaaagcgattggccgtgctgttttccagtatgcaaatgagttgcgggaggccaaatga

SEQ ID NO: 449804 - DNA, 159 bp, Serratia marcescens
atgatggaaatgatgatcgtaggttatgactcccctcttctgacgattcagatgctggaagatcttgcagctaaaggggcagagaaaagttttgaagtgcagttaaacggcgacgctcagaaagtcattttcacccgcgggcaactgaccaaaccataa

SEQ ID NO: 449805 - DNA, 135 bp, Serratia marcescens
ttgacagccggaaagacggaagtggcgatgcaacgccgagaggtgtggctgatgctgcggttattttgggagcgggaatttgcgtttgaggagatgacatgcgatgttggcgagctgtgtaagcagattgaataa

SEQ ID NO: 449806 - DNA, 222 bp, Serratia marcescens
atgaaaatcatcagtaagcgccaggcgatgcatatttatcgtcagcatcccgaatccaagttatctgccttctgtacaggtcactaccagtggcatggcagtgtctgccattactacggacgtgaagttcaggatatcagcggcgttctcgctgtttttgttgaacgtcgtcaggaccgggcaggcccgtacgccattctgcgcagcgtgacagtgaactaa

SEQ ID NO: 449807 - DNA, 1341 bp, Serratia marcescens
atggctggagcgataaaaaaatctgctaaaaaaaccaggaagaaacgggttaactccttctttgctggtatcggtgggtttgaccttgccttcgaagaggagggctatactccatcattttactgcgaaaataacgaattctgtagaggtgtactggaacgtcactgggggcatgttgaaaatgcagaggacataagtgctctacgctctgaggtgataccggaggccgaagtttggactgctggattcccatgccaagatctttctatggcacgtacaccccacggaaagcggagcggcctcaagggttctcagtcaggactgttctatacattcctccagcatttatctgttcataaacctcctgtagtgctgttagaaaacgttgcgggtctactgagttcacataaaggagccgattttactgctttggttcaatcgcttactgagttaggatatgctgtgtcgtggcgtttattaaacgcgcgttattttggggtcccgcaatcaagaccgcgtatttttatttgtgcttggctcggttctattgagaatgcagttgcttctttgtatgaagatgaaatttctattaaaccaaaaaatgagagagaaggttttttaaaagaatcaaaatgtaaagattctattatttctgtgccacaaatttctttctgtatatcagcaacatctggtagacatacgggccttgattgggcgcgtacttatgttacatatccagataaagtccgccgtttaacacctaaagaatgtgaaagacttcaagggttgcctccagattggacaattccctcagacaactatgttatcccaattcgcggtatcgagactaacaggtatcatgcaataggtaatgctgtctgcgtgcctgttgtcagatggattgcaaaacgtattaaagctatcctagataaggatggattaaatgttactactccgtcgaatatggaaaatttagtccatcaggttatgtcttcaaaagtaaagatttcaaatttatacaatggttcgttggagcgtaaatggcagaccgggggagttgcttatgggaatatctatgcaactactgcagtttccccaagtcctataaaaccaataagtacaaaacttattgatttgattgagaaagatcatgttgcatctcgctattttattagtgaaaatgcaatgcaaggtattcttcgtcgtgtggataagctaggaagaaatctatttccgcctcttgatgaaacactcagaaaattagcaacaatagagtctgtagatgctgatgatattcagtttactatagaagttgaaactaaattagataaaattggttga

SEQ ID NO: 449808 - DNA, 681 bp, Serratia marcescens
atgctgacgtttaccgaagcacaaaaccaattcatcggcctctttggccaaacggcacgttaccatcaccggtacaaggtcttttctgactttgttcagtgcggtgcgatagcgatacacaaccgcttttgtccggatgatgcgctggagaaacagtacatgttgatcatcaaagggtatgagcgtgaggacgtcgaacgcctggcgcacttacttgccctggtgcgaatagcactggccgtagaaccttgtgattttttgggcatggctttcatgaacctggaactcggtgataaacaccgtgggcagttttttaccccctggagtgtcgcgtccatgatggccaggctgcagttcacggagttggaacaacggttgctgactcagccgttcgtgacgatcagcgagccggcgtgtggtgccggcgccatgatgatcgcggccgcggtcgagatgcaggcgttggggtatgcgccttcacaacatatgtgggtctcctgcgttgacatcgatgtggtagcgatgtcgatggcgtatatccagttgtcttcgcttggcattcctggagaagtcgtgctcggaaacgcactggcagatgaacgacggttggtgatgtacaccccgatgcattggttggaacaatggccactgcgcttacagacacagacgtttaagcagtga

SEQ ID NO: 449809 - DNA, 282 bp, Serratia marcescens
atgtcaaaagtatcagaaaaaatccaatggcggcttacttatcgtaagaatacaggtgaagatgtcgcgttagaaatgccatcatttgagcacggcaacgcagcatccaaagagttaatgaccccgttaaattatattatccgcattgaaaaaaatggggaaacagtgaagcgttgggacagagagatcttagccggctcaaacaaatggaaaagctgtaacccagatgatttcgagatcttgggggcgctgataacaatcaataaagttattaaaaagtaa

SEQ ID NO: 449810 - DNA, 861 bp, Serratia marcescens
atgactattgaatacccaaaggtgtatgaatatgcagacggtaaatcagcaaaaaaacaaatgtggtattttcgtttactcatagcagaatactcattattgtttattattgcgtttaattcctttattagttataaagataagttcacagtttcttttttcttgattttatttttggttgtatttttctttatcaaaaaaacgttcctattggctagtgagtggtataagtatcgcgcattgtctgagtctgttaaaacaacatgttggcgttatgtcatgaaggctgaacctttcaataaggtagagcagtgcgataactatgatcagtttaagcaaagcttggttgcaactattaaagacagcaacgttatacctaagaaaataaaaccagagatactaaataatagcacagttaccgattccatgcggcgaatggagtcgatgacattggatgaaaaaaaagaagtttatcttaacgagagaattattgatcagtataattggtactcaaaaaaatcgacatataacaaaaaaatgtctaagaggtgggggaaattcatcatctctctttatattctggctttgattttttcactgtcaaacatatacttcagcgcgtttattattcttcccgttgctttaattactacgttagcatcatcatttattggctggtcacaaattaagagatatgacgagcttcagtcatcatatctcttaactgcaggtgaaattctagccataaaagaacaggttcattatataagtaccgagagtcaactttctgcctttgtaagagatgctgagctagcattttctcgagaacacacacaatggacagctaggcgttcatcttaa

SEQ ID NO: 449811 - DNA, 1692 bp, Serratia marcescens
atgctgaaagccatcaaagagatgctggttgggaccaaagaaataccggcgaggccaacggcacgcgttgccaccccgcagagccctgcaggctattttatgccggcggccgccgagcagttgctggatacggcatctcgcaagcagtgcctgcagcagttgtgggagaacagcgcactgcccaaagacctctatacggatttctatctgcagccgctgaagcagctcatgacgctgatgcaggtactgccggcggcgcagcagggggaatatgcccgggagggcggattggcggaagtaaccctccagacggtgacttatgcggtgcgactggccaagggacatatgctgcctctgggggcggcaccggaagaacaggcggcccaaaatgtgcagtggaacatggtggtgttctatgcggcactgtggcactacctgccgctgcttggccaactggagggggaactccggagtggtcagccctggttggttggcgtggcaatacccaatgaaccttaccgctttcggttctctgttaccccgttaactccggtattggcaacaagtcagagcacgatgattgcggcgcgattgttgccagctgcggtcactgactggctgtcagctctgccggcggccatccggtcgctgatgctgattgcatcacgtcaaccgggggcattaccggtgatagatgacattgtccaggaggcagtcaaactggcccgtggtgaagatttattggcagccctgcagagtggccctgctcttgtcacgccggcggcgtcattaaccccgatggtgccggcaacagaaacagaacccctctctcccctgacgtcgtcgattgatttgcaagacacggtcagcggcaccctctcagctctccttgaggaaccactgccggcagagaggggaggtccgtctaacgagaacgtactgtcagcagcggaggtgttactcagctcggcactggatacgccgatgaacgataagccgttagccgagatgacgatagcaccggagccgcttgtcggcacgggtgaggatattcaggccctgttgtcattaatggccgttgagatgtctgctccggtgaaccagacagaacaggcgttcggggacgcccctcacgaagatgaaggccctatgcctgctaataatcctgtacttactgttgaagtgactcaggaggttaaagctgtcgaagtaaacctggagtcagacggacgtgatgatatcgcttcagaagcggcgttttcaacacccgaacctggcgcttctcaaacaccaacaccggctattgaaggtgatggagaggtaacgcccggagaatccttttggcgttggttagctgatgggctcaattctaatcaaatccctatcaataccgtagaggcgagggttcatcttatttctggttttgtctttatcactgtacctggaattttttatttgtatttgaaacaggcgggcctggatggctctcaacgagaagcctttcaggaagactttgaacgcctggataaacaccgcaggggaaagggtaaacgattttatttttcgcacctgtatgaaacatcagagtgcacaggtgcgtttaaacgaaccaaaggttacctcgttaaagcaagtttgttatatcgggggaaaaaactacctgacgacagtccggtattggtgatcccttaa

SEQ ID NO: 449812 - DNA, 1710 bp, Serratia marcescens
atggtagagcatcgggaacaatcgatgtctgcgctttcccaccgtccgcagaactggcaccagatcgactggtaccgtgttcaacgaacggtgcgggcgatgcagattcggattgcgaaggcttgcaaacacagcaactggcggaaggtgaaagccctccaacggatgttgacacgctcgacctcggccaagttactggccgtgcgtcgagtgactgaaaatcgaggtaacaagactgcgggtgtggacggcaaacgctggatcacccctcagtccaaatggaacgctgcgcatgatttggagcgtcgagggtaccgaacatcaccgcttcggcgggtgttcatacccaagtcgaatggcaagcaacgcccgctgggaattccagctatgcgggatcgtgccatgcaagcgctttacctgatggcactgtcacctgtggcagaaactgttggtgaccccaacagttatggcttcagaccggaacgatcgactgccgatgccatgggtcaactctacgtttgcctgtgccggaagcgatcgtcgcgttgggttctggaggcggatatcaggggctgtttcgatcatatcaaccatgcatggctactgagtcatgtgccgatggacaaggacgtactgaggaaatggctgagcgcagggatcgtgaacaagggactctttcaatcgaccgaagaagggacgccgcaaggcggggtcatttccccaacgttggcgaacctggccttggatgggctagagaggcagctcaagaaacacctgggcatcaagcgatcaggccggttgaaagtcaacgtggtgcgatacgccgatgactttgtcatcactgcggattccccagaggtattggagaatgaagtgcgtccgtgggtcgtgcagttcctggcccttcggggcctggagcttgctgaggaaaagacccgcatcgtatcgattgatcatggattcgatttcctcggatggaacttccgtaagtacggcgagaagctcctaatcaagccaagtctaaagagcgtgcgagcactctatagcaaggttcgagagatcatccaacgtcaccatggtggaagccaggctcatttgatctacaggttaagtcccgtgttgagagagtggacacggtatcaccagcccgttgtggctaaagctacgttccatcgcttggatgcgcagatctggtacctgctatggcgctgggcaaggcgacgtcatcagaagaagggagcccggtgggtacggaagcggtatttccataccttgggtgaccgacactgggaattcgcctacgaacaacgggatgctgtatcgggccatacaaggtatgtaaggctcgaaccgctgtcgactacacctatccaacggcatgcgaagatcaagggggactacaacccttttgatcctgcatgggaacgggaaggtgaaatgcttcgcacgcggagaatgattaactcattgcaataccgccgcgaggtcgcccgactctatcagcagcaacgcgggcaatgtgtccactgccggcttcccattacccgggagtctggatggcaggagcactatctcctcccccgcactcaaggcggcaagaaaacggcgagcaatcgcgtgctcctgcaccctgaatgccacgatcaagtccacaacctcggtatttctgtctgcaaaccggctcgcgccgcgagcttagtaaaggcttga

SEQ ID NO: 449813 - DNA, 783 bp, Serratia marcescens
atggtaaaggttttttatgctttttggagttttattgtctttgtttccttccctgcagctgctgattgggaattggacgtaaagtatgagccgaggtatcacgatgtcacggtaaaaataaaaaggtgggatgaatatgatgaaagaccgaatccactttatgattgtctggtcaacaatatgcaacatgattgtcgaatgacgataagatactcggggttcggaggagattatgattttaaagaggtcagttttaaagagatgagcacggttaggactctgggcgatctcgcaagggtatctcgtgaaaagggggttgtatttactaaatatatacccatggcggaaggttacagatattgttttaaccttatatatatttggcggggtttgtggaatccaatgcctggaggggttaacgcttgtaccaaagcggagatagtaccgacgtattgtagtatttctgagccttatattgaactgaaccacggagcgattagtgcaaacgcaattaatggccatacggtaagccgatcgttcaacgtttcgtgtaatactagttataaagtgcttgtcatagcacaagatttaaagagcgtattatcgcttggtggcggtttgcaaagtcaacttaaggttaacgatactgatctgggtgaggggtatgtgaccagcgttggtcctggtggcaagtcattgactttgacctcgactcttagtggttacaccagcggtacggggaatttccatgggtcgaaagtgattatgctaagtctgccttaa

SEQ ID NO: 449814 - DNA, 495 bp, Serratia marcescens
atgcaacgaaaaatgagagtcggcctgttttttatcctgccatgcttgttgtgcggtggcccggtattcgcggcggaagaggtggcgattaatttacgcggaggattgattgcgcccccgccttgcgtcattaattcggggacgaagatagacgttaatttcggcgagcgcattggggtgaataaggttgacggcaaaaactatcggcagaaaatcgactacgcgttcacctgcgagcaaaacgctctgccatggcaaatgacgatgacattaaaaggggctgtcggattcgataaggcggccctgcagaccaataatgaaagcctgaatattcgtgtttatcagaacaatattccatttattatcaatagctcgatcagcattgacgcgggaaacctgccgatattagaagcagtcccgataagcaaacctgatactgttctgcatgaaggcgaatttttcgcgactgggacactgcttattgagtacctttaa

SEQ ID NO: 449815 - DNA, 501 bp, Serratia marcescens
atggaagggaagatgaaaacacgctggtttttttgcctgttaggtttgtacggggggttgtggggaggaaacggttacgccggttcaaccgtggccgttaaggtgacggtactggcgccgttgccctgtgtcctgaacgagaaacaaccgataggtattgactttggtaacgaagtgatgaccacgcgcatcgatggccaggcttaccgccaaaaggtgaattaccgcctaagctgctcggggcagggaaagaatgcgatgaggttacagatcaaaggcgccagtgcggcgttcgacgccaccgcgttgcaaacgaatgtcaatggcctggcgatcgcgttcgaacagcccgtggggaagcgcttgccggttaacggttgggccaactttgactaccccaatctgccagacctttatgcggtgccggtaaaaaaaatcggggtaaatttgccgaccggcgagttttctgcgactgccacattgcgtgtcgattaccaatag

SEQ ID NO: 449816 - DNA, 198 bp, Serratia marcescens
atggtgaacctgcgcgccgacggcaacctgaagtcgatgctagtcgtgaatggctttgccggtaatggtggagtgacgctggatgtatcgggtgccagcgcgcagccggtcacgttctcttcgctgttgattccatcgggaacgccgacgctgggggatttttccggttcggctgtggcggtggtcgacattatgtaa

SEQ ID NO: 449817 - DNA, 543 bp, Serratia marcescens
atggatttaagaataaaaggaataggggcgccttgcctattgttgatgtcgtttggttgtgtttcgcaggttatttctgcttcgcaaggcgaagggcgcgtcaatatgcaaggcgctattatcgataccgcttgcgccatcgccacggaaagccgggaacaaattgtcgacatgaaaaatacggccctggcggatattacacgcggtgggaatggcaaaagtgtgcccttcagcattgagctggtgaactgcgtgcttgaacgcgccgataaaaatttaccggactggaagcagtttcaaattacttttgacggccatgccgatggtgacgcatttggcgtgaatggcgaagtttccggtattgctctgaaaattaccgatgccacagggaatattgcgcggccgggcaagccgatgccgccaatggctattgtccccggcgattatcggctgaatttcgcgatggcgttaattaccaatagtcagccactcaaagttggcaattatttctcatcggtacgtttcaaaatggattactactga

SEQ ID NO: 449818 - DNA, 465 bp, Serratia marcescens
atgctggaactcattttgcttgctgcgacggagttcactctcggggttatcaagcccatactgccggatacacgtgagtttctgcgcggcacgctgggagtgctggaagggttattacccttgacgagttttggcattccattacccgcagtgcgcatactgacgaactgcatggagcacaccaatctggactggcagacactgaacagcttgcgcgacatcatcgccactggtcagtatttgcgtgccgatgttttcgatgtctccctgctcaacaccattattcccaaactcgaaatctacaagatgggccacgcctccggccagcctgttcatcgcctggaaaaaaccaccacgcgtacctccacccttgccgcggctgacaccctgtatgaactggcctgcgaactgttcccgcaatggactgccgacttcgacgctctgcgtcaggaggcgaatcaatga

SEQ ID NO: 449819 - DNA, 675 bp, Serratia marcescens
atgaatattgcacacatcaatattgagcagcttattgccttgctgaatgagcagtgcgaattagccgcgccgtctccctggcaggttcttgaacgctataacgatggcgtcaccgttgtggatgccaacggttttgagcatctggaaatccccaatgtcgcgattgttcctgattgggaaaaacttgggcttgagcactggtcggataaaggcgggagccgtgacgtcagtttagaggaacagcgggctaatggtcagctggccgccgctgcaccgcagctcctggcttacgtcagtgtgcttcgcgatagtttggaaacggccggaaatgcgctgcgccgcatgctgaaaatgcatgagttgatgatggcaaaagccaatcacgcagccagtttctatgacgctgaatgcttgcaggaaatggccgaagcaccgtttgaggcggctgcagtgcttgaatatgtctgtggcattgaagaagtgaattcgggcctaaaagaagcgacctgcgtagggtgtggttgtaccgatgggcatgcctgcctggatgaacatcacacgccttgtcattggctcaaggtcaaccgcaaaacagggctgggagtgtgttcatcctgtccaacctttatcggtcattcattgaccactgaaggcaaaggagggcgcaatgcgtaa

SEQ ID NO: 449820 - DNA, 1344 bp, Serratia marcescens
atgaaacagcccatgaccaacgtgccgcactcctccgatgccgaacaagctgtgctgggtggactgatgctggacaacgaacgctgggatgatgtgctgcccctgcttcaggaggccgacttccatttcccagcgcaccggcgcatttatcaggcgatggggaaactcgtggccacgttgcagccgattgacctgataaccctgtctgagaccctggaacgggaatcgatgctcgagcaggttggcggttttgcctacctggctgaactctccaaaaataccccgagcgccgccaacatcgtggcctatgccaacatcgttcttgaacgcagtcgtctgcgccggttgctgcagctcggaaatgaactgagtgctgaggcagtgagcccgcgggctgatgttgcggtactgaccgagcgtgccgagcagcagctgtttcagctgtcagagcacactcagacgaaccagaacgtgagcgtgattgatggactgaactcgatggtcaatcacctggaaaccgtgatgggaagtggtggtatcacgggtaccccgaccggttttaccgagctggaccaggtgacctgcggcctgcagcccggtgaccttattctggtagccgcgcgtccctcgatgggtaaaacctcactggcgctgtcctgttgcaccggggcgctacgtctgacggcatcgccggtgcaggtgttcagtctggagatgcccaaagcccagctgtaccagcgcctgaccgccatggagggtcgggtatcactgacccggctgcgtagtgggcaactggatgatgtcgagtggacacgcgtttacaaggccgttgaggttatcagcccctgggaaggccgtcttatcatcgatgatgacagttacctgacgccggccttgttgcgctcgcgcgcccgccgatacacccgattgtacggtaaaccggctcttgtcatggtggactatctgcagctgatgcgttgcccgggccaggaaaaccgtacgcaggaaatttcagaaatttcccgcagcctcaaggcgctggccaaagagctggaatgtcccgttgtcgcgctgtctcagctgaaccgtcaactggaaagtcgtgcggacaagcgccccaataatggtgacctgcgcgactccggggcactggaacaggatgcggatgttatcgcctttgtgtaccgcgacgaagtgtatgacccgggcacactggataagggcgtggccgaaatcatcatcggcaagcagcgtcagggcgcgaccggcacccttcgggtcaaattcgaggggcagtacaccgcgttcagtgacctgcccgaccctcaattggggagggcataa

SEQ ID NO: 449821 - DNA, 1719 bp, Serratia marcescens
atgacgcgcctaaagaataaggtccttgacctgaacgctgccctgcttcagcaaggcaagactgcagtcggcactcatcccgagacggcaaccctcacgacactgccggtcagtgagatgcctatggtactcaccctggatgaggtggtgccttttccggacaacccgcggacgtcacgtaaccctcgctacgacgacatcaaggcttccatccgtgcccgcgggttggatacggtgcctaaaattaccctcgacccggagcgtcctgagctggggtatttcttcagcgacggcgggaatacgcgttatgccatcttgtcggagttgtggcaggagaccggggacgaacgcttttaccgtttctcctgcgtgttcaagccctggccggggcgtctgtcctgtgtcatcggtcatctggccgagaacgaggtacgcggtgacctgagtttcattgagaaagccatcggtatccgccaggcccgcgagatctatgaaactcaattgggtaagtctgtcacgctgcgggaattgtctgccttgctcaccgaggaaggctacccggttcataactccagcatcagccggatggaggacactgtgctctatctgcatccgtatatgccccacctgctggagtcggggctagggcgcccacaaattcagctgctgctggcgctacggacgcatgcggaaaaaacctggacactgtttgcgggggaggtcgggggtgacgtcgcctttgaggatgtgtttggccgagtctgtcgtcattttgattcgccagatgcctattcgctggagatgttccgcgatgagctgatcggcgccttgatcacggcgctgcctcatccgtcgctcaactacgaccgctggctactggagctggatccgaaagagcagaaccggcgcaaacatctgggcgacccaccccccatgccggcaatgtcgttgactgagcaagcgccggagggcccaaccgtgcccaacatgttagaacaaaccgcgctgccgctgttactggacagtgccttgtctgagaccacgggcgagcaagacgaactgtccggcacgcccccgacaaacgagataccgccataccgtccaaaaccgcgcgtagagactcagcctgacctgtacggggcaccaccggtgctgtcgggggacatcgagcatgacgagtcgggcgtcgacgaggcgcacaccgacaatctgccgccagtcctgctctcggcgttgcctgccggaggggccggggaagaggatgcgtctccgccggccgagctggcgcccacggtctctgatgtggcctttgcggacaccggcattgagccggtcacttcgctctgggctatcccggttctgcaggatgatatcgagcatctgcagggcatggcgtttcgtctggcctttgaactggccgaggtggcggggtgcgaggcggaagtccaggccgataaaagcggtctgcataccgcgggttttggcctggcgggcagctcggcctcgcggtttaccgcgttgctgctctcgctggccggcattcactctccgctggatgagcggtgttcgctggttgacgcctgtatcggctctgacaatcccgccgactggccggtgcttgacgatgttcataccgtgaaattgatgcggcttatccgcgtgctgcgtcgcctgcgcgaactgcagcgtgatttacctgcaacagaggagacggcttga

SEQ ID NO: 449822 - DNA, 726 bp, Serratia marcescens
atgaaccagtcaccacgacaaaaacgcctggtcagcctggtgcgcaagctgcttgagctggctcgcagcaacagcaatgcgcacgaagccgggctggcgttagcccgggcgcagaaactgatggcgaaatacggcatcagcgcgctggacgccagtctttccacggtacagcaggcccccagccggggcgccccttccgaagcccggcgtgcattgccggagtggatgtcgctgctggcctggacggtgggcagcgcctttggttgccggctgtatttttcctggcgggaaacccgcgccggctatcgccggaatgtgaccttttatggtttcagcgagcggccggcggtggcggcctacgcgtttgatgtgctgagtcgccagctcaaggatgcgacggcagcctacctgaaaacccaggacaagcgcctgaagatgaagacacgccgggcccgcgccgaacagtttagggcggggtgggtgtacggggttctgcgtgttgtcacggcgtttcaagtgacggagcaggaacaacagctcatgacgcgctggctggacacgcagcagatgggcgagttgcacacgcgtacggtcaaagcctgcaggggagataccgtcgcccggctggaggggtatctggccggtcagaatgcccggttgcattacggtgtacagggttcagacacggtcatgtccttgtctcttgcgtcaggggaggacaattga

SEQ ID NO: 449823 - DNA, 255 bp, Serratia marcescens
atgactaagcgtaatagcaacccaacggatgaagagattctggaggcaatgacgaaatggggtagcagcaacagcatgacatacgtcattgccaacatattgcgcagcgaggggttcagggagttgaaaacgacatttgtgctgcggcggcttaagaaactcgaggcgctagggcaggtgaaaagagtcaaatccgtctacgcaacgcaactttgctggactaaatcggctgaggcccaggagaaagcattatga

SEQ ID NO: 449824 - DNA, 330 bp, Serratia marcescens
atgagcactgagaagctgagcgaactgagcaagccggtggcgtatacagattcggaggagctgcgattccaccatgcaacaagtgacatgtggcccgttccgcttggattcgggaaagacgtgtctctctactcgcaagagtacgtctctgcccttatagacgaaaattcagctgccaaaataacgggtgttaaagagtttgcagcggaaatgctcgcgcgtgctgacgatagcgataactcattacctgatgatgctcgtgctgggatgcggacggctgctgcgttcgccaatatgtttattgatttgagtgaggtctcacatggataa

SEQ ID NO: 449825 - DNA, 627 bp, Serratia marcescens
atggataaatacagtgaactgaggcttgcagcaaaaaatgcaacacaaggtgactggcgctattcacgctccggggccaactcaatagtacaagcctcggttatattgccgaggggtggtaattctagcgtcgtcctatgcaaactttttcgctctgagtggcggggagagctgaacacagcgcatgatgctgcattcatcgctgctgcaaaccctgctgtcgttctcgccctgctggcagagctggcggagaaggataagcgcatcgccgagctagaaatcaacgagaagcaaatgctacgtgaccattattgcgctgaggatgtactggccagacagcgtaatgactatgaaagtgcgctggagggcatgtacgaggctgtaaccggaaagtgccctgcgtggggctgcgggttcgggtcagatgaagccgttaaggaagttgcacaaatacacgcagagctggaagccaagctggctacgccggtgcggttgcctacgcgcaaggccgttagacatccagcaggttatccggaggacgccgcgagagaggctgggtataacgaggcgctgttcgatgttggcgaggacctcgacgcccagggcttcaccgtagaggggtggtga

SEQ ID NO: 449826 - DNA, 627 bp, Serratia marcescens
atgagtaacgccttgtctcaggcaacgaacagcctgcttacgcagttggtgatggagcttaaatcaggttacatccgccgctgtgagtccctgggtctgacaaccgaagagatgcagctgctgcacgggctgaccattgaagacctgcattacctgatgaacagcgcggtatctgtgctgaccttccaaatccatcacgagaacttctctttgatgctgcagcacgcgcgtcgggaacagcagcgcctgcagcgtattgaccgcgccctggcactggggggctccatcgagatgatgcaacactactttggtctgtccacggtggaggttgccgcccgccggcgcatgaccggcatcagcattcgccagggacggtgtgccgcgcttactgatgacgagaatgccgccttgtggcgccagtggcaaaaagcggacatcgaggacgcctccagtgcggatgggctggatgtcatgatgctggcggccgagcagatggacattccgctgacggccgtctggaacgcggtacgcaattttgatggagaacatactgaaaccacgaagaaagccattcgggcggtacgttgtgccgcccatcacaccaggaaagaaaggagaactgcatga

SEQ ID NO: 449827 - DNA, 270 bp, Serratia marcescens
atgaaatcagtgacgttaatgcccggcctgcaggcgccacgctcggcgccgccggcatgccagaaaaaagcgatagagcaggtgaaacgctttcgccgcggggagcgcaactacaagcacctttatatcaacgggaaaggcaagtgcccgccggggcgtgcctggatgaaaatcgatgtgggggcctgttggcgtctgctgagtcgaaacagcgggactgactggcacctgctgacgcatgaacgctacaacaccgaaatactgaaatga

SEQ ID NO: 449828 - DNA, 1299 bp, Serratia marcescens
atgcgacccccccggacaccggatgacgatctgatcacgtttacgctggcacagatgaatgcccggctgacagcgcgaatagaggcagagaatacgccccctggcaccgccgatgtgactcatctgcgcagtggcctgctgtatatggggaacgtgcacgactcggtcccacgccggctgctgctggacgcgcgcctgtccccgctggataaacaggcctggatcatgatacgcctgtatgcacagcaaaatcagggggccgtgtttccgacctatgatgagctgcagctgcaactggcttccccgttcaaaggccaggcctcccgggagacggtgagccgggtactcctgatgctgcgcctgaccggctggctcagtctgtgtcgccgcgtgcgtgatggcaaggggcgggtgcgcggcaatatctacgcccagcatgacgaaccgctgtcggcccgggatgccgagacgctggatccgacctggctggatacggtggcattggcctgcctgcacaagaaccgcacggtcagtcagaccgcctggtcggtgttgttcgatatccagcatgatccctcgatgcggcatcagcattcgcagctggcggccatggccgagcgactgggggcaccacagacgcctcaacagatggcggcacgggtcgccctgaggacagggcatcatcgccgttcagcggccgaccgggataaacaatatcccggttcgaaaaccgaattcagtgaatttacccgcagttcggaaaccgaactcagtcaaaaacaggggggcgcatcaccgggttcggttaccgaactcagtctgaaatcagcggcttacggcgaacctgtcaaaccgaactgtaacgtacgttctttcacacagagtgtgaataaaaaaacgtacgtcgcgacactgccggtcgaactgcaggacagcatggacgccgatgaccaccggcaaatcacgacccagcttcaggcgctgcccgaggagcaagcacggcaggtgctggaaagcctggcgcagacgatggcccgcggcggcctgaacaacccgaccggctggttgctggccgttatcaagcgggcccgtaatggtgaactgtatgcgccaggcaaggcgactcagcctgcccggccaacggctgtgcccccataccaccgcccaaccccgcaatcagccgcaccggccagcatgagcctgcctgattgccggcaaccggcctcccgggaacatgtcagtgccatcgtggccaaactgcggcaggaaatggcgagagtgagaggaaaaatatcatga

SEQ ID NO: 449829 - DNA, 750 bp, Serratia marcescens
atggttgattcagcaaagagcaaagaaacggtgccggcaaccccgcgtgcgggggcgcttaaatccacactgaccgtgcaactgcatacgcagtacgccattttgctgtgggaaggccgttcccgcagcaagtcatcaagtaaaccccagatagtcagtatgcctcaggtgattgccctggccgggcggattaaccgggattcggacagcgataatccgtatgcggatcgcgccatggtcttgcttgagcaggcgattgagcggggaaccgcacgcttgcagtctgcggttgccgaactggagacggtcttatcctgtctgccggcacaggtctctctgtcggatatcgcgtctgtttcacccctcaatatcggcgttttcagtcgtacccccctgggataccgctgcgtctggatgctggtcggttttgaccagcttgcgatgaaagccttccaggcctggcattacgggttaatctcccggcaaaagcgcgacgaattgctcagccagggtggccactgggtgcgtcaggtttatggtgttgtgcagcaataccgttccgtggccgtttcccgtgaggacctccgtctgcaaaccccggccggcatcgatgccgtcaaacgcttgggcgagccggatgcggatatcttgtcaggggcagtgcgctccgctttctcccccccgttgcgccagcaacctgaagccccacgttccaccgaggcaaaacccaaaaaaggaggcaaagcatga

SEQ ID NO: 449830 - DNA, 561 bp, Serratia marcescens
atgagtcgtcgcactgcttttatgcccagcgtggtggttatcacgctgttgctcagtggatgtgccggcacagagttggcagagtggaaccaaaaaatcagcgatgcggcccattcgttggccggcggtggcaagtcaggctccgccggtggcgatatgccctggatgacccgtgccaccagtggtccgcgtcagaccgtgcaacgcacctacaccctgcccgtggatgtcgacaccgcggctgcccgcctgaaaagccattaccagttcatctcgtccgacgaactggagagcctgcgacagcgtaatcagtacggtgactggagtgcggcggccattgatgaggcccaccctgtctggtcagcgaaccggggcagttactacacgatggggcaggagtggaaaggtaacgaccgtcttgagctggaggtactgaagtccggtgccggcagcaccctgaaagtggcttacagctccccggatgcgtctcatcttaaggatgcctatctagagcccctgatgacgcaactgcagcaagtcgccaaaggcctgctcaagtga

SEQ ID NO: 449831 - DNA, 468 bp, Serratia marcescens
atgtctactcaagctcaaaacacttctaccaaaactgaatacttcaacctgaccatcaagggcatggggtatctcagcaacgttcgtcaggtcaatggcccgaacggcacctttatcagcgcagtcatcaatggactttccggtccgaccgataacgccagttacacgcgtttcgatgtgacggtcgccggtaaagaagccagcagtctggtcaaccgctgccaaaaagcagtggatgaagacaaaaaagtcctgattgggtttgtcctcagcaatctcaaaacggacatcttcacgctcaacagcggcgaacatgccggtgaaccacgtgtcagcctcaaggcccgccttatcaaggtcgagtggatcaaaatcggccaggagaaggtgttccaggctgagaaatccgactctgcgccgcctcagcaaggttctgcacagcaacaatatgcagaaaactctttctga

SEQ ID NO: 449832 - DNA, 204 bp, Serratia marcescens
atgcaaaattcaatgggcattctggccgcagagtctggatttcatctgccgctgcaggtcttaaaaagtggtcgcggttactatattggtaccgcgaacaatgaagggcctgtttcccgtgagtctgaagagtatttcagcttacgcaataacgctgttcgggccctcgcacagggcacctggacacagcgcgaaatggcatag

SEQ ID NO: 449833 - DNA, 618 bp, Serratia marcescens
atgaaaaaaacagttctcgtctcttccctggccgcactcatgttaaccgggtgcgtgactcagcaacccctgcagcagcgcgatgttacccctgtcacaccatcggtcaccgtcacccgtaatattcagccggtgagctcggatgtttacgggcaggtgccggaggtggtgcgctacgaccgttatctcctggtcagcactgacccggcagccgttcagcgtgacccgctttcgcaaatcatcgacatccgtattccggcgtccgtcaatccgacggtggctgacgcgttgcgctatgcgctgcgccagtcgggctattccctgtgtgcaaccggagcagcaaatggcgtgctgtaccgccaggcgttgccggcagtgcagtaccaattggggccgatgcgtctgcgtaccgccctgcaagtgctggccggtccggcctggcagcttgaggtcgacgacgtgcagcgtgtggtctgccacagcctgcgagccggctatcagttgccggcaacacagttgtcgccgccacgtccggcgccggcggtagcaccggttggcccggttgcaccgcaagcaattaaacccgcgtcaccaaccggcgggtggctgaaaaaatga

SEQ ID NO: 449834 - DNA, 756 bp, Serratia marcescens
atgacagagcataacgacgacatgatgccgatgactccggcaaaacaaggcctgctgcgcagcaaggcattttggggcgtggtgggcgctattgtgatggtgtgcgtcctggtggtgattgctactggaaccctcaagcccatcaatcagcgacttgccttgctggagcagagccaaaaaacgatgacgccgcaggatgacatgaacgcgatggccgataagctgcaggcgcaggcaaaacagcttaacagtctggttgagcgccaggacgcgctcacgcggcagatgggggcgctgacgcaatcctctgggctgccggaaaaacttgaacagcagctgcaggcgcaacaggtcgagctgaatgcgctgaaagacagcattgagtccgtgaaaaagtcagcggcggccttgccgccggaaaaacctgcgccggtagtggcgccgtcaaccgctatccctccggcaccctctgcgactacccaaatcaccccaaagcacaaacccacgccgatgaaaccctctccacgtaatacgcaaccccgcgtggcgcacaaagcccccttcgtgctgaccggggtggagcagcgcgggacatcggcctttgcggctgtggcgccgcaggggttcagtgatttgtcgcaggtgcggttaatcggggaaggtgagtcggtcgccggctggaccctggtcagtgccagctacgggcaggcgacgtttcgggtgaacggccgtctgcagaccgtcagcgcccaataa

SEQ ID NO: 449835 - DNA, 711 bp, Serratia marcescens
atgaaactgaaatatagcgtgattgccctgatgctgctgagtccgttatcacaggcggcgcaacagacggcgattgagaacagtcagtcaaccctgagcgagcttcagcagagtctggtcaacaagacggcggagcagggcaggcagtggggcctcagtggggaagagtaccagcgttatcagcaactgatggagggccctcgcgggacgcagtcaccagggcttgacccgctgacagcccttggcatcgaggcgcagagtgatgccgagcgtaaaaagtacgccgagcagtgggtcaaacaggagttcatccgcaccgagaaggagctgaagttccagcgtgaagtcgatgcggcctggcaacgcctgggcgtgttgccggtgaacatggggaatgcggccggcattgcccacgataccggcggacgactggcactgttcgtgaaggcgaaggactgcgggcagtgtgatgcccgtctggcggcggtgctggccgacaaccggccggtcgacatttacctggtcgacagcaagggcaatgacagcttgctgcgtgactgggcgcgggcacatcacattcccgtcgacaaggtgcgcgcacgtcaaatcacgctcaatcatgacggtggccgctggatgaagttcggcaacggcctgatgccggtggtgctgcaacagggggagaacggatggacactcgccgcgttctga

SEQ ID NO: 449836 - DNA, 675 bp, Serratia marcescens
atggacactcgccgcgttctgacccgggggctgttgcccctgtttgccttccttgctgctgtgagcagtgggggtgttcatgccgccacccagcaggttccttccggctaccgggaggtcgcgctgcgtcacggggtgccgccggagtccctgtattcagtggcgttggccgagacatcgatggcaccgaaaagcatcgtctcggtgacccgcggtaccggcccggcacccaatgtggagcgcccctggccctggaccatcaacgtggccggcattgggtatcgctatgccagccgcctgcaggcctgggaagcgctgcagcgttttttgaaaacccatccgcgcaagcgcattgatgtcgggattgcccaggtcaacctgggctggaacggtcatcacttcacgtcgacctgggaagcgtttgacccttacaccaacctcaacgcggcagcggccatcctgcgggaatgctatgaccgcaaccccggaagctggctggttgccgccgggtgctatcaccaccccgccggcggcgctccggccgcccggtataaagccatcgtgagccgcaagctggcacgcctcaatggtatcgcatccccaaaaaatcctgtgtctgctgtgcgaccggtcacaacggtcgcgctgacgtgggttgagccgaggaacccataa

SEQ ID NO: 449837 - DNA, 585 bp, Serratia marcescens
atgacgcccccggcggtgatggggcagcgcttgctgcgccaaacggcggagattgtcatcatgaaacacgttaattatttattcttcggcctgtgtctggtgacctccaccgcgctggcaaatctgaatgtgattgccgacctcggcggagaagatgcttcaccctattttgaaggcatcaaccgccaggagggtgcccaatcatcgccggctgtgccgccggcgccggtatcgtcagcggatgccgaggcggccatgttaccggtggcaacacctgaactgacgccgggtatggtagaggcgcggccgctgcagttaccgggcattggcgcgttgtttattgtgggggatgatgacagcagtcgtacctggctgagtgcaaatgctgacacactccgtatcaaacacgctgccggcctggtggtgaacatcagtgacggagaggctctgcaggggctgcgtgagcttgcccctggcatcccgatggcgccggcctccggcagcgaactggcgcggcgtctgcagctgtcacattatccggtgctgattaccgacaccggactgacgcagcaggtatcgccgtga

SEQ ID NO: 449838 - DNA, 624 bp, Serratia marcescens
atgtcggcaccgcacattgccgcggcgctgatgatgaatccgctgccggcattgctgctggttgtcatcttcattgcggtcatggtcatgctgggccagcgtcggcgcgagacagtacgtcagcgtcgccatcgccgctatcgcgctgcggccgaacgggtgatgacgaaactccctcaactgggcggcgatgctcagcggctgacttacctgcgcaaaatcaatccctacgtgtttgaggagctgctgctcctggcgtttgagcgccaggggtatgccgttgcgcgcaatgcgtcttacagcggcgacggtggcctggacggcacggtctttattgccgggcaaacctacttcatccaggccaagcgctatagcaaggccatcacgccgtcgcatatccgggattttgcagcgctattgcaggacgcccggtgcgagggcttttttattcataccggacgcaccggccacctaagccgcacgttgctgctggcgcatccccgggtgcatctgatcagcggccaaaagctgctggcgctacttgccggcaatgcagagtggctgtcttttttatccggaaatacggtaacccaacggagtgcatttgatgtctcatcctcttaa

SEQ ID NO: 449839 - DNA, 465 bp, Serratia marcescens
atgtctcatcctcttaatcatacctggagcgtgctgtgtgtttgtggaatcaccctcttcagaatgctgtttttgtggccgggcgtgatgctggcgattttgggggggctggtctggcttgccacgctcacggatgacggtgggcagcgggcggccgacatggctgtcacggcccaaaattaccgcacggcactcgccgggagcgtgatgttccagccttgttcgtacccgcaaccgtctgaattgcctgaattgaaaccattcgtaggtccatcggcggcgccggtgccaggtaacaagtcgaactgtcagccttatccgctgactttcgccgccgctgcggcgcaggaacggcgcgttattctcggcgccgggagtgcactgttcgcctttggcgtgatcgtcgagttgtctttagtactgttcaggcgtcgtcagaggcctcagggaggtcgtcatgagtaa

SEQ ID NO: 449840 - DNA, 2115 bp, Serratia marcescens
atgagtaaccgccatgtgatggaggccctgctgcgcccggcggtagagctgaatacggcgattgtcgccggcgcggcttcggtgatttgcgtggcggcgccctgggcggtggcactggcaccgtcggtaagttatgtcaccgccggcgcctttgccgtgctgtccgcggtgcgtgcccgccagggtatccgggtggtgcgctaccgccgtaatctgcgccgcctgccgcgctatgtcatgaccagcccgcaaatcccggtcagccagcagcggttgttcctgggacgcggttttcgctggcagcaaaagcacacacagcggttgatggatacgcgacgtcccgaggtggagaagtatgtccagccgtccggtacgtatcagttggcgcgtcgcctcgagctgcagaccgaatacactctcccctggctgtcgcagctgctgcgcaccgactcgccgctcaatccggtgcggccattgccgccggtcgggggtaacccggctattcacggtattgagcccgacgagctcgatgtctcgatggcgctgggcgagcgtgtgggccacagcctggtgctaggcactacccgagtcggcaagacccgcctggcggagctgcttatcacccaggatattcgccgaggtgacatcaccatcgtgtttgaccccaaaggcgatgcggacctgcttcgccgggtctgggcggaagcgcaccgtgccggccgcggggacgagttgtttatcttccacctgggctggccggatatctcggcacgctataacgcggttggtcgtttcgaacgggtatctgaggtggccgggcgtatttccgggcagctcagcggtgagggcaacagtgcggcattccgcgagtttgcctggcgattcgtcaacattgtggcgcgcgccctggttgcgctgggacaacgtcctgactatcagctgattacccgttacgtgaacaacatcagcgagctgtatgagacctacgcgaaaaaggtgatagacgcgcggatgccggcactgcagcagcaaatcgacaacagcctgcaggtgctgacggaagacgatgtgccccgcaacatgcagggccagccaaatgcgataaaaatcatggcggtggaaatggcattgagctccgaggccggcaagcagctgtatgaccccattcttgatggcctgcggtcggccgtgcgttatgaccgaacctacttcgataaaatcgtggcctccctgctgccgctgctggagaagctcaccaccggcaagaccgctgagctgctggcgccgaactacatggacatgagcgacccgcggcccatctttgactgggagcaggtcatccgcaagcgcggcattgtgtatgtggggctcgatgcgctgtcagacggcgttgttgcttccgccgttggcaacagcatgttcgccgacctggtgtcggtggccggccatatctataagcatggcatgcacggcggactgcccacccgggccgacggaaagctgcccatcaacctgcactgtgacgagttcaacgagttgatgggggacgagtttattccgctcatcaacaaaggcgggggggcgggcatgcaggtgacagcctacacccagacccagtccgatatcgaggctcgtatcggcagcccggccaaggcagcccaggtcacgggtaacttcaataccctgataatgctgcgtgtgcgggagaacaccacggcgcagctgctgaccacgcagttgccggaagtggatatctacaccaaaaccctggtctcggggcacgccgacacggccgacgtggagaaagggcaggactttacctccagtacccaggaccgtgtcggcacggtgaaaacgccgctgcttaccccggccgagctgataaacctgccgaagggccaggcgttcgcgctgctggaagggggacagctgtggaaaatccgcatgccgctgcccagtggtgacggggatgatgcgctcatgccgcccaacctgcaaaagattgctgaagagatgcagcgcaactaccgcaccagcgagtcctggtggtcggcaagtcaggtgatgccggacagcctggtcaggggaggtagcgatggcacaggccgtgaataa

SEQ ID NO: 449841 - DNA, 759 bp, Serratia marcescens
atggcacaggccgtgaataatcagccacagcagccggtacctccgcgtcggcatggcctgctgtacaacctgttctggggctggccctgggcgctggttgggatgctcctggtctcgctgctggtcagcctgcttatcgagtatgtgggcatggcgttcttctggccggagcttggtgcgtcgcacagtgaagcggtgatgaacaccgaactcggttatctgtcgtcggagtttacccggagcctgctgctgtcaacgccgtcagtgacggtaacccgatgggtgacgctggcctatcagtggacctttgtggatagcgggttcctggactgggtgcatcgggcgtatgagagccaggccagcagccagaatgcggtggcccgggagctgaacagctggagcgggtggctggccggcacgctcaaggagtacttgctggcgacggtgtatgtcaccgtcatcaccctggtacgggtgactatcctggtgttgtccatcccgctgtttattctggtgctgctggttgccctgaccgagggctttgggcgccgggatattcggcgttatggcgcgggctatgaatcgagctttgtgtaccaccatgccaagcgcatggtaaaacctgctgtgtatattccctgcatgctgtacctgtcctggccaagtgcggtgtacccgaacctgctgctgttgccggcggctatcctgctgggtattgcggtgacggtaacgacggcgtcattcaagaaatatctttaa

SEQ ID NO: 449842 - DNA, 255 bp, Serratia marcescens
atggattacctgatgatctgcttcatcgtcatcatactttggctgatctttgtcaaactctcgctgattgaggatgcccgctaccccagctgggtctggggagtcattcagtgggtcaccgttctgttaccggtgtgcactttcgtgggaggagtcatagccctgcctttggatatccccacggccatcatactgggggccctgaatggctcagtgacagccatgggcatcgcagcaatacgatctgatcgctga

SEQ ID NO: 449843 - DNA, 330 bp, Serratia marcescens
atgcctatccccgttgtccgcggtctcagcgtcggctgtgtactgggactgactctgctcagcgtctttcctgcccaggcctctgagaaagacgagctggcctctgcccagcggatgcttgtccaggtccaggcggcgctggagcgcgcccgcgtggcggccgttcaggctgacccgtctgaacgtggccgtttcttctttgactatgcccgcgcgaccgctgacctcaagaccatccatgccggcattgaccggtaccaggagccttcccgggcgcagccgcgtgacggcggcgcagtggccggcaactaccgccgggagcgtccctga

SEQ ID NO: 449844 - DNA, 243 bp, Serratia marcescens
atggccatgaatacggcgcaggagcaggccttcagggcagccagcggcggtgttgagttcaacatcctgtcgttgatgtgcatcggcgggttgctggcggtgctgtttctctgggcggcctgggcggcgaccgatatctggaaaggctggagcaacgagaagcttcgccacgcggcgatgacgcagtttgtcgttcgcctggtgttgctgctggttgtctctgtctggatgtttgccagctga

SEQ ID NO: 449845 - DNA, 366 bp, Serratia marcescens
atgaagactgttatgcattttttacgccggctgtccgcgcgtgttgcgctggcgagctcactgatttatgccgctacccagccggtgcaggcagcactgccgaccgtcgaaccgccgtcgtccggcggcggcggtggactgatggagatgcttaaaggctacctgcaggacgggattgtgctggttggcctggtgatggccgccgtgtccttcatcgtggtcgccaactcggcgatcacgacgttccatgaggtgcgggaaggcaaatccacctggggcaagttcggcggcatcgtggtggtcggtatcgtgctgctcgtgaccgttatctggctggtcggcaagtcggccgaagtcctgttctga

SEQ ID NO: 449846 - DNA, 366 bp, Serratia marcescens
atgcagactattcattttatccctgaccgtcttaatgccgagcccgtggtctttcgcgggtttaccactccggagatggggctggcggcgttggccggtatcgggctgggtctgctcgtgtcgctgccgtttcttccccttgccggttgggtggtgctccccaccggcatgttgctgacgccgctcggggtcatctggtttggcggcagccgactgacgcgcttcaagcggggcaagccggagaactatctctggcagcgtctcggcgcctggcaacgccgcagggggtggggacacgccacgctgattatcgataaacagggctggtcgttacggcgcagccgaaccgtcaggggggcttcatga

SEQ ID NO: 449847 - DNA, 672 bp, Serratia marcescens
atgagccgttttcgccatgcggtaaaaaaccgtgaccagcacattttaacgttacgcgctgcctgcggcgtgctggtgctctttttgttggtggcctgccttggctggatgcgggcaccttccacgctcaccattcacaacccgccggatttacgcagtgggtcaacccgtccctggtgggaggtgccgccgtccaccgtctatgcctttaccttctatatcgcccagcagctcaatgcctggcccaaaaacggtgaggtggactacccggcgcgcattgcggggctgtcggcctacctgaccccgtcctgcacgcgctttctggaggcggacgcccaaaagcgcaccgacaacggtgaactgacagggcggacccgcgtggtgtttgaaatcccggaccacggctataacggacgttataactcgcaggccgtggtggtcaaggggcgtgacaactgggtcgtgaacctcgatttggcggcggacgagtactttgccggcgagccggtcaagcgggcgctcatccgttatcccatccgggtggtgcgctgggagggcgaccccgagcgcaatccgtttgggctggcgctggactgctttgaccgcgtaccgcagcgcctggcggctgcaccggaagccgacaagcccgagaaaaaaggggtattccaatga

SEQ ID NO: 449848 - DNA, 939 bp, Serratia marcescens
atgatgaaagcacgcctcctggcgttttcactgcacatgctgccgttggcggcgctgtgtgtattcccgcaggtacaggccgaggaactgatgaagtgggagcgtatcccgctgcccatcccgctggccgttggcaaggagcgggtgctgtttgccgacaaaaatgtgcgtgtcggcttcccgccggcgctgaacggcaagctgcgggtacagagcagcggcggtgcggtgtacctgaaggccgacagcgctttcccgacaacccgtctgcagctgcaggacgtggagaccggggaaatcattctgctggacgtgactgccggcgagaaaggctcctccgagccggtgcgcctggtctacagcggtgacgtgacgtctgtcagcagcagtcacgatccctctgagccctctaacgggaacggtgcggcgcctggggcggataacggtacccaggcgaagcgtaaaaaagtcacctacaacgccccgctgccggtggtgctgacgcgctacgcggcccaaagcctgtacgggccgttacggacagtggaggcggtgccgggtattcacccggtgaacccgcacctgcccaagcgtatcaccacgctgtacccgtccgagccggtgtctatctcgccgctgggcggttggggtgtcggtagccgcaacgtggtggcgctgaaggtacagaacacggccagtcgcaaaatcacgctggatccgcgggtgctgcaggggcagttcgtgacggccactttccagcaccgttacctgggaccggtgggcacgccagaggacaccaccacgctgtacctggtgacggcggggcggccggacggggcctttatcgccgaaccgactttggtgcgaaaagccgtaaaagccgcccgggcctccacggggtcaccgtcaaacaaggaggctgaagatggccagtattaa

SEQ ID NO: 449849 - DNA, 1506 bp, Serratia marcescens
atggccagtattaaatccaatatgttgccgaaggtgattgtcgtgggggccctggtcgccgccgtggccatcggcctgaaaagctgcagcgggagcaaatcaggcgcctctgacgagaccgcgacacaggcgcataacgtgttggccagcatgtcgccggaggaactgcgcgccctgggcgtggaaggggatacgccagaggacacgctgcgcacccttatcggcaccctgcgtaccacccgcacccagcaggccgagctgcaggggcacatcgacaaggtcctgaaagagaacgaggcgctgcgcaagcgcaacgacaacgtctccggccaaatcagcaacgcggtggccggcgtcgaaaaacagagccggcaacagcagcaacggctgcaggacgagcagcagacgctgatgggcaaaatccagtcgctgaccgagcagctgggcaaacaacaaagcccggcgaaaagtgacagcgatatcccgctggggctgggactggatggcatgggcgccggtgaaggcagcgccgcggccggccaggatggcctgatgtgggtgaagccgcgggacatgaaagagccggatccgcgcagcccgaacagcgccaaaaatggtccgcagttcccgacctcgttcctggaggacaatgcgctgacccgccagaaggcggcctacgagatgcaggtcaaggggcacaccaacgagaagggggcagaggtcggggctgaaccggtctacaccctgccggaaaactccaccctggtgggcagtcgggccatgacggccttgctgggccgcgtgccaatcaacggcacggtgactgacccgtacccgttcaagctgatgattggcaaggataacctgacggccaacggcatcgagttgccggacgtggagggcgccattgtctccggcaccgccagcggtgactggacgctgtcgtgcgtgcgtggccaggtcaacagcatcacctttgtgtttgcggacgggacggtacgcaccctgccaaaacctgacaccaacctgaaggcgggcggcaataacactgctggcaacggcaaggatgtcagcactaccgccggcattggctggatctcggatgacaacggtatcccgtgcatcggcggtgagcgtaagtccaacgcgtcgacctacctgccgacgattgcggcgctgtcggctgccagtgccgccggcgacggcatcagccaggggcagtacaccacccagaacaacgtcaacggcatcacctcgaccatgaccggcaatgccggccaggcggtgctgggcaaggccctgtccggcgggatgaaagagaccgccgactgggtgcgcgagcgctacgggatgatgtttgatgcagtgtacgtaccgcccggtcagcgtctgtcggtgcatatcacccgtcaactggccattgactatgaagagaaggggcgcaaggtgcgctacgacgacttcagtttgccgggtgagggaggcagtgcctatggactggactga

SEQ ID NO: 449850 - DNA, 417 bp, Serratia marcescens
atgctgacagatacagaaatgggggggttaaatcgactcctgccctctgaatatcttctgctcgagctggaaaactggattgtgaccgaagcaggaagtcgtttgcgcaagcgcctcaatcagggtgaaaccctgaccgagggtgaacttctggctcttcctcattccgaaagcctcggcgaggtgaaaataacggaggccgacgatatgcaatggctgacggcatttgctatcgcggtggggcgtgatttgcagtcgattttcgaaactgactctcacgcctattacacgcttttcatagacagctcgtttatcaacgagcaggtcagagcgttgcttgataagtacggtctgctcagaacgtttcagacaaatccttcggcaagtattgcgttgagttttcccgcccgcccgtag

SEQ ID NO: 449851 - DNA, 411 bp, Serratia marcescens
atgcaacgattgatatgtgtggtgatggtggcggttagcctgcagctgacggggtgttccacctccaaggaggcactgttgccggccggggacagctcgatgctggagatctggcagggcgaggacggcggcggctcggctcgggggggcatggctgctcgggatagcctgcgccggccgttgaccgagcaggaaagtcaggctggcacggcggttgaccgcagctacagccgcacgcaggagagcgagattgcgcagcagttcccgcgcctgcccaatcccgacctggtgatgtacgtgttcccgcacctggcgggcggcacggcgccggtgccggggtacagcaccgtgtttccattttacagccaggtgcagtatgcgatgcccggtgaacgaacggaggtctactga

SEQ ID NO: 449852 - DNA, 2862 bp, Serratia marcescens
atgcgattttccctgtttgataaaaagcgactgcgtaaggcgccaaagccaccggttgatgcgacctcaggcgttgaagatcttacgctcagtgaagagggcgtcccgctctcggtcgccggccggaaggccctgatgcgcccggggcgcatgacggtgaaggacgagcagcagctgtatcacgccaacccgtccatcattgaccacctgccgtgggcggagttcctggatgacgaacagtgcattctgcttgatgacggtgtgtcggtgggcgcggtctttgaggtgacgccggtggcgaccgaagggcgcacgctggagcggctcgagcagatgcgcgacacggtggaggacgccctgcaggactcctttgacgagcatgatgaaaacccctgggtggtgcagttcttctgccaggacgaggacaacgtcgatgcgtaccttgatcggctgagagggtatatcaagtcgcatgcgcagggttctcaactgtcagagtcctggctaaaggagaccgagcgccatctgcgcggcattgcccgcccggaaggcatcttcaccgactcgctgatcaccggccagccgtggcggggacagcagcgacgtacccgcatggtggtgtatcgctggctgggcaaggggaataccgacccgatgccgccggtggcaatgctgaaccaggcctgcgaacgtgtgaccggggcgctcgccggcgccggcgtgctttgcgtacgtcagggcggggcgcaggtgcatgactggctgctgcgccattttaatcccaatcccgagtgggtggacaagagcacattgtaccgtgacgccgcctattttgaccggcgggatacgccggcgggcgtgatgccggtgcagaacgactttgccgagacgctgtggtttaccccgccgcactccgacccggaacacggcgtgtggtggttcgatgaccaggcgcactgtgcggtgcccatcgagcggctgcgccgggcacccgagccggggacgctcaccggggagatggcgcggggcgagaaaaaggtcaatgcgctgatggacctgtttccggaaggcacgatggtgtgcatgacggtcgtggtgcagccgcaggacacgctggagaacgattttaaccagctggccaaaaacgccgtcggcgagaacaccgagtctgcccgggtgcggcaggatgtggcgcaggtgaaagagtacctgggcaaccggcacaagctgtaccgggccggcctcactttcctgctcagggccggtgacctggcctcgctcaaccataagcgggtggcgctgagcagcgtgctgctgggcgccggcctgcagccggtacggccggcgtttgatgtggcgccgctcaatacctacctgcgtgccctgccgatgtgcttcaacccgcagacggacaaaaagcactggtacacccgcctgacctgggtgcagcacctggcggggctcttgccggtgacggggcgcgagacgggaacgggcaatcccgggctgagttttttcaaccgcggtggcgacatcctgacggttgacccgctcaacaagcatgaccgcagccagaatgcgcatatgctctactttggcccgaccggtgccgggaagtccgcaacgctctgtgccgccctgtcgcaggtgatggccgttcaccggccacggctgtttattgccgaagcgggcaactcgttcggattgctggccgattactttgaaagccaggggctcagcgtcaacaaggtgagcatcaaaccgggcagcggcgtctcgctgccgccgttcacctacgcacacaagctggttgaggagccggctctgtctggcgtggatgaaagcgacctgccggatatcgatgccgaggacgaggacgaggaaaaacgcgattatctgggggaaatggaaatcgcggcgcgcatgatgataaccggcggggacaggaaagaagaggaggcgctcaagcgggccgaccgcgcgatgatccgcgaggcgctgctgatggcggcgcagaccacgtatgcggccgggcgccagatgctgccggccgacctgcaggtggcgctctatacccttgcgtatgacacggacaacgcacagcgcaatgcacagcggcgcgccagggcggccgagatggcggagtcgctggggatgtttacccagcgcggcagttttgaggcggagctgtttaaccgcgaggggagcctgtggccggaggcggatgtgaccctgattgacctggggcacctggcccgcgaaggctacgaggcgcagatggcgctgaccatggtgagcctgaccaacaccatcaatcacatcgccgagcgggaccagtacgcggagcgagacattgtgtttgctgtggatgaggcgcacatcgtgacggtgaacccgctgctggcgccgtacatgaccaaaatcgtgaagatgtggcgcaagctcggcgcctggctgtggctggcgacgcagaacctgaaggacttcccggacattgccgagaagatgctgaacatggcggagtggtgggtctgcctgacgatgccgcaggaggaggtcaacgagattgcgcgcttcagggcgctcaccgaggagcaaaaggccgtcctgttatcagccagtaaactgtccggctgttacaccgagggggtggtgctgtcgaaaaacctcgaagcgctgttccgggcggtaccgccgagcctgtacctggcgctcggaatgaccgagaagccggagaaggccgaacggcgagcgctgatggaggaatacggttgcagcgagcttgaagcggcgcgcaaggtggcgcaaaagcttgaccgcctgcgcggcctggtggcgaacggagaggaagcggcagcatga

SEQ ID NO: 449853 - DNA, 414 bp, Serratia marcescens
atgatgaccctgaaatacccggccccggcggcgcggcaggttgaccgtgaccgggaataccgtgaaccaacgctgtttgccctgccaccgcagggagcggcaaccctcagtgaaccggatgcgcgggcgctggccgcattcagcgcggctatccgcgaacggttgccaaggcccgtgcggttcactgttcacccgcatcgtattggcagtcgtaccagcgtggcactgcatctcgaggggcgactggggcagagcattgatgtgcttatcacggtgactggtatcacgcgatggccacaaccagatgaatacagccacccgcgctggtaccttacggtaccggatgcggccgatgtggtgtatctgttgctccatctgggcgatctgtgcgagcgatttcaggttaacggatag

SEQ ID NO: 449854 - DNA, 774 bp, Serratia marcescens
atgacactgacgttaatactggcgtcatttatggtgcaggggtgtaacaagagtatggattatgaagcgcaagattttttcgtgggtgaacagttagagatcgcacgcctaatttatgaaaataatgaagcaaagctgaagtcagtgcttccctcgatcagcaaagaagcattaaatcgtccagcgaaagccgagatgaccttattgttctgggccgtactcaactcgatttatgatcgaaaatccgaacagcgcttactaataataactgatttagttaaggctggggctgacccactacaaccccgagaagcaggccaaagcagccccgccgaatacgttttgaaagctgactctggcatatggataaaagccctgcttgatggtggtttgtctcccaatgccaaagataaggtctttgatgagcctgtgatttttgaatcgataaaggcaaaaaacactgaaaccttacaaaccatgctcgagtccggcgcgaatataaacataagaaattcattgggtgatacattgctaattgatgctttggactctcggtcattcgatcatgtgatctttttgttggaaaacggtgccaacagcgagctcagaggaaactcaggatggtctatggggaaccaactacaacgctttattaccatgaataccggcgacagtgaagacaagcttaaaattgagaaaatcaaagagatcctggttaaaaaaggtgaatggccgcctacccctgtaacagcaccatcgacgatggggaaataa

SEQ ID NO: 449855 - DNA, 1503 bp, Serratia marcescens
atgttctccagtttgaagctactgtacatcaccggcgatatcattttacctgatgaattcccccggataatcagcccctccagagcatgccatgaactgtcgttcatgccggatagtgacattttgtcacttttctccggttttcacggtggcgaacggatccgtcgtgaggtcggtattacgcaaaatgggataagttccaacttgcgcggaaaggttcagagtgagctgatgagaggcactgtcgttgcggttgaaacccgacctggtgtgttagcgacgatgggccccttctatgccgatacagaaggctacttgagaccgcagggacaacaagtgcctaactatccggtggagaagatagtgaggcggtacgaggatgcagtgaaatcttatggtggccgccgggcacgcccatccatcttccccgcacaagtcacgcgagcaaaacccgctataggcccagataatccagcgcaaagtggaagagtttcacaacaggcagctgcgagccccatgaccaaagcggaacgttggcaagaacgaaaatacctcattggccgtgggcaaaggagtatctatccggacgcccgaatagcctcggaaagattggctgaaaacaatgtggctgtcgagaaggcaaagctggctgagaatatctacaaaaccacggatccgttaaaagagacgcctggcgttcctgaaggatggaaagatatcagcaatgataatgctgcccttcgtaaaattggactaaacagaagcctgctctatgaccgaggagagtcaccagattttttggcaagagtatatcagcctgacaaccgtatctttggtaacgatatgaacccaacggttgtgtttagagggtcaagagcgccagagtttcctgaagggataggtagtgcagcaaaaaaagcacttaagggcgatttgtcaggaattaagaatgtaaaggattggacaaacaatggtgcccaggctgcgggatttgactcagcgtattatgaaagtgcagttaaattaggagataaaatatcaaagttctccaacattgacattgcaggacactctctaggcgggggcatggcttcagcggcatctatggccagtggaaaacccgcatggacattcaacgccgcaggacttaatcccgggactgttgaaaaatatagcgcgacggttatggggacagctaaagacatacaggcctatagagtcgatggcgagttattgacctcattgcaggaagttcataccgagcaagattatgctctcataaaaaacatgcttccggcctcgctgcaaaagccatggggggtatcattgccgtacacattgaaagaatggggctctatcgctacgccacaggcagtgggtgttccccacacactttctggtggcgttgggtcactacttgataagcacggtattgggcaaacgatagaacttattgaaggtgagaaagatgatgatatcgccaccattaagggcagaatatga

SEQ ID NO: 449856 - DNA, 405 bp, Serratia marcescens
atgaacatccccatcctactgacgttatgcccgttactgatgccggcatcggtactggccggcacggtactctataccgatgcccaccatcccccgaccaacatcgatgcgtcggtatccgttatttatcttgacggcccggagcagctgcaggcgcagctgtttggtgaacttccgtcaaatccggatgacgcgcagcgccaggcgcaggccgtcctgcagtcaccgcagtggcaggcgaacgaacagcaactagccacggtttaccgtgcagtggtgcgagcctgggaagtgggcgtcaaaaaagtccccgcggtcgtgtttgacgataaagaagtggtgtatggcacggctgacgtagctcaggccatggcacttcgcgcccaggcatcgggagggcagtga

SEQ ID NO: 449857 - DNA, 1008 bp, Serratia marcescens
atgcagcgacccgttttgtatagcgtgccggcggggcaaccccgccttacccttaaatccctcggcgtggccatgatgctgtctgcggccggcgtgccggtggcgaatgccgcgctcaacagcgcgcagattgtggccagtgccgtctcgcagacctgtatcagctggcgcgtcagcggtatttgctactggttgttctgcagttggggcggctgtactgtccgaacttcggtcaaagttagccatttcatcccggaggcggttgtatcagcgtataacgctccaggaggcaacccgtggcgtgagatgtcgatggtcagtcaggctgccggcggactcgaaagcagtatcaccagcgcactgggcggtgttgctgccggcggtggcaacaatgagctgaaaacccccgggcagcgtaaaaccaacctccacttcaagtatgccgatgccattggtcatccggcgacgaccctgattggcggcagcattgccggctattcgtgccgcagtgccgccatgccgtttgtgccgtatttcctcagcacgctggacagcctggcatggcggaccggcatgcctgaatccctctatcccgaagcactggtgtcaggtcagcgtgaagtgggcagtcaggcggccatgaatatgtggggcaacgtctatccccgttcgggctttgtgacgcaggtcgatgacgacaaggccggcgccctggtggcgcaacgggtggcagacatcatcacccgctcgggtcagccgcacgtgtaccagccgctgatgggccagcgttcggaagggtactggccaccgggcgccgttcaggagaacaccggtacccgtaaccataaatggcagcgactggcgccgcagctgagtacgtcctgcgccgtgttcccggacggtgaccacgcccctgcagccgacggcaacgcggcctttgctctgtggcaaccctatagctgctgccagcgtcgcgggcagcgtttcctctccagtacggacttctga

SEQ ID NO: 449858 - DNA, 1530 bp, Serratia marcescens
atgatgaacaacgcaacatctgtattacgtatcagccggcaataccgcctgctgtctctggccgtcctggtcggtacactcattgccgggctctcccacagtcgaccggccactgctgatgaagacaacggcaaactcttcggtgtggctttgccgcagatgagtgacagcaacgtgggctacggcaagagcgccagcggcgccgtctcggacaagctgttttactccctgggcggcggctcggtcatctcacagccggcgacgcgcggcaatatgcagcgcctggggatgaagcttggctggagctcggatttgatgtgcggcaatttcgatttgaagagcaccattggcaaccagcttaacggcgtgacctccgggttcaagaacctgatgggggaggtggtgcagggggccagcggcgcggtggctagcctgccggcgatggctatccagcgcgccaacccggggctgtatgagatgctgaccaacggcgttctgcaggccaatgtggcgttcgacaaggcccagctcaactgccagaacctctccaaacgcatgatggactttgccgatgccggcgaatggagtcaggcggcagcgatggaggaggtgcgtgacctggtcaacaccggagataccgacgcggtgcgctcgatgaatgccgccgggaaagtgtcgggcgcctcgggcagcacctggattggcggtcagaagcggggtggcgccggccagccggccatcaaaccgacgcatgacctggtcgcggccggttacaacatgatgaatggccagccggtgaccagcacgtccagcgttaccggcagtagctgtaacgggggcgcctgcgcccggtatgccagcagtgaagaggcggccgctgccgtggtgaaggtgctgggcgacacctcactgcgcacctgcagggaggcggcacagtgtgccggtgatagtggtggtagcggcaatggcagtgatggcggtgatgccggcgcggaccagccgggcagcagcgtggccggcaccggctttgcgccgctgctggaagacgccacccgggcgaaccgtgagcagctgaccaaactggtcaatggcaatgagccccccacggccgccaatctggccaaactcaagaccggcagcctgggcgtgacggcgggtgtcatcagggccctgcggcgtgacccggacaatggcgccctgattggtcggctggcgagtgaactggcgatgtcggacaccatcgagacggctttcatcatgcgccggatggtcaccaccggaatgtcagagccttatgcggcggcgcagaagatggcggtggccgaaggcgaccggcgcatcgaggcactggaccgggaaatcctggctctgaagaacgagatggacatgaagcgggacatctcccgcaacacgatgctgaccatcatcgacagggagaacacccgcgccgacaccaacccgcagcgccagtcccaggatgcaccggacagccggttcaatcagctggatacgccggcgagtgagcaataa

SEQ ID NO: 449859 - DNA, 399 bp, Serratia marcescens
atgacgacaacaaagagaacagtaaatgtggcggggacaaaggaatcattgtcctcattgccaggtaaaggccggcttgccggccgtgccaaacgtgttctgaagctgctggcactgctcgccggcatgacgctccttgcgctggtactggctcactggggcgttaaccacccgggtgaaagtacggcgctgcgcgactggatgcagcgcacccgctacggctggctgggctggcggctggtgctgtatgccggcctggtctggggattctgggcaatctggcatgcgccgggcttcaggccggaataccggcaacccctcaaacgcatggtcattgccagcgtggtctttgcgctgctgtgtgagtactcggtatttggcggagggctgtcactatga

SEQ ID NO: 449860 - DNA, 1539 bp, Serratia marcescens
atgatgaccaacagctatctcgagtattttttgaccctgctgggctgggtcatcaacaacggcctgtgggacctgctggtcagcaccgggctgtttgtgctgccgctgctgttcagggtgatggccatctggctgaaggtgcgtgaagaaggggaggatgagggtaacaaggggatgctgtccctgccgcgcatcgagaacctgctgtatggtgcgttctttgtgatgctggcctgctgcctgccgctgatgaacgtcagcctcgacaccatcaagtatgacagcagccgggcggcaacgtgcggtacctggacgccgaagaagccggaggataccgggtacgccaatattatgtcgagcatgaacggccagacggcgaaggtgccggtgtggtggttactggtacacaagctttccaagggcattacccaggcggcggtagcgtccatcccgtgccggccggatttacgtcaggtgcgctttgaggtgcagcacagtcgggtcaacaacccggcgctggcctctgaactgcaggactttaccaacgactgctacgcgctggcgctgtacacctggaagaaccgcgaccagggacacaccacggacaagaccacgctgcgggacatcgagtggctggggtcaaagaccttcctgaacaaaggatactacagcaacctgcagtcgaagacgccgcgcgccagcttcccgtggaatgaggcacgggacagcgggatggcgaacgtcggccgcggcggctatccgacctgcagcgagtggtggtcgacggcggaggtggggctggaagcccgggtgctgaagcaggtggactcgggcacgctgctgcggatgtcggcggcgctgaaaatgataggggaagcggatgcagactataaggaagcgacggtccgtcgcctggtgagcccggagaacttgacggtgtcgcagggcggacgggcatatgccggctacgggggcaatgcggactttaccggtgataacgcatttacccgcatggcgtctctgggcgggacggccctgggaagtctggcggcctacccggcctttgatgcgatgcgccaggccttgccgatggtacaggccgtactgctgatggcggtttacatcatggtgccgcttatcctggcgttcgccgcctacgagtacaaggcggtgattacggtgacgttcgtggtatttgcgctgaacttcctgacgttctggtgggaactggcgcgctggctggacagctggctgttgacggcactgtacagctcggatgcgcacagccgctggaatgtagcggggttccagaatagcaccgatgacctcatcatgaacctggtgatgggctgcatgtttatcgtgctgccggccgtgtggctaggggcgttgtcctgggctggcgtgagtgtgggacattctatcggagcagcagttaaaagcggtactgacactgctcataatactgggggtaaattgggaggcgcagttgaaggggccattgggcaaaaagctgggaagaatttgactggagggtaa

SEQ ID NO: 449861 - DNA, 594 bp, Serratia marcescens
atgaaaaccgatacacaaggaaacgaaccagaaatcaccttgtcagcgttgagcaacctggcattttgcgcgcttgttgcgttgggtatcgctcgtcaggatggcatcgccggcacaccgttgtcggagcatctcttcctggtccgctggctggccaccgcccaaaagcaaaagcgatttccgaagtgtgttgccattgatatcactttcctgcttgagcaggggcgaaaaaaggggccttccagtaaactacatgaaaagctgcaatacctgtggcaatcctgcacagctcccctgaccatgcagtcagatttatttcgactgacctatgttaccgagaaactacgagagcagggctggaaaaacttcaccctggacagcaagtcctggaaggatgagcgttttccggcatcctgcccacccaatggattttacactgaagaaagcgcgctacatgccgtctattcggatgatggccgcttaatcagcccgctgtatctgcggattgtgggggatgtcgacttactcctggcgctcatggaccaatgcgcgatctctgcagaactgattgagcgaggtgacctctttcactag

SEQ ID NO: 449862 - DNA, 1089 bp, Serratia marcescens
atgaatagcagtgcaaattctcgaagaaaaaccggctcaaccattaaatatagaacacaattagatacagcttcaaaagcagtaacattaatgacgttcactgcaaccatctatggttcaatgattttgtttttcttctcgataaaacacaacatcaacttcatcgaccttatatccccaggcatactcatcagtgttggcagcctagctcttttcatactgacattcatttccatactcacgatcgccattccatatataaacaaagagtcgattcaaaattcatatctttgcctcatctacataagcccctgcaaaaaagtacacaaacacaaaaaagcaatcatggcaatctttaatttattaatatgcctgtggccatttattcttatcaaagctagctccgtaaatatagtattcatctacttaatagtaatagcaagcatagcacttaccctatcaatagcaacctcgcataaatgctccatcagcggagcaataagtaactcaactataaaaatcagaacagcaagtattagaacagcaacactctttgcaagagcgctattattcgtagccattccattcatagaactcactataatattgccactaattctttttctgtcggttttattcaagcctgagtttatttctatcggcgatggtacatttgcaatcacagtcgctgcaactcacttccttctaaaactaccatctttatcaacatccaaacgaagcaggaggctaattgcccaactcattgccgttgtcattattgccgagacggttatgttgttatcattcactttctcacaaaatctagctcagacagtatcaaaccgaattggcataacattagacaacacctgttttttacgcaacgaagctctcaaaaatgggatacctcgaatttatataaatgaaaatgaatccaatgacgagcttgtcaaattgaaccttgttattaaagttaatgatatttactacttatcgatagaacctggcaatgagattgaaagaaaagcaaacatcaggataaaaggtttgaacttaacagaactagactgtccgagaaggaaagagtag

SEQ ID NO: 449863 - DNA, 909 bp, Serratia marcescens
atgtccagaaacgaaaagctacttaaaaaggatttggttaccttgtccagacaggggggcggtggctttaaaaccgtcgctgaccgaggcaaaattgttgcgcgactggccaagcgtcttgccactttaaatattcaaatccgaacagcacagcagctgaaagtcaggcatgtcgagctgtatatgcaaagtcgcaaggaagaaaagttgtccgaccgtacattacaaaacgaaatgtccgccattcgtaatatttgtggccagatcggtaaaacggaaatggcagacccgaatcatccgcgtctcagcaataaggctttgggtattgccggggccagtcgggcaggcaccaaagtggcattgtcaaatgaacgctatcgagaggcgctggcttgtgtaagaaataaagatgaaggtgtggctgtagtaatggagttgtcccggtatttaggattgcgtaatgaagaggctgttcaggcggctaaatcaatcaaaacctggaaacaggcgatattgcgtggagaggataaggttcgcgtggtttttggtacaaaaggcggacgccctcgagacacccgagttgttgacagggaaaaagtgatttcggcgattaataatgctatttctcatgcggaaaagcataatggaaagttaattgataaaccttcgttaaagcaggctatgacgcgttatattaatgttatgagacgtgatggcggattggtgagtaaggaatctaaccattcattacgttatgcgtatgcgcaggatgcagaggcttattataaatcgcaggggttcagtgacaaggaagcttatgcattaacgtctatggacttggggcatggtgatggacgaggggattatataaaacgggtttacagccaaaaaatgagtgaggatgaatga

SEQ ID NO: 449864 - DNA, 342 bp, Serratia marcescens
atgctggatgttatttcgatgaatatcacgtcagtacgggttattacaaaagagcagccttacttttctcgctgccttggcaagtatatggaaaatggttgcctgacttatttcgagtgtgtgagtccggtcgatgagtcagatacctatgagtcaatagcagaatattttgatgtggctggtgattttgactgtgaagtcagcatcaaagagagagtgtgctatttgacggggagctgtgttttgatttttggggagccgatattggggcttcaccaggtgccaattgaaccggagtatttagtggatgagctgaagtgtggagagtatccgtacctttag

SEQ ID NO: 449865 - DNA, 420 bp, Serratia marcescens
atgaccagaatgaaccttctctgtgctgttgtttcatttttgaagcatcagattgaacaacgctttcctcacacgagtgtcggagcaaccctggccagattggaagaggatgccttgtttttgcaacgcattcttgccgaacttgaattggcagcccggtatatcccgagtatgtgcaattctgaggataaactggctattgatcaaaccgtgttctataccgcacaggcgctgggtcatcgtcaattttatggccttgggaaccagcggctcctgcgaatggggttgcggcaagcgattaagctgggcaaccaacttgatccggaactgtggcagtgtggttggcaatgtggttatgacgatgcttacggcaacggcatagaatccagggtagaactggagcaagactgcatttattga

SEQ ID NO: 449866 - DNA, 558 bp, Serratia marcescens
atgaacgtgtattttgtcgcaccaccgtcccaggacgcgtggattgatttcaccctggtggtaaccgaagtgtactggctgctacccgacgaggcccggccagaaggtatcagggaagccggccagctgtttgatggcatggccttcgaaacggccggtttacgggtctctccgggagcagaggaaaatattccgatgcaaccgatgccttatgtcgaagcgcgggtggggttctttcagcgccccgacttctttcaccgattggttctgatcctgatgcataacctgtgtccaggctctgtccgcattgagcgggatacgcacactgccgaatgtggctgggaacaaccgcttatctggttgcgccatcatcttcagtgccctgaacttcaggcgccagaagccgtgaatgaacgggtgcttacggatgattccgtctgcagacacttggtgcagttcagggacagcattaacaccgacgcgctcgcctaccactggcgagtgatcgccttgatggataacgtctggcttactccgaaagagggaaaaatgtcatga

SEQ ID NO: 449867 - DNA, 375 bp, Serratia marcescens
atgagtatgaacatcgcctttttaaccacctcacctcagacgctgactcaggatttgtgcgatctggccaacctggaagggcatttgttggctgtacgcgcgctgatgcgtctcgatgtcggcaatgaaaagggtgagggcgaagcccactcccctaaccaatgtgcggtggcacatgtcgcctgccattttggttttgcctggactgggggacgtttcaaccgttcggcctgtgaaccgcttgtcaacgcactgcaccagctcgggaccgcaatcgatccgacagtatggcagagcagctttgatgacgggtgtaatgacgcagagattgaacgggagcaggcgcgaatgaacctgctcaaccccctcatctag

SEQ ID NO: 449868 - DNA, 894 bp, Serratia marcescens
atgaaaagaaataaattaattgttttttcactctttcttatattaggggtgtcgaaaagtgccgatgcattttattgtacctctcttggccaaactataaggggggggacaactaatgtctatgtcaacctagatcctagtgtagaggtagggcagaatatagttgttcgacttggggaaagtatacaatgtaaaaatgaggcacctcagcaatatttagaccctatcaggatcattcgggggcaatatactggccctttggatagtcttgctggcagtataaaatactacgattcgccttatgattttcctataagtacccctacaaaaacggttaatcatacttggggttcgcctaggccttggaatactattttgtatctaaaggtaataggtagcggagcatcaggaatagcagtcaattcaggtcaaatgttagcaacattaactatggaaaaagttaactctagtccatatcaaactttgacttggaatatttatgcgaataatagtgttgtgataccaactggtggatgtgacgtatcatcgcgcaatgtgacggttaccttgccggattatcccggcacgacttcggtaccgcttacagtgcattgcgctcaaaatcaaaagttggcttattatctgaccggcactacggctgatacggcaagcaccatatttaccaatacgtcatcatccaatcctgcaaccggtgtgggcgtacagctgtctaaccgtaatggcattgtagctaccaataagaatgtctctctcggtacggtcggtaccagtcctgtcagtctgggcctgacagcttcctatgcacgaaccacggggcaggttgtggcaggcaatgtacagtctatcatcggagtgacgttcgtttacgagtag

SEQ ID NO: 449869 - DNA, 201 bp, Serratia marcescens
  misc_feature (63)..(72): n is a, c, g, or t
atgcgcaaagcaatattgaaaaattatctgcgcagtggttggcttttgatcaaggtgaatacnnnnnnnnnnggtgaatacaaagataagattaaatcagaaaatataaataaaataattagcaagcaaagtgactgtcttgatgaaatttgtctggttattgaggattttgaaatacagataaataaagatagcgattaa

SEQ ID NO: 449870 - DNA, 207 bp, Serratia marcescens
atggccaccggtatcccggtggctttttttcccgtgagggagttcaccatgctgacgtttgccgaagcacaataccaattcatcggcctctttggccaaacggcacgctaccatcacgggtacaaagtatttctgattttctcagtgcggtgcgatagcgatacacaatcattattatatgacttcagaagaaccattctaatataa

SEQ ID NO: 449871 - DNA, 282 bp, Serratia marcescens
atgcacgttgccagggttaactgggtgtgtgtcgccgattaccgccgggtgaccgcgcgcatgctgcagctggccgaagtccactactcggtttgcgtcagccaggatgagtttaaacactggcgtgagcgggccatcaacctgctggccacggcctgtcataccgattgcaagcgggcaaagcctgccgacagagacgactacctgagcctgttcgaacggctgaaacggcgtgttgacacagtcaacccgaaaggggcgctgcgttaccccgctctctaa

SEQ ID NO: 449872 - DNA, 255 bp, Serratia marcescens
atggcaaagctaaacaaaaaagagcgcgcttggctcgacgagctgcaagaggttctgaatcgttgcccgtccgagcgcctgggcttcttcaccatcggcgacccgcgcatatacgtctatgaccgaagcaaggatcaggagattgacgcccaccaggatcgcaatgggcgtgagttctgtcacagcgttgatgcgctgaatgctggtttctgcgacctggatttcccggccgccattcactctacagcaggctaa

SEQ ID NO: 449873 - DNA, 489 bp, Serratia marcescens
atgatggacaataagctgagcgaactgagcaagccggtggcgactgttgacgttcaacgcggccgcccagatggaaatatgtttggcgttgcatggagttcggcaggccatgcgattccggatggcccgcacttcctctactcgcaagagtacgtctccgccctgctggcagagctggaagcgaaggataagcgcatcgccgagctggaacgcgcaaatcaatcgcaggacgatcacatcaatcagcagcaggacagaatcgattctctggagaagaaaaacggagatgtagggcgatcattgggagcggcagaaaagcggctggctacgccggtgcggttgccacgtcgcgctcctgaaaatttggcatctgtgcttgatggttatgagaaatggctgatagcgacaacattccgtgacacgtggaatgcatgcctcgatgaagtttcccgcatctcatctggtttcaccgtagagggggatgagtag

SEQ ID NO: 449874 - DNA, 1164 bp, Serratia marcescens
atggcattgatcatcaaaattttaaggtgtatctttaggtcaccaaaaaacactgaagataaaatgatgcgacatcttgttagaaaacctgggaagttcgaagcactggaggcatttacagcattcagtcgcgagcatgacttcaagctgaaatcatcagaagatgcagataaatttattgaaatttttggcgaatcgcttaaggcctcacagaaaaatgaaacacttcttcatggtaaacgcatggaagcatgttttagtcgagtcgttgcagggttgcatggctgtagtattattaaggctgaagacgctggtgacgtaatttccgaaaactccgacattttattgcctgattacaggcttgtcttaaaggatggaaggcaaatatttgtcgaggtaaaaaatagcagcgctccaaaacccacatcaaaatacttactccaaaagaagtatgttgcaaaactgctgcgctatagtaatctaaataatgtccctttatattttgctatttattatcgctgcctcagagtatggacgttgatgccagtaagttcatttactgaactgaaggggaaatatgaaacaacaccaatacactctatggcaaagagtgaaatggccatgcttggtgatgttactataggagctaagcctcctcttatattcgagctgatttgcgatagggatagagaggcatttattgatgaggggaaccttgctaaattcgtatgcggtgatgttaaaattcactgcaatgagagagaagttgaagatgtcgaggagaaaaaaattgcgttttatctaataagatttggtcagtgggaatgtggtaaaccagaggcaatattggataacggtaatctttatagtgtacgcttcacgttttatcctgcatcacccgaggatgctgagcgtaatgggtttgctatgcttggtagcctcagttcaatgataactgaagcgtataatgaacatacagtctatgagcaagaagtaacagctataagctcgaaggctgaaccagatgtattcacagttgatattcccgaagattacaagggtgatgttcttggtttatggcgtttcgttatgcaaccaaaccatgattttaaaatagcgtcggagggaggggtaaagtatgaagataaggtaggtaaggcatga

SEQ ID NO: 449875 - DNA, 948 bp, Serratia marcescens
atgacctttacagattggttaatcctaaatcaatacaatggtgatataatcaaggccatagaatcattgcgtccaaccactgattacgttaaagattacgttttccctattgccatggcgtttacttcagctcttttcggtggcttatctgcagtctatatcaatagaaggcaagaactacaaaaaattgccagagacaatctcgtgacggttatacaagctataactcttgctaatgattgtttgaataatttggtggccataaaggcaaattacatggatatagaaagcgatgagccactaattagaactcgcgctgttacaacaataattactaagtttgaccaagtcaaattcaacatcaatagcctttactttattagacaaataccaacatccaataaaaatataattgagtctattgtatggacattcaaacatcgcattttacgtaagaaaataatgatgccgcaatcagatgagttacgtagtacatggcgaaacagtgtgagagttggctcaatgttcagaaactacaatgaagcaatgggtttgcttagctataggaacgagttaagtgaacaggtcaaagataaggtttcgaagtatgacgatgagctcactattgaaaaatttcaaatcattcttggcgagaggttatgctgcggactcattgacatcaatgagacatctatagcgttgatagatcatgtaatgattgaactttatcaatttttactagagtttccagctgtagcggaaagtaatattgagttaagtagagttagagcgtggggaggtgtgcctacttacgaaaacaagcaagaagcatttttgaagtgtatggaaccaattaaacaaccagattttaaaaagttcaatgcttatacagggatgtcagagcaacaagcgcgggaaaagtacacgttcaagtcttggtttgactaa

SEQ ID NO: 449876 - DNA, 639 bp, Serratia marcescens
atgagtgaagaaaaagaagaggaaaaaaaagaagaaaaaaaatcaaccagtgcgctagcccgatattgggtgatctatggtggcactggggctgtgcttaaaagtcgctatttttggtgtgctttattgatgactgcaattctttatccatcttggtctcaccaggggtggtggaatgatattctgtcattaatgccaaaccttttaggtttttcattaggaggttttgctatgtggatagctattggcgatgaggcatttaaaaaaataataactggcgatgaaaaaaatgaaaatggagaaatggaatactctccatatatgtcagtaaatgcaacatttgttcattttatattgttgcagttactaaccattatcacggctttggttactaaagcttatagtggtattcttattgataatgcatttatgtattattatttaggggttgcttataaatatgcactattaacatttagtttttttgcttattttatatttatttactctgttttctctgcgttagccgctgttctagccatatttcgcgtatcaagttggtataatacgtttatgacttttcagaataaaaatgttggttgtaacactaaagatagcaataaaaataaaagctcttaa

SEQ ID NO: 449877 - DNA, 894 bp, Serratia marcescens
atggcaagggcaaaaaaattaacttatggggctgtgaatataactatgcatccccactcgccagaaaagtatattgagttatttcggatggcaagaaaaaatgcgagcaatgttaatttaaggggggactcattcgcgaccttatcgtatttttacccttataagaaaggacaggcgcatagtgaaccttttgagggggaagttttaaagtacacagatattgatgttgatggtgattggttcgatattgtaaaaaaagatatcgcatctgatgaggaaaagggaaggattaatatacctgataatttaaagccaaatgtggctaggttctcttttgtttttcttccagtgagccatcttttagtttatgaaatgcaagacaagaacaggcatcttacatcaaggcaaatggagtcatttctcaatggaatattttctcatgagaaaattatagagaaatttggaaaggttaatgttacggcgttaactgaacctgatagcgttgagcgtatgctttctttgaaaggaattacgtgtataaatatggtaactcgacgtcctaatccggatgatctcgcttccgcagagagtatcatgcaaaagagattcaagcgaattggggttatcgaagaggacaaaacatacaaatcagaaagagggcaggaaataaaacctgacggagagttaaagcaagatgctcttatcgcttcgcgaaatggtgaggttagtgtgcgtaggattaatgaggttggattagtagaggtccatgcctcaagtgacgtgccgctgcaaagggttgaatcatatgattcagatgtaacttcagtttctgagttattactattaagagcaaagtcattggcgggtgaatttaagaggcttctgagaaggtga

SEQ ID NO: 449878 - DNA, 792 bp, Serratia marcescens
atggacttttcgccatttctggagaaatgtagagaactcttaaatgagtggaaatcttcattattaattggcttagcaagtgcgatatttataattattttacctagatcacctcaaagtgaatgggtcacactcgcattcataattgcttacgcgatggcttctctatccattgcaagctttatcgtgaaaataataaatatcatacacatcaaacgcactcaaaataaagaagatagtgcgaaaaaagagaagttggcactttttaaatccaaacagatagatactgcgaaactgatattaaatgaaatgagctcttctcagaaaaggattctaaggaaacttctttctggcccgtcaatgtttgatagctatagccatacacgaactagcatgagggaggatttgcgcttcttgctagcacgcagtttcataatcctgatagacgaactcagctccagcaaagcaatatttcaattaaatgagttatttactgatattgttctttccgatcgacaaaaggaaatagctttttatacagatgagttacttttaaagtataaagatgaaataccaacaatactaaacaatttcatctctaccaacccgaaaatcaagttacctaaaagtataatagcagacagatttaattacgaacccgctttaaatttttattgggataagtttgagctaacgataaggttcaccccacactacaaagaaatgttcgaaagtcgtttgaatatcgagctaagtgaatttgcaatctatgaactaatagaggcagagtaa

SEQ ID NO: 449879 - DNA, 624 bp, Serratia marcescens
atgcgaactataggatcacttaatgaaatcgtcaacaataaagttcacatggtgaaatctatggatttggtaaaaggtgggcgcggcgcgattgaaaggatggttgaggcctacggctttagcactcgccaagctctttgcgaacaattaggcgtatcaaaaagcactttagctactcgctatatgcgcgactcttttccatcagattgggttatccaatgcacccttgaaactggtgtgtcacttcgctggctgacaactggtcaaggggttatgtacgaagactcaaaattgctagatatcgtacaagtgccacgtaaaaagttagttgaaggaaaactccttgactcaaatttatacatgttcgataaggcatttttgcctgatggccttatagaccctgtagtaattgttgatggagatagtacctatatagccgactgtcgattcgatgaaatagttgatggaacctgggctgttgatattgaggggaagatttccatccgagatatcattcgtattccaggcggaaaagtacgaatagaaggtggtaaattcgcttttgactgccaattagaggatataaaattcacacaaagaattagactatcatgtactaaataa

SEQ ID NO: 449880 - DNA, 1341 bp, Serratia marcescens
atgctgaaacttaataatgatataactttcgacattcgtgatgaatttcaaagaaagaagattgcagagaaaatagcgacactcatcacatcagatattgacacatcgccaatgattataaatggaggctggggaacaggtaaaacagagttttgctataaattaataaatttattaaaagaaactcacccacaatataaaactgtttacatagatgctttcaatgaagatcacacagactccccaattttaactgttctcgctgcaataataactcttttacccgaaaaagaaggcgcaactttaattcaaaaagcattgcctgctttacggtttggattaaaaacaacattaaaagcaagtgctggatggattcttagacaaaatgcgaatgatgtaaccgaagagtttcaggaagcaatcaaagaaacaagtgatgctgtaatagacagcacagtagagtctctcttaaaagaccatatcgaatcagataaaaatatacgaacactaaaaaccgcgttacaggagatatcacaggaaaatccgatagtcatttttattgatgagttagacagatgcaaaccaagtttttccatttctattttggaaaatataaaacacgtttttgatgttgaaaatgttcattttgtattaattactaatacacagcaactagaagcctctattaatcacctatacggtcaatcagtggatgccaaacgttatttagacaaattcatccgtttcacattcacattacccaactacttaaaaccagataactacaccaatacgtatacatcaaccatgcactgggacaatataataattgactcgccgtcacttggggttgttaacggagaagcaggtgacttcataaagtcaataatagaaaaaggaatgttatcattaagagaggtcgaaactttcgcgcgatatattgacatataccaaagtatttcaccaaaaaaaatatcagatagaacttactttggatatactatgttttggataataggaatatatttttattgtttcaacaaagagctagccattgatttatccatgggtaatattgatatagataaaatagcagaagctcttaacactaaagattttaattataacccagagaaataccctgggtatttaacaatagcattttatgcattgcttaatgagagcaataaaccaagccaatatttcacgaaaccaaatgacgaacaaaagaagatttgggatgagctagttggcggcctttttagaactgcatttcacgctcctgatagcttatgtcaagttgtcgctgattcgattgaagcacttcaactaaaaaaatag

SEQ ID NO: 449881 - DNA, 1005 bp, Serratia marcescens
atgtctgctacatctaagaataaaacgggccattcttacccagcagttcctattgttcaaaatgaacaacgtttttacttcagcacgattccagtatcagctttgtttgaatcgtgcttcgtggttagtagagatgaaaacccatctgagggctttcaaagaaagctaaataaaacacgggctgaagacatagcaaaatatttatcaagtggaaaaggatctataccaacgaatattgtactatcagcacaggaagactcaggaatagcttacaacagtcgttcaaaactcattgcttaccccggtaaaaaaggatcatttttggtgcttgatggacaacatagattatggggctaccaactctgttatgaacaatatagcatagatcatcgagttccagtcgctatttacactggccttaatcgtgtggaagaagcaaagctatttattgacatcaacacaactcaagttggggttccatccgccttacttttggacattaagcaggttgctcagttagaaaattctaaagagcaaattcttagagctttatttgacaacctgaatgatgataagaattcgccgttaagaaaactattaagcccaaacagatcccttacaggaaaaatatcaagagtaaccttcaacaaagcattactcccagtaattcgctcaggcatatgggctgatgcatctgaaaaatcccgccttcaacttttaataaattatatatcagctgtaatacaagttatcgatgattcttcgatactagttagatctgcatttttcgagagcatatttgaagtgtttgatgatgttgttcaaacatcaattgcaaagcatggtaatgctaaaaaagattcgcttgttgatattttatctcctatatcagcaattgattttcaagaattactttcaaggggaagaacctctaaaacaacatatcttgaaccaattaaatcagctcttaaaaagagcgtttccatctctgactcaatggtttga

SEQ ID NO: 449882 - DNA, 1020 bp, Serratia marcescens
atggatatacaacatgggataatatatgactctgtcatcactgactctcttgatgcaattccagagggtgttgaagcagacctaaataaaattatgagcttctatgaatggcgagagaaaggaggatatttagtttctggttctaataaaaaagaattttatttaagttgcgcagctagagaattaggtggtgtactacttaaggaagcaacaagtcttaacaatcaagctctagaacacaaaaccattattggttctgctatagcatcaggaaaaacactgagtagctcttggttgcttgtcactacatattactggtgtgtttacttagtactatcatggttgaggatgactggtcaggttgttacctatctgccaagtgaagagattactcggtttaataaacttaatccttcgaataacaaattcccacagaatggtacatttattactaaatttgatgatacatctggttcaagagctcattttaaattacagagattaaaatcaaataatttccacgaaggattatgggttgcatttaacaatgatatagttgatcgattagagctttttaaagacaaaccagcagatattgacctgagagctctttcatgcctaaatttgagtaagtttgctgatgggcattcatggccgtctaagataagaaatattgtaaattataaggttggcttcggctatgatgaaatcaatggattaagcaagccaaatatgctaagaattggaagtcagttgaaatcactgaatcttgtagatataattggtttgcatgaggaaaatcaattacgagttagctctttaaaggttgaaaaatcaattgataaatacagtgagttgcttttgacatttggaacgatactctcctccttacaaagcacttatttaaaagaaatctgctctcgaagaaatgttcacacatcaattaatgaacgctatttaatatatcttgggcaccattcatttgagcctgatggtgattggattaaaataatgaaatag

SEQ ID NO: 449883 - DNA, 2340 bp, Serratia marcescens
atgagcaataaactaaatggattctatgcttacccttcaataccaagtgaagtaggattatgtattgactcggcgtctgcgaaagtaaatagttctaatggtagagttacaataaaaacatggaagcagctagatataatagggcactttatatctggagaggtattatccggaattaatgaagcggactttttaatagcggatataactgaactgaattttaacgtcacatatgagataggatatgcaataggacggctaaaaagggtttatttgacaagaaattcaagtgtcaaccaaaaaggaataaagatatctgatgtgggtatttttgatacattaggttataaaacgtatcaaaactcccaagagttgcagaaaataattagtgattttgttgactttaatgctattgatgttaatggtgacttaaatataaagtcgccagtttatataataaatacaccatttaaaacagactggtctggtaggattatatccagaataaagaaatctggttatatttatagagagtttaatccaagtgaacaacctcgcttgtcagcttttgaagcaataaagcaagtgtcatcatcatatggaattgtggtccccttgctttctgattcatctgagggatttgagattcacaatattagggctgcctttattgcaggcttagcgcatggaatgaataaagctgtatgccttattcaaaatggagatggacccgtccctcttgactatagagatctagtaaatgtcacctatcaccctggagacgtaaatgaggtgattggaggttttgctattgaggtggctaaagcgttccaagaaggtgataatgataaatcgcatagagagaaatcatttctgaagagattagatttgggtgctacatctgctgagaatgagatgcggtatctcgaatcgtattatttagaaacagatcaatacctaaaagcacttaggggagaggcacatcttattgttggtaggaaaggttcaggaaagtccgctatatttctccagataagagatcatgaacgcgaaagaaatagaagtaaaaatatagtgttagatttaaaaccagatggttataaattgataaaatttaaggagagaatgctagagcatttagaggagggaacgtatctacataccattacagctttttgggaatatgttcttttgcttgagatttgttataaaataatagaaaaagatagaaagagacatgttactgatcataccctttatgacgggtatcgagagctggtagagttatataatgtcgatgagtatgattctgaaggtgatttttctgaaagaatgtcggtattaatggagaagatttactctcaatatgatgctgtttatggagataaaaaacatgtgagtttaaatgctgcaaagataacagaactcatccataagcatgatgtgaaaaaacttagagagaaattaattggatacatggggaataaactatctctatggcttttatttgataatatagataatggttggccgacgtcaggacttgaacatggcgatttaatgataataagagccttaattgatgcgacgcggaaaatagaaagggaatttaaccgtaatgagctggatgtgaatactgtagttttcctcaggaatgatgtttacgaactcttggtcagagagacttcagatagagggaaagaagccagtgttttattagattggactgattctgatttattgcgagagttagttaggttaagaataatttcaaataatctcccagaggaaatggatttcattactgcttggcgtaaagtttttattagtcattataagggagaggaaacatcgcaatatttaattgatcgctcattaatgagaccaagatttttattaaatctaattaaccactgcaaaagcttctcgatcaatctaaatcatgaaattatcgaagagacagatattgaaaaaggtatttcagcttattcttcagatcttttacaggatattggctatgaacttcgtgatgtatcaaaagactcagaagatattttgtattcatttataggatgtaatgctactctttcttatatggacgtcattggaataataagcactcagcaatctgatattgatgtttcagagaaaataatgggcctcttactttggtatgggttcttaggaattaaaacaagctccggagatgtcaagtttatttataactttaattataataaaaatctcttggatggggtgataaaaaaagaaaatggtaatttgagctatgtcattcatgaagctttttggcctgtactaatgatcactggagatttataa

SEQ ID NO: 449884 - DNA, 831 bp, Serratia marcescens
atgagaggcatgttttatgaattctgtaaagaaaatgactctaggctttttaataaacttcttcttgctgaagcgtttaaaaactatttaaaagaaagtcattaccctgacttaatttcatttgaaaaagacattgcgaacttatcctctttgattattatatttttggaaagtagtggctccattgcagaattaggcttgttttgtaatttggatgatataaataaaaaacttttagttattgtccctgaacatgaagtaaaggatgataaaaaagagtcgtttatttatctcggcccactatcctatcttcgtgaaaaggttaatgagaaatcatatattgtttaccctggtcctattgatggaagggattacaatgagcacctagagttaattctcgatgatgtaaactcattggccccctcagatggaaaggaatataagtttgatgtaaataactcaggccatttagcctttttacttacccatattatttctttagccatgccgattagactaaaagaaatcatgatgtgtgtaaatgaattaggtattaatgcaactttgcaaaaagacatagagcgaatgctgttcctgcttgaaacctttttccatattgaagtatatgaatatggaggtacaaaatattattataccaagagttcaaaaggatgcattagattgggtaaaaacaaatctggctttacggttgatgaggttggcataaaagccgatttgctactttttattaatgatgtagcaaggtgtgatgataagaaaaggcggttagcattgaattcgataaaggagaggatcaatgaacataattga

SEQ ID NO: 449885 - DNA, 642 bp, Serratia marcescens
atgaataaacagactcgcttggcctcattaggatggttgacgcttttttttgaggcggctgaaagatgtgctctatatcccatttctatggagatgttgcatagattcatttatttagcaaatgtattatccccattgtctaaggtaaaaatgcctaatgaatacacgctaaaacatcgtcgtggaccatattttccgcaagcccaatatgatattggtattctcgttgcacaaagagttattgaggccactgatatctctgtgattcaggatgaatatggattttggttaaaaggtaattatcggataacgaagtatggcttatctattacagataaaataaatgaacagtcaattttagaaaactattctttctttttgcgagagttttttggagctttatctctgcttcatcacgaagaaatattaaatataaatagctacgagatacactataaagcagtagaggatggccagggcgttgatatttcaattcctgataataattacacaagatatgctgtttcaaaattattccctacaagtcgcttgcaaacaccaagagaaggtattcatcgctacatttcatatttaactaataccctccatgtgcaagaggagaattatcatgaagatagataa

SEQ ID NO: 449886 - DNA, 1272 bp, Serratia marcescens
atgaatggtatagagagtttattaaaacaacaagatttgtctgtgccattaagcactgctcaaggtgtttctaatgttccttttcaaagatggtttaaatttaaggaagcgttttccccaaaattcgtacatgatactatacagaagtccctcatcaaagttgataagatacttgatccttttggtgggtctggaacgacagcacttacatctcaattaatgggaataaatccaacgacaatagaagttaatccttttctagccgatttaatagaaagtaaattaactgaatataacactcaaaaattaatttcagattgggtttttgtttcccaaaatgtagggttagaaaatccatcgttagatacaatgttttcaaatgccccaaaaactttatttgaagacaaagacgttgaacgatggatttttaatcgtgaaattatattcaggattgctcaatatagagaaattataaagaaacttgatggtttaaaaaattcaagattattcagagtgctacttggtagcattatgattccatttagtaatgttataattaatggtaaaggacgccggtatagaaaaaactgggagattctttcattcacgaaaagtgcattcgatgaagctttcagactaaaggttgaagaagctatttttgatatagttcgatattcgaatataaagtctggagcttatgatttcttcaacggggattcccgaagtgtacttagtagcttggattgtaaacaagatttaatagttttctcgccaccctatcctaatagttttgattacactgatatttataatgttgagctttgggcattaggttatctaaatagcgcaagtgataataagctattacgctcaaatacattacgttcccatgtccaaataaaaatggatgcatcaccaatgcctgagtctttaactttgttatcaacattagaaaaattagatgctaaagttaaactgctttggaataaaaacattccttcaatggtaaataactatttctatgatttaaatgttatcttagaaaactcaatgcgattgctcaataataacggaatggctgttgtcgttattggcgatagcaaatatgcagatgtgaaaattgatactgtaaaaataacatgtgaacttgctaaaaaaatcggatttacagttagagagactcaagaaattaggataatgaaagccagtgctcagcaaggatggtcaaaaagtctgagcgaaacagcaatatacttaggtaaagatatttaa

SEQ ID NO: 449887 - DNA, 594 bp, Serratia marcescens
gtggaatgcaaatttttatctaaattgttaaagtttttagtaacaaaagttgctctaccatggcgttccttgcacagcttatacaatggtattttaggaaaaagtttacttgttgtatctttagccacacctgtatcattattatacagctcaatacattttatcccatcaacttatccaaccatccttattggagcattactttcattgtccggcttcatctatacagaaatatccacaccgccgttaataaaagactttaaagacagccatcaatattcttctgaaatattaaaggttgcaggtaatgttgattgggtctctgagttcaaagtgcttgagggaaatataactagtcttagtgatgagattgatggttattattctgttcctttaaattttatatccattgatttttcgaaaaaaatcctcggtgaagagcgagcaatcagaagtttatcaatgttaaaattcaactattgcaataaaacaaatagctataaaagattagcattgacaataactctttatctttccttagtaatcatattttcatcaacagcaacccatatttataatattttattaggataa

SEQ ID NO: 449888 - DNA, 1422 bp, Serratia marcescens
atgtcaaaaaataatttttatgctgagccggcagtctatcacaaaccgatttctgaaattgacaccgatactattaatgagctttataagttagaggaagggtggtttgtcgagtttaagtctaatctgcctgaaggggcaaaaattgcaaaatctataagctcctttgcgaatgctcatggaggaataattatttatggagcgattgaagaccaaaaaacgagaaagttaaaggaattgaaagggtttgatgttgatactgcagaagaaaatttaattaaaataaggcagtcggtggaaagtcatattatgccatgcccgtattatcaggcggaaaaaatcaagactagtgaagataaagacgaatatataatttgggttcgggttcctaaaggtaagcatgttccatatttacatggtagtggtgttatatatacaagaaaaggcgactcctcatcaccaacagcgctaactgatataagtgttttagaacggttatggcaggatgggtatagagaaagagaaaaacttgccaatagaataaaacatttaatggaatgtataccaaaatcatttccaagcatcgatatatttattaagcatgaagattttgggtttaaagataatgattatgttttgagttttaatgactttaaaaaattagcgttggaaccggcagttgagggggtacaatcttttcttgatgtagctcatccaatggacggttcttttgttgcaagaaagcgacataaagatgttggaaatattagcattaagtgggagtttgatagagcgaacaatctacaccatattagaataccacttgccgttcaattttggggcaaaggtaagctaaatgattcatatttgggaaaggcggattatagcaagctgagcgagtactttaataataacggtataaccagtgatgtattcatagtagatatgagctatgcaattggtatgttatctatccttgttagaaaggttttcatgttgcatgaaataacaggcgataatggaaggttatatctaaacgctaaggtttctggtgttaagaatagcatggctattgtaaattataataaatattacgaagagttaaataactcagtgttcccatttattttcagggatccagattttttatatcctattgatgagataacgtcttggatgaatctggtggttcgagataaagaaaatgatgatttaggaaaagcaaaatttgaaattgctaatacaagtgccatatttgttgaaatttgccattgtctaggaataactttttattctgttcttggtaacggtgagagtgttgacggaggtgatgatgatttgtctgaattagtagaaaatctatcaggactgttaataggaaactattcatacacaagtatggctaaccctagctattcgtag

SEQ ID NO: 449889 - DNA, 840 bp, Serratia marcescens
atgactgataaatcagaagattcagccgccattattgaacgccttatttcatcttatggcgtcagttcacaaagagcgctggccaacagtcttggtgtaccaccaaataacgtgagctcatgggctcaacggaacagcgttcctggaagcgcagtaattaagtgtgctctggatactggtgctgacttgcggtggttgatgacgggtaagtttgaaaattcgaattttgagattggtaaatcgaaattttccgggcgagctttgtatgagcaaattcaagcatcaggtggaaaacccgtcctgcgacggatgctcgatgcgtatggactgcgcacacaaaaggaacttggtgacctcctagatatatctacagcaacgatcagcacatgggttaggcgagaatatttccccggagatgcggttgttgcatgtgcattagatactggtgtttcacttttatggttagccacggggcaaggcactccaggaaatccagatgttatttcgtatgagtctcgctttgttagctttcctcgtttaactatcacttcgggcggcctcattgagtcaggcacatggattgcagattcttctttaatttctgaaaaccaagacacaatacgttttgttgaacgtttaacggagggatggctcgtagatttcagcagcaatattgttggtaacggcaaatggctcttaggtattgatggcgtttatgacgtctattctgttgcacgtattccaggacggaaaattaaagttaatggcacatcttctaactttgagtgttctgtgaatgatgttgtttgtgttggtgaagtaaaaaaaacaatttgctaa

SEQ ID NO: 449890 - DNA, 927 bp, Serratia marcescens
atgccttatgaattaattgtgttaagtcccgttgctaatgacatcgagcagcttggcacgaaggaaaagttttggttttgctatgctgatgacctaaccaaagaatggttgttcaaatattccagagaagctactggcgaacattggtccgaaaagtgtgctgcggagctttgtcaccttctcggcatccctcatgctagttatgatctagcattagcatatgagcgctttggtatcattaccccaaacatgatccccgatggttttcgcatggtcatggggaacgaagttctgcatagcaaaacgacagattatccacaaccgctgcagcttggagagaaagcagtaagggtgcgagagcataccgtaacacgggtgttaggctgtttagacaaagagtcgattcttccacccaatagtgactacgaccttggagagcttaatgcagctgatgttttttgtggatatctgatgcttgatgctctcatcagcaaccaagatcggcatcatgagaactgggcaataatgttgaacaatgaaacaggcgaacagttcctgtgtccaacttatgatcatgctgcgagtttaggtcgagagatgcgcgacacagaacgtgacgagaggatgagtacaaatgacaggaataggcagatcccggctttcgtagccaaagcgagatctgagcttttcaaagcaaaaacagataggaaacccttacttaccgttgatgcatttcgtcacgcagtggagaacagacctgctgctaaagagcattggctaagcaagttaaaggatttgtcagaggaggccatcacccaagttttcaaaaatgtacctggcgagtgtatctcagagtgtgcaagaaattttgcgatcttgatggtgttggaaaacagaagaaggttattagaagatgaacgcaattaa

SEQ ID NO: 449891 - DNA, 741 bp, Serratia marcescens
atgaacgcaattaactccgtttatgttgcctggcaagcgccagacacccgttactggcacgtcgttggtaatcttcaagaacgtaaatcggggtatgtcttcaaatacaccaaaggtgctttgacatccccaaaattcacaaaattcagtggcatgagtgatgttaacgagacttatgtatcagaagaattattcccactgtttaagaaccggctgctgtctccaaaaaggcctgagtatccacgattcattgagtggctaggtctaaacagcgagaatgccaaacctattgagatccttgcccgctcaggtgggcttcgcagtacagaccaactgcaaatttttaagaggatcgagctcgatgaagatggcacttttgagcattatttctttctgcatgggttaagccatttaaactcaatggccaatgagcgggtgtcaagactggagccgggagaaaccttgaggctctgtctcgatcttcaaaacccacacgatagccaggcaattgttgttcgagctgataaaccagcagaaattgttggttattgcccgaggtattttgccactgatatcaaaaggatgcttctcgatgatccgatgtcagcacagcttgttgttgaaagaatcagcgacgacgctccacataactatcgccttttgtgcaaattgacaggaagtgcctccaaggccctaagtaacaagctagaccttcagggtgagtttgaaactgtgagctag

SEQ ID NO: 449892 - DNA, 813 bp, Serratia marcescens
atggcaaaagagttgatattcctttctcatatacatgaagaaaaggaaatcgcactattaataaaatccgcaatagaggatgaattttctggttttgtggatgtattcgtttcatcagacggcattagtatacctgcaggctcaaatcttttagaaaaaattgaaaaggcactcataaactgctcggccgcaatatatttaataagcccgagctcaattaaaaaaagctggattagttttgagctaggagcaatttggataagaagcaaaattagcactctaaatggagggagagaaatccctgcattgccgttctgttatgcaggcatgacatttggtgacttacctcaaccaataagtaacctaaacgcaattatggcaacctctcccaaagatctagagtttgcatttaaatctttgcataatgctctcggcgcaagtgggaaaattaaaaccgacattgttgaactagcaagaaagatagaagaatcggagggcaggataactgaaggtagacatctaaaaagaatatttgaaatcatagatactgaaaatgaaagtgcatcaggattattccccgctctagaaaacaacccgcatgaaattttaaacctaagttcacacgtccctcaagcgcaggttaaagaattaaatgacatcgtaaaaaaaataggcaaagtcgtgtctataatctatggtggagtaggtttttacaatgacccagttagcggcccagaaaataaatccgaggtaactatcacaataagaaaagacactctactaaaatataaagaaataatcattaatcgttaa

SEQ ID NO: 449893 - DNA, 849 bp, Serratia marcescens
gtgaaagaagcattgcgttcattgttaccaactatatttatatttttaatatttatcgtaatagtgacttcattatcatttttctgggggaattataataacaaccattacccgtatggttcaaactcattttataatttcgcttttctgcaaagtcttttaattaaccttaactcttcaattgtggattttttggtgttaggcgtagttgtcatttttttcgaaagaagaagagaacacactagcaagcaaaattctctgattgatgacttaaaggattatgcatcctactcttcagaagagattaatttaaaaaaggcaggattgcttaaaagattaactcaggccaaggtaaaaaaacttaatatacaaaggattataataacaaaaacatcaattaaggatgtaaaattttactctggggatatttccggatccagttttgaaaaatcaaaaatgagaagggtctttctaaataatgtgatattgaaatctgtcaatttcaatgaggctaatttagatggatgtcattttaaaaattgtaatatgtacaatgtcaaaatgaaagatgccagtgttactggagttcaacttaatgaatctagtttggttaatgttcagtttaataattcaaatttgaaaggttgcgatctaaggaactgtgatttgaaaaatgtaaactttgaagatgctaacctctgccgtgtaaatatacggggtgcaaaaaatatagatatagatgcgctagttaaggctaaaaatcttaattatatgatcgcagaagataatgtgctagaagaaataaagaagaagagaccggaaagtattcaccaaactagacggctttag

SEQ ID NO: 449894 - DNA, 489 bp, Serratia marcescens
atgtataaccgccgcacccgagatccggagaatccagacatattgcaactgacgggccagcaacgtaccgatggcttggaactgagcatgaacgccaacctcacagcaaacctttatctgcgcggcggtatggcgttgcaaaatgcctcgtttctcaaagcagaggaacaattccagggcaagcgccccaataatgtgtcgcggcgcaacggtgagttgtatataggctatagagacaagtcaggctggttcagtgaggccggtgtaacagcagtaagtaagcgtttcgccgacaatcaaaacaccactgctttacccggctatcagaggtatgacgtgcgtatcggttatggcgggaaacgctgggatctgcagttaagtgccgaaaacgtgttggataataggtattacctcagtgcaaccagcgccgcacaaatccagcctggttcgccgcgtcaaataaatctctccgcatcctatcgcttctag

SEQ ID NO: 449895 - DNA, 171 bp, Serratia marcescens
atgactattcataatttagagacattgacagtaagattatctcaaatagcggaggctttgactcaacttctaaaatatcagccgagtcaatggcgtgaaaatattattggtaagttgattgatgagttggagcgtttgagagatcaagctgaatactttctcttgatttaa

SEQ ID NO: 449896 - DNA, 945 bp, Serratia marcescens
atgaaaatgacttttaatataaatggaaagaaagtaccacctcaatctttgaagtataaaagcaaagatgaccagattgaagtaatgcgaaattggttttttgaaaacttcgaagacccagcgcactcgtgcccttataatagccgtgaaggggggtacgcttacatttatggcggcccatacgatgctcaagaagaactagaaatgacgtttggaggatacataaaggataactatattgaggagttagtaggcgaattacaacatgaatgctttgagtggtcaggtaactctaataatgttgatgattggtacgatgatgatttatatagtgcggtaacctcttcagaggaaccaatggctaagtttgaagaaaatatcgatataataaaatcgttggggaaaggtaagtataacaaagagcaaaaaaaacacttgctcaatattttgtacaccaatgttattacagcgcttgagacactttatgttgaattgttcataaaatcattggaggaaaaccaatcttatatcttaaatttaatagagaaaggaaaatcagagtttaagtggagtaaagaaactctagctttgccatttaaaactgagtccattgaacaattaaaagttgagttaataaaatcaatcaaagaaaacttgattagtgcaagctggcataacatcgaacaagttttaaaacgttacaaggctgcatttgacattcaaacgagaaatgattggccgactcaagagattgaagccgcaacactcattcgcaaccacttagtgcatcgtggtggcaaggataaaggcggcaatacagtaaatattacagagcaaaatttagaagatttactcgattctgctacgtcacttgcaaaaaagcttaacgacagcttatgcaatgctttgcaggaagaattaatcagtgaagaaagtgagttttga

SEQ ID NO: 449897 - DNA, 324 bp, Serratia marcescens
atgccattcacactacccaatgaatgggggctacaaagcgatatcaccccacgatttggcgcaagattagttcacgaaggcaaccggctgcattacctggctgacagggctggtttgacgggggaaattaccctgaagcaactgcagaaactggatcaaactttcccgctgtttatagagcagttagaaaatatgttgcgttccggtgagctaaatccacgtcagcaacatcaggtgaccattcagcttacaggtttgacttgtatagctgatacccgtggtagctgcggctacgtttacatttctatttatccaaccccgtaa

SEQ ID NO: 449898 - DNA, 1008 bp, Serratia marcescens
atgggcaacagaatgtggatgattcgcggtgatggcggcaaactctatgacgattttcgcgataagcaaattgtaggcatcggttggtctcagctggctccattagtgaaacccggcctgtcccgggcccagttacttgccttataccaggaagtagaccctttgacgaagctgggatcagcccgttctggtgcatcgcaggtctggcgttttgtgaatgaaatccaaaagggtgattgggttattacctattcgccagccaaccgtacttatctgctaggcaaagtcatatcggacttccaatatcatcctgaatgggtggaagaggggatgggtattgctcggcaggttaagtggaatactcaagaaatcggccgcgatcgattgtctgttgctaccaaaaacacattgggttctacgctgacggttttccagcttccagaatatgctctagaagagcttttgcaggataagaaacccactgtagacgtgattactcagaatccagttgcgatagatgaagatgaggtcgtttctgatccgctgcgcgatatggaaatgctggcgtttgagggtatcaaagatcgtatcaactctcttgattgggacgagatgcaaaatctggttgccggagttttacgcagcatgggctataaaacgcaggtctctcctgcaggagccgatcggggtaaagatatcatagcttcacctgatgggttcggttttgaaaatccgcgtattatcgttgaggtaaagcaccgcagggaacagatgggaagccaacagatacgcagctttattggtggtcgccataaagatgatcgcgggctttatgttagtacagggggctttacgaaagatgctcgatatgaagccgaccgttcgacaataccactgacgctctggacacttgatgatcttgtccgtgcgcttattgagaactacgagcaagttgatatcgagaccaaacttttggtacctttgaagaagactttcctacctgcctga

SEQ ID NO: 449899 - DNA, 630 bp, Serratia marcescens
atggtatcgacaacgactgtgttaacattgcggttgatcatgttgaatctccgttatactggtcaggccccggcaaagattggcgtctgcagccggggctttttaatgtgtgcctgttcacttcaccacctcaggcggcagtggtatcttggttgctctcacacagccaagaagggaataaaaatgacggtaatcagtgaagacttttaccatctcgtcttacaaaaagtcggcgaagcaagaggcgtggctttgactggaactattcagcagccagattatgcgcaagtgcaaaatcgagctgcgcttatatttactttcgagtgcgttttagaaaatcatcggaatacctatgcaacgataggaagcccattaaaaggacgcgctgcacttgagcatctacttcttcaaaaatacaagtggccgttaagtgagattcgtaatctctcactccaggacgcaattcttgcactccaagaggagatacgcgcgattgctgaatatgagcctgcacaaaaaatgattgcctactttggagcacaaagaattaaacaggtttatcccacgattcttgatgaagaatgggagcctaacttgattgacaaacttctacagacgcctcgttggtaa

SEQ ID NO: 449900 - DNA, 1368 bp, Serratia marcescens
atggcgatcccccattccgtcatcgagatgattggcaataccccgatgctggaactgacccggttcgataccggcccgtgccggctgttcgtcaagctggagaatcaaaaccccggcggttcgatcaaagaccgcgtggcgctgtcgatgatcgaacaggccgagcgcgacggcaagctgcagccgggcggcaccatcatcgaagccaccgccggcaataccggcctggggctggcgctggtggcggcgctgaaaggctataagctgctgctggtggtgccggacaagatgagccgcgagaagatcttccacctgcgcgcgctgggcgtggaagtgctgctgacccgctcggacgtcggcaaggggcatccggcttactatcaggattacgccaaacgcctggccggggagatccccggcgccttttatatcgatcagttcaacaacccggccaatccggcggcccataccactaccaccgcgcccgaactgtggcggcagatggagcatgacgtggacgctatcgtggttggcgtcggctccggcggcacgctgggcgggttgagccgctatttcgccgaggtttcgccgcagacggaatttgtgctggccgaccctgccggctctatcctggcggactacctcgacagcggccacatcggcgaagcgggcagctggctggtggaaggcatcggcgaagacttcgtcccgccgctcagcgactttgaccaggtccgccacgcttatcgcatcggcgacgccgaagccttcgccaccgcgcgcgatctgctgcgcaaggaaggcgtgctggcgggatcgtccaccggcaccctgctggccgccgcgctgcgttactgccgcgcacagaccgaacccaagcgggtggtgacctttgtctgcgacagcggcaacaaatacctgtctaaaatgtataacgaccactggatgctggaacagggcctgctgagcaagccgcagcacggcgatctgcgcgatctgatcgcctaccgccacgacgaaggcgccgccgtctccgccgcgccggacgacacgctggcgatcgtgcacgcccgcatgcggctgtacgacatctcgcagctgccggtgctggaaggcgatcgggtggtcggcctgatcgatgagtgggatctgctgaacgccgtccaggccgacgccgcccacttcagcctgccggccggcagcgcgatgaccaagcaggtccatacgctgcaaaaggaagccggctacgacgaattgcaggccaccttcaaccatggccacgtcgcggtggtgctcgacggcgagcgcttcctcggcctgattacccgcacagacgtgcttaacgcctggcgccaaaaattacgttaa

SEQ ID NO: 449901 - DNA, 1386 bp, Serratia marcescens
atgaactctcagccagagcagaccgcgtttattgaagacaagtcgatcgattttgttcccgccggggagcgccatggccatgcccgcagcctgtttaccctgtggttttgcaccaatattgcgccgctggcggtcgtgaccggggccatctccacacaaacgtttcatctcaatattctctcggcgctgagcgcgattatcgccggccacctgttcggcggtatttttctggcgctgacctctgcccagggaccacaggtcggaataccgcaaatggtgcagagccgggcgcagtttggccgctacggctcgctgttggtgatcgtgttcgccacggtgatctatctggggttctttatttccaacatcacgctttccggcaaggtcatccataacgtcatcccgtcattgaacatgggcgtggcgacggtgattggcgcggtgttggcaacgttgatcggggtggtgggctaccgtttcatccataagatcaacaaaatcggcgcctgggtgatgggcagcgcgctgattctcggattggtattgatgttttctcaaccgctgccggcggatttttggcagcggggatcgttcagcattgccggttggttcgccacgttctgcatcggcgccgtctggcaaatcagcttctcgccctacacgtcagactattcgcgttacctgccggcggaagtcggcattgccaaacccttcctgtatacctacctgggcgcctgcagcggcaccattttggccttcgtgttcggcgtggtggcggtcaatctggtcgccggcagcgacgatgccatggaggcggtgcgccaggcgacgggagggctggggccggtgttgatggtgctgtttctgatcaacatcatctgccataactcgatgaatttgtacggcgcggtgctttcactcatcactgcggtacaaaccttcttaccgcagtggatgccgaatgcgcgtatacgcacgctgttctcggcgctgattttgctgggggcggtgtgggtggcgctggttgcctcggccaacttcgttcatctgttcctgaacctgatttttgccttgatttcggtgctgatcccctggtgcatgatcaacctgattgatttttacctgcttaaccgccaacgctatgacatttcggccattttcagcgccgacggcgggcgctacggcctgctaaacacccgcgcgctcggcgtttatttcggcggtattgcggtgcaggtgcctttcgtcgagaacgcattcttctccggcccttacgccaatctgatcccgggcgcagacatttcctgggtgatcagcatggtgctgaccggtatcgcctacccattgtgttgttcgcgacgggctaactgggcggtgcaattataa

SEQ ID NO: 449902 - DNA, 627 bp, Serratia marcescens
atgatgaaacgcagtgtattagccttagctgtcgccctcggggcgatcacctccttcgccaacgcggctgaaatctacaataaggatggcaataaactcgacctgtacggccgtgttaacgccaagcattatttcagcgacagtaaatccaacgacggtgatatgacctatgttcgcctgggcttcaaaggcgaaacgcaaatcaatgatcagttgaccgggtacggccagtgggaatacaacgtccaggccaatcatgacgaagcgcagggcactaccggcaccaaaacgcgtctgggcttcgcggggctgaaattcggcaactacggttctttcgactacggccgcaactatggtgtggtctatgacgccgaggcttacaccgacatgctgccggagttcggcggcgactcctacagctataccgataactttatgaccgcccgttccaacggtttggccacctaccgcaaccgtgatttcttcggtttggtggacggcctgaatctggcggtgcagtaccagggtaaaaacgatggcgacggccgcagcgtgaccaagcaaaaggcgacggttacggcctgtctctggactatcaggacatcggcggttccggcatcggcgtag

SEQ ID NO: 449903 - DNA, 321 bp, Serratia marcescens; identical to SEQ ID NO: 83617

SEQ ID NO: 449904 - DNA, 1263 bp, Serratia marcescens; identical to SEQ ID NO: 67462

SEQ ID NO: 449905 - DNA, 411 bp, Serratia marcescens; identical to SEQ ID NO: 21571

SEQ ID NO: 449906 - DNA, 978 bp, Serratia marcescens
atgagcaacgaactaattgaagtcaacaaccagccaccaaccatgaccgccagcaacgcggtatttaaccctcaggcgctgggccaattgacatcctttgccaacctgatggcggattcagctgtgagtgtccccgcgcactttgttggtaaaccagccgattgcatggccgtggtaatgcaagcgatgcaatggggcatgaacccatacgctgtggcccagaaaacgcacattgtaaacggcacccttggttatgaggctcaacttgttaatgccgtcgttaccagctcaaacgctgttcgcggacgattccattacgagtacgccggggactggtcaaaatgtaccacctctaaagaggtcaccgttaaaaaacctgccaaagggggcggaacttacgacaaggttgaacgtgttagggggtgggttgatcaagatgaagttggattaagtatccgcgttggcgcggtattacggggagaagaagaaataacctggggtgagccggtttatctttcaagcgtagcaattcgaaactcacctctgtgggcgacaaatccaaaacagcagatcgcctatctggcagttaaatactgggcgcgcctgtactgccctgaagtgattctcggtgtgtacacgccggatgaattcgacgcgcctcaaccacgcgttgaacgcgacgtcaccccgcccgccaccagtgccgccggcgtaaataaccttatcaacgccaagcctgctcagcagcaggaagataaaaatccatcccgatcacaggatgacattcttaccagcttcaccgaagcagctggcaatgctgagaacgctgaaaaactggatctcatcttcaatggtggtacctggccggacggtaaaaaacgccctggcgcatgcgatgcgctgtcggataaatggcttgagatggccacagacgtttacaacatccgtcgcgatgagttgaacgaagtccctatgtaa

SEQ ID NO: 449907 - DNA, 204 bp, Serratia marcescens
atgcccatgccatgggggaccgaaaaaaccatgaataaatggatatggcctatcagcaaattctggacgttcactccgcaaggttgggtattagccgtgatctggaatgtctgcgaactactgcaaatcaggatgccgcatgcagaaaaggctttcggcgtaatcatcagcagaaaaggtaacaaagtgcgggaggccaaatga

SEQ ID NO: 449908 - DNA, 699 bp, Serratia marcescens
atgaaagagcgcccagtgattttcaactcagaaatggttcgtgccattcttgacggccgcaagactcagacgcggcgggttatgaaggttcagccatctgagcatttccaccctatgaatatggcccttgaattggattattccgctcgctggtatacccctggcgtcgtcgataaagacggttatctgcaaccggcaaagaatcagattttcggcgttgcaggcgaggatgagggttatgcgtgtccgttcggagcggtaggggagctgctgtgggtacgcgagacattcatggacttaaccggcaccggcattgaagccactaccggaaagtttgagggattagcatatcgcgctgacaccccggcgggaagttatggcgatgaggttcgcaaagaatatgggctgaaatggacgccttcacttcacatgccgcgcaaagcctgccgcatcctgctggaaatcaccgccgtgcgcgttgagcgcctgaattcaattggtgatgtcgaagccatgcgagaaggcatacagaatcttacgacatgttcccatgccgattttggaatcccgggcgtcgtaaacgcacagcatccagtgcgtgcctttcagttgctatggcaatccatctatggcgcagaaagctggcgcgctaatccctgggtgtgggttatcgagtttcgtcgtgtgggaggtgcgtga

SEQ ID NO: 449909 - DNA, 1230 bp, Serratia marcescens
atggcgttatctgatacgtacttaaaatccaacttggggcgagggcgtctgaaggttgaagaaaaggccgatcgtgatggtttgtgggttcgcttatccatcaagggtgcggtcactttcttctatcgctaccgattcatgggtaagcaagacaagatgaccatcggttcatatcccgccatatcgttaaagcaagccagagaggaggttgcaaagcatgctgctgtgttggctataggaaagaaccctaaaatccagcgcgagctggagttggctcggttaaattcctctatgacgtttgaacggatgttccgcgattggttcgaaatggtcgagagcgggaaaaaatgcgcggatcaagtgatgcgatcgttcgagctgcatgtattccctaaggttggcaaatacccggcttctgagatatccctacagcgctggatagagctattggatgcgctggcggctgtgtataccggcgtaacaaagcggatccttaacaaaaccaaaaatagctatgcctgggcgcacaaaaggggagctgttgagcataatccagtcgttacgcttacatcttccgattttggtatcaaaaccaatgttggtgagcgtaccttggagaggaaggagatcgcttttatctggaaagcctgtgaccaatccaggatgagcaataggaataaagcgataattaagctatgtcttttctttggttgtcgagttagcgagttaagattagcggaaaaagatcactttgatttcgaaaatatggtgtgggtcgtaccgccacagaaccataaaacaggctcaagtacaggaaagcccatcattaggccaattatccctggtgttgtgccacttattaagtcagctatggatttagcgccggggaaatatgctttctcaaatcggacggaaccgatgccgagtggaaatcatctgagtattacggggatgttatgtaaatttatgctgaaggtttacaaggagagcgtgccccatttcactgttcatgatttaagacggacagcaagaaccaattggtcggagctcgccgagcctcacatttctgaaatgatgttggggcacaaattgcctggcgtctggggcgtgtatgataaacacaaatacctagacgagatgagaacggcatatagcctttggtgggcaagactaatggggattgttgacccgcaggttgcagagttcaagcggccttctgtcgcgtcttga

SEQ ID NO: 449910 - DNA, 309 bp, Serratia marcescens
atggctcaggtatttttcgatactctaaaattcgttgaaacgctggaggccgcaggtgttccagccgctcaggcgcgcgctttttctgccgctgtgaaggagtcccatgaggctgctgaagtagcaaccagagctgacctcgcagaggttaagcgcgacatcgaagacctgcgtaaagatatggagaatcgcttcaatatggttgatgcgaagtttgacaagttcagcctacaactaaccgtcaagttcggtgggatgctggttgttgctgttggtgtcctcgctgccattatcaaacttcctctctaa

SEQ ID NO: 449911 - DNA, 471 bp, Serratia marcescens
atgagcatccaaatcaaccaaataagccttattgcggctatcaccaaagaaattgatcgccagtatccagggatagccgttgagagccgcttatttaacgtgatgattcaggctgtgaatactatctgcgaagagttttccaagccggtggtaaaggcatcggaggggatggggttaactgcatggctcgccagcgacgacaccgggctgagcagccggttcatggcatccaagctgaccggcatgttcgaggccaaatacgcctacccacgcgatccggctgatttcgggcgctgcttacgcctcgttgaagcggtgccggaactggaaagtaaaattcgtgacatgtcacagcatggtaaggagtgggctgtagtcgtggcacattggcatgaatgggtcgccgcacaccgtgggggaaattacaaacggttctatcgccttatgaagctttgctatgaggagggatga

SEQ ID NO: 449912 - DNA, 231 bp, Serratia marcescens
atggctaagccaatcgtcagaacaaaaaccgacgcaaaggtcacgctcactcttgagctgacaaacctcggctcatgggggcctgattgcagaattgaccaggtttaccggcaggcactggaacaagcctgcggtcgcctgggtaggttattccaagggcagtcggatatacggattgtaggtaagccagtagttcaagccatttccactgatgtagaggtgaaacgatga

SEQ ID NO: 449913 - DNA, 540 bp, Serratia marcescens
atgatgtacgagaacatcaaagttgcaacgtatgcaccgggagcaagatacccggcgatgatccaacgctggcaccccatgcgaacagcgatgctactcaggctagcaccggtgatgggacggaaaaagctagcgaaatacctgggtatctcgttgcgatcgctgctctgcaaagccgcccgctttggcgtggtgcttcggcatgaccgagcgcaacactacactctgagcgagttgcgtttcatgcgggagagccgccgcacactgtcctatcagcagattgctgacgccctcggacgcagcatggaagcagttagagtggcgatgactgtcagggggtgggcgaaaggtgttcccaccggagagaggcacccgttctgcaaatacccagatagcgatgtcgagttatgccgggcgctgcacgatgatggcatggcgatatcggtgatcgccgaaaaaatggaagtgccttacccaaccgtcagaaactgggttcaattcgaaagccgtaaaacgacagaaggcacatcacatggctaa

SEQ ID NO: 449914 - DNA, 699 bp, Serratia marcescens
atgaaccaaccaatggccttcacgtggaataacgaatcggcggaaatggcaaaaaaagctggcacttccgccaatataagtgaaaccggggcttatgaagtggaaataacctccgctatttacacctttggtaaggaagggagccaatcgcaggcgttggaaatcagcgtcgacgctaacggactcaaaggaaattatatccgcattaatttcctgggcaaagacggccagcaaacgttcggcatggggcttgtcaccgcgctaatgtgggcggcgcaggtgaaacaggtacagccgcagcaggttcagggacaaaacggcatggaatggcactgccccgcactggtcggcaggaaagcaggcctgttcctccagaaagtgctctacaccaaaaacgatggtggcgacggttataaattcgaggtacggcacgtcttccagcccggcacacgtaaaacctatgccgaatacgctgaaaattcgccggcggaaactatcgccaccctggaagccaccatgaaagacaaggatgaacgcaccaataccggcggccctcaattctctggcggtcgaggcgcgccgcagggtggcaatccttacgcacaaaacggcatccctcaatcacgcctgcaacaggcggcacagcaacaccaggcatctcaagaaattcctgatttcgacgacgacatcccgttctaa

SEQ ID NO: 449915 - DNA, 669 bp, Serratia marcescens
atgggtactccagtgctaatcctcggtgattctggagcgggcaaatcctatagcttgcgtaacttcaatccagatgaagtggtactgcttcaatgcatccccaaaatgctgccgttcaagtccgctggctggaagttgcacggcaaaattctgcctgatggtagcaagcaacgcggcaacgttctgcgctctgataactgggaggtcgtgctggataccatttaccgcatggtgcagtcaaaaacgcgccgtgtcctgattatcgacgactttcaggtggtcatgcagcatgaaaacatgaaccgcgcctaccagactgggtacgccaaattcacggaaatggccgatcacatctggcggatcatcatggcggccaccgagttacccgacgacttccgcgtttacttcctggctcataccgaagagaccgaaggcaagatccgcatgaagaccaccgggaaaatgctgaacgaaaagctgacgcctgaggggtacttctccatcgtgctgcgcgccatcaagaaagacggcaaacacgtatttctgattaaaggcgatgacaacgacaccgccaaagcaccaccggacttgttccctgatcagacggaaatggacaacgacctccacgccgtcgatgtggcaatcactgaatttatgaccgaattgtaa

SEQ ID NO: 449916 - DNA, 309 bp, Serratia marcescens
atgcagggcgaccgcatcacccaggagcaggctgaagcatttttctccgaggatttggccgtgtttgagctgacggtgaacagcgcgattaagcgaccgatgacgcagaaccagttcgacgcgatggtctctctggcgttcaacattggaggcccgaacttcgcgcaatccacactggtgaagaagttcaatgccggtgacgtgcaaggcgctgctgaccagttcccgcgctggaagttcgcgaacggtaacgaaatgctggggctgattaagcgccgtgcggcagagcgtgagatgtttctggcgtga

SEQ ID NO: 449917 - DNA, 180 bp, Serratia marcescens
atgcaattcagcactaaatcgaagaaacaccggatgttcatgaatgatcggggaatggcgattaccgacaagcaaggtacgccgcgcgtcattatgggatcaattgacgaatcaaaccccattatccgaactggtaataaaaccaccttccaacaatgggcgcagagcgccgggagataa

SEQ ID NO: 449918 - DNA, 480 bp, Serratia marcescens
atggcgacattatcatcagaggttaaggccttcatagttcaggcattagcgtgctatgacagcccgtctcaagtagctgatcaggtcaaaaatgaatttaagataacggtgacgcgtcagcaggtcgaatctcacgatccaacgaaatctaacggtaaaaaactggcccagaaatgggtagagctattcaatgctactcgcgcacgctttcagagtgaaatttttgacattccgatcgccaacaaggcttaccggcttcgaacgcttaaccgcatggcgacccgtaccgagaccatgaagaattatgctttaactgcccaattgattgagcaggcagcgaaagagtgcggcgatgcttacaccaataagcagaaggttgagcataccggtaaagacggaggcccaatagagtcggctacgttaacgcgtgaggagtataagcaggctcgacgggagatgctggaggatgacgactgttga

SEQ ID NO: 449919 - DNA, 1446 bp, Serratia marcescens
gtgaacgaaagccaaatgaaacagcaacgtgccagtaactcatccttagagaaggcgcgtgtgaacgcgctcgcctcgctatttaacggaaccagcaacaccaagcgccagcgcctttatcaggagtttggctatccggttgacctgtgttttgacgacttctatcgggcgtactgccgcaatgctctagccggggctgccgtgcgacgtatggtggatggttgctgggaggacttccctgaaatttatgaaggggacaagacaaaagatgccacgaagcttactccatgggataagcgggttaacaagctgatgaagcgttgctggaagcaggttaagggcgcagaccggcgcaatctggttgggcgctattctgcgttgttattgcagttaaaagatggaaaaccatggcgtgagccagtggaccgcgtcgcgatcgggcgtctgtcagaacgagggttggtaaagctgatccctgtatgggaagcgcagctggaaccgatagagtgggatagtgatgccgatagcgaaacgtttggcgacgtgaaaatgtactctttcaccgaactgaatgttgacagcggcgacaatccccagccaggtcgcatcatcaatgttcatcctgagcgggtgatcatacttgctgaaggttccgatgatggctcgctttattccggcaaatcgatgctggaagagggctttaataaactgctggatattgagaaagtcagcggtggcgcgtctgaaggcttcctgaagaacgccagccggcaattgaattattcattcagcgagaaaacaaatttcgcagcgttggcgaaagcgcttggggtgcctgaaggccaactggccgaggcgctcgacatgcaggtacgccgcttgaacgacagcactgacagcgccagctttatgcaggcaggtaccgctgaggtgctgtcagtcacagcagccgaccctgaacccacctggcgtaccgcagttaacgaattctgcgcgacgatccccatgccagtgaaaatcctgatcgggatgcagacgggcgaacgcgcatcgaccgaggatagcaaggattggtcacgaacccgtatgtcgcgacgcaacggcttcctgacagagttgatcaccgacctgattacccgtttctggacatttggcattatcccagcgccaaaaggtgatgagattagcgttggttggtccgacttaatggcacccagtcgggccgagaagattgccaacatggcagcaatggccgatgtcggcgttaaatcagccaatgccctcggcaggtctgccatcactgaaaacgaagtacgtgcagagggtgagcttcagccgataacgaatctggatgatgacgatggcaaaccaaaaccgaaacggcctgaccctctggtcgacgacccagaagccgaaaagtccggtggtaccacgttcacgcaatga

SEQ ID NO: 449920 - DNA, 915 bp, Serratia marcescens
atggcgaaggatattgatgaacggtattaccagataaaactggctttgaaggcgttgttagacgagcggatggtcgggcgggagcgtgcgggaaacggccagaaatggaactttctctgtcatcagtccggcgatatgccaacgctctacgaggtcaacgccgcgacttatatctacgatatgtcgtcttcgcaactggcagaacttctgcgcagcgtgcaggccattctcgatgagaatctgctggctggtggcgaacagaatatctgggcactagagtacgtcaccgaggagatacggcgcggcacatttgagtcgttcaacaacctttcccagcagtcagctgtttatgctcagcaaaccacgctagcgcaattactcaatagtgcaccgtaccttaatcaggtcggcgcagcagtcgtgaccacctacagcgactggaaggcgctaagtgatgctgcacgtgctgacctggcgaatgtcattaccgatgcagtggcccgcggtgtgaatccgaaagaaacagcccgtgtgctcagcaagcgcttggatatctcccggtcacgggcatggaatattgcgcagactgaacaggtaggtgcgctcaggcaggcacagtgggccgaaactgactgggcatccgagcggcttggtctacgtaccgcgttattgtggatttccgcgcttaagccaaccacccgaccgtggcatgcatcccggcacggcgagatctacacgactgaagaagtccgcaccttctattccgagaatggtaaccgctaccgctgctattgcagccagatcccctgtctggttgacgaggatggccaggtagtgaatcaggggcttattgaccgtctgatcgaagaacgaaagcagtggaagccggcttccaaaccaaccaaaaccacatga

SEQ ID NO: 449921 - DNA, 1386 bp, Serratia marcescens
gtgaaactatccagtatccacgttaaatccttcgccgttaacgcctccaacatctcaaccacgaccatcgacggtgacgagcattatgtcattcgtggcgttgtgcctgtcgttgatgatgtggtgatgaatggaggcctttatccggcggaggagattaacaccagctacagcagcattgagggaaaactgaccccgttaccgcacccgaaagtcgacggaaaatttgtcagcgccaacgatgcccgcgctctgaacaagttccatgttggtgcctgggcgcaaaatgttaccaaggcgggtgataaggtggtgatggacgtttatgtgaataagcgcgtcgccgaacagtcgccagacggtaaacggttgattgcccgtcttgacgagatgatagccggaaacaacgttgacccaattcacgtttctacaggcttgctgctcaataaagaggaaagtaaaggcgagtcgaagggcaaaaaatacaactggattgccagaaatttgcgttttgaccacgtggcgatcctgctggatgaacccggtgctgccactcctgccgaaggcgtcggcattttcgtaaatgctgacgggcaagagggagaagtagaggcagcaagccttacagagaccgtcaacaacatgaaagacggcctgtggaatagggcaaagttcttctttaccaatgcttccaactactcattcgacgacatccagcgagccatcagcgaaaaattgcgtgaaggccgcaccgatgattcgtggttgtggccggaaagcgtttggccggacagttttatctatcgcgacagcagcagctatttcaaacagaagtatgtaatcgacgaagtcggcaaggctgttttcgtcggtggcccagtcgaagttgttcgaaaacccactgaatacgaagtaaaaaccaacggagataataacccgatgaaagagaagatgatcgctgcgctcaataccgcaggcgttaaaactgaagggctaaccgacgatcaggtctgggatgcctacaaccagcaggtggtgaagaaagaaggtggcggtgatccagctggcgtacagcagaccaacgctgaagccattaccgcagccgttaatgctgcaatcgctccgctgactcaaaaactctctgcgctggaaactcaactgacggccaattcggaaaacgagttgaaccagaaacgagcggcagtgaaattggcaatgaatatgagcgatgaagaagtggctgatttgcagggcaaggcgctcgaccgcctttatgccaactgccagaagtcccaggggctgcacggtggcttccatctcaacagtctgaacacagaagaccagtggaaagactacgacctcaacgctgaaatggaggcgaaataa

SEQ ID NO: 449922 - DNA, 447 bp, Serratia marcescens
atggttgctcacgtcatttatcgtggacccgccgagcgcgaaccggaaaccatcaacctgccagtatcaggtgattacctgccgggcgtggttgtgaagaaaaataccgccggtggcgtgacagttgccaccgatgccactggccggttgcttattctgggtaaccgccgcttcattgggcaagatatcaacacggcctacgctgctaacgaaacaggtgtccagtaccgcgtcgaagtcgatcaggaatacaacgtgcgccttgctgccgctgcttacaccatcggtcaggagctgaccgttggtgctggtggtgtgctgaaggctgcgtcagccggcgacattgtcgtggccacctttgacgaaaaagcagggcgtactctggctgttgccggattcgctgatgtggtgatcgtcaactcttatgttaaaccggcttcggcctaa

SEQ ID NO: 449923 - DNA, 1032 bp, Serratia marcescens
atgctgaagtttactaaagaacagcaaatgctgatcctcaacgcccgccgccggtgggagcagtcccatcgcattatggccgcacagaatggttttgaagtgaacagcgtgaatggtgctcttgtcgctcataacgagatgatggggaatgcctcaacgctgccgaaagatgtctggggcgagtgggaccgttctgctattaccgttcagcgcgatgtgttgtcagtgtttaatgacctggccgcatcagtgtcacgccctatgcgattgggtaaaattattcactacttcatgacgctgtcagattctggtgacgtgaatatcagcctggacgggcgcggcaaggcgaaggtcgattcgccagtaatgaactatgaaggcacgccgctgccgatcattgattcagagctgagtttcggttggcgtcaaatgttgtctgcccagactgaggggtactcgctggacagcgacgccatcggtaaccatcagcgcaaagtggcggagaaaatggaagatatggtgctgaatggtgatccttccattcgcgtcggtgaatccgccatctacggtctgcgcaccgcgccgcaacgcgctactggtactcatggctttactttggcgtccgccactggtgcaaactgggtgagcgtcgtcacggcggcgattgcagcattgcaagataaaaatttctttgccccagttacgctttacgtgaactacaaggactggttctacgcttcggtcactgattatgctgccaactaccctaaaaccattctgacgcgcctgatggaaatcccaggcctggcagcaatcgttcctgcatccaaggtgccaaccaacgaggtgctgggtgttgttaagcgttctgacgtggtgcagatcctgaatggtatgccactcaccatccgcccgaaagcgcgacagaatcctgaagatgattatatctacaccgttctggccgctgtggctccacagttcaaacacgatgatgaaggtaacgccggttacgttcagctgaccaaagcataa

SEQ ID NO: 449924 - DNA, 327 bp, Serratia marcescens
atgaccgacaagaaacagaaatggctcctcacccatgatagccatgagctgaaaaagggtgaggtgtttgaaggcgttaccctgccagcctggttaaatggcaaagttacccctctatcggaagattcattcgaagtggcctcgcctggcggtgctgaactggaaaagctaaaagctgagttggcagcgcaaacccagcgcgccgatgaagctgaggcatccctgaaccaggctaaagcagatcacgtcgctgagctggcggcagaggccaagcgcgccgatgaagctgtcgccgcgctggccgaagcaaccaagaaggtgaaataa

SEQ ID NO: 449925 - DNA, 342 bp, Serratia marcescens
atgagcgctgcggctaactggagctatacggccattgccaccctatggcgcaaactgggtagtaatgatgatggtgaaatctggtctgagcccatcaaaatatggtgcgactatggcggagatgcatcaggccggctcggtgatatcggcctggagctcgtgattaaaaacacgttctggactgaatacgccgaggcacagcaaggagattacattctcataggtgaatcctctgtagttaatccattggaggcaaatgcggacgaaattcggcacgtcattcgttatgccgacactttcgaccgcattgctgatgatttcgcgttaatcaccggagtctga

SEQ ID NO: 449926 - DNA, 369 bp, Serratia marcescens
atgggggtgaaggttaaaggcattgaacaggcacagcgcaagctgaacgcgctggtgagtgatgtgcaggggcgtaaggccgtgagagcaatgcaatcagctctgttgattggtggcactcaagcagcattgtataccccaatcgacacatccacgcttatcaattctcagtatcgtgaaatggaaataaaaggcactcgtctaacaggcagggttggttattcagcaaaatatgctgtttatgtccacgatcctaacatttctcagaaattccgtagggctacagcgcagaaggaatttttgaaaaaaggatttgaggaaacaaaggcccagattgacgcggctatttaccgggagctgagactatga

SEQ ID NO: 449927 - DNA, 387 bp, Serratia marcescens
atgaccccagcgatgcactaccgggtaaaagagctgttagagaacgccggccttaccgagggtttcgaagtgcaaagcctcatgtgggaggacagcgggaagatcactgaccgttttatcgttgtacggccatcgggtggtagcaatatcgacccctcgctctcatctgattactatgtgttggtcgacgtgatctcagccaagggattaggagagtacaaaaaagccgacgcaaccgtacagcgaattattgagtacgtgcagcagaaccccgtcagtccgtgtgttggcaaaattaacaatctcggcggaatccctgcgccactgacaacgacagaaaagcggctggtgtatcgcctgcaattcgtatgcacctacggcgagtga

SEQ ID NO: 449928 - DNA, 738 bp, Serratia marcescens
atgcaaggttgctcatccagctttgaccgtttaattggccgagcgaagacgcttgaattggcatatggttgcccggggctcgtcccagcagatgccgattggaaacttcttggcctgccaacatcagctacatgggacatgaaccccgagtcgctgaactctgatgcagacgatggcggcttcacatcaaccatgatcgccagcctcgacccaacttactcgatcgatggtgaggtacgggttaacgatcgcactgacgagtttggcattcagcagttcctgcaatacttcgtcaatgaagttaaagcacgacgccagccaaccgtctggatgcgattccactggggtaatttctatcacattggctatatggttgtttctggattcagcgatggtggtggcgttaaagagatcgtcacctatagcctggagctgaaattgaacgaaggcacgaccttccaaattatcccagacggcgaaaatattttcgtaactggtgtgacggtaaccccggccacatccagcggcgctgttaatagcacggtgcagctcacagcgaacgttcagccagccaatgctacggacaagtctggtgtgtggaaaagttccgatacttccaaggctacggtaagcaatacggggcttgtcacccgtaaggccgtgggcagcgccgatattacttttaccaccaatgacggcgctaaggttggcacttccaccattaccatcactgcataa

SEQ ID NO: 449929 - DNA, 675 bp, Serratia marcescens
atgacggcatttaaagaaattggcgagtgcgttatcagcgacggtgttaacgattatttctttcgcccaagtttcacagccatgaccaaagtcggtgagccgcaagaaatcgtacaggcgttttatgacctgcataacgatgaagcaacaccactgctcaccaaggcattagaagcctacgggtacgtccccgcatggctgataaagttcattggcaagccacagttttctaggcaggctatcatggcagcgatgaaagtgctggtggcctgttgtgatcgtgatcccgtcccgctgattggcgagatagtgccgggtaagtctggaaagtgggcgtttgtctatcgcaaggggaagatggaactgctggatatgatccttgttgcacaatctctgttgacccatggcgttattggtaaggccaagataagacaactgcaacgccatgagacaggcgaggcgacgagcgaatttaaagccatagagtacatcaactccgccagaaatcatttcggtatgagccgcgcagaggctgaacagctaaccatgactgagttcgccatgcttatcgccaacaagtacccagaccagaagggatatacgcgagaagaatacgaccaggcagccgatgatttctttgaacgcagaaagcgacggcttgctaaggctgattaa

SEQ ID NO: 449930 - DNA, 378 bp, Serratia marcescens
atgaccgaggaagaatggttagatggtttgcgtcacctgtcggatgacatgattattcatgttcatttcgaattgcaagaacagatcaaaaaacattacaagcttcgagcacaaggtaaccacctagagaaagcgatagcactttgcgagcaacagatcgctctgtctccattgtccattaaagcactaatgaaaaagcaccagcacgatgtagaagagtaccgttctgtaatgggaaaagagcatcctgaacctgatttctattacccttcgcatcatggttatcgtcagtatgctgtaatcctacgcaagcgtaaggattttgataagctcgctgagattgaggcaaaaagaatgtcagaaggttgggctgcttga

SEQ ID NO: 449931 - DNA, 282 bp, Serratia marcescens
atgctaaaatcaattggtgggatattaatcgcagtgggtgtgatttctgttggttgtgccctaggaatggatgtcacggttggttatgtggataaggtctataatagcggactaatggccaatcgtgaggtctataccattgcaggaagcgcaatagctatcattggcacactgattgccatgacagggcttattatcgagcgagcagaaaaaaatgaaaaagaaaaattggatgttctgaaaaatattaataatggcctagcagattacctcgataaataa

SEQ ID NO: 449932 - DNA, 3117 bp, Serratia marcescens
atggcagaacaaggcggcggtaagcttgtttacgaggtcgatattgatgtcgcaccattattaagcggcagcagcaaagcaaaggctgaattaggatcgctgggtgatgccgcgcaagaggttacaccaggattcgaaaaactcagtaaaggcgcgaagggcgtgtcgtcagcgctggcaatgcccgaggtaaataagctctcagcaaaacttgcgcaactatccgggaaaattggtgtttcaaccgatgctgttgccgacgctgccatttctcagaataagttctctggcgcgctaagcacggtcgctagcactttgggggctggctatgtatcgaacgtgggggcggcaacgaacgcattaatcaaacacgccaaggaagcagtagccgccaccaatgcgcagcttgaaaacgctgttgcggctcaaaaggaagctaatgcattacaagcatcagcatctcagcttgtgataaatgcggcagccgaaaaaaaacttgccgaaactgcggctaagacagctgctgaggagctacaagtagccgaagcagtttttgcacgaaaagaggctgatatagcctcgcttgaagcgttgcttttacgccagaaagaatccctgcgccaatcagaagcaaacttgcagatcactaattcagagaaggccgtcgctcaggctctgcgagacaggaatgcggttgaagctacgcaggctaaaatactcaaacaatcaaatcaggccgtaaaagaggtcatagccgcagaagaccgattaaaggcagcaaaaactgcatcagccgcagcgagtgaaaagttaacacagtcgatggcgctggaagcagctgcggttgccacagtggcgaaagctaatgatgcagctactatggctacagaaaggctaacggtagcctcaaaggtacaagccgctgctgtgtctggtgctcgtagtgctctctctttgcttggtggtccatcgggtattctgctgttggctgctgctggagtttattcgctctatcaggcgatgaacgatacgtcagcgattgataaatacaagcaagaaattgatgatgcagcgaaacgtataaattatctgaccaaggttcaggctgatgccgcttcggtaaaaacaaaaatacgccttgatatagataagcaatccttgaaagacgcagaaaacgatgttgaagccattaaaaaatcgataaacaccataaagtcgataagcggatcgccaaaactaattgctgagttagagaaagacctaactttagccaaagaaaaatcatctgtatttgcagagtctgttcgggtggcgaacgagcgaattgcccaattcacccagcaagcacagaaagccggcgatgcatctacagccatcgccagtgctaatgaaacctatgacaaatccatgaagaacgtcatagagtccaatgaagtgcttgagaaggcgatacatgacagcttggctgcggccgaggagatggctgccaagaaaaatttggaaaaggcgctggctgatattgggataaccggcgaagaggccacgctacaggtagaaaaactccaagccgccttcgcaaaaaagcgtgagttaacattcgagcagtctctgaagagcattcaggataatgtcaaagcgttaaaaattgagatgaccgagggtgccgaggctgctgcggcatatcgcgctgagctttcattgaagaacgccgggataacagatcccgctgagactaaaaagtatcttgattcagtccgtgagcaatacaagctccagaaacagatatctgatagcaagaaaaaaggctcggggacaagcaaggctgccggaggactcaccaagcagcagagccaagccgcatctctgcgtcgtgaatatgagctactgacatcaggagccgctgatgttgcacgttcaatggcgatattcaacgccgttcagagtttgggtgcgaaggccacagctaagcaaaaagaggaagcagcagctgaagcagcaacggtatttgacctaaagcaaaaggtcgatgatttccgcaaggctgctgaaattacccctgagctgaaattatcgaaggcctttgccgatgaggctaaagagctccaacgcttattttcagaggggcttattaatgaggatacatttaaggagctgggagccaaggctaaggcgaaatttgacgaaggaatggcagaggccaggtccaatgcagttgtaagttctaagcaggaagcagcagccaaggttgaccccgttcaggctctcgccaatgagcacgcaagaaagcttgaactcatcaaacagtttgaagctgatgaaacgctaacgcacgaccaggcgcttgcgatacgtaacgcctcggatagagaatacgaacggcaaagaattgaggctcagtgggagatttggcgcaatcagaacacgactaacgagctgctgtcggcctctattgatggcatccaaagtagtgcggcaagcgctattaccggcttactcaatggcacacaaagccttcaagaggcattcgcaaatattggttcaactattctgaatagcgttgttagcagtcttgttcagatgggcctcgaatgggtgaaaagccaggtaatgggacaggcagcagcaacggcgggtttagccgcgacgctggcacaagcaacagcagcggcatcagcgtgggcacctgcggcagtcagtgcctccatagccacaatgggtacagcttcatcggttggttctacggcttatgcgacatccttggcggcagcgaaggggcttgcgttggccggcgctcgttataacggcgggccggtatctgcaaattcgatgtaccgtgtgggcgagaagggcaagccagaaatctaccaggccagcaacggtaatcaattcatgatccccggtgataatggcagggtgatcagcaataaagacatgcagggtgctggtggtggcaatggtggcggggtggtgatgaacgtggccttcaacattcagactacgggaggtattgacgaggctacgcaacggcagatggcgcagatgatggagagcgtggctatgcgagtagctgaccgggaaagcaagagtgctggggggattctccagcggcgtaaatag

SEQ ID NO: 449933 - DNA, 705 bp, Serratia marcescens
atgcgagacattccagcagaactcattatcgaaagcgttgacgctggcgttggggcgatgattgacctgtttgaggtcgatttacagccattcggcggtgacgtggtgcgctttcattctggcgttaatgccaactacaacgatgtaatttggcaggggcgacgatacacagcttacccaatacaagttgagggttttgaaactaaatccgaaggcgtgtattcacgcccgacaatggccgtcgccaacgttaccggtttaatcacgggcatcaacagcgactttgacgacgcactcggagcgatggttacgcgccgccaggtgttggttaagcatttagacgcagttaatttctccaatggcaaccctgacgcggatagcacgatggaggctgtatcccgctacatcattgaagaaatggccgaggaaacgttcgagcaggtgacctacaacctcgccacccctgttgattgcgacaacgccatcgttccagcccgcactatcctggctgatgtttgtcagtgggtttatcgtggcgatggatgtgggtacagcgggccgccggttgccgatgagaaggacaatcccaccacagacccaggcaaggataagtgctccaaatgtctgcgcggctgtcgattccgttaccctaaaccgtctgctctgaggttcggcggataccctggcgcggccaagatttcatga

SEQ ID NO: 449934 - DNA, 729 bp, Serratia marcescens
atgatgctagaagatgaatgcctgagatatgccgccagttcagtgcaggaggtgtgcggcttaatcatcgacaacaagcggctgtggcgctgtccgaatgttcaccctgaaccggataagcacttcaggatagacgacagagactggctcgaggcagaagcggcgggagaaatcaccgccgtttttcattcccatcccggcgataacctttacttgtctggcgctgaccgcatagcgcagatagcaacggatttgccgtggtggctggcaagcgccggcagtttgcgaaagtatcgccctgtgcagcatctgctggggcgcaagtttgagcatggggtgatggattgctacacgctttttcgcgacgcctatcacctatgcggcttagatttgcctgactttgagcgaaccaatggctggtgggtgaggggagagaacctctacatcaagaatatggcaagaaacggtttctacgaggtcacgcccgcaagcatcgtcccgggcgatgtgattatccgccgcgccttcacagagtcagacccttgccatgcgatgatttaccttggcgacaatatcgttctgcatcacgaaaacgccgggctatacagccgtcgagagccatacagacaggcttacgtgaaactcacacattccatctggaggcatgagcaatgctcgtctttaaatttgcaggcgctctacgccgacatttccgccaggtcgctctga

SEQ ID NO: 449935 - DNA, 528 bp, Serratia marcescens
atgctcgtctttaaatttgcaggcgctctacgccgacatttccgccaggtcgctctgaacgttgaaaccccttcccaaggcctgcgcctgcttctatctcaaaacccggcatttaagcgcgatttttaccgcgcacggctgcgtgttcgtgtggctggattggacatcaaggcggatgaggtggattttcacctcaacagaaagctgcaagacggcgcgacagtgttattcgtgccggtggtggaaggggcacttggtctttcggtggctgcgtgggtggttattggcttaacggtggccgccacggcttattcactatatctgacctcgaccatgaaaaccaaaacctcagcagagtcagcacaggataattccatcaccaacaactcgttcaccagcgcggagaaccgggtaggtcagggtaggccggttcctctattgctgggggagatggtggtgggtagcaacgtaattagtctaggcatcgacacatcgaacaataaagattggactgaatcaatcagttaa

SEQ ID NO: 449936 - DNA, 3177 bp, Serratia marcescens
atgagttcaggcggcggtgggggcagcacccctacactaatcaatgacaaccttacttcaaagcagttttaccgcgttcttgaccttatcagtgagggcccaatctacgggccggtagaccaagagcacctttcctcgttcatgctgaacaagacgccagtgaccgatgcgcagggtaacgccagcgtgaacggcgtgagtgtggcatggcgtccgggttcggaaagccagcagccgattaacggctttgatgccattgaggcaaccactctggtaaatacagaggtgaagtttaatacgccgctggtgcgcacgattactgataccgatgttgaccgggtacgcttcaacctcggcgtaaccagtctcgtagagcaggacgacaaagggaatcagaaaaacacttctgttagcatggtcattgagatgcgcacagggaacagcgcattccaggtgatgaagactgtaaccatcgggccaggcaaaatatccggccaatatctggaggcgcatgttattgacgcgccagaacagaagccttttgacattcgtattcgccgcatcacgccagacagcaccagtgatttactcaacaacggcaccatctggaacagctttaccgaaatatcagattacaacctttcctacccgtatgcggctattgccggcgcagtgatagaccgtgaccaatacgcagacacgccggccaggaactaccatctgcgcgggctgattgttgacgttccagacaactacgaccccattaaccgcacctataccgggctttggcaaggtgggtttaaatcagcatggacgaataacccggcatggattttccgggcgctggtgaaaaacaatcgctatggattggctaagcgggctggctatgtcgatgttgatgatggaagcctgtatgttctgtctcagttttgtgaccaactggtcaatgacggttatggcggcaaggaacctcgctttacgctgaatgcctacattacggagcaaaaaagcgcgcgcgatattttggatagtatcgccagcatgttcagggggattgctctctgggacggcctgcgcttttccatcatgcttgaccacccgcaagacccggtggcggcggtgacaaatgcgaacgtggtagaaggcaactttgcctacagctctatgccgcgctccgagcgctacaatgcggtagttgtttcatggacagaccctaacaatggctgggagcaggtgaaggagtacgtctctgacgacgcgcttattgaccgatttggctacaacgaaaccacggttgaggcgttcggttgtacgtcgcgcgggcaggcataccgaaccggcaagtggttactggaaagctgcaagcgcgagtatcgcaaggtaacgttccagatggcgcgtgacgcgattgcgttcatgcccggtgacattatcgagctaatggacaatcgacgcgcagcgacccgcctgggtggcagaatcgttagccacaacggcaacgtcataaccgtggatgcggacgtgtcggagttggtggatgccggggccacgatggcaataatgggaagcgatgcgaagtttgttcattacgaggttgctcgcgtttccggctctgtaattacgctgaaaacaacgccgacctgggtgaaggttggaacaatcttcgttatctcgaccggtcaggtaaaaacggcgctttaccgcgtcatgggggtgaaggaggatagcaacaactccacatactccatttccgcagtacggcacgacccgaacaagcaggctgttgttgacgatggcgctgtgttcgatattcccaacgatacgatgaacggttatcgggttcccaatgttgagaacctgaaaatcatcaacaccaacagcgagacggtgcaggtaacggcgacgtgggaaactgccacggccaccaagaagctgatgttcgagttgtacgtctataccatggatgggcgcgtagttgcgcagtatgagactgaccagttccgctatgacttctacgggttggcggcaggctcgtacaccctgggcgttcgtggccgcaatgagaacggcatgaagggcgcagagactcaggttagccttgttatcggcgtacctgctgcaccgtctaacatcatctggacgccaggcatattctcggcagacatcgtgccggttatgcgcgtaacggccactacagacacgacatttgagttttggtactcaggcacgaagcagatcaccaaccctgctcagattgaggatagcgctcagttccttggacgttccagtcaatggacgttgcacaacctgaaagcggataccacgtattacatgtacgtgcgcaccaaaaacgctttcggcatgtcgccatttatcgaagcatcaggtaaagcgtcgtctgaaatccctggcatgattgattacatcgataacgccattcgtgattcagaggcgttcgagaacgtcaaaaacggcgtagatacgaacattgaaggtatcttgcagaatgcattagccaacgatgcaacggttgatcaccagtggaagcagtacggtgaagtgcgggcagatgtcattaccattcgcactacggtagcgacagtggaaggttcgctggccgacctgaccgacattgtgcaggcgcaatatggggagctgaccgccgcagtaaaccagaagctcactgctgaggtgaaagataatggcaccgccaaagcctcctacacgctgaacctcggcattgagcgcaatggcgtcatgtacaacaccggttttggcatgagcatcgagccaagtggaagtggcggatacaagtcaacggcagtgtttgctgctgaccagttcggaatttacagtggaagtgatccgggtaactatgaagctgcgttcctagtgtataacgggcaggtattcatcaactccgcattcattcaggatgcctcaatcacgtcggcgaaaataaaggatgctgcgatcactaatgcaaaaatcagcgggtttattcagtccgataatttcaatgctaccaacggatggcacttgggtaaaagcggctccggcgctggacaattccaggtaaacggcggcgatggcaacgggcgtatggagatacgcggcgaccagatcaacgtctatgacgcaggtggtaatctgcgggtgagaatggggaggttgtag

SEQ ID NO: 449937 - DNA, 855 bp, Serratia marcescens
atgagtaaaaaggccgatgttaaagaaatcctgtcctggttcgatcttagccgatatgactatttattaaatttacctgttaagcacgtattggctgaagtatattttaggcatggaatacatgaaacttttttgaataaagcaatgaaaggggatttccctgtttttgaccacattgatatacttgatgaagatcatcaaacagatggggttcacttcaatgaccgcgggataatacctttaacttatggttttctctctgaaatagttaacaccgctataagtaaaagcatttataaggttgagaatggtttcttgaatattgatgaggaatcatacaataacaccgcatgccaagcagaagtgtacagttatgatgaggggtgtcaaaacgcaggaaaaccaaaggaagtatttagtataggcatgttaatagatcttgagcttgatttaatgacggatgaagagataactaatcatatagcttataatttaccaaaatggcgcaaacgattttcaataccacaacctaaaacggttggagatggtcaaaaaattggtttttctttcattgaaaagatcaataattacagagtggtcccgttcatggatttgcaaatgtgggctatgaaaaatgatgtcactatatcctatgacatgtactcccgacttctatttcctattgaacatggtgatataaagtcagattctcacgttagaaataccgttaagccttttgctgactcagtatttgatgtgatttatcaaccagagttaagtttgtttctcgctaaaaatccatacattgaagatatgccattttcagactttctgattttagcaaaaaacaggtaa

SEQ ID NO: 449938 - DNA, 648 bp, Serratia marcescens
atgaaactgaaagatacgaccattcttggtcggggccaaactcaccctgaattcactgccggtgccaatatcgccgagctgaagttccacgaccaggtggtaattccgttcgataatggcgacgggaaaatatggttcactatggaaaccttggcagatctgcttggttatgcgaatgcgggtaagatttccaatatctacaaccgtcataaagacgaattcaccaacagtatgacgatggtgaccaaagtgaggatgaatggaataaacaatagcttacgtgaagttgacgtacgtttgttctcaccgcgcggagctcacctgatcggcatgctttcacgtaccaagatcgccaaagagttacgcatttggttgctggaccttgctgagcaagaaacccagccacaggcattagatctggaaaacctcagcttcgcctcattgaaggatttgtcggtaaaacaaatcaccgattttctcgttaaggcggaggaatattcaaagcgggagaacggtaccaagggcagcatgaaaatgcaccgccgaaaaaaagagaagaaagcgatcgagaatgcggatcgggccgcaaagcaattcatctttttcacgctggggcttgagttctctgatggtgaggtgtgcaaatga

SEQ ID NO: 449939 - DNA, 825 bp, Serratia marcescens
atgatgaccggcacttggaaagaaaaaggcagcaccgcaaatgctgccctttgggacgactgctttctcaatcagaagctctatcagtatattgcagaaccgcaggagcggcactacgaaagtttcgtaggtcagccttctggcgattccttggctttcttacgttgttcagctttgagctttcgcccgcaggcatccagcacccaggatgaaaaattggcgttgggatgctctgatttctcatcctcaatgctcgcgtcaatttcgtcgatcatttcatgcgggaagcggattcccttatatgttgatttgctgtttttgtgtccagtggccatcgtccctattttccatggtaagtgttttaacacctacgacgataccgcatgttgccctgatgatgaagtgtttaaacaaaaaatacttgacgtgtttaaacacatggcgctatggtatttaaacaccaaagaaaaggtgaaaactacaaatgcgaaaccccatagtgctcgcaacacgtatggggtctctaaccacaacgttaactggagtaacattatggcatgttcacatgatacccaaactcgccctaaatttgtatacctgttcttgggcacccctaacgaatttaccgactccacaccgacggtgcttcgtgctgaggccgataccgaggatgacgctcgtgccaaattccctcgttggacgctgacctttgccgctcaaatccgcacggctgcaccttgtcgcctgcaaatcttctccactgacgacggctttatgtgggtttacgagcagcgccaagctgcgcaggaggaagctcatgcataa

SEQ ID NO: 449940 - DNA, 603 bp, Serratia marcescens
atggcaacgaaaactattcctgaaattattcgctcgggcgaatttattttaacgccaggcatgtcggaagagggactagtggatattactgttcattcccaacacggcagagcgtttatcgcaacaatattggcgaaagatattcccaaatggattaatgagcaggaagtgagcgttagtctgttagacgccgagttaatggcattttgggttggtcaaatgggggaaccatcggcagacgatatgctgttgttctggcgctggcgttttgttgattgctggcggaattaccaaatggaattaactggctcaccttctttcacgcatgaggtcaacggaaatctgaatattttgccgatgtatccccgcgccatgcgtttcgccgtagccagccatatggaaggggccatgattgagcatctgggcgaagaggagggcactcagatggcgctaaggatgtatgcacaaatggtggcgccgccaggctcttctcagtggttgacgccattgggcatcgaagcgacagaaaagctgaaactggtatttttcgaggccatcgagatgattgacaacggcccgcttcctgaagaggtgatgcactga

SEQ ID NO: 449941 - DNA, 126 bp, Serratia marcescens
atgacaaatcaacgcgattaccaaaaggtatttgaattattggatcaaatggaagcgtgcgttaacaaggttcgcgaactaaatgaatcgcttggccaatgcacccataatgcgaaagcagcatga

SEQ ID NO: 449942 - DNA, 312 bp, Serratia marcescens
atgtacgcggttttccaaagtggtggtaaacaacaccgagtaagcgaaggtcagaccgttcgcttggaaaagctggacatcgcaactggtgaagcggttgagtttgaccagattctgatgctcgctaatggcgaagatatcaaaatcggcgttcctttcgtcgatggcggcaagatcaaagctgaagtcgttgctcacggtcgtggcgagaaaattaaaattgttaagtttcgtcgtcgtaaacaccaccgtaagcagcagggccaccgtcagtggttcactgacgttaaaatcaccggcatcagcgcttaa

SEQ ID NO: 449943 - DNA, 195 bp, Serratia marcescens
atggaagaacagtttagcaagtatgatccaactgaatacttgaccaacgaagctgagatcaatgcctatttagatgaagccatgacgattggagaacctaatttgctctctgcggttcttaacgacataaccaaagccaaatgcatggtaaaatcatgttcagaaaacggaaataacaataacgcatgcttatag

SEQ ID NO: 449944 - DNA, 918 bp, Serratia marcescens
atggttatgaacaacgaaaccctatgcgccatcgcacgccaattgctcaagcagcagcaagcctcaaattcatctatagttgaagggctattgcccacatgcagccctgacatagatcttttttatcagaccagcgctcaagagctgcgaccgacactgtacgcacctggattggtatttttattttcaggtgagaaaagtgtacagcttgggcaaaattattacgtatacaaccccagcaaagctttgttgctgactggagtttatcctgtgtacttcaacattcgcgccagcgaacaagaacctgtcattgggatacaaatccgttttgaacgcaaacaagtggcgcaattgctacaccacttgactgtgcattcagacagcacatcggaacagatggcagcagcccattcgcactcgggttttttgtctgttcaagtgactccagccatccaaacggctttatacgggttgttgaatgcactaggcaatccagtcacgtgcgatctgtttatgcccacacacattcaaacgctggtatatgcggcattagaacaagccgatgtttgtgcatttatccgcgagtggctggagcaagatggtagctttgctcaatttttacaagcctctgagtttcttttacgtcaattggatcagcctgtcactttgcatgatttggcgtcccatatgggcatgagcattcccaccttgcagcgtagattcaagcactatacggccgattcacccatgcaatatctaaaaaaagtgcgcctcagccacgcttatgctcgcctcacgcagactaactgcaccgtgcaaagcgccgcttatgcagttggctatgaaagcgtgtcgcagttcagtcgtgaatttaaacgctattatgggcagaatccacagcaggttaagcgaatttaa

SEQ ID NO: 449945 - DNA, 933 bp, Serratia marcescens
atgagcattcaaaaccaacccacagcagaacaatttgcggtcattcaagccgtggccaatttttctgctaagccgatgcgcaccccgattttaaaaacccctgctgaccacggcatggcctatgaagatgtgttcttccctgctttggatggcgtgccgcttgaggcttggtacattccagccgttcagccatctgatttgttgattattgccaatcatcctttgccgatgaatcgctatggcttggctggacatttatctccttgggacatgcttgacccgacagaaattaattttttgtttgagttaaaacacctgcatgatgctggctacaatattttgacttatgacttacgcaatttaggccgtagtggcacaggaggcaatggtgcttgtggtgtgggtcgttatgagtggcgtgattgcgttggtgcacaaaactatgtcaacgcacatccagaattgtcaaaaatgaaagtgggtctgttaagccgttgcacaggtggcaatgctcagtacgaggcaatttcacgtcatcctgaattgtttaaagatgtagcgtgcatggtcagtccaatggtggtttcaatggaagcgttcaccaaacattatgcaaattctgtggtggcaggtgctggtgattttcctgaaattttggactttgaacaagtcaaagcaggcggcttgaaaaactcagaaatgactcctcacctctttgcacccgatgtcactatgccaacttttgtggtgcaagtgcgtgaagatcgctggacttcagtggaagatggcgaaaaaacttttgagctgttgggcgcaaaagaaaaagagctgttctggattgaagggacaccacgccgttgggttggctacaactactttggcagccatcctgaaaagttaattggctggttcgacaaatacatgaaggtttaa

SEQ ID NO: 449946 - DNA, 222 bp, Serratia marcescens
atgctatccgtaacacttaatgcgcctaagtatgcttttgatactaatgagttttttgaaggtaaaggtgtcgacggtttatttatgtggctacacaaagtatatcaatttaatggctttgattctttaccaggctttgcagcctatgatgtaattaaaaacccaactattgaacaagacttcgcgaattttgacaagcacatttcccaactgtttgcttaa

SEQ ID NO: 449947 - DNA, 189 bp, Serratia marcescens
atgcagacagacctggacagctacctggatcactacaacacccagcggccacatcagggcaggatgatgaaaggacagactccctacagcatgttcattaagggtctgaaattgataccgaaggaagtgcgcactaaagtagcgcgtaaacaagacaccggtttgaggccggtgtcaggtgataactag

SEQ ID NO: 449948 - DNA, 1464 bp, Serratia marcescens
ttgactgccagtatcgcggcacaacgcattaatctgagtaccagacaggtctacaacctgttggcgcgttatcggctggaggggccgctaggattacgatcactgcgcgttggtaagcccagtaatcaccagttgccgaccggcatgaaggaactagctgggcaactgattttacagcattaccccgacttcggccctaccctcgcagcagaaaagctggtcgagctacacgatctccaccttgccgtgtctacggtacgccagctgatgatcaatatgggactatgggtgccacggcgacaacgccctccaagaatccaacagcctcgctaccggcgtgcttgcttcggcgaattgatccagatcgatggttgtgatcatcgatggtttgaggaaagagggcctacatgtactgccatcgtgttcgtggatgacgctactagccagatcactgctctgcggtttgtgtattccgagtctacattcgcctattttagtaccttgcgcgatcatctgagcgcacatggcaagccactggccctttacagcgacaaggccagcgtttttagggtgaatcacaagtcctcccgtggtgagggacaaacacagtttgcgcgagccctggacgaactcaatatcgaggggttctgtgctcatagcagtgcagccaagggacgtgtcgaacgtgcacacctgaccttacaggataggttggtgaaggagttgaggttagctggcatcagctcgatagacgatgctaataaatggttaccggactttatcgctgattacaaccgacgttttggcaaagctccattgcatgaactggatgtacatcgccccttgagcccacatgataatctggatcatatcctgctttggaaagagccaaggctgatctcaaaacggcttacgacgcaatatgacaaggtgcaatatctgttgatggatacgccttcccaacgccgtctgattggacgagaaattgtggtttatcactattgcgatgatcgggttgaattacgtggccctgatggcaacctgttggattactgcattaatgatcggcttgcaccggtcaatcagggggctattgttgataacaagcggcttggccacgttttgcagatggctcaggaagtacagacgatgcgggatgatgtgcgttcacgtagcttgccgaacaccccgacagccaaccgacgtcgtgggccacatccagacaaggtaaagccgaatcgactgggggaagaacagtattacaaggcgctgttggatgtcagtggtgaacggatggaggcacaattagataggctagaacttgccgatattgccaatgaagctacacagacagcggtaaaacgtaaacggggaaggccacaaataacagggccaagagatgaatctccgtcaccagttgttcaagatgcgataaacctgtggcagcagagagcacgatcataa

SEQ ID NO: 449949 - DNA, 1116 bp, Serratia marcescens
atgaaattaacaacaggtaaggcactgctggcgggttgtattgcgatggccatgagccaggcggccatggcgaaagacatcaaggtggcgatcgtcggggcgatgtccggcccggtcgcgcagtatggcgacatggagtttaccggcgcgcgccaggcgattgccgacatcaacgccaagggcggcatcaagggcgacaagctggtcggcgtggaatacgacgacgcctgcgacccgaaacaggcggttgcggtcgccaataaggtgatcaacgacggcattcgctacgtgatcggccacctgtgctcctcgtccacccagccggcgtccgatatttatgaagacgaaggcgtgatcatgattaccccggcggccaccaacgccgatctgaccacccgcggctacaagatgatcatgcgcaccaccggcctggactcggatcagggcccgaccgccgccaaatacatcctcagcgacatcaagccgaagcgcatcgccgtggtgcacgacaagcagcaatatggcgaaggcctggcgcgctcggtgcgcgacagcctgaaaaaacagggcaccgaagtggcgatgttcgaaggcatcaccgccggcgacaaagacttctccaccctggtggcgcgcctgaagaaagagaatatcgacttcgtgtatttcggcggttactacccggaaatgggccagatcctgcgccaggccaagcaggccgggttgaccacccgcttcatggggccggaaggcgtgggcaactcctcgctgtccaacatcgccggggccgcttcggaaggcatgctggtgacgctgccgaagcgctacgatcaggtgcctgccaaccagccgatcgtcgatgcgttgaaagccaagaagctggatccgaccggcccgttcgtctggaccacctatgccgcgctgcagtcgctgaccaccggcatggagcgcagcggcagccaggagccggcggacatcgtcaaggatctgaaaaccggcaagccggtggagaccgtgatggggccgctgagctgggatgacaagggcgatctgaaaggcttcgagttcggcgtgttcgagtggcatgccaacggcacgtccacaccgatcaaataa

SEQ ID NO: 449950 - DNA, 519 bp, Serratia marcescens
atgaaacacggatacatcttggcaaaagaccttgtgaacatccccgggctacccagtacagtacaaggtatacataagcgcgctaaggctgagggttggtcaaaagaggcagttcctgtccccggtgttagggggcgctcctttgcctacagagtcaatgacctgccatcgcatattcagggtctactcaaagcgggcatagaagaagattcagaggttatttcagatgattttccggctgatgtgccgtcacagcagaagctaatgatgttgctgggagagctatcagagcaagaaaggcaggatctagttagacttttgagccgtaagggggttgagtcgattttacttctacttaacgatttgaattttaagctattaaatctgccattagatattcgccaggcggcgcttatgcttgataaattaccaactgctaggcttgaagagattttggtcgaatgtggtaaggttcagcaagacccgactctaagcgtacaacacaagcaggccggttga

SEQ ID NO: 449951 - DNA, 1770 bp, Serratia marcescens
atgcgcaaatgtccggccctactggagcgcaagaccaacgccctcaccaccgggcaaaaagacattgccgatgcacgcatggtgctggttgtcgaggtattgcgattgatggatgacggcatgtcccgcaaaggggcggtcgaactggtcgcgaaggagtcgcaggccggctcgttgccgccaagcctccagaaagctgccgataaggccaacgcgcgcaagggttcgacccgtcacggtgtcggcaaaagcagtctgcaccaatggctatcggactacatggcggcggagaacgccagcgagcggctggctacgctggcccctggcaagatccaggtcaagcaaccggaaaccatcggctggttgcccgacttcctggctatctaccgcgacccgcgcgggttcaatattgccgaggcttaccgccgcttcgagaaatggtgggcgcaggagttcgccggtcaggaggatgtgctggaagccataccgtcaatggacgccgtgcgccgcgccatgaaaaaactgccggtggtggtctcgcaaaaataccgcgtcaccggttctgcctggcgttcgctcaatccgttcattcgccgtgattgggagcaggtgcctgttaacggggtctgggtgggcgatggtcacaacatgaagctggatgtgcagcaccctgtccatggtcggccgttcagtccggagatcaccatggttattgatgctcggacgcgctttattgtcggctggagcctggcgctgtcggagaacgtgatcgccgttgccgatgccattcgccacggtgtacagcagcacggtctgttcgggatttattactcggataacggccctggccagaccggcaaaacgctggatgccgatgtaacggggattctggcgcggttgggcatcgaagatggcggcgttgaacaccgtaccggtatccccggcaacccacaggggcgcggtattatcgaacggcccaacaagggtatccctaaatatgcggcacaagcctttgattcttatcacggtaaggatgcggacaaggaaaccgtcagggtaaggaaacgcatcgcacaatccgctatcaacgccgttcgccaggggcgcgagttgaccaacaagcaagcggccgcgttgagaatgataccaacctggcaacagctgctggacgtgattgaggaagaggtcaactggtacaacacccggcatcatcacagcagtctgcccaaggcaccggacggcaagcattacacgccggccgcctaccgccagcacctgctggaactggagcaaactgtgattgcctatccgtcagacgtcgagctacgcgagatgttccgaccgcagcaaaagcgtaccgtcagccgttgcgaggtgcagatattcggtaacctgtatttctctatgggactactgaatcatcacggtgaggaagttattgtcagttacgacattcacgacccacagacggtgattattcgcagtttggacggtgcctttatttgcgaggcagtatgggatggtaataagaaagtgcctttcgctatttcggccaaagaccacagccagaatcagcgtaccaagggcattatcaaacgagcagaagagaagatcaccatggccaaggaagagaaccgccctgtgctgaacggctctgcgcctgatttttcgcgacttctcggtgcagagaagccgcaagcgaaaaagaaatatcatatatttcagtctgatatagatgacgaaaaaaatggttctaagaagagcgcttag

SEQ ID NO: 449952 - DNA, 264 bp, Serratia marcescens
atgaaagaagatctcgatgaactgcatcaacgccttgatgctgcagaagaccagattctttcgcttaaactgctaactggttgtcttagttttgcacttgctaaaaccgcacctgatattgcggaggaattaataatgcgtatgtcctttgaatccaaccgtttccaaaatgaaaatcccgagctatcaggtgatatcaattatttggagcatgtatggaaaaacatgcgtgatatcattgactcttctaagcgctcttcttag

SEQ ID NO: 449953 - DNA, 888 bp, Serratia marcescens
atgagtacattagaattactgaaagatttcatggcggataatagtatttctcaatcggctatagcaagaggtattggtcggagcgctactgccgttaaccaattcttgaaagggaaatatgctggcgatattgagggattagaacgtgagattgaggcgtttatcgatctccaggaggaaaagaagaaagagaaccgcagcgatcttccttttgttgaaacgccaaccgccaatcgtattttagagttcttacagctggcgcatcttgatagcgaaatgcaagtgctgtatggcggcgctggcatgggtaagagtaaggctatcaatgcctacgcagagcgaaacagcggggttattgtcatcgacgtagacccaagttatacggcgagagatgtcctggttgagcttagcaaatgcctgaagatatcgacacgcggcagcatcaacgacctgatgcgtgagtgtgttcgtaagctcaagaacagtgaccggctcgttattgttgatgaagctgagcttcttcctcatcgcgcattagaaatactccgccggctacatgataaggcaggcgttggcatggtattggctggaatggacagattgattatcaacctgaaagggaaaaatggtgagtatgcacagctctattctcgcattgggtttgctttcaatatcggtgagtccctgccacaagaagatattcatgttattacgtgcgcggcgcataaagacttgtcacatctcggtgacgttatgttccgtgcttcacaggggaatgcgcgtaggctttcaaaattaatcaaacgcattgagagaatgagcactttaaaccaatcaccaccagacagagaaatggtggaagaagtggcagatatgttgattagttaa

SEQ ID NO: 449954 - DNA, 696 bp, Serratia marcescens
atgaaacgtttaacttcacttgtattggttacagttggctcctcgttcacctcgttagctcaagcggcttccggcgatcaaacgttatttatcggctattcgcaagccagtgccgattgggtcaaaaaagctgtaagcaacaatggtaacctgtttgatgctgccctccaggccagctcctcctttggcggtgacctgagcgctacgcgcgacagcaataaagaccttgctggtggttttatcaaatatcgatatgagtttgatgatagttggggggcgattgttacagccaattatctgcttggagagtacggaaacacggccaatcgcaataagccttcactcaacccagggcaaacagacagctattatttcaaaaaccgcgtcaaggctgaccacttcacgctgatggtagggcccacttatcgcttcaatccgctactgagtgtttatgccacattgggcatggcctataaccatatcggtattagcaacaactcctatcagatcatcaacggaatctcaactgataggagcggtagcagtcatgatgagaacaaattctcattggcatcatctgttggcttccaggttaatgcttggaaagatctcgttgttgatgcagcctatgatgtttcgggtagcggagattggaaaaccagcggctttagcgtgggactcggttaccgcttctaa

SEQ ID NO: 449955 - DNA, 1194 bp, Serratia marcescens
atgcccgcaggcactctaaccctaacgaacaattccgctgtagtgaaagggacggggacggcattcaataccgagctgaaagccggtgatttcatcgtgagtgtcgtcggtggcgtcacctatacgctaccggtgaaaaccgttgatagcgccacacaggcgacactgattaaagcctacgatggcccaacgcaggcgggtgcagcatggtatgccgtaccgcgcgacgcgatgaacaccattaccgcccagcttgccgcagagacggcgaaagcgctacgcggactgaacctcgataaaaacaactggcaacaggtattcagcggcaccggaaacattacagtgacgttacctgacggcagcacttacaccggcccggcctggaatagttttaccgctgcattgaatttgaaggcggataaaacagaagtcgataaaaaggccaataaaagcgacctcggcaactcggcgtcccgtgatgttggtactaccgcaaacactgtggccgctggaaacgataatcgcctgggtactatcaatgggaaaactggtggattgataaacgggatagtaaaaactcaaggggttaatggaattgtcgttgatgcgtgcactgccattggttgggatggttctaccggtataagtgaatttgttaataacagaggcgtaggtactggcgggtttagataccggatagccaatcaggctggcgggttggttactcagtttgaaatgcgccaagatggttctttcgccgcacctcttggatcatactccgttgctggacgagtacgggcattttccgcaattggtaatggttatcttgaagtatcaattgatggatctcaaaagggaataaatttctttgattcagacgtaacaatcaaagaaaaaattaatcccgtagaaccgggtgctgcatcggcggtgatacgtcaaattcgcccagtgtcatacaagtttaaagatactatttatgatggtgagaaaactgtaggtgctacgcatgatttcggtgtgattgctcaggaaatggagaagatattacctaatggcgttacgacactatccgatgggaaaaagtcgctgaatccgcttgagctgtttggtcttttgttgacagcaaataaggaaatgctggaaagaatagaccgccaagatgaattaattaaattattaatggagaaataa

SEQ ID NO: 449956 - DNA, 135 bp, Serratia marcescens
atggtacccgcgatggaaattataccggtgcaagcagtggttctggtgccgggggagcagtactggttaagcgcgaaccctatgaagcatatgtgccaagcgctgcgttttttgacgttaataatggcgtcataa

SEQ ID NO: 449957 - DNA, 3108 bp, Serratia marcescens
atgctggacttacaaaaagacgttgccctgcttttttacgcgacgctaggaaaaaaagccgatgataacgccttaacttactatgccacccaactgcagaaaggtgtgtgtacgctggatgagttagccaatatctttatcaactcacctgatggtcaccgccgatacgacggccttagtaccgatgcccaactcaaatatctctatcaaaatatcagcggcaccgccccatctcaagccacattgatgacattgaccgctcaggttaatgaggggaaatcgttaggacagatagcccaagagctcgcgacaaatatcaggtcctattccggcgctcagagcgacagcctacagcagcaatatgcagaacatatcatcaacaccacgctttataacggttctacacagtttgatacgcattcgtcagcagccgccgatgtgcaaggcatttactacctcctcggcagcaccatcaatgcaaccgccgtcaattattggagcggcgccctcgcaaatggcagcctcactgcagctcgtctcgctacttatatcgccacggaaaagcatgatacgaaatcgttgaacaatgaggattttgtaaaaaaaatctattttgaagcttttggcactcaggctgacacgagcagcattcaatactatgtcaccggtttgaacaaccattcggaaactcgcggtgatgtcatcatgcgccttatcgaaaacatccgcagcgatacgcttcatgcacatgccaaacagaatttccttaccgcaacgcatgtctatgcacctggcgaattgcccgactcccgctatgtggaaacggtaatgtccatgtatctgacgatcgctaacataaccgcgaccgcctccgctatcgatacctacagcaaataccttgccagcggaaaatcggcgggcgcgctgctgaagatgctcgccacatcacctttattcagcgacgccggcaattatgaaaaaatctttgcgacgctataccacgagacgctcagcgaatccatgtcgcgggctctgctgctcaaggccggcaacgaccattatgtggccagcgcgctggttttagatgccttccgcaacggtgagtatcctatcgacagtaacaatgcccccaacccgacgttagtcgcaaactatctcgccactatcgcctcaacattgggttataaaacaacggctgagctcaatatcaccgctgatggcaccttgacggggacggtgaataccggcagcgaacatgttttaagcaacgccgagctagccgttctgcttaacgtatccctcaacgtcgatgcaccgattggcgtcagttttgatcattccccccatcttcgtgaagtggtattgcagggaggaatgccaaccaacgacgtcactttatccaccctgaaaaacaagtcattcgctttacgcgtgaatcttgacgataagccctggttccagagccaggacaaaatcgtgtttggcgcggagaaagacaccgtggttattacggacagttatcatattgccaccggcaaactccatatcgattttggcgatggcggtgctaacctggtctggggcggcaacggcctcaataatggcaccaacaaagtcagcgccagcttcaccgctcaaaacggcgttgctgccgacggcacactctctgccaatctaattgtgaagaatattttgctgacaaccaccgccgacggcagtatcagcggccaaatacagagcaatgtcaatcaattcctctacttccccctgctcgagctcgctgggtaccgaggaaccggggatatttatctggatgggaaatgggtagccaccgagggcgcaaacgtcttcgactacggcgtcatttatcaagcagccagcgttcacaatgcacagtacaccgtgactaacctgcaacaggattcgcatgcgcagaagagccccgacaatcaacgttggaccggtgtcgatggcttcaccctctccggctttgctgataacgtgcgcgtcatcaacctttccctggatcacttgccctacctatccgtgacaggcaatgcgggagcccaaagcaaattaagcctcgaaatggctcccgacacggccgctgcgactgactatgtacgctggggggtgaatattggcaatgcggcaattgagaatatcaatgccggtacgctcaactttgtcagccacttcgccggccaacaaccgcatgaagaactgcggttatattccagcggctctcagttaaataccgtgtcgctgtcaggtgccgacagtcatctctcaatgatttaccttagcggagtcagcaaactcaatgtcaccgtacaagcggatttcggcgatagcctcaacaacattgtcattgaacccattatcgatccgttaggcgaaggtattccccgcattgaggttaatctgaccatggagaaaggcggcagtggcggaggtgaattctacaagctgctttcctcgctcagtaatcacagcgtattcgacggcattatcagctcactcgcgggtaaccaaatcaacattgggtacaccaatagccagacgctgaatgttatgggcaataccacgctcaatgatttgaaaatggcacgggagtctatacacgacactaaaatcaattttgcacatagctccatcgacagcatggtcactatcaatgcgctttcgtcaacagataccatcacagcaggtaacgccggccagcaatgggtgtttaactcggggaaaacgggcaacatcgccgtatacggaagcgtaaccaaaatggccgatctgaatacgctcttcggttctctatcggttggcgggaatacccaggcgcatgatgtctttgcacaggcgctggctaaagtcacttccggcagcagcgacggacaactacaagaggtgggagtgataaaattgggtgccaacgcctacgtgattgtcgatagcaatcataaccagaagttcgacaatcaagacatcattttctcattgggaaataaggacgtttacgacatagcggctaacttgcactatcaggcacccgccataacggtaaacggcaacgcgcacgcgattgcggcgtcagaggccctgttctaa

SEQ ID NO: 449958 - DNA, 435 bp, Serratia marcescens
atgtttgattcgattctcgtcgtatgtgtggggaatatttgccgttcgccgactggcgaacggatgttaaaacgtcttctgccccataaaaaaatcgcctctgcgggtctgggggccatggtcggccatccagcagacccttcagctatggctgttgccgaacaaaacggcctatcgctggagcaccattcaggtacccaactgactaaagaactctgccgcgaatattcccttatcttggtcatggagaggaaacacatcgacggcgtctgccgattggcgcctgaagtcaggggaaaaaccatgctttttgctcactggcttgcgcaaaaggacatccccgatccctatgggaaaagcgccgaggcgtttgatttcgtctatcgccaactggacgaatcggcaaagaaatgggcaactgttttaaataaataa

SEQ ID NO: 449959 - DNA, 1011 bp, Serratia marcescens
atgcgttggctcaataatgcaaggatcatcgccatacttgctgttgttttattgcatgtatcctcgcgtgtcataacgtggagtgagcttggttcaaacgattggtggtatgctaatctctacgactctctggtgcgctggtgtgtccctgtctttgtgatgatttcaggtgctcttttgctggcaccagagaaagcagagcctttaggtgtcttttataaaaaacgtgcatcccgaatcctttcccctctggttttttggtcacttttctacatgctttgggatttttcaagaaacatgttaaaaggtgatcctaaatctattcaggagattttttttgctttgctttcgggaaaaccctattttcatatgtggttcctctttatgattctggggctctattttgtaacaccctttatcagacaggtcgttgctgcatctgatcggaaagcgttatggttgctctgtctgacattgctggcaatatcctgtttaaactcgtatttcagcaacccacatgacatggttattaactctgtttttattgtatggtttataccttacattccttactttatcctgggctatcttttgaaagatgaaaggatattcccttccattgtctggttgtgtttattcgttgtttcgactgcagtaacggctttgtggtattattactgcgcggttaacttaggtaatgtgcctgggctatacccatatacatatctttcgatcactgtgattattatgtcgatttcagctttccagctgttaaaggttatcaatatacccctcctcagtgaccaccagcttaaaacggtggctagtctgacacttggtgtctacttgattcacccgattctcttggatgtttcaaacgcactggggctgaaaccggtatcctacttacctctgatcactattcctttagcgactatcgttgtcttctgcctctctttaggatgtgcttttgtctgcagtaagctccccctcttgaagcgaactatctga

SEQ ID NO: 449960 - DNA, 666 bp, Serratia marcescens
atggctatttttcgtgaatatctatcaactcttattagtcaagtaaatattgattggagaaataaacgaaaagaaaagaaagaaaaagaacttgaaatatctacaggtattgatacttcccaatggatgagtactatgccagaagatattaggcaacaaacatcaaagattctagattttttgggtgatgaggatgctcttgaaaaatatagtcccgttgtcgaagccttacacactatagttcctgagtacccgatgctacattggcgttatttaaatgagaaagtaaaagaccgaatcaaaacattttatacaaataggcaatatggtatagctgcagatcaaggaacaaagatatattgcgaaataattcgcagcctaacaggtttaactgttgacggtacagacttagttaatcaagcattttctcctgcaaatcctcttgtaaagatatgtgatacttctacgaagacaggtttgagcatgcaaaatggacaaatgtctttatctcgaggagtaatagagtcattcagaaatcctgcagcacatatgccgctagataccttagttccaaataattactctgagctggactgcttaaacatcctgagtttaatatcttatttattagaaaggatggaaaagtcagaaataataaaaaaataa

SEQ ID NO: 449961 - DNA, 1260 bp, Serratia marcescens
atgttaactgacagcaaagtccgatctgcgaaacctctcgcaaaatcttataagctcactgattcgcaaggcctgtacctcacggtatctaccagcggcgctaagctatggtatttccgctatcgtttcggcggtaaagaaagccgtctggcctttggcccctatcctcagactacgctggcggaagcccgtgaaaagcgcgatgcggcacgtaagctgctggcgtctgggctcagcccttctcagcttcgtaaatcgaacaatcccgccgttgaggaatcccgcacctttcaatatatagccacggcatggcacaccagcagccttaagctctggtcagacgcacacgccgataaaatcctcacctgtctgaaacgctacgttttccccgccattggtgcgatggatattgctcaggttgaaacccgtcatctggcacagttggttaaggccattgacgacaaaggcgtgcatgacgtcgccggacgggtacgccagcatctaaccaaaatcatgcgccacgccgtacaacagggcgtcatcaaatacaatccggcttacgatctggacggtgtcgtgaccccggtggtgacccaacatcaccccgccctgccgctaaaacgcctgcctgaactgctggcgaagatggaaaactacaaaggccggatgctcacccgtctggcgctggagctgaatctgcatgtttttctgcgctccagtgagctgcgttttgcccgctgggatgaattcaatctgaaagcacatatctggagcgtacccgcccagcgagaagcggtaaacggcgtgaggttctcagaacgcggagctaagatgaaggatgaacatctggtgccgctgtcacggcaggcagtcgccctgctgaaacagattcaggcgctttccggcgaatcggtcttcgtttttccgggcgcacatactctgaacaagccgatgagtgaaaacaccatcaacaaagcattgcgcgtaattggctatgacaccaaaaccgaaatctgtgggcatggtttcagaactatggcttgtagcgccctgaacgagtccgggcgctggtcaaaggatgccattgagagacagatgagccacaaagaacgcaacggcgtgcgggcggcctatgtgcataaagcggagcatctggaagccagaatcgaaatgatgcagtggtggtcggactatctggacgtcaaccgcgaaggatatgtcgcaccgtatatctatgcgcggagtcattcggctggctaa

SEQ ID NO: 449962 - DNA, 195 bp, Serratia marcescens
atgcctacaggttctaaaaacaagcgttcgaccacaaagggaattcgcttcccgcatgaacttatcgaagaaataaacgccagcgttgcgcaggagaaagcggaagatcccgatgctaatttttcagcctgggttctggatgcatgcaaccaaaaattggcaatgccaaaacgcgataagccagtgaaatcctaa

SEQ ID NO: 449963 - DNA, 342 bp, Serratia marcescens
atggctgacaccaatagtaacacgggctcgtcttatcaatcactgccggattatgagaaccgttactccgccatgagtgccgcgctggcgcgtctggacttttcacacatggacaatgacgaactctcgcaggtgacagagtattgcgccgaaacacaggcagggctttgccattgcctgaatttcattggcgatgcgctggttacttttgccgataatgacgtgtgcgaatcgacaccagaaagcttgtgccagttgggacatgggttaaccgcaatcagtttactcatccctgcccttaccacgatgcaaaaacgcgcacactcactcaccgccagataa

SEQ ID NO: 449964 - DNA, 744 bp, Serratia marcescens
atgctgatttctgattaccgtgaacgccgggcgcgtagttacgaaaaaatgcgacttctgctcacctttctgaaagaagaaacctacagcgattttaaaaccctgatgctgctttttgattataaaaatcacaagccgctgtatctgttgctggcaaaagccatcgacatgggattcattcaaaaacagacgttttgcacaagaatggaaaaaatctcactatgggggatcaccaacgacggattatccgttgtcgtcacaccccatgaggatggctttcctgcgcggtttgagccctcgaaagtcactggctggacgctgatgcagcgccttgatcgtcagctagcacggctcctccttgagaagaaaggcgcttatgggtggatcagcggcgctgattcaacattccgcagccgctatgaggtatatcatcgcccggcaggggtgataacgttaccagacggaaccgtcatcgccattgagactgaacgccatctgaaaaccaaggcccgttatcaggcaattatcacccaatatttgataactcgtactcaaaaactttggatgtacgtcttctacatcgtgccagaccagcagaaaaaactggctatcgaattgctgttcaatagcatgaaatacgtcatcgttaaccgtcaacacatcccgctggaaacgaagcaccgcaatgtttttcgagtttatacgtttgaggaacttaaacggttagcgttaaattttgactaa

SEQ ID NO: 449965 - DNA, 831 bp, Serratia marcescens
atgtctgcctcagatgtagattttgagttaaaaattgactcaggaaaaactttagttgatatggaatatggccttgaaactatgtctggattttcaggagctattgccataacagcagattgcatcttgtctaacgaagtgccatctcaaatgaactactctgccaatgtcagagctaaactcatgagcgcttgtcttggttcatatatacaagacttcaaacttgttgtgtcggatccagtaaaatctgccaaattagcgcaaataggaaactctgtattgtctgagttaatcacatatttcatatgtgaaactatgtatgttgagcccccagctttgactaaaaaagctgagcgattactatctaaacttgaaaaaattgaaagcaaaatcattgacagaatacatgagcgagttaaagatatgcacaaaatatcgcgctcaagtaaataccctgtcattttgaaaagaaagactcaattaagaacctttaaattattggaaataaatgaagcaacatcaagcaatctttttaatttaacaacagatcagcaacctgaagaaattaatgccattatcaccagatttaattcattcactggtaatggtagattgcttgccgatggttttgctacaacaataccgttcagtttttcagggccttacagtaaagtaaagtcatcaattaaaagaatgatgtcagagaatttgcataataataatgcaatcgaagatgaagatatcgttagattaataattactgcaaaagcaagaagaaacacatctggcgatgttgttaaatatcttattgatactgtggtaaaaccatga

SEQ ID NO: 449966 - DNA, 627 bp, Serratia marcescens
atggttgtggagtcagttctttcaacagaaccaaaatcactcaagcatgaatcaaacatacgccacagacaaagcctactcacagctcctcatatgcagccgttaacagcgtatgtcaaaaatctacgtgaaaggcttggtgacaatgtattcatccctgactttgatcctttagatggtgggatcaatgccgaatttattttcctcttcgagaaaccaggtccccaaactgactttagaaacggtggttctggttttatttcacgtgataataacgatgacacggccaaagcaatcttttgctttatgcaaagtgtagatctggatagaaaacgaacgctgctttggaataccattcctgcttgggataactcaagagcatatcagggcctacatgtccgtaaaggcattgaaatgttagatgagctactaccattactacccaacctgaaaaccataattttggtaggaaaacaggcccaaaaagcgaaaaaaggactaaaggctcgtggttatgatgttgcagaatcctaccatccctcaccacttgtcaaagctaggtatcgtcagagatgggagcaaatcccggcagcgtgggaagatgcgatttcaactaacaaaagataa

SEQ ID NO: 449967 - DNA, 327 bp, Serratia marcescens
atgcatcgactttatacctatctctgcggcattcacgcacgctcttcacaggtacgggcaatcaacaaaacggaaagcgtcgaacgcttctttgatgaggaaaacgtcattgaagagcgcgaaatactttatgaattcagcaacggcgtcaccctcttgtgcaagatggagtcggatagctttcaatccgacgatctgtgccgcgaatgctggataagctacgaagtcgtacacgacggcggccatgccatctcgccgagaaaaaagcagttttataatcgctgccaggaagcgttctggatgaaaatgcaggcggagcacgcctga

SEQ ID NO: 449968 - DNA, 1221 bp, Serratia marcescens
atggtgcggactacacgccccctcaccaacactgaagtacaaaaaaccagagcactcgagaaagaccttacgctgcatgacggagacgggctctttcttctggtaaaagctaatggcaaaaagcaatggcgcttccgttatcagcgaccagcaacgaaacagcgcaccatgatggggctaggcccctacccagccctgtcacttgccgacgctcgagcaattcgtgcagattatctttccatgctagctaagggtgttgatccgcaaaccaaggccgagcaagcagcagaacagcaccaaatcgctttagacagcattttctcaaccgtcgcggccaattggtttgcccttaagcgaacaagcgtaaccgaagattatgcgaaagatatctggcgttctttggataaagatatttttccaagcatcggaggcattccggttcaggaaattaaggcgcgaacgctgattgaagcattggaacccattaaagcgcacggtgagttggagaccgttcgccgcttgatacagcgcatcaacgaaattctgatatttgcggtcaatacaggtctgattgatgcaaacccggcatcggggatcggtatggcctttgaaaaacctaaaaagcaaaacatgcccacactgcgaccggaagagctaccaaaactgatgcgttcgctggtttcgctggtaatgtcgaatctgtctgtttcgactcgttgcctgattgaatggcagctcttaaccctagtacacccttctgaagcttctggcacccgatgggtagagatcgaccttgcctcaaagctctggacaatttcatccaagcggatgaaagcgaatcgtgagcacatagttcctctatcccctcaagcaatagatatactggaggtgatgaaaccaatcaatgctcaccgtgaacatgtttttcccagcatgaatgatccgaaactaccaatgaacagccagaccgcaaatgctgctttaaaaagaataggatacggtggtaaattggtcgctcatgggttacgttccatagcaagcacagcactgaatgagcaagaatttaattcagatgtgattgaagcaactcttgatcatgttggaaaaaatgaagttagacgagcatataatagatctacttatcttaaggcccgtcgtaaatcaatgaactggcgggctttatttgtgaataaatcaaaaaaggaattattatgtcattaa

SEQ ID NO: 449969 - DNA, 1113 bp, Serratia marcescens
atgtcattaattgatgaagtaaatgatagaagaaaagagattcgtacagatggctatgctatttctattggagagtggctatctttgtacgaaaatggtgaaatcgacatacatcctgaatttcagcgtatctatcgatggtctgaggcacaaaaaaccaacttgatagaatccatcttattaggaatacctgtaccccctatatttgttagtcaaagagcagatggcgtatgggatgttgttgacggtttgcaacgactatcaacaatatatcaattcattgggcagttaaaagatgaaaataacgaaaccattccaccattagttctttcaggaacaaagtacttacctagcctagaaaacaaaaagtgggaaggtgaggctgaacttggtgatgacgatcctaatagcatcggtcaaaatcttagactcacaattaagcgttcaaagctaaatgttagcattatattgaaagaaagcgatgaaactgcaaagtatgatttattccagagactaaacacaggtggttcaagattaagtgctcaagaagtcagaaattgcattttagtaatgttgaacaaagatttttattcttggctatcggaacttgctaaatttgacaagttcactgaatgtacagccttgagtgatagggcaattagtgaatcctatgatattgagttagccctaagatttattatattctcattgattgaaccgattgatttagattctatgggtgatgtcggcgtattcatcactgaaaaaatgcgtgagatttgcgtagatgatagcttcgatattacatattggggcgacttattccgtgaaaccttcacaatacttgctgattcttgtggtgataactcatttaaaagattcaacactgcaaagtctaaatattctggaggtttccttgtctcgcaatatgaagctgtttcatacggccttgcctataacatttcaaaaggaaccgctaccgaagatataaacaatcttgtatctagtctttggtcaaacaaagaattcacggattggtcaggttcaggaatgactgctacgagacgcctgcctcaccttataccgttaggtagagatgtatttaaaaaatga

SEQ ID NO: 449970 - DNA, 645 bp, Serratia marcescens
atgataaaaacaaaagaggagcttattgataaaatcgcagcagaccatatctggagactgcgtgaaattaacgagatgaaaaatctcacccaaaaaaaacattcatctacgatacaaaaacaagtgctatgccgtgcaggcatagcactaatgtatgctcactgggagggttttgtaaaaaaaacaggaacctactttctagagtacgtttctgcacaaagacattgcattgaagaactaaaaagcaacttcatcacactcattgtaaaagggagaattgatagtgctcacgcatcgaaaaaatactccgcattcgatgaagttacaaaatacatcttatgcaatcaaaaaagcagggctcgaatcccagtgaaaaatgtcgtagacacccagtcgaacctttcgactacggtacttaaagaaatcctttggtgcttaggcctagactataatttatttgaatcaagagagaaattgattgatcagaaattagtaagcagaagaaatcatatagctcacggccaagaaattgaaatagaattagatgattttaatgaaatggtagacgaagttctggggctaatggaaacgttcagaaacatgcttgaaaactgcacaatcacagaaggttacaaagcggcataa

SEQ ID NO: 449971 - DNA, 915 bp, Serratia marcescens
atgaaaactgacttgtttatatcgtatgcatggacttcagactctcatagggaatgggttcgattatttgcaagccaactcgacctaattggttacaacgtcaaaatcgatgaggacgttaactatggttcaagtttaaatggatttatgaaggatgttaccgaaacctcccacgtattgcttgttgttgatgaaaactatgtcgatcgagccgatagtaagccggaatcaggagttgggttcgagaatagatggataagcgaagcttttatgaccaaaccagatacatggttgtcagttatctttgttcgaaatcctgagcggaaattacctaactggctcaaagagcataaccctaagggttttgacttaaattctgaacctatcaaaaacaaattttctggttctcgacagatagaagacatttggcgctggattgaaggattacccgcaagcagaaagcatagcgtttcattagccgtccagcgacaacgcgcagcacggattgaaaggattaatattcttcgtgatcctgcgcagtatgcaaacccggcactaaatggaagtgaattattttacttcaatgacaaccgttactatacggttggctatggtaactaccagtttaaaattgcttttagttcatgtgcgcataatagcgtttacctctacaaagacggtgggctcgaagccgtggggctgattactgctcctgattatgatcctcttactgttgactcttttctcacttctggccgtacggtttcacctaatgtgggccaaaaagctgtattgctgaactccagtggagttctatgtgtaataactattgatgaagtgcaacgtgagatcaattcaaaagagtatgttccccagcatgtgaagttctcttatgaaatatttgaaaggcattag

SEQ ID NO: 449972 - DNA, 513 bp, Serratia marcescens
atgcaactaatgaattttacagcgattgacctcttctgcggtgcgggtggtttaacatgcggtttaagagatgcagggttcaaagtccttgcaggagttgagctcgaagctgttgcggcaaaaacttaccgagctaaccatcctgagcatgttctctacgaagccgacataaggacattagaccctcaggagattatgcgagaacttagcctgcaaccaggtgagctggacttgttggctggttgccctccctgtcaaggattctctactcatagaactcgcaataagtgcacatctgtcatagatctacgcaatgatcttatctttgatttaatgcgctttgttcgtgcttttgagccaaaaactgtaatgatagaaaatgtgcccgctcttgctaaagacgcgcgtattactcaagtcctcaatgaactacatgaacgaggatattttattggtgaaaagacgctgcaagttaaagatactgcggtttatggtgttacccaagacagttaa

SEQ ID NO: 449973 - DNA, 1050 bp, Serratia marcescens
atgaaggtaaaatatattgaagtaaatcagccaatcggcactttctacttaacatccataagggctattgatttactcgatatagtcagggttgatcatcgtagagattttgagtttggtgtgcaaagagataaatcgtcttccagggtatcagacatcgcaaaatatactggagagcctgatgcaaccttccctacacctattattatttccgtcgacgaatcatcacaaataaaaatggatgatatttatttctacttcgaacgtgaagtggtcataggtgatgttatagatgggcagcacagattatggggaattaagaactcctcaaatgcaaagttatttgacctgcctgtagtgttgatgtttaaccttacaaatgaagaaaaggcatatgtcttttcaataataaatagtaaacaaactcgcgtaaatccatctatcgtatacgatttatttgcattggcagaacgaagaagtcctcaaaaaacttgccatgaaattgcacgaggaatgaatagtaattccgactcaccatttcacaatagattaaaaatgctaggtaaaaaggaaaaagatcaagataatgcttcgctctctcaaagcaccttcatcaaatatttaatgcaacatatatccaaaaaacccgatgatgatgcaagaaagttaaaaatgggtgaagaactagagactaatgataactgtgtattaagaaactactttattgaagaaaatgacgttgtaattcaaaaaataatattaaactttttcagtgctattagggatgtctatgaaaaagagtgggagacaccgcaagagtatagccttagtaagttaacaggctacgcagccctaatgaaagctttcccatatctttatgaaaaaggtgtagccaagaaaaaactagatcatgaatttatgctaggcgaagtaaaaagaatgaaaaggctacttgattcgaaaggagtgacattcaaatctggtgactttggaacaagtgaagcggaaataaataaattagcaaagctaattattgaagcacttcgataa

SEQ ID NO: 449974 - DNA, 390 bp, Serratia marcescens
atgtttaacgacctggtcaataacttaggtatcgataagcaaaagatcgtcaaaataaataacccattggattatagatccatcgtgaagctttctgtagatgaaagcctgagtaacctttacgataaaagtaaaacgaaccttcttagcattggccgattaacttaccaaaaagggttcgatcttctgcttgaagcgatgtctaagctcgatgatgaccgtttccatctcacaataatcggtgatggcgaagacaaggataaactgattgccttaagacgacaccttaatctagagtcgaaagtgaccttcgtttccggtgttgataatccttatccctatatgagacaggccgacgtgttcgtttccagttctcgttgggaaggataa

SEQ ID NO: 449975 - DNA, 858 bp, Serratia marcescens
  misc_feature (701)..(710): n is a, c, g, or t
atgagagagcgaaacacattgttaaaaatgaccagcgcagtacaagcaaaatacaaaaaaatccatggttatataaataaggggatcattaaagaaaatgaagccgttatcatcgtagttaatgattcattattattcccactaagctcccgcatgataggtctatcctgtgatatagccaaaggatgcagcggtctccctttagttgtggaagctttgctgggggtgggacaaagctattggcaacctgacgaatcaggcactaactatcaaatggtgagaagtgaacgcccagtgatacacaataacaataatgcagaaattgaaacaaaccgtttcttaacagagaaatacagtgatatttctggagtttttgttttaacactaagagaggattatggtttagctgaaacaatatacacgcatccacgtcataagcaaaatagagggcagttacttacaaaccccaacacaagcagagtatttaaaacaagcgatttatcagcttatgttatcgatcatgatgaaataaaaaagctacttaaaccatcgaaagaaaggccaatacggaactctatcacaaaaacgactactggatattatcttgatatgattaattatttaaatagattgagagagcttttctttgaggcaggaatacttattgaagataaagaaactggtgaggtaactatatcagnnnnnnnnnntgaggcaggaatacttattgaagataaagaaactggtgaggtaactatatcagaatacggactttcagtcggaatagataattttgaattggttttggatgattatggccggttatttaagatggttccagtattggtagacagttga

SEQ ID NO: 449976 - DNA, 417 bp, Serratia marcescens
atgctcgctgttaaagctttccttgctatagcggtgtacctggttaaacgcttctcgaatagcgacgccacgttttttcaactcaacgtgcaccaagggcaacccattgaccagaatggtcacatcgtagcgattggcataactaccggtttgttcaaactgttttatcacctggagcttgttacgggcgatattcttcttatccagcagatagatgttctggatgcggccatcatcaaaaacaaaatcatagatatgatcatcgtgaattttacgggtcttatccacaacggagtcgttgggcttatcgaggtacatttccacaaaacgtcgccattcaccgtcggaaaattgcacatgattgagcgtttgcaactgtacccgcacattaccaagcaaagcctcagggttatttaa

SEQ ID NO: 449977 - DNA, 357 bp, Serratia marcescens
atggacaataagctgagcgaactgagcaagccggttgcagaaattaaatgccacgaagacttatcactgagcattgttaacgtgcgagatggattcagtcttgggcgtcatccggtctactcgcaagagtacgtctccgccctgaaacacgaatccgctgttaactgggaagcggcagcatcgatgaacgttgaaaaccaggagctgaaaaagcgcatcgccgagctggaagccaagctggctacgccggtgcagttgccgaccacttccggccgcctgggcgtggcatacacccgggtaattccagaagttatcgaagctatccgcgccgctggcttcatcgtggaggggggatga

SEQ ID NO: 449978 - DNA, 210 bp, Serratia marcescens
atgagcaagacacagatgcagtatgccaaccgagcttggcgtaaggctaccgccaattggggcatgaacaaaaaggcacatcgcgacttttgccgcgagaacgcagcgataaccgtagatgttcatacctccgagggtttcgacctatttctgaaccaggacgatgccgattatgcggtgcgcgaagaactaacgtactggggtgattga

SEQ ID NO: 449979 - DNA, 432 bp, Serratia marcescens
atgcatgtcggcgagctctcttttctttctgccgataagcagctcaatagcctcaacctttgctcgcgcttggatagctgcaagtgcggcgtcagtggctggggtttcggagttgaacagctcatcattggcaatcatcgccactactccggcttgtcctttgtcggttacatccacatgttccaaaattacggaaagcgcgtgcttaaagcctgcattctccacagccagcgcattaactcgatctgccagcgcatcgcgctcagccttcagtgcgatcacttcctgctggtgggcatcaaatcgaacatattcaccgtgttcagcttcacgcgcgaaagcctcaaagcgcactgcgtgcattttgtagtcaggggtaaaccgctggatggttgtcattcgtcgtctcccagcacccagcggagcgcctga

SEQ ID NO: 449980 - DNA, 501 bp, Serratia marcescens
atgagttcgaaagagcagttaaaagcagcattggaagctaaagatgtacagcttgaaacccaaaaacgtgaacgagaagaaaggttagaagtggaaagacagcgagctatggcccatacagagcagtatgtaaaagcagtgggcaagcttaatgaacaaattgctaaatgggttgaaggtcttgattttcaaattacatctcagaatcgtcatttgtcagacgggccggagaactacgatgcgattggcctaattctcattcgtagatctcagtttctgagttttatcccgaaaggtaaaagtacgggtgaatatcttggatctattacgttacaacccaaagaagccaggcaacgcggaagtttatcattgcagttagcttcgattaacagcgatggctctggaagctggttcttggttgcttcagtcaatggagattctaatgaatttcctttcgacgataagcgattctacgatctgctaaaaacaacatttgcctaa

SEQ ID NO: 449981 - DNA, 504 bp, Serratia marcescens
atggagttaacgttgtcgttagggtcagtaatcacggctggtgtgggtttcttaggtgtttatgtactgatgccctttgcattaattctgcgggattacttcctaattaaattcattaataaattttttctcaatgagagtttttggcaagatttaatagtgttggaaagtgatagagcacactatgattatttttacaaaaaaaatacagagattaaacacccaataggtggaggaaatccggagtgtaatatcgacggaaaaatcgtctcgttagaggcgtttagtagttttgaacatgcgagaagctttcatgtggaacgcatggatacgttgtggaagcgaatggaatttaaaaataacattgctttgaagatgtttaaatattttaaactgaacgagtatgagaatgtaataaaaaataaatccaaagaactctacgataatgcaattaattcaattaaacgaaaagaggcttctaaggggggtggaagtctttcataa

SEQ ID NO: 449982 - DNA, 1707 bp, Serratia marcescens
atggctagtctttttgttgttcccgaaaaaggcaatcttgtgcaacgactgaggttgtggggtttactggcaattatcctctccggggtgatggccacacttatcctccgaggaacatatcaggcttcctcgcaggccagacaaaatgctctgattatccaggagttatatcagctacttaatgcagccaatctgctcgcggctgaacgagccccttcgaacattttactgagcgccgggataagggacctggcggccgccagaagtcaagtctctcaggcaagacaaatgacggacaaagcattgcgacaaatcatgcctctcattccggatgctcagcttactgttctgttgaccaggctacaggatgcccgaagactggttgatcaaacttctgcagaattgtcccccgaccaggagcagatccagaggacaatcaacagtatgttcgctgtttctgatacgtttcgtgacatcgtttcgagcaaatcgtcaggatggtttgaggatgacacatcactttccggcccggtgctatgggccgtttccttgtctgaacttcgggatgccgccgggcgcatgggctcctggctgattgcacctgtttatacccataccccattatctcctcaaaacaaagagggcctgaaccggactgatgaacaggttaatatgctctggcgctttctcgcgcccgcaggtgaatttcccgttaccggtaccggccgtctgacagcagcacgcaatcaggcccggaaacatttttttgaacagggacgtccccttatcaataagctcatttccgaagggatgaatgacagtggccggtattctgtcactgcggttgggttaactgagagctatgtgaccactctgatttatcttgaaagctggcagcatgaatacctgctgcagttactgtcggattataaaaaaaggtctgaaaaagaaaccggcttgtttatcatggtcctgatagccatgctgataacggtaatcctgatatctgcaaacgtactggtggttcagttcagagtattgcgtcccttgctggaagcccgggaaatcattgttggaatggctgaaggacgccatgtgccctcaacctatcacaaccattcccgcgagctgaaccagttattccattctctggatatccttaaaattcatctggaagaacgccaggaactgacgcaacagctgaaatcccttgcggaaacagatgcactgacgggtttgtttaaccgacgcatttttgagagtaccggcaaccagtggatttccggtggcatcccaggagagtatgtttacctgatcattatggatcttgattattttaagcaaatcaacgacagccatggtcatcctgcaggagatcaggtgcttatatcaaccgcctcaattctcaggaagactatccgtgaagatgatattgctgcacgcatcgggggggaagaattcgctgttcttatgagaggaaataaaatagcagaggccaaatctctcgcggcaaggatacaaagggaaataaacaatgctgtcattaagatatctgatgatacatcacttaaaataacgtccagctacggtattgccggaacatcagcacagcattcatggccacaactggttgctgcagcggataatgctctttatgcggcaaaacggatgggaagagactctatttatatttatgaccgggaataa

SEQ ID NO: 449983 - DNA, 927 bp, Serratia marcescens
atgccaaaaaacactttaatattaacaatcgataataaaatgcccgcctgggttactatcccagaagccgtcgagatcgcgacagaatcagcaaagaaaaagatctgccccagcgatatttatcgtcatgctttaagtggaaacattattctttcaatttatttccagtcgccgattatactcaaaaaaatacaaatcagcaatggaaagttaaaattcagacaactggaaggggaattgattgataaactatgccatcttgacaacagagggtttacttacggggaaaatttgattctgagtaccgaagataaatatattcatcccatgcaacagattattgatacgacactagtgggttatgaatatgttttgctacagagaatgctggcgcaggaacttcatttttcccaaccgattattggagcaaaaactgccaactatggcgtaactgttaattttctaggagagacttatcaaatcttcgagaagatgacctggttaaaacgtgcgaaaaaacaaatttctagattacctcaagatatctcgcataatattatttctcagatatctgaaaaccccatcagaaaatatcagcaaaaagggtacttccctcttcacgacttaccaccagatgctcgttttgtcatacgtcaggaggaagttgagaaactaattaatttatatataaagaacaaaggatttcctaactcatcaacacgtatgacaacccccttatcccgtttattctggctggcctgcaaacataatgatgctatcagcccactactgaaacatccctataaacttctctctatcttcgaaatatgggcatcagatgacggcatcacagaatctttgagcgccgaaactttgaaaaatgctctggagcgtggtgctcctccctcagcattcttatcccgctaa

SEQ ID NO: 449984 - DNA, 585 bp, Serratia marcescens
atgatcccgtcactgaattacgccgtcttaaccgacgctttaaatgctctcaaagagggcgatattcaccactgtgagtctcttggattcacgtttgacgaaatgaacgcccttaatctgttatcggttgatgaactgtttatggttagccgggctacgacaccctttgtttccgtcagtatccgccatgatgttctgcttcatttactggctctggcccgacaggagcacaaatgccagaaacagattaaccgtgcgatccgactgggcgggtcgatagccctgcttaaccagtattttggtctcacctcaaacgaaacctgccttcgccgcagattactgggtgtcagcgtgccttatggccggacgcctgaaccggacgaagagacggatgccgaaatttggcggcaatggcaaaaatgtcgggtggataaccttaaatcctccgacgcgctggtcgccatgatgcaggtgacggaaaaactgttaccggacaccgaaggtctgtctctaaccaccgtctggaagcgcatcacactttgtgaacaggaagccgtcaacaggaggacatcacatgccggatga

SEQ ID NO: 449985 - DNA, 816 bp, Serratia marcescens
atgtttgacaatatatttagcgttgaatccattatttccttagcagtaactattacggttagctttgctgttacctttaaagttataaagttaaatctaactataaaaaacaaatcacatactattaaaggcgacgggaatagtatcgagcataacgaattcaatatcgttatgaaagatgctcaaggtgaatttaggaatctaagtttgtgtctgggtgggattattattttactgcttccatattgcggctcttttgtcaattattttttgtataatttttcacgtattgctccttacttttgtgttgttggtattgtttttaccctatgggctagaggctttactaatcgtttttttgattgtttatatattgtaccgacgctatttaatgtttatttcgcatcacgtgcagctgaaaattcatattattttatgagccattttgatggcttatacgatagaattttaagctctcttgtttctattcttttttctgcgggaaagtttgaatactttagtaaatcaattttatactttttagaacagatcgctattttttcatccattatagggtttgtaacggtgtctgtaatgttgttgtatgcaacttttggttacataaaacaacgcagtttctccagtgcacttacattcgctttaaaaaattgcatatggggttttataggttatctggctgcttctgggattgtatggggtttgttttatggacaaaatcagtatattgcgagtattttcgagcctgcaattcagttgataaccggtttgtttaacatcagaactccactttattaa

SEQ ID NO: 449986 - DNA, 1371 bp, Serratia marcescens
atgagcaccgggagtcgcctgatattgacgcaggagcttcatgcctcactctggaaacatctgttcccgggagacggaaaagaggctgctgcaattctggtctgtaatcgttacgacggtactcgtctgaagctcctggctaagaagctcattcttgttccatatgaagagtgtaaatccaggacgatcgattttatttcctggccgggtagctatctggagaaggccattgatactgcagaagaaaaatcgatgtcaattatactcgtccattcgcatcctggtggtttcctggctttctctgatatggatgatgcaagtgatgtgcagactatggcgtcactttttcagggtgttaatgccattcatggttcggcaattatgattcctgacgggaatatgcgtgcacgtttctaccgggaggggaagtactctgagaatgtggaactggtaaccgtcgcgggtgataatattcactactggtgggacgggctcactgagccacggctgtctgcaatggcttttacatcggggatgacggacacttttaacaagctcaccgcagctgtcattggggtatccggtacagggtcgattgtggccgagcaggtagcaaggctgggctttggcgaaattcttttgattgatcatgatcatatagaaaagaaaaatctgaaccggatcctgaactcgacccttgaagatgcgatggtctgccgaccaaaggtagacatgttcgcggaagttattaagcgtattcgagggggcgatattgcccggcccattcacaatactattttctcgcgggaggccgttcttgctgcagcaaacgcagatataatcttttgctgcgttgatacctaccatgcccgaatgattgcagatcgtattgcttctgcttttttaatcccattgcttgatgtaggggtgaaaattccgactcatgttgatcctgacgatgggcgaaaaatcacggacgtgacgggccggatcgattatgtaaaacccggtggttctactttatctgatcgtcatgtgtatacacctgagcttatataccgggaaaacctgagcgcgaaggattatgaagatcaggtcgggagaggttacatcacgggggttcaggaagaggcgccatcagtaataaccctgaatatgcgagcggcatcggcttgtgtgtcagaatttatcgcaaggtgtttcccttttcgcgaatatcctaataagagatttgcccgtactatgttcagtctttcaggtgctgaagaagactataccgatgaaagtgatatagagaaggcgctgaatccacggcttgcagtcggatgtgaagagcctcttttggggatcccggaactgggagggaaataa

SEQ ID NO: 449987 - DNA, 1089 bp, Serratia marcescens
atgaacgacctgcaatcacaacatccccaccatcgtatcattgaggtggcggacgagagcctcgcttaccgtcaggtaaccgtgggggataacacgcctaccggtgcgcagatttcagctgcatcagggtttaaacctgatcagctacctgtagtgctgatgttgctttctgatggctctctggaggacatccgtcccgatgaagttgtggatcttggctctgaggttcgccgttttatcattgtcgagtcagaccgtacctatttgtttactattgatggcactcgtatggagtggccatgtcgtttaattaccggctatgttgtccgtaaacttggcaatgttgatgataataaaaaactgttactggagcgtgaagacgaagctgatctcgaaatccagaatgaccagtttatcgatctggatggggatggtattgagcgcttcattagcaggaaggcatcatggaaactgaatgttcagggtaaggaatttacttttgataccccgactattgtaatccgtgacgctgttatccgtgcagggctgaatcccggtcaggcatggcatattttcctcaaagtcgaaggacagcctaaggttgagaagaatattgatgacgtcattgatttgcgtacacctggcattgagaagctgcgacttacgccgaaagatgtgaataatggcgaagcatccggggtaacccgtcgtgagttcagtttgctacctacagatgagcaatatctagatggaatgggatattcctgggaaacctgcctgaacggcaatgctcgctggctgattatccacgattatgaactaccggaagggtataaccatcataagattaaactggctctgttgattacctccggttatcccgtaaacatgctggatatgttttacgtacatccgccactgtcgcgggtcaatggcgtcaacattccagcgacggaagctacggcggctattgatagtatcgcgtatcagcgatggtcccgccatcgctcatgggatcctgaaacagattccgtcgtctctcaactggcgatggcggatggttgtcttcaaaaggaggccggacaatga

SEQ ID NO: 449988 - DNA, 549 bp, Serratia marcescens
atgaaagtcaaactgctggaactcactgaaaacaatgaccacccattcggaaatgttttgggacgggaagtgtttaagcgacttcaaagagttgttgactcacatcctagttgcaaggcatttgaaatttctcttgaaggtatcatcgctaccgattcttcctttccgcgggaaagtgtaattgcacttgcaaaacagctttgtggcgaaaagtacttctttatcacagatgtcagttctgtagatctcattgataactgggactatgcggcaatagcaaagcagcagtctttgattgtgatgcttgataaggaagtgcgtatcattggtcctgaagcaaaaagttcgacaaaggcattgctcgatgtcgtgttaagccgggatggagccagtaccgccaatgttgctaaagccctcaatatctctgtacagaatgcgagtacaaggctcaaaaagcttgtaagtgagggacttattatgcggtcagaggtatcatcaccaacaggtggtattgagtttatctacaccggccccggaatctctgattaa

SEQ ID NO: 449989 - DNA, 1104 bp, Serratia marcescens
gtgttgttcgatatagagaaaatcaaagagctacttcgtgaatttcctggactgacaggtaagcaaatagccaaaaagcttgggtatcctgataaatctgccctgaattcatttttatacagcaatctagagggcctcaaacaggtcgaatggaaatggtatgtagaagatgaatatgtgttggttttggatgctgacgcctggatcgatgaagacatttttgaagctaacttatcggctgcaggctgcctattgggcgcttcagcaaacaggtgcagaatatgctttccggagaattgcaggattttattggcagctggtgcgagagtgattgctctgtcaaatcaggctgcttttttggggaaggcgatcgaactggatttcagtaaatgtccatcgacgaaagactttttggaccggttgggtttttttgaccatttacatccggatgtaagggttcagccagagaggccaacggaatccagggcaaaacgctaccggggaaataatgacaatctggttgagatagcatccattaacctggatgatttcgatgattcaattccggtaaaactgactaaacaattcgcgctccatgctggccaagaatattacatggctgtgtttacaattttttctgagctcattggtaatgtacgagatcatagcgagactcctattcctgggttcgcggcgttgcagttgtacaaggggaagcgacgtcatatccagactgtaatttcagatagtggtttaggcatagcaacaactttgaaacgaaaccttaaaacatattaccctgaaatttttaaggaaattgaatctttatccgaagatcctgacatatttttggttaagcgtgcactaaaaaaaggtgggttgagtcagtttggctccgcgcctgatgaggcagctcgcggactgggattgaaacggtctcaagagttggccgccagatatgatgcagttgtgctggttcgacagccaaacttcgagttgagaatcatatataaagacggtgaactcaccgacattataggaaaaaaagggctggcgttgatcaaaggtacccaagtttgctttgatttttttcttaggctatga

SEQ ID NO: 449990 - DNA, 210 bp, Serratia marcescens
atgctgcaggcgctgccggagaaagtccgcgcggcgtttttgatgtcacagatcggtggcctgacttacgcaaacatcgccgccgaactcgccgtctccgagcgcatggtgaagaaatatatggctcaggccatgctccactgcctgagccttgaaatcgaatatctcgatgcattaccccccgccgcggtcagatacgatgagcaataa

SEQ ID NO: 449991 - DNA, 981 bp, Serratia marcescens
atgagcaataaacccggcttcgccgcgttgcagcaggcggcaaactggtacgccgaagtccaggacatctcgtcgccgcagacatatcccgccgcactgcaacgctggcttgacgagaatcaggagaatcagctggcgtggcagtacgtgctgaacatcagccagcgcttttcgccgctgcgggaaaacggtgagcgacaagcggcggcgttcaccgcgctgacccagcgaacgcacaacgccgggcggcgccaggtgctgaaaatggcggcctggatttccgtcggcaccctgctcgcctggggtagctggcgtcatacaccgctgcgcaatctggtactggcgtggcacgccgattatcacaccccccacggtgaaataacgtcgttcacgctggctgatggttcgcggatctggcttgacaccgacagcgcgctgaacgtcgattactccccgacgcagcgcgcgctgcagttgctgaacggtcggatgatgatcgaaaccgccgccgatccgcatcgcccgctgaccatcgtcaccgcacagggcaaaatgcgcgccctcggcacacgtttcagcgtgcaggcgctcggcgataccagcgtgttgcaggtgtatcagggggcggtggaagtttccccggcggctatcagcgacgcaccaatcgtgcaggccggacaggcgatggccttccggagggatggctttgatccggtttcttcgttgcgcaatacggagcctgcctggccgcgcgggttgctacaggccgataatctccccctcggtgagtttatcaaacggttgtcggcatatcgccgcggctatctgggatgcgatccggccgtgtcagcgctgaccgttaccggtacgttcccgctacatgataccgatatggcgctggacatgctcaccaacgcgctgcctgtacagctcaaccgccgcttctcatggtggctgacggtcgcaccgcgcgataaataa

SEQ ID NO: 449992 - DNA, 2460 bp, Serratia marcescens
atgtcatcaccacgcaccagccaaccgcgggttttccgtcgtacgccgacggccgctcttcttcgtatgatgttatgcgcaccggtactgacgtttgccgccgccctcgcgccggctgcgcaggccgccgaaacagtgacggataagcacgtttatgcgatctctgttgcgccactggcgactcagctgaatcagtttgccgcgcagtcgggtatttatctggcgagcgatgcacagttgactgccgggaaatcctctccggcgctaaacggcacttacacccttaccgaaggctttgcccgactgttgaccaatcaggggctgctggctgaacgtcagccagacggcagctacaccctgaaaaagatccctgaaggggacgaaatggtggtagtcggtgacattaactacggctcgatgactgaagataccggctcttacaccacccgcagcatgtcggcggcgactcgtctgaatctctccccgcgggaaacgccgcagtcggtcagcgtggttacccgccagcggatgaacgatcagaatatgacctcgctggacgacgcgatgcgtcaggtcacgggcgtgaacgtcatcaatgaaagctcctaccagactcgttaccagtcgcgcggcttcacgatggataaccttcaggaagacggtatcagctcctcgtttcaaaacagcctcgccggaatgggatatgccgaagcctccaccgaatcgccggatctggccatttacgaccatctggaagttctgcgcggcgcgtcaggcctgacccagggcagcggcgaaccggggggaacggtgaatttggtgcgcaagcgtccgacctatgattttcgctcttccgtcagcgccagcgccggcagctgggataactaccgcggcgaaatggacgtctccgggccgctgaatgacgatgcctcgctgcgcggccgcgcggttggcgtactgcaaaagagagacagctttaccgattacgtgcacagcgatcgccaggtgctgttcggtactctcgcctatgatttgacgtcgcagaccacgctgaccaccggtctatcctggcaaaaaaccgatacggtgcccaatctttacggcgtgccgatgtccaccaactactccagcctgggtctgccccgctcgaccttcctgggggccggctggaataacatcaccttcgagaaaactaacgcctacgccgaactcgaacactattttgataacgaatgggtcgccaaaagctcgctgaactacacgaccgccagcgccgagggcaaattcatcggcgtttacggcaacggcactcagggcgtggatgattccggcagagcgaagctcaacaactacctgcaacgacacaaccgcagcggccagtacggcgtgaacatcaacctgagcgggccgttcgagctgctggatcgcgaccaccagctggtattcggcggtgattatcagaaggagaacttcaataatttatttggttcgctgagcaataccagcgcagtaaatatctatagctgggaccctgaaagcctctctgaacccgactgggattacacccgccgctatcagtacaacgtctatcagcgcggcctgtacgccacgacgcggctgagcctgacggacgactggaagctgatcctcggaagccgttacagcagctttacctacgactcctatttcaccaatctcaccaccggggcgatgaccgcgcacagcaactacaaggtgaaaggtaaaatcatcccctacggcggcctgctgtgggatttcgccaaagactacacctggtatctgagctacgccgaaatctacaaaccgcaaagctcgctggatgccagcggcaacttcctgccgccggtcaccggcagcaactacgaaaccggcgtcaaaggggagttcttcaacggcgggctgaacgcctccgtcgccctgttccgcattattcaggcgaataacgccatgagcggggtggactgcgatgactgctacgtcgccgacggcaaggtgcagagccagggcattgaaatggagatatccgggcagcttgcgctgggctggcagatctacgccggatacacgcttaataacagcaaatatctcgaagccgccgccacgcagaaaggcaccaactacagcaaacacacgccgcagcatcttttccgcttgtatagcagctatcgcctgccgggagagtgggataaatggtccgtcggcgcagggctgacggcgcagacggataccaccaccaactacgatgtgtcccagggcggatacacccttttcaacgccaatatcggctatcagtacagtaaacaaataagcctgagcctgaacggtaacaacctgacggataaagagtactacctcggcgtttccaaccgtcaccgcggcggcaacaatttctacggcgatccgcgtaacgtcatgttcagcgtgaaatgggcttattaa

SEQ ID NO: 449993 - DNA, 1683 bp, Serratia marcescens
atgcaaagtttgaaacggttttaccagctgatcgcaccctgttggctgcaccctcgcgaatggttttcatggcttttattgctgacgctgaccgccctcacgctgggcgtggtatggataagcgtgcagtacaacaactggagccgggaattttacgatgccctcagcgactactttcagcaggcgtcgatcggcatgctggcgctctcctattccggatataccgcgctgtttgtgacgttcattatcagctcgaactggctgaaaaaattactgatcatccgcggccgtcaaaagatgaccctaagatttcaccatctgtggctgcgacgacataatcactaccgtctgagcctccatgctgaacccgataatcccgatcagcgtattgccgaggatattcggctgctggttgagcagagccttgggctatttttgtcgctgctaaaaaacatcacggggcttttatcgttcattgttattctgtggcagctttcgggcacgctcagcctcaccgtcgccggacacagcgtcacgctgcacggctatctggtgtgggtggcgctggggtatgcggttattagcagcctgctggcccactggataggcagcccgctgcatcaactgaatatagagcggcaaaaaagcgaggcggactaccgtgccagcctgctgcgcatccgcgaaaatagcgagcagattgccttctacgccggcgagcgtgccgaactgcgccgcgtacaccgtcatttttcggcgattgtgcagaactggcagcggctgatgttgcgcgagtttcgcctggatacgttcaccacctcctattttcgtctgagcctgatgatcccgatttttgccgtcctgccgctgtacatcgcaaaacagatctcgcttggcggcgtcatgcaggcgcgcgccgctttcggctacgtccttgacgccttcggctggtttatcgactcctaccgccagatagtggcctggtcagcgacggtagagaggctatggcagtttgcgcaaggcttaatcgcgctgccggcgcaatcgcgcgtttcccgccagcctggaacgttacgctgtcttcatctggtcgcccgtcacgctgatggtacgcccctgtttaacccgataaatctcgacttacggcgcggggaggcggtggcgattaccggcgccagcgggtgtgggaaaacgaccttcttaagggtactctgcgggctgtggccataccgcagcggggcctatagtcacccgacaggcaaaagcctgttcgtgccgcaaaaaccgtatctgcccgacgatctcctgagccacgtgttgacgtatccgggcttagctaaagtcagcaatcaacggctggagagctgcctgaagagggttgggctacaccatttatgccggcagctgaatgagcgccagtcatggcgcggtatcctttccggcggcgagcagcagcgtctttcgtttgcccgcatcctggtgaatcagcccgattttatttgccttgatgagtcaaccagtcacctggacgatatgacatccatagagctgataagtacgatccggagcgaactcccgcaaagcatcattattgtcgtcagccatcaaagagcggttatagattcactgaatataaaatatcttgttgaaaaggatgctcaaaaaccatatacagccatttaa

SEQ ID NO: 449994 - DNA, 384 bp, Serratia marcescens
gtggccgatgcgcgtgagcttcgcccgttccggcagacggcggcggagcggttcgcagaggagctgccccacctgcagccgctgccagcgacggactacgacacgagctacttcgacatccgtcacgtgacgtgggacggttacatcgaagtcaggggcagccgatacagcgtgccggaggcctggtgcgggcacccggtctccatccgcatcacgctcgacgatgagctgcgcatctatggtaacgagatgctgctcgcgtcgcaccggctggcggcccccggcgcgggatggcagacggtgccggagcaccacgccccgctgtggcagcaggtgagccgcgtggagcaccggtcactgagcacctatgaggatctgctgtga

SEQ ID NO: 449995 - DNA, 780 bp, Serratia marcescens
atgctgagcagagaggacttttacatgataaagcaaatgcgccagcagggcgtctacattgtcgatatcgccgcgcaaatcggctgctccgaaaggaccgtacggcgctgcctgcagtatcccgagcctccggcacggcagacgcgccataagatggccaaactgaagccgcacatggattacatcgacatgcggctgggcgaaaacgtctggaacgccgaaatcatttttcaggaaatcagagcgcagggctataccgggggacgttccatgctgcgctactacatccagcccaaacggaaaatgcggccttcccggaaaacggtgcgcttcgaaacccagccaggttatcagcttcagcacgactggggcgtcattgaagcggaggttgccggtcagctatgccgcgttaacttcgccgtcaatacgctggggttctcccgccgcttccacgcctgggccaccgacagtcaggacgcagagcatacttacgagtcgctggtgcgcgccttccgccacttcggcggtggcgtgaaaagcgtgctggtcgacaaccagaaagcagcggtgctcaggaaccacaacggacacgtgctgttcaacgcaggcttccagcttctggcggaccactacggcttcacaccccgggcctgccgaccgcggcgggcccgtaccaaaggcaaggtggagcgcatggtgaagtacctgaaagagaacttcttcgtgcggtatcgccgcttcgacagcttcactcatctcaatcagcagctggaacagtga

SEQ ID NO: 449996 - DNA, 168 bp, Serratia marcescens
atggataacaatcaccaaaaattcgattcacagtcgattgccaatcgggtcagggagctgtttttacattacgggattggaaaacgtcagcatgcccgcgagctcagccgcatcttggatctgagtttttcacatgcgcaccgcaaactgaaagggcaaagcccctag

SEQ ID NO: 449997 - DNA, 558 bp, Serratia marcescens; identical to SEQ ID NO: 86309

SEQ ID NO: 449998 - DNA, 513 bp, Serratia marcescens
gtgacggcgctgctgaaaaccggccgcagccgccatgcggcggtcgccgggccgatgagcgaggtggtgacccacagcacgcagtacctcagcgacggcgatctgaacgccatcgcggtgtacctgcgcagcctggcgccggacaccgccgccaaagccgctgcgcctgccgcgcaggcggataacccgggcggcaaggcgacctacgcgatgtactgctcgacctgccacggcaacaagggggagggcactgacttcgccattccggcgctggcgggcaatgccacggtaacggcggacaatccgctgaccgcgctgcgggtggtgctggagggggcgcatacgccgatcacgcagcaggcgatggcgttcgacatgccggcttacggctgggcgttgaacgatcggcaggcggcggatctgatgagctatctgcggggaagctggggcaaccaggcggcgccggtgacggtgcagcaggtgcaggacgcgcgccagctacaggcgaaatga

SEQ ID NO: 449999 - DNA, 1662 bp, Serratia marcescens
atgtccacgtcccgattgcagcagcagttcatccgtctgtggcagcgctgccacggtgaaaccaccgacaccacgctgcaggatctggcggaggtgctgagctgctcgcggcgccacgtgcgctccctgctgagcgccatgcagcgagagggctggctcacctggcaggcggagtcggggcgcggcaaacgttcgcggctaaccttccactacaccggcctggcgctgcagcaacagcgggccgaggagctgttggaacaggaccgcatcgatcagttggtgcagctggtgggcgacaaaaacgtggtgcgccagatgctgctgtcgcagttggggcgcagcttccgccagggaaaacatatcctgcgggtgctctactaccggcagctgtacaacctgctgcccggctcggcgctgcggcgttcggaaacccatttggcgcgccagatcttcaacggcctgacgcgcataaatgaggaaaacggggaactcgagtccgatctgtctcaccattggcaggcgctgacgccgctgcactggcggttttacctgcgtccggcgatccattttcatcacggccgcgagctggagatggcggacgtcatcacttccctctcacgtctgacctcgcaaccgctgttctcgcatatcgagagcgtcacctcgccgacgccgttcgtgatcgacgtgcagctgcgcagccccgaccactggctgccctggctgctgggcagcgtgcaggccatgatcctgccgcgcgaatggcgcgaactgcctgatttcgcccgccatccggtcggcaccggcccctaccgcatggtgcgcaaccatcccagccagatgaagatccacgccttcgacgactatttcggctaccgggcgctgatcgacgaggtgaacatctgggtgctgccggagttttccgaagagctggtgcactccggcgtgcagctgcagggcgatgaaaccggcaacagcgagctggaaagccggctggaagagggctgctatttcctgctgttcgatcagcgctccccgctggccgccgatcccgccattcgcagttggctgtgcgaattgatcaaccccatttcgctgctgagccatgccgggccgctctaccagcgctattggtcgccggcgtacggactgctgccgcgctggcaccacaaccgcacactggcgcagcagcccaagcccgcgggcctgaccgaactgacgatgacccacttcaatgagcattcggagtttcacgccattcgccaggcgatcgaaccgctgctggcgcagcacggcatccgcctgattgtgcaaagcgtggattacgccacctggcaccagggcgacgcgcgcagcgatctgtggctcggcagcgccaacttctacctgccgctggagttttcgctgttcgccacgctgtacgaactgccgctggtgcagcactgcatgaacgaagatctggcgcaggacgcggcgctgtggcgcgccaaccgcttgccgctggccgagttctgccagcgtctggtcagcaaccaccagctgcatccgctgttccaccactggctgcagctgcacggccagcgcagcatgcgcggcgtgcggatgaacaccctcggctggttcgacttcaagtccgcctggtttgccccgccggaggcataa

SEQ ID NO: 450000 - DNA, 1116 bp, Serratia marcescens
atgaaattaacaacaggtaaggcactgctggcgggttgtattgcgatggccatgagccaggcggccatggcgaaagacatcaaggtggcgatcgtcggggcgatgtccggcccggtcgcgcagtatggcgacatggagtttaccggcgcgcgccaggcgattgccgacatcaacgccaagggcggcatcaagggcgacaagctggtcggtgtggaatacgacgacgcctgcgacccgaaacaggcggttgcggtcgccaacaaggtgatcaacgacggcattcgctacgtgatcggccacctgtgctcctcgtccacccagccggcgtccgatatttatgaagacgaaggcgtgatcatgattaccccggcggccaccaacgccgatctgaccacccgcggctacaagatgatcatgcgcaccaccggcctggactcggatcagggcccgaccgctgccaaatacatcctcagcgacatcaagccgaagcgcatcgccgtggtgcacgacaagcagcaatatggcgaaggcctggcgcgctcggtgcgcgacagcctgaaaaaacagggcaccgaagtggcgatgttcgaaggcatcaccgccggcgacaaagacttctccaccctggtggcgcgcctgaagaaagagaatatcgacttcgtgtatttcggcggttactacccggaaatgggccagatcctgcgtcaggccaagcaggccgggttgaccacccgcttcatggggccggaaggcgtgggcaactcctcgctgtccaacatcgccggagccgcttcggaaggcatgctggtgacgttgccgaaacgctacgatcaggtgcctgccaaccagccgatcgtcgatgcgttgaaagccaagaagctggatccgaccggcccgttcgtctggaccacctatgccgcgctgcagtcgctgaccaccggcatggagcgcagcggcagccaggagccggcggacatcgtcaaggatctgaaaaccggcaagccggtggagaccgtgatggggccgctgagctgggatgacaagggcgatctgaaaggcttcgagttcggcgtgttcgaatggcatgccaacggcacgtccacaccgatcaaataa

SEQ ID NO: 450001 - DNA, 258 bp, Serratia marcescens
gtggccacgttgccggatgttgaagtgttgctggtgcaggcggtttcgcccaacggcttttaccgcgccgggctgttctggccgcatgatggcgtcaatgtgttcgtcagtgatacgcctgatgcggataacgctgaaagccaagcagaggatgctattgcaccgttcatcagcaccgagaccgctgacaggttgaaggctgagccacacctccgagtaaccgttctgccaaccgtgattaaagaccagggggaatga

SEQ ID NO: 450002 - DNA, 918 bp, Serratia marcescens
atgccaacacctaatgcagagattttgcacgccctgacaacatccctgagcgccgcgtttaccgccgggctgtcaggcgtgaaaccgcaatacctgcgtatcgctacagaagtgccgagcggctccgcctccaacacctacggctggctgtcagatttaccgggcatcaaggaatggatcagcgaccgccagcttgccgtgctgagccagcagggttacaccatcagcaacaagacctgggaaagctccatccgcgtgaagcgcgaaaacatcgaagatgaccagattggccaatacagcgtgattgccaaggcgttcggtcgccaggtgagcgagttcccggacacgctgagcttcccgctgttggtcgcaggcttcaacacgttgtgcttcgacggccagaacttcttcgacactgaccacccgatggccggtggcacctacagcaacatcgtgggtaatggcaccgagacgggtgagccgtggttcctgattgatgaatctcaggtgctgaagcccatcctgtaccaaaaccgtcgcccctttaagttcgtctccctggatgacctcaacagcgaacataccttcctgaagaatgagtttctgtatggggtggatggtcgctgcaacgttggtttcggtttctggcaaaccgccgtgggttcgcgcgcgccgctgaacgtggcgaactatgagaaagccgttgaagtccttcaggggatgcaacgtgccgatggttccccattgggcatccggccgaccacgctggtcgtcgggcgcaaaaaccgcgcagcggcgaaacgggttatcgacgccatgctggtcgatggcggtgactccaacatctactacaaggatgtggatatcctcaacagcccgttcatcgtgacgccagcagcgccaccgtccggcggctaa

SEQ ID NO: 450003 - DNA, 1569 bp, Serratia marcescens
atgctaacagccagcttaaacgccattgcgaccggcattaacggcggggaggacttcgatgaaaacgaagtcctccttggttatcagcggcgctggatcgccgacgactcaccgctgaagattgcggagaaatcccgccgaaccggtatcacctgggcagaggcggcagatgccgctttaacggcgtcgaaagccaaagctgccggtggcaccaaccacttttacgtcggctccaacaaagagatggcacgcgagtttatcgatgcggcggcgatgtgggccaaagcctacgacctggcagcggctgacgtttgcgaagaagtcctggccgatgacgataaggacattctgacgtttgtcatctacttcgccagtgggttcaaggtgcaggcgctgtccagtaaccccagcaacctgcgcggtatgcaaggcaacgtgactatcgacgaagcggcgttccatgagcgcctggcggaggtgctaaaggcggcgctggcgctcacgatgtggggtgcaaaagtccgccttatcagcacccataacggcacggacaatcttttcaacgagttgatccaggacagtcgcgccgggaagaaacgctattccgttcataccatcaccctggatgatgcgtgccgcgatggcttgtacaagcgcatctgccaggtgaaaaagcgcgaatggagccagcccgccgaagaccaatggaaagccgatctgttgcgcgatactgccacgcaggatgatgcgctggaggaatactattgcgtgccgaagaacggcagcggcacctacctggcccgctcaatccgagagcgtgccgcacgcggtgacgggccggttttgcgctttaccggctcggcggagttcaacgccctgccggaagggatgcgggcgctggatatgcgggaatggctggagaacaccgtgctgccggtacttaaccagctccccgataaacgccacgcgctgggcgaagacttcgcgcgctccggtcacctgacagtctttgcgccgatcactatcaacgatgacaccacgcgaacggtgccgttcctggtcgagttggcgaacgtcccctacaagcagcaggagcaggcgctgttcttcatctgcgaccgtctgccgcatcgtgacggcatcaagcttgatgggcgcggcaacggcaactacctggccgagcaggccgccgaacgctacggtgctgaagtggaagtcgttatgccgtctgtcgcccactaccgcgagaacatgccgcgcttcaaggcagcgtttgaagacgatgaactggtcgtgccgaagcatgaggatgttgtcaacgacctgggccagattgtcgtcttgcgcggcgtgccgggtatcgatgaccgggagaataccggcagcgatggccacaagcggcacggtgacagcgcctatgcgattttcctggcctatctggccagtaaagaggattgccgccgttatgagctgcaccgactcaatcaacccgaacggccggaggagcgcgatgagcgccgccaaatgcgcatcacgcgcgggctgaaaaatcaacgagggctactgtaa

SEQ ID NO: 450004 - DNA, 267 bp, Serratia marcescens
atggtgcaaaatggcgtgacggataccgcgccggtattcgacggtaacggccaacccaccggacaggtcggtcgctccaaggtgccgttgaaaacgcaggctccgccagtcaagaacgtcaaatggttgaacaagcgcaccggcgaggaggaactggtgccggagggtattgaccctgggtggaactacaatcctggcatcagtcgccaggccgcactggagcgccagctccaggccaagcagcaggcatttgatgctggccgctga

SEQ ID NO: 450005 - DNA, 519 bp, Serratia marcescens
atgagtattaccattagaggtgaagatgcaacatgtttatttgaaatcttatctgaacctaaaacgatttgcatcgagggacatactggctctgggaaaacaactgctggaaagaaaatagcagaaaagtttggagccaagtttttcgatacagatagctatataattaaagatccgacttcagatgttattaaaccatatgaagatatgctggacattgcaaaactatcaaaagaactaattgaagaaaaaggtaaaaagattattgctggcatatgtcttagaaaaatattaaaattagctaaaatatctgaagaatcaatattcatttacataaaatgcgtatcaagaacatcatatcaatggatagaagaaaatacattagaggatcttaaggagagagttattgacatagataacatccctgaacctcatgcaagtgattatcgatatattttggaaatgagtcctcaacataatgcagatattgttttcgaacgattggaagaaaatatctaa

SEQ ID NO: 450006 - DNA, 876 bp, Serratia marcescens
atgaatattagagtttttttaagccataatcataatgacaaaccgtttgtcagaaagttagcaagagaccttgaaaatcacggcatccattattggcttgatgaggcagaaatgaaaattggcgattctctaattcaaaaaattagggagggtattgatagtgttgattactttgctgttgttctatcacccgattcaataaatgcaccttgggtagtcaatgaacttgatgtagcaatgaattatcaaataagcggtaaaaaaacaaaagtattacctattatgctgaaagaatgtgagcctccgggttttctcatcggtaaactgtatgcggattttagaaatgaagataactatgtagaggcgtttaaacggttaattcaaagcatagggatagtttttaataaaaacgtcatgagcaacgataaaacatttgataatcttggcacagctttagataaagcatctcatgcaagtatccccatgatgtgtaaaccatttcacagaccatttcaatacatgggaatgcaagtcccacaagcagaaaaaattcttgagtgtaaaggcaatgaaattggaagcattattgttgaagacgatgattgtcgtatgtaccttgaggcagaaggtaatttcattagttatatagaagttgatttcaaaaaaaccgccctacattaccaaaacaaagaattcgattcagaaattttccttggagcgttgagcataggcttatcagagctagatctagttggcaagaaatcacatagtcatgcatattatgatcaccggcggaaattaaaaataactgtaagttgtctatatgatgaagcaccaataaccgtatcgtttagctctaaatattacggcatgtaa

SEQ ID NO: 450007 - DNA, 138 bp, Serratia marcescens
atggcgcataagcttttgctaaacagcgtgacgcaggatcacggtgatgtatttcttaatccgtatggcaatttcaaggtagccaagtggttccgcttttttgaccggcacaagcaggtcacccgtacccagatctaa

SEQ ID NO: 450008 - DNA, 390 bp, Serratia marcescens
atgcaaacacgcaagttagggcgagaagggctggaagtatcggcgttgggtctgggctgtatggggctgagttttggctacggcccggccaccgacaaacggcaggcgatcgatctgatccgcgccgcggttgacgagggcgtgacgttcttcgataccgccgagatttatggtccgttcaccaacgaggaattgttgggcgaagcgctggcaccggtgcgcgatcgggtcgtcatcgccaccaagttcggtttcgatctgccgcagccggcggggcaacaggtgttgaacagccgtccggagcatattcgccgggcggtggaaggttcgttgaagcgcctgcgggtagagacgatcgatttgctgtatcaacatcgcgtcgatccctaa

SEQ ID NO: 450009 - DNA, 204 bp, Serratia marcescens
atggccgggcaatcggactatctaccgcccggcctgccattcaatcgatgcagctggacgcaggaacaacgcgatttattcgcgaggaagatcacccgcaccaaggtgctggtggcgattgaagaggcgccggagcaataccgggaacattttagggcgcgcttgaattactggcgtggtggcagggaggggaaggagcaatga

SEQ ID NO: 450010 - DNA, 930 bp, Serratia marcescens
atgcacagcgtaaatttctattcttttcgagttctagaaaagaaaggtggtcacaaaagttataatttaggtgaacttaaaaataataaccagataaaagcatatgatatcataaaaaattatatcattgctaattataacatagcaatggaatcacagggggccaagactgtagtatcaataccatcattaaattttgatgataataaaaagcttatatatgggtatgttaatgttggaaaatatggcgaacaatattccgtaagacataaatcattatctcaaccgaaaaagttcacagtaactgtcgacgatgttcccgagagagctagatatgttatgttatacctaccagatgcgcttgatgaaggtattatagccattcattcatctgataaaattagcccgagaggggttttatttgaaaagataattgcgcattttaaagcagctccattgtctatggaaccaagatttaggcctttactccataaaaacatcccccagtatatattggagtcacaaatatctgagataaaggctattggatttaaaccacataaagatttggccgacgctgttaaaaatgcctcaactcacattcaaactgagtacactattcgtaataatgcctcacaccttggtaaggttaaagattatattggcaatggtaagcataaagaaatagttgagatactttctgataatagtgaaaaagttaaattcaaagcagaagtaaatggtagagatgttgtctataatatctatgacattttgggtaagggtatcggcatacttctggatgattcaaagttgcagattgacttgctaacgggaattccgaatttatcggcattacacgacgagattcgtaaccatacgaatgatatcatatcatcaattcataatcgtagcgggttgcatatatga

SEQ ID NO: 450011 - DNA, 540 bp, Serratia marcescens
atgaataagataaacttcattggtataattaaggatcattttttcacattaaaagacgatgggtgttcaaaactatccaagtcggatgtttttactcatttattacttcccgctatagtcagtttcattatttgttatatcgctggaataatgaaacctagtgttatatctattttggttaactttggggcaataaccactgcgttattaatgagtgcagtgataatggtgtacgatcagaaatcaaagataaaggaaaaagatgaaaaagaggaagatgtcagtaagaaggaattaaataaaactaaaatcgcactttacaatgaactgtgcaaaaatacttgttacgcaatacttacatctattgtaatcgttgttttgtcggttgctctttcattttttgatgagaaatctgtgactggagatgaaaaaatctatattttctatttcatcacatttctttgttactatctttttatatcgaccataataacatttttaatgataataaaacgatttagtgttgtactggatacttaa

SEQ ID NO: 450012 - DNA, 843 bp, Serratia marcescens
atgaattggcaaggcatcccatttaaatatctttcagctgatcctgtcgatactgttaatttggctctacaatcaatccccagaattattgtagattctcccactgattatacatcccctatagtgactgggatcgtatctcttattgctggtattattcctgcttgcatcgctatctggacatttaagagaaatgcgttcaatacacaagagcagagagagaaacaagaactttttctaattaatgagcgggctgaacaacaaaaattccttcaagaggaaagggcaactcaaatagcttcgatggagaaagatagagaaactcaactaaagatatccaaacaaaattttgatatgcaagttctctcggtaaatagacaggcttggatagccaatctacgggatttgttggctgactatatttcaatagctccaaacttgttagattataagttgaagttactaaacaaaaagaaatattaccaaaggatctctgagctttatgtcgaatctgtaggtgaggggagaaatagacttagacaagactatgatgatgcggttcgtgatttggatgattgggctcagaactttgactctctggctttaaaaatacggaatcttgaggctaaaataaaaatgatgttaaacccaagtgaaatttattatcgagagattattgtttgttttgctaatatttctatagtttataatgaattttccgaggttagtctggataagtacagattaaagcttcctgagatgaatgataaccttgatagaattatgagagtctcacaggatttgtttaagtatgaatgggaacgagttaagcaagggaactaa

SEQ ID NO: 450013 - DNA, 534 bp, Serratia marcescens
atgaacgaaaattatattgcttacgaaactcttgttgctaacagggatgctgcaaactgggccttctggtctatgattggtgcatgggtcgctggtatagctacatttgctgcagtagtgacaactctatatatagctaaaatgagaccgaaaccgagaattaaatgtgagattactatttccgcaatgaagaggtatagctggaaaaaaggtatcgctattcatatagctaacattggaataatgtctataaatataagttcaattgtttggcatttcgatggtgatactacattttcacaggattttgagccggaaggtagtaacttaccaaagaagctagaacatggtgagtcagcatttttcttcatacagaatgatgaagaaataaattgggggaaagatgtgaagaacttcatcttagaaaacaatgggaggatagatagactacgaatctctgtaaatctaggaactatggataagtttttcgtaaaacctcataagtctgtcattaaaataatcaaggaatcttag

SEQ ID NO: 450014 - DNA, 522 bp, Serratia marcescens
atggcattgttagagactttggcagctactgcaatgggtggtgcttttgcgctgctgggtggtttccttacaaataaatttaataggcagaattcagaagaccagcgaaatcatgaaaaatggaaagccaaaagggattcatatctaaccaaaggtgaggaggcatatgcactttttaatcagtggatggtgaatgccgcgaagattacaactatatatgcatttaggatgaatggcgtatatgacgccaaagatgtcgcacttagaattaaagatgttgatatacatggtattacaccaaaattaactgcattgattgagatctattttcctgagttaggctcatcgttttctgaacttcaaaaaaacgtattcgacacacatctattatatgctcaaaacctggataaaataccagatgtaggaatttccacggaaattacaagccaaggtgcagaattcgcaattgaggcaactctttttctgaaaaaattatgtgatgcgataaatatacataagtaa

SEQ ID NO: 450015 - DNA, 783 bp, Serratia marcescens
atgccacccgtttcaaaactaaaaatgctgcggagacgggcctatccaaggctccgccgactcacattcgtttcttttattctcagtgtgtctttgctcctctgtgggtgcgtaacctcgcctgcatcagaccgtctgtcaagaacccagcatgttccagcaacatggcgggccgccccgtctgactcggcacacgtgtctgtgtggaatgcatggccctccgcccgaaatgaatccggcgcccggcgcttgcgcgctccggctggcaaacccagtcacgtagagcatgtacgcggaacacaaacgtcgattgcgcgtgccaatttggagtgcgctcaaacgttatggaatgacgctcgcaaactggctgcggcagaggctgcggccctctattacgcatcgcgtacctgccggcgacaacacgcgttctctacccaaagcgcgccattgcctgaatccttcgaacgggcgatacaaacgccccctcgccgggcgtcccaatctggtcagaaggaagtcgccgagcgtggcaaagccgaacccgatggaagcgagatcaaccgccacacgacccagcattctgctccccggacgttggatctatcgagcgtagacaccgaccccggcgaaagcgaggcggattggcgggctgaaccgcatgagcatcataaccgcgtgcgatccacagtgcggaagtggatacggcgtttgttcacttcgtcagagcgatcaagggttcaatgccagattgaaccgctgcagaacagcaccgtattcgtttga

SEQ ID NO: 450016 - DNA, 1278 bp, Serratia marcescens
atgttaattgaattcaatgttgagaactatctctcaatcaaaaacagacaaacactttctcttattgctaataaaagcaatgagttagatagtaatgtctttaaggttgaagggagtgtaaacttaaacgttttaaaatcagcagttatttatggcgcgaatgcggcgggaaaatctaacctactgcttgctgtacgagcaatgatggatcttgtcactcaatcagctgccaacaatcaagctggtgagaatattgctgtatatccatttaagttgagttctgagtcagtcgggcaaccaacagaattcgaagttatttttattgcagaaggggttcgatatcaattcggattttctgctacgcaggatcgtatcattgatgaatggctctatgcataccctaaaggccgacctcaaaaatggtattatcgttcttggaatgctgaatcattagaatatgattgggatttcggtaattatttactgggcgaaaaacaagtctggcagcgttctacaagggcgaatgctttgttcttgtcgacagcggttcaattaaacagtgaacaactgaaaccagtgtttatgtggttccaaaaaacacttagaatgtcaggtgtatctggttggaataattcattctcagctaagcggtgcactgaaaatactaagaaagatattcttggttttttgaaagctgcagatgtagggattgatgacatcttagtgaaaaaagagaagtttaatccggaaaccttgccagaagaaatgccagaagatatcaagaaaattgtcatttcaaatatgaaagataaggaggttcttgatatctatactgttcactatgatgataaaggagagtccgtaactttctcattagaggaggagtcacacggcacacagaagtttttctcattagctggcccttggttggatgctctggataatgggtatgttcttctgattgatgaactgcatgatacactccatcctaagctagttggtttcctagttaagctatttaatgatccaatgacaaataaaaaaggggctcaactaattttctcaactcatgaaacatctattctaaatcagagtgttttcagaagagatcaagtttggttttgtgagaaaaatgataaaagcgaaactaacatttacccattgactgattatagccctagaaaagggagagagaacttggaggcggcatatttagatggtcgatacggtgcccttcctaatattagaaaatggattgggggcgaagatggggagtga

SEQ ID NO: 450017 - DNA, 768 bp, Serratia marcescens
atggtcgatacggtgcccttcctaatattagaaaatggattgggggcgaagatggggagtgaggatttatttaaaaaaagacgtggcccaaaaacatctaaagatttagcgaggaaagaggccacaaaagcaccattaatgaagattcttattgcttgtgaaggtgagaaaactgagccgacttatttcgaggatttgatttctcattttggattattaactgcaagtgtaattgatgttactggggaatctggatccagccctatgtgtgttgtgaaacatgcaaagaaaaaacaagaagatatggctgcccaaggtgcgccctatgacaaaatttatattgtaattgataaagatgctcatgttgattatttaagagcattggatgctattaaaagagctaaacctaataaggtatggtttacagtgaattccgttccttgtttcgagttttggttactccttcattatacttattcaacaaaggaatatagagggttgcctgggaaaagtgctggggatcaagtcgtctctgagttgaaaaaatatattaaaggatatgataaagcagctaaaggtattttctacaaaacatttaactcattgaaaacaaaggatttgaatgaggttatcactaaggctaaacaaagtttacgagcggccgaaagtagtggtactgacaatcctagcaccaaggtgcatgagttgatagaaacattaatggagttaaaggaacaaatcaatattaataaaggcaagaaaagatga

SEQ ID NO: 450018 - DNA, 750 bp, Serratia marcescens
atgctggaaaatatttttaactttgagtcgattgtatcgattgctctcggttcgcttgtaagctttaaagcgctaaaggtgaagagtgttatcaataaccagagtcctactattaatggtgatggaaactctgttacatataataattacatggagaaaacccagaaaaactttaaatatttttggaatgtcctttttgtaattgtgtttctcttgctacctgtctttggttctcgttttggtgtggcgttgtactcattctcatttttgtcagtagtattttgccttgttggagtggtgatgacaattcgtaattacggtggcgagcgtgcattggatctcctttatatagtgctaacattgttgataagcgttttggcttattgcacagtagttaatatggcgagtttttgggactattatcaaggctactacgggcgattgtttagcgctatcgcctcatttagaccttccttgccctacattgaatatgtaacagggttgctttatatgttcatcattacctttggttttgtgatggtttttgtttcgttaatatactctacttttgcatatataaaggaaagggactttgacgaggtaattaaattctcttgctatcattttggtgttgcattcattgggtatgttttagcatcaaatacgctttgggcattaaaaaataatgaccttcaatatgttttatatgttttgcatgccccagtgagctttttcacatcatttttctga

SEQ ID NO: 450019 - DNA, 168 bp, Serratia marcescens
atgccggaaggaccggagatccgccgggcggcggacaaactggcggcggcggtgatcgatcagccgctgaccgccgtcgatttcgcttttccccagttgaagcactatcgccagcgtctgctcggcgagcgtatcgtcgccatcgagccgcgcggaaggcgctgctga

SEQ ID NO: 450020 - DNA, 531 bp, Serratia marcescens
ttggattctgccacagtaagtaccacagtaagcattgctaccctcatcgttggtgtagcaactttcttagtcgccgtgttgttcggcatacctacccttctccataccctcgaccaagcaaaggaaatgaagcgtaaaagaagggacgatatcgttgagcaattaaaagacaggaattggaacaacttaggcattgaccgcttttcgtggcctgcaattgcaatcaaagtgaccacctatgacaaagtcggcagaatcgagggggaaattacaaattgcgcaagttacttaattgatccggacttaatcacatttgcgtttgttggaaaaatgaatgccaaaggcgaggcaatattaactttgcgaaccctgaccccaccaatagtaaacgtaggtgtagcacgaataaaatacgatcttaagagcgatactctcgactatcactacttacacgaccataaacataatccccatatctcgcataatctaggcctaccacggtttacggcatacggattgtatggttgttaa

SEQ ID NO: 450021 - DNA, 759 bp, Serratia marcescens
atggctggcccttttaagttcaaatattttactaaaaactctattccggactggtgttgccctgcatgtggaaagcccactcttgtgcttattcctgagtattttcatacacaaaccacctctagtgcccggcatcagtatgaggtcgacccaggattctgtcctgaagatgatgaggaggtattcagttgcctcttgaggtgcagtcaaagaagctgccttcagcccgtatcagtttcaggagtcggatattacgaacgagagtatgagaactcttatggtcttgaatataactatattgcaatttactacccgaagtatttttacccaccactgactcttttcacgcattgtgagagttaccctgaaaagattaaatcccaactaaaagaaatttcagcacaattgccaggccatcgtcaggccgcgattaacgcactacgaactacattagaaatcgttctcgactattttgaagtacctcgcgaagcgaaaaatcgctatctaagtctggataagcgcatctcactgattcctgctccttataagtatgttgaatccggattcagggcgatgaaatggctaggcaatacaggcagccataatctcaaagaggtattggatgaagatattgaaggagcatgcttgatgctcgatgattttcttcttcgaattttcagtaaaccaactgatcatagtgaaacaatttcccagctaaacaaaaactatgctccacaaatgagaaatgaaaagcagtaa

SEQ ID NO: 450022 - DNA, 564 bp, Serratia marcescens
atggatttcaaaaacggagggcgcgaagtcattgagcgcctcatagaggcgtatggcttcactactaggcaagcgttatgtgaccatctaggtgtatcgaaaagtacgctagcaacacgctatatgcgtgatctttttccggcagaatgggtaattcaatgcgcgctagagactggtgtatcactcagctggattgcatttaaaactggtccgatgtacgacgataaaaagaatgatgtgatttcaatacctcgattgaaaattttagaagggaaagcttacgattcgaatttttatttatttgacaaagcactccttccagaaaaattgaaagagccattatgcatagtagatggcgacgtaatatacattgccgaaagagcatttgatgaaatcaatgatgggaaatggctaatagagatagaaggaacagtaagcatccgtgacatcataagagttcctagaggaaaaataagaatttttgatggtaaactttcttttgaatgtcaggtaaacgaagtaacagccttggcattaatttacaaactatatacctccatttaa

SEQ ID NO: 450023 - DNA, 1599 bp, Serratia marcescens
atggcagacagcaatagtacaatggactgggtgaaattaataatagaaatcataaagtggccagctactcttgttattatagctttaatattcagaacgtctgtaaaagaattcgcgaataagataaaaacttttaaattaaataatggcaactcatctatcgaagcaaccatctcagaacctcctaacgaagcggcacaacagccagtaagtatagacagaatagaaaacatgccacctaaacttgaagaagtgaagcaggaggaaaaaccacaaaatgagaatgttaactggataataaacacacaaaatgagattaatgaaggaaacatagagaatgccagagcgttatttttaaagcatattgaaaacataaatgatgaggataaaaaacactacgacaaatcattcctccttttctgcatttacgaaaagactaatcaacaagagatactattagagcttgaaagacatacaaggaatgcaccgagtgatgaggcactggttaaatcaaccacttggtatacaatggctctagataaaactaaaaattacaaagcatctttagctttccttcaggaaattttaattaaaataaaaacaccaaaagacattacaaatctaatatccaaaatagccgaggtgcatctatctaactctgaaccaaatgaagcaagggagttagtaataagtagattacaagaaaaactatctgatgaagagaatttcactctctataaaactctttctgaaatcgaattaaaactagataataaaagagcatcagcgttatgtctagataaagctctagaatacagtccaaatgataaagatataatgttcaaatcagcttatgaagcaagcaatgtggatttaaaacccatagaaattagcaactatgacacgctacttaatcttgatgaaaaacaagatcatgtacttaataactttggtgtaagtgcattaaatgaaggtctaaataccattgcggtagattattatgaaaaggctgctgatttgggcaatactctttctatggcaaacttaggaagcaaacttcttactgccggtttttccggccaagccaatattttatcacaaaaagccatatcacttaaaaatccacacgaaaatatatactcacttttaaagcaaataaaaaagacaagtgatgatgagaaaaagaaatgggatgaaataaaagaaaaatcattcgagctacaaaaaagaatcagaatatatacagcatcatattattataaaaatgatggcgtcattacttctggaaaatggaatacaaataacaatcatatcgcccacatagaactgctcgaaaagcaaacaattaaaataagcattgaatccggtattgatggtgcaacaattaatattgtagggacattttataatcacagttttaattgtgtatataccgaaaccaatcccaaaaacacaacaagtctactatcgagcgataaaaacaaaacaataaaatgcttaggctatttagatgagacaggttcaaagataacaattttcgctgaatctatagccaatgacttcgagatgattttactaagagataaccaagaatcataa

SEQ ID NO: 450024 - DNA, 333 bp, Serratia marcescens
ttgagaaccgtcgaaatactgcaatacaccttacgcaaaggcagcggtgccgcttttcacgccataatgcaggaaatcagtgttcccctacaccaaagccacgggatcgatgttgtttcgtttggcaactcgcttcatgacctggattgctactacctgatccgcgcctttgccagcgttgaaaaaatgactgcggttctcgatgctttttacgcaagcgcagactggcgcaacggcccacgcgaagacatcattggcagcatagaaaccagcattaaaacggtgatgttcctgccatcggaaagcgtggaagggctgcgggtgcaatcgtag

SEQ ID NO: 450025 - DNA, 510 bp, Serratia marcescens
atggatgaagagccgctggctggcggcgataaatcattaaagacggtgaatgcaatccgtcaggttccaattcatccgcgacttatcgaactagggctgctggagtatgtggatgcgctgaaagcagccggatatgatcgtcttttccctgagttaaagcacaacaaaatcaaaggatatagcgccgccgcctcaaaatggtttaacgaaaactactttggcaaaattcttggctttccccgcgatggtaagaaaacgttccattcgctgcggcatacttttatcaatgccgtagacgagtttgagatcaacgagcgcacgattgcgcagcttgtaggacatgttcgcggcagcaccactgcgatgacaacctatcgtaaggatgctgatgtgggcgagcaatttggcgtgatttcgcagcttcactacagtttgcctgatattgcgcagtttgattcgcaagcgggtatcaaggcggtcatcgacgcgcggcgcaggcataaatcgtaa

SEQ ID NO: 450026 - DNA, 3654 bp, Serratia marcescens
atgtcaggatttgaagagatacgcccgcttgaaggtatatggaacccgacggaactacgccgcgagttacgtgaaatgtttggacgttggttatcgcgttcacgcaatacgtcgccaccacaaagcactgaagcattatttgatgagctgagcctccgcaaacttatccagcactatcgaccggagtttcttggaagcaggaaagacatcgccaattcatgggacgcttcagaagagcgtaatgctgatggaggcccgacttttgatgaacttaagcagcttggttgggtaaaatttgatggatgccattggattatgcctgggatgtcgatgagctcctataagctcatcaattatcccagtcaaagtacaaaagaatttcttctaggactctataaacttcagcttgttgcaaagactgaaaccatatcatcagatgttcaggaaattgctgacaaagcaacggctcagttgattaaaagcagttatatcccaatcactaatccagatgtttttctcggcaatctgtggaaagaactttgcccggtaccattaccttctaatcaaaatgaacgagttactgatactaaaatagaagaaccggataagaacgcagtgaatgattcacgggaattattagcctcccacaatgagagcattgatcgtgctttcatagaatggtctgcatggtgtcgtctattcggtgcttatagtaattgggatccgaacttgagctggagttctcttgaaaagcagtactgccatgaagcagcttatcgaatattgacacgtcagaagttatggggatcatggcgtaacgacctagaggattacaccgatttacttgaaaatacctttacaatcgctcgtgacaaacttgagtaccgatggagccaatttgattccccaccagagacgcttgttgaaagattggattggttggcaagtcgagatattgaaaatctgatgatggagcgtttatttttgcattatgatggtccatgcgcggtcagttttgcatttagcctattgtgctcagagcttgagacgacagattttgggagtgatattgcactcaaaaatttaacattacttgagttcgctactagccatcctatggcactattgacactcaagttacgaatcgatgctgaccctctactgttagtggatatgctcatgcatcacggcactacctgtatggcgactaaaatactcattgagtgggtggcgggatcaggactacatagcgatcgcattagggggcgtgaagcgcaaactaaggcatttgctgtcgaagacgctttatcatttatggcttactacatgggggaaggtaagctcgaccttaaggattacgcatctttaatcacctggtgctatattggtaaaacccgaaatgggcatgctccaaccgactcgagaaggagtgttggacgtcgactcattggattactggctaagcaaaatgaagatgttaaatctttagtgctgaagcatatgttggttcaggctgcctataagaacaatgttccacgagcatgctttgccgctgtgttggatgttttaaactttctcccgaatcaatcgggagacgcttgcctgcctattgtcgaattgtattcaaagtttgctcaagaaagaaatcttgactggacagatgccgcagatttgacgcccccacaggccatgcgactcgtttcgactgccattgcacaaaatgaacgcgaaagagacgctctgctgattccattcgatagcgctgaaattttaagagcgacgcctaggcttgataagccatccgtacgttcatcaatagggaaagcactaagggttcacgtgcgactacttgctcgcgccatatctggatggcctaccaccaaaatcgtaccgatggagcttagtgatgctctgaagcttcttacttctcgtagtgttgtagagcatgatgaaaaagggagagtaggggcgctaactgacaggtacagctcaagtcatttcatgggtaatgaggagggttcgccagcttcggacctcgctgaggcctatcagaagctggatggcgataaccagaaggcattattgcatatatttatgcagtccgatgatcccgtgtttctggctgagctcagccaatacttaccttacactgaaacaactcaaattcatgaaagattacaacagctgaaaccgggcgaagcgtctgttccatggacatggccagaggttcaacaccgtatcgaatcagtgctggctgtagggcaagttaaccttgcacgagactatcttagtgacattaacggggctctaaaccgagcaccgtctcagtttagactgggtctttttggcgtcgaacttcaaatccttatgaaggagaaaaactgggaaacacttgattccattaatgtaccaccagaattaaagggaacatcagggcatcaggcgcaaaatcaacttgatttctacagggcaacttcgcagttgcttcggcaaaatggagacttggcaaaagcgcgggatgctcttcatcgtttagcatccttacctaacgcaagttttgcttataaggagaacttgttcgctgtcgctattcaacagctcctgggaaccaaattgcaaccgcttgatgatgcgaatcgaacagccggcgaaattcttctagcagaaatcaatgcagagattgaatctaatgaagatcgttttagcaacactatgtttgctaaccgtgccatactcctgattggccttcaacggccagaagatgcattagagagtttaaacaagcggcgaagagatgtgactactctagatctggaacacattgttgtattggcgaagtatgaaatgggtcagaaaggtgaagcgatggccatactgaatgcagcgcttacaaagtatggcgataacaatgatctcttaaatcttaagagagatttggaatcaggtgataccactcttattgtggcttcagctagcggatatctcgatccgatttcacctatccgaaatgctttacaacaattggctgaacttttgccttctcaggttggtgatgttctcggtcccccaggaaaaggggtcaggggttatctcgtaaggcaagtcgcgcgagcagtgtcgtcacttcagcatatggctagtatattacgtgacaaaaagaatgaagcggatgaagcaagattcgaagatgatctaaatactgccgtaagggaagtattaggagcctctcttgcagtggccaagtgggatgttgcagaccaatcatttggcggccaaactgcaaaaggaaacccaggagaaagagatgcagtgattcgagtggctggtcaggaaattgccatttacgaagctctagtctgctctggactgaataaaaagaatattaaatcgcattttgataagctcatagattatggtaactgtgatttatattttcacgtgatttattcatatgctaaagagataaatcctttgcttgactatgtaagggaaatgttaaaagaaaatattccccataatcttacctaccttagctgcgaggaattaatgcctcctgattatgaaataagtgggtatctggcaacttatcgggtagatcatcgagaggtcgcagtggtgttcatggtggctgacctcagaaccaaccgtttttga

SEQ ID NO: 450027 - DNA, 264 bp, Serratia marcescens
atgttgaccgtttccactcccaccccatttaccccgtcgccggtgcttcctggcggttacaccccgcgcgaacgttttattcgcctgccggaagtgctctacaccaccggtctgtcccgctccaccgtgtacgagatgatgagtcgccgacagttcccggctcaggtctccctcggcggtaaaaatgttgcctggctggcctccgaggtcgaacagtggatggacgaacgtattgccaaccgtcatcaggggagcgccaactga

SEQ ID NO: 450028 - DNA, 309 bp, Serratia marcescens
atggaaaacattttcacatcagaacccgccactaacaccatcactctctaccgcgaactgttcagccaactcgatcttcatgaacttactgccacacagcttctcgaccttgctgcactttcagcggaacatgcggaaggtctttgccatgggctgatgctgttcgatgatctgctgcaaaggaaccttcagcccgatgacacccagtgggcacaactgaatcactacctcaatgctatagctcacttggtgcccgccctgtgcaacctttatggccgcgtactgcggcagatggagtgccagaactga

SEQ ID NO: 450029 - DNA, 270 bp, Serratia marcescens
ttgctgttggggttagccatgggcggttatgagcaaatgtccgaggtcaccaccaaagacaactttttcaacatcaagaacgccaaccgcgacgtactgttgagtgcgcaccgcatacctccacagataatggggattatcccgaacaacacctacggcttcgaggatgtgaaaaaggacgctcaggtgtttgtacgcaacgatttaacgtcgctggtggagcgtatatatgaaagaggcgaacaactggatcgaagaagaggtgattag

SEQ ID NO: 450030 - DNA, 1212 bp, Serratia marcescens
atggtttcccccctgaatttagaatttaaaagatcaaaagatggtctttataattacaatgtaaaggcaaggaatggtgaggttctttatactagtgaacactatactaataaaaaagatgcgaacttatgtgcggaagaacttatttctgctttgtctgatggcaaatatggtaggagaattgagtttgatgtttttagaaagccttatataagtgttattactaagaacggagttcgcatcaacagtgctccatatgaaaatatggatgagctaaggggagggtttgaacgacttgagtacgctattaaaaaaataagtaaaataaaatttgataactggaattcttccagtgaagaagatagtaggataggtagtgtagtcgagtttgttacaaaagtattttcaattaaaagagaaaaaggatgcgcatactattttagagggcattctgattatcgatatgaattagttccggggatatatagaaaagggaaaggatggattaaccatgagcataaactatttagggagataatgcttaggtgtcctgttgagtttagaggtaatagtacaacatttcaaaatcttgtaaagatgcaacactacgcattacctactcgattgttagatataacaaccaatgctctaatggcattgtacttcgcttgtgttggcgaggcagaaaagaaacaagatggggaggtcatagtttttaatataaatgagtcggaaattaaatattatgatgattctgaagtgtctttgttgtctaatctgagtaaacaagattacttgtttagtttggatgataagtcaagacccaaaaatagagaggacttgagggtcatccaagatattagtatcaataagaggaggattatggatgcagcaaaaagggacggttgctatatagagagtgtctatttttacgattttcaaaaggtcgtttgtgttaaaccagagatggacaacccaaggattatccgtcaggatggggcttttctgctttttggaatggaccgcgagaaaaaaatgccgccaataattcctcctgcgtacttatataaccaccctgaaggtaagttaataataaagtcagagagtaaagagagcattatagctgagctggagtctttggggatttcatcaagtggtgtttatccagaaatagaacatgtagcatcacatataaaaaacaaatactcataa

SEQ ID NO: 450031 - DNA, 345 bp, Serratia marcescens
atgatgaacaacacactgaaaattggcggccatacggccgtcatcaacttcgaccctgaaattgaaatgttccggggtgagtttgtcgggctgaacggtggcgccgacttctacgcctacagcgtggacgagctgaagaaagaaggcgcgctctcactcgcggtctttctggatgagtgccaaaaagacggcatcgagccttacaagtcgtatagcggcaaagtaaccacccgtttgtcgccggaacgccatcaggcgctagcccttgccgcacaggcgaccgggcagtctattaatgagctgctgaatgagggtgttgatttagttattgaaaaacattcctga

SEQ ID NO: 450032 - DNA, 1152 bp, Serratia marcescens
atggttgacgaaaacagcatgatgcgagcaagtttgctatcatatcgcaatagaaagctgcttaatgagagagccgatgtaatatctattgttgaatttattatttattctgatagtagattcaccggtcaggtattagatgagggagcatattcttttttgaatatgcttccattatctcatgatgatgtagttccttctattacagtaagagctaattggtctgtagatataaataagacgatattttcaggtacggaaccctatacttctgattttcatggaggatggtatactgatgaaatagcggcactcatcagcttaaagcttggtgttagagcccacgcagggacagtcacaagagaatataattactacgcccccgagtatgggcaaccaagagcagaacagagcccacccccccccttttccgataaaaataaaagatcaattattccattctgtaaaaaaaatataagtatcgaggaattgaaagaagtaaacaacatacatcaccttaatgaaacggatttcaatcacttaataagagcggcaagaagttttcaggatagcctttggatttgcgaatcttcacctaatcttgcatggctactaatggtttcagccttggagactgcggctcaacaatgggatcaaagtaagggaagcaatattgaaaaatttaaagagtcaaaacctaatttattcaatgcattaaataacgatcaatacaaaaaccttataccagttatttccgatgagttttcaagtacgtttggagcaggaaaaaaattccgagatttctgtgttgaattcctacctgatgaaccacaggaacgtcctgatcttgggcgtataagatggaagaagcaaccactgaaagatatatttatcaagatttataacttgcgttctattgcactacatacaggacaaccattcccagcccctatgtgctcggcacccgataggcattctggcatttccgaaatgggtgtgactgcattagcctcatcaacgctaggagggacatggaccccaaaggaggcgccaatcaatcttaatatatttttccacatgacccattctatattaaataaatggtgggatagtttataccgaccaaatcgaaataatatttctagttcttaa

SEQ ID NO: 450033 - DNA, 1542 bp, Serratia marcescens
atgggtgccaatggttcactagcagtatttgccatacttattgcttggtatactctcttgacagacgagagacgtgtagatttaaaattgcgcatatctaaaataaatattttatttgtcatcatctttacgttggtaattttggtaattatatactccaaggttttgttggatatttttccgttaaaacctatcccatgggtgttaggttttaacgaagatacgttagcttttacttgcctatgcatcataatcgcattttttgggtttaaaaccttaggtaaaagaataccaaaagcaaatcttacctattggatcagcgtttccgaaaagtatatgcgcgcaaaaaaaatagaacagctgggatatctttttgataaataccatgagcaattattcgatgttattagtaataagaaatggtatgttcgggtacataattatttaaatccttcactatttcacatgatggtggatagagaaaagataaaaaaaatacgattcaataaaataaaaaaaattctgtcaaagtgtttcccttatgaagacaaaagccaggaagccattcagctaaatatatctaagcttctgaaatcaaaaaacttcatccattatttaattgatacataccctcacgtagcaatgaaggctagctgtttacgattgagggataacaatgaatataatacaaatttctttacgtatttaatatctaaccaaaacagtattatgtatagggaactacgcgataatcaaaatcgatcacataccggggagtacgcactcgacgagagcaacgccttgcttaatttttatttaaatgatattcgtatagcgataagtgtagggatatggaaacctgtgggtgattacgtagttagctacataaagaaacagaaaggaagctctaacttttacaatcagccggataattacttttcaagtagtgatgagcgctgggagtgcccaatatttgttgggctagtgtttttcgatgtcatggtatctacagccatattcaaacgttcaaaagatcatatgtggctcatgtattatcgtcattttttaaaagaaatacttgagaaccatgaaatatcggaaattatagatgttaacagagagtttcctatgcgatttgattatctaatatatgaattaatccataactgtagtgtatgggcaggggcaactgaacatcttgactatgacaaatgggcaattgaagaaataaagcaatcaccagagtacgttgcatctactaccttgggggaaatgatgttcctgataataaaatcaggtaaacttcaggatgattttaaaatatatattttagaaatgatcattaaaagaatgaggtcatttgataataacaataagtctttttactccgagagaattttcaccaaccttatccggccatactcttattcaaaggttgatgcaaacgcagcaaatgaattgcgaaaactatataaaggtgttgatcatgttctaaaaaataaaagttcaacttttgaagttgaactttctaaaataccttag

SEQ ID NO: 450034 - DNA, 465 bp, Serratia marcescens
atgaaacgatatggctataccctggtggcattgctggctgtcggctgcggcgccatggccgcttattcgctgttttttaaaccgcaggttccggaatgccgggcggtgcaacataagaccgacaacgttgccggccgcagcgttgagcgcatcattctgatcaacgtggttcccgatggcccgcggcgcattaacatattgttgaatggcagagtctatgatggcgcgaatcggtatgttatctcgcgtatcctggtgatggactaccggcggcagggaaataactatacgctgtgggtgagggaaaatatcaagaaaccgcaagattcattcaagattgagggttttaatcggcggctgccggtgaagggaatgcagctgcactggcggattgaacggctagacagccggcatttcttgttcgcggataaccatgcgccgttatttgtgtgtgttacaccctaa

SEQ ID NO: 450035 - DNA, 540 bp, Serratia marcescens
atggttgcgtatgaatatgcatcctctcatccagaagatgtgaaacgacttgccctgatggaagcggctattcccggtttaggccttgagactttgcaagactcggcaaaattcccacatctttggcatttcggttttttcattgccccaggtgttgccgagtcacttattttcggccgtgaaaaaatattcttaacccatttcattaaagaattatcttacaacacgtctgcctttactgatgatgacttcaatgaatactctgaaagtatgagcgctccaggaacattaagctcaagcttgaaacattatcgtgcatttcccgaggatgctgtaaataatcgtgaaaatgcgcgaaaaaagttaatcatgccaatattagcgattggtggctctcatggaatgggtaaaagagtgggcgaaatgatgtacccacttgctgaaaatgtacaaatggcggtcattgaacaatgtgggcattggattccagaagagcaaccagaaaagctaacaaagttatttcttgatttctttagttaa

SEQ ID NO: 450036 - DNA, 972 bp, Serratia marcescens
atgaatattatgactgaaaatgacttgcagcaaataaaaagagtattatttggttcgtatttagggtttattttgcctaagattttcgattgggattatggtacttacttttcactatacccaatacttattatgggcttatctccggtaattaatgctcatatcataagacagtttttgtttagtggagtgtttagcgttgctgttgcttattttataactgttaactcctctgtatctatagtcacaacaataacattatcatttagtataaatgtattttgcttttggattatgtctacaaataccgcatttttagctggcgcacaatccttaatttcaatacatacattaactcatctgggcagttatcaatctacaaatttaagtgctgtttatacatcggtgattctggcaacatttattacagctgctattgttgccatttcattctacttcttcccggatagacacgaaaggactataatccagaaatctgtgcagagtaacattgataatataaagaaaaccatgttgggttctgttgtgtcttcggtatctttaatgttttttatgctgtttgatgagaaagattcaatagcagcccaagtatcgtctttattagtgttgtttcctatcaattggaatttgatttttcattcaagtataaaaagaatatatgggacaattattggttcatctactgctttaattatacaggtaatagttagtgtctttaatgaaaatattttcatcatttcatttctatattgtttctgtattatgctatatacatcagcacatataaaagagaatgctggacctgcaaaatggtttgtagccttaactacacttagtgtcattgttggcatgaaaactatgaatagcgacatatcttattcatcattgtatcgtttaacgtcagttccaatagcgattgtagtaactataatgataacttatataatgtaa

SEQ ID NO: 450037 - DNA, 1194 bp, Serratia marcescens
atggtcacttttgagacagttatggaaattaaaatcctgcacaagcagggtatgagcagtcgggcgatcgccagggaactgggtatctcccgtaacaccgtaaagcgttatctgcttgcgcagtctgaaccgccaaaatatacgccgcgtcccgccgtcgcttcactcctggatgaacaccgggactatattcggcaacgcatcgccgatgcccatccttataaaatccctgcaacggtcatcgcccgcgagatcacggagcagggttatcgtggtggcatgaccatcctgagagagttcatacgttcactcgccatccctcaggaacaggagcccgtcgtgcgcttcgaaacagaacctggacgacagatgcaggttgactggggcaccatgcgtaatggcaaatcaccacttcatgtgttcgttgccgttctggggttcagcagaatgttgtatatcgagttcactgacaatatgcgctacgacaccctggaagaatgccaccgtaatgcgttcagcttcttcggtggcgtaccgcgtgaagtgctctacgacaatatgaaaacggtagtgtcacaacgcgatgcctatcggaccgggcaacaccggttcaacccttcactgtggcagttcggcaaagagatgggcttctctccacgactgtgccgccccttcagggcacagactaaaggcaaggtggagcggatggtgcagtacacccgcaacagcttctacatcccgctaatgacccgcctgcgtccgttggggatcaccgtcgatgttgaaacagccaaccgctacggcctgcgctggttgcacgatgttgctaaccagcgcaggcacgaaacaatccagacccgtccctgcgatcgctggatcgaggaacagcagtccatgctggcgctaccgccggagaaaaaacagtatgacgtgcaggtagacgaaagcctggtgaccttcgacagacagccactgcatcacccgctgtccatctatgacacgttctgcagaggggcgcatgatggtggaactgcaacatcaacgactgatggtccttgccgaacagctgcagctggacagccttatcagcgccgcacccgctctgtcgcaacaggctgtggatcaggaatggagctatatggacttcctggagcatctgcttcacgaagagaaactggcccgccaccaacgtaa

SEQ ID NO: 450038 - DNA, 273 bp, Serratia marcescens
atgaaaaaggtgctggccctgtgcctgagcggctattccgcgctggcgatcgccggctttgacgtggtggcgctgggcgtcgacggcggcgtcagcgacggcaacctgacttcctacctgatccgcagcgacaatcagccgcagtatgtggcgctggacgccggctcactgctgccgggcatcgccaaagggctggagaagggcagtttcccgcaggtgacccccgagctggccgcgccttacacgccacaggctacgtgtttcggcagttga

SEQ ID NO: 450039 - DNA, 2412 bp, Serratia marcescens
atggggtttaactatctattggcgcgagggaacccgagaacccccgcgacgagtacagtgaacaactttgcagatttcagcacatccattttatctaagcgtgtagaaatttccatcactccaggaatggcagacgaagaacgtcgacaggaaaagaggaaactgtactggtttgcacccccggtaaaacaggcggggctgcggcgtatcgtgtcgaatatggcgccatgcccgtatggttgcctggatatcgacgaggccacgccgggggcaatcccggtattactggaccggttaggcccgtattcggcctttgcctaccagacagccagccatacacccgaagagccccgcctgcgtgttgtgttcgagtattcccgcgcggtgacagccgccgaacgcgggattgttagcgaggcaaccgaaactctgttgatgcagttagcggagtttgccctggccaatatcgagggtaaaaaggccaagtgggtaaacggtgctgatcacgttgtttttgaccgtggcgtttacagcgcacaaagctatttctactgccccgatgcgggggcggagagttaccagtttactggcgaggcggtcgatgttgacgcgctctccctgcccgtagccccgccaaaagcagataagggggccagcaaaggtaaaggaaagaagcaacgccagcgtgacgctgaggcagaagattttgacgattggggcagctttgactctgggccggatgaatatgctattgctgacctgcgcagtgctttatggtttccgacgatgttagaaaaagcgtatagcaatagctcgtggattgacaccgggtaccgacttgcctcgctcaaaggtacgacttttgaggatgatgctcggcaggtgtggatcgactggtcggtaactgtgcaggatgcctatgacgacgacttaatcgacgtagcggcccaacggtgggaaggactggagcctgacaagaccagctataaggccatatttgcagacgctcaatcattgggttggagtaaccccggcacctggcgggctcgtgctgcaaacgttggtgatatggcggccagtactcggggtgaactgctggcgcagtattacggcaatgtgtgcctgaaagccgatggcaatagggtttatcgctataccgggcaggggtgggagcacataccggacgcagagctacgtcgccagctctcgcatattttcaaggagaacaaggtacctttcaccccgcatgaggtaaaaagcgctattgaagctatgggaatgctgctgccgctgatgggcgatacacctcgcaacctgataggttttgcaaatggggtctatgacattgaggcgcagcacttccgcccccactgcccggaggactggctgacctgtcataacggggtagagtatacgcaaccggtaaagggtgagaacctgaaagaccatgcgccaaactttcaccgttggctttctcattcggctgatagcgacacgcggaagatggaacgtatcaaagcggcgctgtatatggtgctggccaaccgctatgactggcaattattcattgaggtgacaggcgctggcggcagcggtaaaagtgtgttgacggggattgccaggatgctggccggagagcgcaacaccaccagcggtactatgcaggatatggacatagcccgcgaacgtgcgtcttttgtagggaaaagccttataacgttgcccgaccaagccaactatactggctccggcgcggggattaaatccataactggcggtgatgtggtgaggattgaccctaagcacgtacagccctttgaaacgattattcgtgcagtggtgatagccaccaataacgaacccatgcgtttcactgagaggcagggcggcatatcgcgacggcgggttatctttccgtttaaccgtgaagtgtcagggaccgaacgggaccctgcgctgggcgataagattaaggctgagctgtctgtaattgtccgctgcctactggtagattttgaacaatccagcaaagccgaggcattgcttattgagcaacgagattcagtggaagcgctgcaggtaaagaacgacaacgatccgatgtacggattttgttcctacttgataggcttacctaatcctgatggtatgtatatgggtaatggacgtatggcggataacccacttttatacctctaccatgccttcagggcttatctggaagcgcacggttaccagcgggtcccctcattgaataaatttagtggtgacttgcgtgacaccctcaaagccttcggtgttgtgctgaagaaacacccgacgaataaaggctatcgctataacgtcaacctgaccgattccgcgcgagattggttggaaaacaacggcgaggaacccccgctgacgttttga

SEQ ID NO: 450040 - DNA, 219 bp, Serratia marcescens
atgcgtaaacacctctcatctacaaatcttatccaattgatggaacgccagaaaggagtaggccgcgaggatatacagacaaccgacagccaccccactttattgcccaacgagccaacaggcacatatgcaacaaatcgccatacccgccgtatgttgcgtaagaagttcggtattgaagctaaaaaaatgtgtgatgttgaagggggcggtaaataa

SEQ ID NO: 450041 - DNA, 333 bp, Serratia marcescens
atgcgtaatctcaacgtgtacacgctgatgacggcaccaatgaccggtatagagaaagagttgaatgaagccgaactgcagattgccgctgatgcgggccgcttggcggtgaacgactatctgcgcgggttatcggctatcggcaatatcacttcgtgggcgtgtgaaaaccctaactacaccgatcatgttcacgatctccctgcgttggcagacttcctcaaacacactgcgcagatggctagggttacaggcttttacagcgaccacgccgactatatggccgatctgaaagataacggtcaccaacaaggggagaaggcaaatgcgtaa

SEQ ID NO: 450042 - DNA, 201 bp, Serratia marcescens
atgcataacaacaatatcactcgcgtttattcacatcctcaagatgtgatccacccgttggcggtgttcctagaggcagtacagtttctgcagcttgacccgcgtgctaaagaactggcagctgatctgatcgcttacgctcaagaaatggctaaatcgcatacgttggccgccaaaaataaggaggcagacaatgcgtaa

SEQ ID NO: 450043 - DNA, 600 bp, Serratia marcescens
atgcttaattctatgttctcgctgatgggtcccgtttctaccccttgcccggaactggattacgaaacaaatcaagccttaggctttatccctaaacgctcgagttcttttcgccctaaagttttaagccagttagccaaactcataccggcggttgaagccgcagcctcgaattgtgcctttagttcaggcgctatccgtacttggaaggccggggctttacctccccctttgggctgcttatctctctgtatcattgttgacatgtgtgtacctatttggctaacatcaatttcgataggtacgtaccttagcacggtgatatctacaaaaacaacgccccggagtgcgggaacactaccagggcgtctgaccaacaacgttatggagactaacgctatggctaatccgcagtgtaaccaaactcaccctaaatttcagtatcgctttttggccatagaccgtgccgaacgtcaggctaaaccccgccggttgtccattgaggcctcaagtgagcagggggcacgccaaattctcgctccccgcttcatcctctctttcactgctcgtctgccgagtctggaggtgggtcatgcataa

SEQ ID NO: 450044 - DNA, 216 bp, Serratia marcescens
atgaacactcaagatttcacattccccctcagcggtaacgctcgcgccgctgccgtggcacgctttttgtcagtgagtgaggccacagtctggcgctatgccaaacgcccgggcttccctcaaccggtaaagctgtctgaccgcgcaacggtatttgatgcggccgccgtgcgccagtggcttgagtcacgcaagcaggggggcggttatgcttaa

SEQ ID NO: 450045 - DNA, 717 bp, Serratia marcescens
atgaagccacttatctatccctttgaaaacccctcaatgaccgttggcctggcggctataaacgcgacagaaccagcgtttatagttgagccgcgccatcttgaggcttggtttaaggagggtgctatcggccgctatatgctgatggacgacatacgggagttatggaaccgtgagggttttggaacgctatttgacctgttctacggtgaggccaaacactgcacgttaatcgcatcctgccgaactgatatggaatggagcaaaacagaacgcggggaaaaaccaacgtatagtgtgtttggtattgatactgcagcatcactctatcaaatgttacccgatatcgagcaaggggggcgatcttcggatcctccgcggcaaaatatggataccccctgcccggattatctggaattggacttcccgatgccggaaccagtcctaccccgctatgaagcgcagaaaatttacaacatgattcatagtgttaatgcgctagaagttcaagaaaaagcgccgaaggttcgaacaacaaagcttccgcttaaagcgcttgtagaggcattaacagtagttggccttaccgatgaagattacaagggggagatacctaccttgcaacagaaattgaccaggctgggcttaggcggaactctaaccagcatcgacaagaatacactggatgattggctaaaaaaaggtggcgtcaggtga

SEQ ID NO: 450046 - DNA, 384 bp, Serratia marcescens
atgccagttacaaatcatatcggctatgacgaaaataccggcaacaagattaatcggcaggttaccctaaagcttcataatgtggctcgcgctattgcggtatccaatcaggaagaatctttgcttataacaacccctgaaggccgtaatgtctccacgccgctaacctctaacgatgtggcagaacttattgatgcctacttcttccctgtgttgaaaatcgaatatcccgaaggctggcagttggttgccctcactgtgcttgataagtgcataacagaaagcgcattactttcagattttggggcaaatatgtggcgagtgctgattgcctatgtagcggagtggattgacaaagtgaggtacggcgatgcaacccattga

SEQ ID NO: 450047 - DNA, 174 bp, Serratia marcescens
atgacagtacgtgaaggcgtgaggccagtactactcagcaaagcgcagatgaacgcgatccgacaaattcaggaagttgaaagacgcaagtcagcccttggtctggcacccagcattcacgagatcgcccgtaagctgatcggtaacgcgttaaacaatatggcggcaggttaa

SEQ ID NO: 450048 - DNA, 540 bp, Serratia marcescens
ttgagcggtccggtctacaaagttcccccacaaagccgagcttcaatccgcgctttggcgaatactgttcgacgttcgctaggtattacggatctgcatttccctattatggaagtgttggagttcggtcttccacgcttagataaagactatgtatttgaagtctctagcgtacaggaaatgggttcaaaccatggattaaccataccgatagaaaaacggattgttctacgtgaagacgtgtacgaacgggccttggaagggtcaggtcgtgatcgaatgactgcggcacacgaattcgggcatttgctattacatactcaagtggcgctcgctcgtgctgactcaaaagggtctgtgaagccttacgagagtagtgaatggcaagccaactgttatggaggagagcttctagtccccgcaacgcacgccaatgcgctgttgggaatgagcttggatgctatagcaaagcactgcggagtgtcactcgaagccgcggagtatcagatgcgcgaaattagcaaagcgtataaaaactaa

SEQ ID NO: 450049 - DNA, 204 bp, Serratia marcescens
atgcacaaaaatcccattatttttaccaaggatattctcgaacgttaccagatttcggagaaaacactgtggaagtggagagataaagacaagatgcctagggctttcttgctccctttccccgccccaacaatccctggagttcccaaccgatggcgccagtctgatgtgatggaatgggaggagaataacaagaagatatag

SEQ ID NO: 450050 - DNA, 1260 bp, Serratia marcescens
gtggcgaaactgacagatgtacaaatcagggcatgggtacgggcaggggagcatttcgaggggcgttcggacggtaacgggttatatctacgctatcgagagaccgacaaagtccctgtatggcgttaccggtaccagatcgcaggaaaatcacgtgtaatggttcttggttcttttgctgtgctgtcgttggcacgtgcgcgggatgctgtcaaagagcttgctgcacgcgttgccctgggatatgacgtagctgccgagaagcaggagcggaaagcggctatacgggagaagatggaagaagagcgaaatacggtcactgtggccgaggtggccgccgcctactatacccagcagatcctaggccgtgttaaacggcccgagttcgtgaaacagcagatcgatagggatataaatccacacctcggcacgatgaacgtgaaggcggtaacccctttgaacatcgatactatgttacaggcagttgtttcgcgaggggcgaaaagcgcggctatcaaagtgttgggcgtcacccggcggatctttgactatgcagtaaaacgccaatacacggagattaacccaactgcggcctttaccgtcgatgatgctggtggtgcagaaaaaagtcgtgatcggtggctaacccgagatgaacttatccaattattccaggcgatgcatatcacaaagggattcagtcgacagaacgagatcagcatgaagctactactggccctgtgttgccgtaaaatggagctgtgcggggcgcggtgggacgaattcgatttagacggggcggtgtggcacctaccaggcgaacgcgtcaagaacggcgatgcaatagatatcccgttggccccttccgtggttggctggttactcgagctgaaagaatttgccgccggtagtgcctggctgctccctgcacgggcagtatgcggacgagggttaccgcacatagctgaaagcactttacccgtagcgctggcgaaggttaagcgccttctccctgacttgccccatttcaccctgcacgacttccgccgcactggccgtacccatttagcggcgctgggcgtggatcccatcgtcgcagaacgttgccttaaccatcggatacagggagtagagggcatctataaccggcaccagtattttgaagaacgccgggcagggttacagctttgggctgatctgttgatggcgctggaacagggcgaaaattacaacgtggtccccatatcaaacacaaagtaa

SEQ ID NO: 450051 - DNA, 294 bp, Serratia marcescens; identical to SEQ ID NO: 446624

SEQ ID NO: 450052 - DNA, 882 bp, Serratia marcescens
  misc_feature (282)..(291): n is a, c, g, or t
atggttaaaaaatattatcaaatgtatttgccattgatgccgttcgccgttgaacagttggatttgaaatcgcatgacatcgttatttccagcagccatgcggtcgccaaaggcgtgctgaccgggccggatcaattgcatatcagctatgtccattcacctatgcgctatgcttgggacttgcagcatcattatctcagggagtcagggttgagcaaagggttgaagggggggatcgccaggtggtttttgcaccacattcgccgtgcggtgatcccacannnnnnnnnntatccccctgttgacatcgagaggttctcgatgtcagaaaagaaggaaaatttctatcttacggcctctcgaatcgttccgtacaagcgtattgatttgatcgtagaagcgttctccgccatgcctgacaagaaattggtagtcattggagatggttcggaactgaataaaataaaagcaaaagccagtgctaatgtggaaattttaggctatcagaataatgatgtgctcgaacgctatatgagcaaggcaaaagcgtttatctttgccgcagaagaggacttcggcatcgttcccgtcgagtctcaggcgtgcggcactcctgtgatcgcttacggcagaggcggagcgctggagacagtaagaccttatggtgttgagcgagcaaccgggcttttctttgagcaccaaactatcgcgtcgttgatcgacgccgtaggtcgatttgaacggatcgcggaagaaattttgccccaagattgtcatgctaatgcgctaaagttttccagggagaggttcagaaatgagttcagtcattatgttaataataaatggcgggcattttacgcggaaaagaagattcactattga

SEQ ID NO: 450053 - DNA, 1227 bp, Serratia marcescens
atgagttatccgattgaacgcgtgcgcggcgatttcccgctgttggcgcgtgaggtgaacggccaaccgctggcctatctcgacagcgccgccagcgcgcagaaaccgcaggcggtgatcgaccgcgagctggatttctaccgccacgggtatgcggcggtgcatcgcggtatccacaccctgagcgccgaggcgactcagcagatggaagcggtgcgggaacaggcggcgcgctttatcaatgccgcctcggcggaagagatggtgttcgtcaagggcaccaccgaaggcatcaacctggtggccaacagctttggccgccacctgctgcagccgggcgatgcgattctcatcaccgagatggagcaccacgccaacatcgtgccgtggcagatactggcgcaagagcgtgggttgcagctgcgggtgtggccgctgcagccggacggcacgctggatctggcgcggttgccggaactggtcgacgcgtcctgcaaactgctggcgctgaccgaggtctccaacgtgctgggcaccgtcaacccggtgcgtgagatcatcgcccgcgccagaaccctggcgccggatctgacggtgctggtggacggcgcgcaggcggtgatgcaccagcgcgtcgatgtccaggcgctggactgcgatttctacgtgttttccggccataagctgtatggcccttccggcatcggcatgctgtatggccgccaggcgttgttgcagcagatgccgccgtgggaagggggcggctcgatgatccggcaggtcagcctgacggcgggcaccaccttcgccgatccgccgtggcgcttcgaggccggttcgccgaacaccgccggcatcatggggctgggcgcggcgtttgattacgtcgaagctttgagcctgaatgcgatccacgattatgaacagtcgctgatgcattacgcgctcgaggcgctcaagcaggtgccgacgctgaaaatctatggtccggcgcatcgcgccggggtgatcgccttcaatctgggagagcaccacgcctatgacgtcggcagcttcctcgatcagtacggtatcgccattcgcaccggccatcactgcgcgatgccgctgatggcgttttatcaggtgccgagcatgtgccgtgcttcgctggcgttatataatacccgcgaagaggtggaccggctggtggccgggctgcaacgcattcatcagttattaggttag

SEQ ID NO: 450054 - DNA, 2484 bp, Serratia marcescens
atgttggatcgcattattgcgcacacgccgctgggccaggagcaactgctgttccgctcgctggacggcatcgaagcgctttccactcctttcgacttctctattgaattgctgagcaccgacgcgcggctcgatcgcaaagcgctgctcggccaaccgctgacgctggagatcccgacccagggctttctcagcgccccgcgctacctgaacggcaagatcaccgccatcgccgtcagcagcgaagagatcggcggcacgcgctacgcggtgtataacctgcacgtgcagccggatctgtggccgatgaccaaagaccgcaacttccgcatcttccaggaacagacggtgccgcagatcgtcaagaccctgctggcggagcacaacgtgcagctggaagatcagctgaccggcgactatcgcctgtggggctactgcgtgcagtacaacgaaagcagcttcaacttcatcagccgcctgatggagctggagggcatctattactatttcaaacacgagatgggcaagcacacgctggtgctcggggatgcgccccaccaccaccagccctatcccggctacgagatgatcccctaccacctgacgccgtccggcggcagcaccagcgaggaaggcatcagccagtggacattgtccgatcgcgtcacgccgggcatctacagcctggacgactacgattttcgcaaaccgaacgcctggctgttccaggcgcggcaaaacccggtctcacccacgccggggcagatcgacgtttacgactggccgggccgctacaccgagcatcagcagggcgagttctacgcccgcgtgcgccaggaggcctggcaggccgaacatcagcagatccgaggcaccgccaccgccatgggcatcgcccccggcagtactttcacgctgtataacgccccgcatgccgacgacaatcgcgaatatctgacgctgcaggccagctaccatctgaaagagaatcgctacgccagcggcgacgatcagagcagcgaacaccgcatcgacttcatcgtcctgccggcggacgtgccctggcacccgccgcagcaggccagctggccgaaaacccacggaccgcagaccgcccgggtggtcggcccggccggcgaatcgatttggaccgacaaatacggccgtatcaaggtgaagttccactgggatcgcttcgggccgaaagacgacggcagctcctgctgggtgcgcgtctccagcgcctgggcaggccaaggctacggcggcgtgcagatcccgcgcgtgaacgacgaagtggtggtggactttatcaacggcgatccggatcggccgatcgtcaccgggcgcgtctataacgaagccagcatgccgccgtgggcgctgccggccgccgccacccagatgggctttatgagccgttccaaaaatggtacacctgataatgccaacgctcttaggtttgaggataaaatgggcaaagagcaggtttggattcaggcagaacgcaatctagatgttaatgtcaagaacgatgccagtcgaaccattgcaaacaatcatactcactatgtcggtgctgacgagttgtaccgtgttgaaacaaatcgagttcaaggaaccaaaagtgaagagcatttattaaccggtaaaggaaaaagtgactctgtcgttgaggactatattattgcttcagggacccgcttgcgcctcgaatgtggagaaagcgctattgagcttactgccgatggacaaattaatattgtcggtaaaaattttaacttccatgtagaaagtgatggttttatcaacacgggcggtaagcttaaccttaacgatggaacgggtgccgcgatcgtcgctcctggttcgggtcataaagaagatattaacaaagcggtaatcgagctgtttcccccgaaagaaaagggaaattcggctttgctcccaagagggccaaatgtgactaagtcaaactcttctacagcaacaccagaaaaaacaccgttgttaaattcaaacagagaaaaaccagataaagctacatttgtcaaagaggttcatgaagccgcaaaaattgaggagcaaaagaccggtgtccctgccgccgtcacaactgcgcaggcaatactagaaacgggctatggtaaatccgttcccactgatgtcaactcaggaaaatatagtcataatctctttggcataaaggctcatggcaatcctaattatgttgaagtttggacacatgaaaatttgaatggtaaaagagtaaagatcctcgacaagttcgcttcatatgactctttcgaagatagtattgctggcagaacagagtttctgacaaaaaacaaaagatatcgtgatctatttaagagcacagaccctaaggaatgggctcaagggttgcaggataaaggttacgcaacggatcctgactacgctaagaaacttattagcataatgaactcacaaggacttctttaa

SEQ ID NO: 450055 - DNA, 351 bp, Serratia marcescens
atgaaaaatttatcagttctacttttcctgctatcattcagctcaatcgccgatgttaattgtgatattctggacaaaaaagcccaagacaatgcagtacgttttgaaaattcaaataatggcttttctgttatcggcaaagggcgtttgtattttcactccgctcccgacttaagatgtaaagaaagcaaagtctttattatacctaacgataaggtcaatgcttacctcgactaccacggttactattacgttatgtacttcaatagtaaaggagaacaagctgagggatgggtcgatagcaatagattaaaggaaaacaatacgggtataggcccgatagaaaaataa

SEQ ID NO: 450056 - DNA, 324 bp, Serratia marcescens
atgagaaaaatatttttagcctgcccctacagccacgccgacgccaacgtcgtgcatcaacgctttatcgccggcaacgccgtttttagtcaggtcagcatgtcgcatccgatcaatctctgtctgcaagatctcgacaaaactgccatcggcaagctgtgggcgccgatcgacgcgctgttcatggcggcgatggatgaattgatcgtgctcgacttgccgggttggcaagaaagcggcggcatcaagcgcgagatggacgctttcgcggcgcgcggttgccgcgtcagcctgtggtccgaggtcgcaggcgagttcaactga

SEQ ID NO: 450057 - DNA, 858 bp, Serratia marcescens
atggccatgggtaagtacagtaaagcattcgcgcagccggaagccatgagcgaagcgcagattgccgaggtgatcgcccgctttgccgccagcgcgcacgccgccgagcgggccgggtttaccggcgtgcagatccacgcggcgcatggctacctgatctctcagtttttgtcgccgttggccaaccagcgcagcgatcgttgggggggcgagctggcaaatcgcgcccgcctgctgctggaggtggtgcgcgcggtgcgcaagcgggtctcgccaggtttttgcgtggcggtaaagctcaattccgccgattttcagcgcggcggcttttcgccggacgaagcccggcaggtgttgctgatgctcaacgaactgccggtcgatctggtggagttatcgggcgggagctatgaaagcccggcgatgcagggcgaaacggcagacgacagtaccctggcgcgtgaagcttattttctgaccttcgcccgcgatctcgccgcagtagcccgcatgccggtgatgaccaccggcggcatcacccgcccgacggtggcgcaacgggtgctgaacagcggcgtcgcggtggtcggcatcgccaccgccatggcggaaattcccgatctgccgcgccgctggcaaaccggcgaagcccctcatgcgctgcccgcgccggtaacatggcgcgacaaaacgctgacgctgctcgcccgcatggcgctgatcaagcgccgcatgcacgctctgagccgcgatcggacgcgcaacgtgcgttactccccgcggtggtcgctgctcatcgatcggtggcgcacccgccgcactctgcggcgctatcatgcctggttacggcaacgttaa

SEQ ID NO: 450058 - DNA, 621 bp, Serratia marcescens
atgacacccacgagaaagctgacggcgatagcgctggtcatcgcctttattcaattcaccaatgccctggaatacatggtgttcaacccaatatttctctatatggccgccgacttttcggtgcccgtcagctacgccggttatgtcagcgcggcctatacgctggcggcggtgatttccggtatcggcgcgttctattggatcggcggcgttgagaagcggcgttttctgctgttcaacgtcgcgctgctgggcgtgacgaccttactgatcgccgccacccggcagttttattggctgttggcgctgcggctgctggccggtctgctgggcggcaccacgatgggcgtggggatcggcttgctgctcaacgccgcgccggccgcgctgcacggccgaatgctggcgacggtgatttcgtccttttcgctggtgagcatcgtcggcatgccgggcatgttgtacctgtgcgaggtggcgaactggcgcgttgcgctggcggctatcggcgggcggtgttggtggcgctgttcgttcccagggatgcgccgcagccgcaggccgccgcccccgtcacgctcgatcgccgtttgttgctgttcgcctccgccgccggtctga

SEQ ID NO: 450059 - DNA, 519 bp, Serratia marcescens
atggcaatgactaagtgcaaagagtgtaaaaaagaggtgtcagacaaggcgaaggtttgccctcattgtggcgtaaaggaacctgcaagaaatctcggaaaagaaactgcgcaggggtgtttagggttggttattttggtcggcgctctctttttcttctttagtggtggtgatgatgacaaagagaaggctgatacaaaaaaagccacacagcagaaagagtgcggcattaacgattcccgatgcgtgtttgagacatatcttgctgatgctgctatccaatgcaggccactcgttgaaaagtcgtcaaagtatgactttgaatggactgatggactattaactccaatgttctctcgccagatacatgatcctaaaaagcatcaaatgatattcattggtgaccaggttaaatttacaaatggttttaatgcaaaatcgacgatgacttacgcctgcactttcgattatcaaacaaagcaaatcactgatttcaagatcgagaacggaaagctgtga

SEQ ID NO: 450060 - DNA, 216 bp, Serratia marcescens
atgaaaaattatgcgtacagtgcgaaaaataacgcattctatccgttaagcatgaaagccatctatcaagacgccggtaattggccccgcgacgggaagctgatcgacgacaatgtttatctcgaattcgccgctaatcagccgcctgcgggaatgacacgcatcgccggtaaaaatggcgctccggcctgggcaccactcaaaacggacgattaa

SEQ ID NO: 450061 - DNA, 1548 bp, Serratia marcescens
atgtcagccatcattacacgacaatatgagcagtgggcagcaagccagacagcccaaaagctgccggcgcgtccggatacgttcgtttttgcctatattccagggcaagatcctgacgccgagatcagccgtgacgaaccgttgccgtccccgggcaatgtcgtccacaccgcgccggtcatgcaatacggcatgatcaacactgatgcggtggtgttctctgttgtgctggacacagcggtcggcgattttgactataactggatcgggttggtcgataacgccagcaacacgctatgcatgattgtgcatacccgcacccagcggaaaatcgcgaccaacggccaggcacagggaaacacgctaacccgcacgctggcgatggagttcaacggcgccgccggcaccacgcagatcaatgtgacgccgcagacctggcaaatcgatttttccgcgcgcctaagcggcattgacgagcgccaacgtctgagcgcattggacatttacggcaccgccgcattttttggtgacggattcttggtgacgcgcgccgatgccgcctatcaagtcaatgctgggctgggatacgtcggcgggctgcgatgtcacctgccggcgaactccctgatcacggtcaagcgatttccgacatttatctgggctgatgcaagttttcaagggcaggtaaccagccgctgggagacagtgattaaactgacagactcggatgcgctgcagggctatatcgatcctcaaggattcccgcattatgtcacgaagttggctcgcatcaacgacgacggcagcgtcaccgacttacgtctgaaaggctcgcagggcgaacaggaggccagtcggttatttttacgcaaagacgccaatctctccgatatgactgacccgaccgccggccgcaataatcttggcctgggcgagctggctacaaaagacacgctcgccgcgcacgacgttggcgcttacacccagggcgaggtcgatcagaaatttttcccgtattccggcggcacaataaccggagcaacacaagttatcgggaatgtcacttcccgaggtggttcattcgtctttcaggataatgacgggcaccagacaggaattgttgcagcatggaatgatggctcgtttgcagtttctcgcagtgatagcggacgcggcttcggaattgataaaaatggggtgttttacacctccgaaggtatgcccatatacgaatacggcgcccgtgtgtacagcccgcacaacaccccaaccgaaggaactatgggaaggacatggtggtggagagacaaagtgacagggttaatacgccagggaggttacgtcgaagattcgcagagagaggggtttttagacgttaactttgcaatcccattccctaatgccgcaacagggttttcgttcacaccggcatcagtgccagatacaagcaatatgaatatttctattgcgagtacaacaaatagcagcatgaatatctatcacggcaggcaagagcataagttctactgggaggcggttggatactga

SEQ ID NO: 450062 - DNA, 621 bp, Serratia marcescens
atgaaagaaataataaagaacatgttaaaccaactgaaatatgcatctgaggcggacgcctgggagcctcgtgtatatgacgcagttattaacgctgcaaaattaattgaaaatcaggctgaaaccattgactgccttaaacgaagccgactgcacatcgttgaatatctcagtgaactgcaagggcgttacgttactctgcagaaaaatagcactgcgaattttatcctcagaaagaaaatcgaggcgcagcgggatgccttgctgatggctatcggtggaaccgaagacggaaaaatcattgatatcaccaagcctgaagaagccacggcgcaagcggtaattatcatccgtcaatctttccgcgacctaaagcagtatcgcgatcttgaagaaatcccgttcggcgccgttgagcaggatcatgaagtggcccagctacagcgccaggtcgatgaaaaagatttgttgctccaacaggcaaaagaaaatgaacgccgcgcgctggattgctttgctcgcgcggtggctttcgctaaaggcgttgaatgtgatccgtgctacatcaccacgctggaaaaagaagttgctgacttggcagacgaggggcggaaaaaatga

SEQ ID NO: 450063 - DNA, 474 bp, Serratia marcescens
atggaaatctctcttactaattacttcggcttgttcacacacacatacaaaaatgtacttaaagcactcaacatcaatgacaatgaaattgattggagttcggagaaccacagttatttgagtgaacgcactattgttatcttcaaacttgatatgttgttgttcgattataaacaaaagaacgatcctcatcgcttaatccttaaaggcaaaaacgccctaacttcttatttggtaaacgtcaaaaaactgtcgctcaatgacgcaaaaaacataacccttgctgacgctttgactttgctcgctagcgagttaagagaggtcaacatctccgatgaaataatcagccacttgcgaaaagacgctgagttcattttcaatgattacccttcaaaacagtttgtttatcaacatccgggctatcaagactcagaatgggatccggatctctgggataaacgtttgctgaaataa

SEQ ID NO: 450064 - DNA, 339 bp, Serratia marcescens
atggcagaactcgcagacagcacgatctctcagctcgtgacgccggaactttttgccgactacatcggtaagacccctggcgccattcgcaagatggcagcggccaacaagcttccggtgatccgaatgaaagatccggagaatcctgacgggcaaggtgagatttatattcacaagggggaatgggacgctttcgccgatcacctggtttcagtcgctggccctgagtggcacgcatggaaagaccggttgatgacaagtggccctggtgtgattcccaaacgtcgccgggtaactaaagcaccgaaagccggcaccgcagggagaaaggccgcatga

SEQ ID NO: 450065 - DNA, 987 bp, Serratia marcescens
atgtcgattaagaagctcgatgatggtcagtatcaagtggacatcaggccgcaaggtgcagcaggaaagcgcatccgcaagcggttcagtaaaaaggccgaggcacaggcttatgaaaaatatgtgctggtcaactatcacgataaagagtggatcgataagcccgcggacaagcggccgttatccgaacttatagagttatggtgggtgtatggtggacgcaatcagaagcatggcgagatctatctcggaaagctgaacaagatcgatcgggatatggggtatccaaggtcgtatatgctgacgcgcaagtttttgatggagttccgttcgcgcaggctccaggaaggcgcacaggcaacgacggtcaatcgcgaactttgttacttgtccggcatgttcactcttttacaggaggcggaggagtttcacagcgacaacccaatccatgctctgaaaaagctgaagccgaaaaacaccgagatgtctttcctggcagatggtgagattgaaacgctgctttcggtaatgactggcgacaacttgcgtatagccgttctttgtctgaatacgggggcgaggtggggggaggccagcagcctcaaagccgagcaggttatcggtaaccgggtcacgtttgttgaaacaaagaacagtaaaaagcgctcgattccaatatcgcaggaggtcgccgatatgattttggagaaaaaatccgggccgttatttaacgcaaattacgcgcatttccgaaatgtcttgaaagagattaaacccaatcttcccagagggcaggctacccatgttttgcgacacacattcgcaacgcacttcatgattaaccggggaagccttatcacgttacagaggattttgggtcatgcatcgatacagcaaacgatggtctatgcccactttgcgccagactatttatcggatgcagtgacgttaaacccactgcgcgggatgtccacattttgcccatag

SEQ ID NO: 450066 - DNA, 555 bp, Serratia marcescens
atgagcaagaagcgagaaatttttatctcggttgacatcgaaactgctggtccgatcgtcggtgagcacagcatgcttaccgtgggggcctgcctagcgcatcagcctgaagtgtctttctcagtaatgctcaagccgattagtgataaatcggtcgcagaagccttggaagtcacaggtcttacgttggagcaggcagaaaaagatggcctagcaccaatcgaagccatgtcgaattttgctgcctgggttaccaagaatgtgcctgaagacagcatgccggtattcgtcggactgaatgcaccgtttgactggggattcgtaaactactatttcctgaattacctaggtgacaacccatttggcttcacagcgttagatattaaagctcttttcatgggagtaacgggctgttcttggtacgacaccaggtccagtgctattgataaagttgttaatcctgtccaaaagggggatcacgacgcccttcacgatgcaagataccaagccgagctcttcagattggtctataacttaagcaagaaagctaaatag

SEQ ID NO: 450067 - DNA, 948 bp, Serratia marcescens
atgccgctgtcaaattcagagcttgaatatttcgaccacaatgtattgcggcttccgggcgaaaaacgcaaggagtatcacgcacaagtcgacaatcttgtaagtgaacttaaaaagcgtattacagacaagtcagagcttaaagtcacgaaggtcgttaaagccggctcattcgcaaaatttactatcctacgaaaagttgacgattatcccacggatgttgatgttgttttctatatcaccggcgtagaggaaaacagcaagtcctacgaggacctatgcaccaaaatctacgatctgctaatagagatttacccaaccaagaaagttgacgacttcgagatccagcgtcgcgcagctaaagtgaccttcgtgaaaagcggtctggaagttgatgttgtcccggtactgcaagacagctctaacgcggaccatggctggcaatacgacattcagagcggcgcaaagaatcttacctgcgcgccgtgccacatccagttcgttaaaactcgtaaggataaagataaacactttcgaacgctggtccgcctggcgaagcgttggaaacacttccacggcatccctggtctgaagtctttccatatcgaactaattttcggtcacattcttgatatagatgggccagcagacagtatcgaaaaacgcttcagagagtttttggcatatatcgcgcgcacgaaattaagtgaacgcattgattttccggaaaactccggcaacccgacgacccatttcagcgaccctgtcgtaattattgatccagtgagccctgcgaacaatgtcgcatctcgcattaccaaggatgagcaggcgcttatagccaaagctgcggagaccgctttagatacggcgacctatgcgtctgttgaaaatgataacgaggtgtggaaagagatttttggcggccgcttcaagaccaaggattaa

SEQ ID NO: 450068 - DNA, 1536 bp, Serratia marcescens
atgacaaactcccttatgctggcgtcgcgccacatcctccttgctggcagcatttcaaacaccactgaaaacgggctcatcgacagagcacacgaatttgttaatacgtttgttgaggaagttctcaaggccggcggagggtttgtcatttacgtcgctgcggaaccggtcaacggagataacaaaccgcttctgttcgattggacaatcgccaaggcggtcgacaagctgacacctggtgacagttctcaggttcgcttaaaaattgtggcttcgcacgagcgccttcacgccaaggcgaaccctgagcagcggaggctgctcttgggcatggtcgcgcgtggagttgcagaactcgttcctctggaagaagaagtgctgactggtggcaatgtcggcgatgagcaaattgagcacgcaactgcaatggtggctctgggcggtgggaaaggcgtacttgaccgcgcgcgtaagatgaccaagaggctgttgcctgtgttgccgctcgacttgctgctgggcgcaaacagcgaagatggtactggtgcgcttggcgtgctgaagagctttcaaacagctccgctgacctacatgccgaatagtggcaatagggttatcaaagttcttcccgctctatccctgcaagagcccgtgttagctttgtccgatatcagcagtcgcatcgtcaagattttctatgaggaagagcaggccagaattgatgctctaccccctgatgtgctgatactaaccgcgctggacgtcgagttggcagcagccaagcacgcctttggtattgcggaagatgccgagcatacgactaccgagaacggcctccacgtttggaaggcccctgtaaccaagcgtggtggcaagacagtaaattgcgtggtagcttgctttgcgggcgccggcaacgtagatgcggcttctgttactaccatgctcttgggcgaactacgacctgacaacgtaatgatgctgggtattgcggccggtcttcgggacaaatgcgcgctgggggaagtcgttctggctgagcgtatcgtcgcctatgaaggcgccgctttcgttgaaggtggcggggtcgaagcgcgccccgaaattactaggttgaccatgcgagttcgtcaagatgtcagctcttatctctccagtagagcagcccttgaatctcgtctcacggaaagctaccaaacactgggtatcgagttccccgacccagtcgaggccggccctgtcgccaaaggagtactacccaagacagcaaccgttgccagtggtgaaaagcttcttcgggacccagagaagtttttgggaatgcgtgagcttcacggtaagactgaagtcgccgagatggaaggagcaggcctatttgctgcatgcgccaactttggcaaacctgtactgatggtgcgtggcatcagcgatttcggtgatgccaagaaagacaatagattccatttattggcagccaaagctgcagcagcagtcactgtcgactacatcgctaacggcatgaccttgcaaagctaa

SEQ ID NO: 450069 - DNA, 1269 bp, Serratia marcescens
ttgtgcctaaaaacgttctatagctactcccgttatcaccactatcgcagttatgatgatttgcagaaatctatcgttcatgagataaaaaatcgtagctggcaatatgaagatattatagatgccgccattctctcatttacacgccatgatactcgatacttgttcttacatgaatttactgaaagcacctttcatcttgtccctgatgagcttttgctggctcgttttatccactatttatcccatgctgaggctggttcagataaaactgaatgtatttatcgactgacatttgcggtcctttaccgatgtgccaagccatcccaagaagcgtttgagtttctttccgcgtactgccatttaaatgtaaagttgacgactgtgtttgagacctccatcgtctgcgagattgacgattggcgagtaaaacataatattagacaaatagcgtatgagaaagaacgaaacgcggcgcgttatgaagataggcacagtttcgagttatgtcgtcaggaaattgtgtcgggccaacatttggggtggctcaaacatatttcctatatttactattcgaaatacagcgatgttgatgacaaattgacgccagtgcagcgctgtgaagacatattaggtgccgaaaacgtcattgatgcgatatccggtcttttagcgattttaaatcgttcagatctgcccactattgacgagttgaattgtgctttgctgaagagggagtattacggatggtggtatgcagtactggcaggaagcgatgagttatttaaaaaacatcctgatgttacacaatggaacgaaggtttattaacaacgctattgactctggatgttatattagcacttttcaccaaagacaataatgttgtaagtgattattcattaccgtggaaaagggatgtgatacttaacaaaacagcatttttcatcaaaacctattaccacattatcaatttctgcattagtaatcagttgcaacatatccgtgcacttaactatctgttaaatgatacctgcattccaatcgactataccgttcctttagttatgagactcgctaaagagcaccctgatgatgttctccacttacaaaacctggtggagtggttgttagcgcatcctgagagtcatgcagagttattgcagttatctgagttgatggtagcgcaaccctcaaaactcaaaaatccaagttatcaaatttggctggtatgtacttatttattcgttccaaaccagaacacaagatag

SEQ ID NO: 450070 - DNA, 474 bp, Serratia marcescens; identical to SEQ ID NO: 85977

SEQ ID NO: 450071 - DNA, 303 bp, Serratia marcescens
atgaaaaaagcaatacccgccgcattattgctctgcattatggcgtcatattcaacctccgtcatggccgctgacgcctgtgaagtggtgttatgcatgtacggtaaagccaccggtaacggcggcggcaatgaatgtcattcggctgaacgtgcattctttaatatcgtgaaaaagaacaagcacggttttctgccggaccatactgccgatgccagaaaatcgttcttacttgagtgtgattcggcagacccggcaattatcagccagattatcagtaaatttggccgcatgcgtggttaa

SEQ ID NO: 450072 - DNA, 1002 bp, Serratia marcescens
atgaaccagataaaggtcctcgcctcgagcctgctcgtatgggccggcaccacctgcgcccagcaggctgacactgaacacgccgacagcaaacatgatcagccgccgctgcttgccgccccggcaacgtcgccagccgcagaaaaaacctggcatataaccaccggcctgttgattgaaacggaaaacgtcgaaggccaatcggataataaaggcttttgggaacccaccctgtatctggaggcggcacgcggcaactggagtatctacggttccttttatcaagagagccataatggcgcgcactattacggtactcagggacgcagcgactggtttaatcagtacgagatcaatttacgctatctgatcgccagccatgccgtctacgacctcggcctgatggccggcgtacgccattaccagtggcaatataaacagcaagacggcataacccgctaccagacgcagcgctatactgtgcaacccgactgggaaatccggcttggcgaccagacccgctttagcggctggctggcgctgtatcaatataccaatcatgtaaggcagaacgcgatgaccgacaaggaactggagggcgaaaccggttttggctaccaggtcaacgacatgctcagcctcaaactcaattattatatcgatcgcggctggaatagcggcagcgatcggctggcggaattttctcagcaggagctgcgcctgtacgttccattgacgctgtcactgtggcgcacgcccctgaccgtgaccccttatctgcgccattcgctaggcaccgactactataacgtcgagcaacagcgcaacgacggcgaaaccgacacccgtattggcctgttgctggaacagacgttgccgcagggcattgcgctgagcctggagtatgcctatgaactgcagcgccatcatggagctgctgatgatgcggggagcaacggcaaatatcactataccggcgtaggtctttcctatgcgttttaa

SEQ ID NO: 450073 - DNA, 1263 bp, Serratia marcescens
atgaaacgcttactttccgtcctctgttccatattactcagcggcgccgtgcatgccgcaaccgcagaccccaccagcgccgaggcggccgccgaacgggtaaccacgctggcgcaaacgccgccgatgggttggtcaagctggaactattatggcgacagaatcaatgaaaaaattattatagacactatcgataaaatggttgccagtggtttgcgcgacgccggttatatttatgtcaatattgatgacggctggcaaaaatataaaggctcgcgcgccgaccatccattaacctatgacgaaaaaaagtttccccgtggtattaaatacctcgccgactacgctcaccaaaagggcatgaaactgggcatttacagcgggccggggaattccacctgcgcaggctacgtcggttccgaagggcatgaaaagcaggatgccgccatgttcgcctcatggggggtcgaccatttgaaatacgactcctgctgcagccaccaacaggcgagtcaggcggtgctaaaaacggtgtttggcgatatgtccaaggcgctgcaggctaccggccggccgattgtctatcatgcctgccactgcggctggcagaacatttggcaatggggtaacagcgttggcgcaaaccagtggcgcatcggtcaagacatcagcgacgacttcaattatccgggcaaccgcgaaggttactactttgacgtgctggatatgatcgaccgtggcgttggcctggaagcctacagcggcaaagggcattggaacgactacgacatgctggtcatcgggctgcatggccattcaaaagagctggtcggcaccggcgcgtcaaacaccgaataccgcacccacttcagcatgtgggcgatcctcagttcaccactgctgattggcgccaacctcgacgatctgaacgccgcggatatggttaccttgaaaaacaaggaaatcattgcgctgaaccaggatccgctggggttgcaagccaaacgttatgtcaataacggcgatcagcagatctttgccaaaccgctcgccgacggctcctgggcggtagcgttactcaaccgttcgggacagaccgccaccatgaccctcaatctccaccaggatttggatctgccctggaaaaaaacgctggtgcgcgatctgtggacacaccgcgacgtggcaaccgtgaccgacagttacagcagcgaagtgcaatcgcacgaagccaaaatgctggttatccgcagcggctggtaa

SEQ ID NO: 450074 - DNA, 909 bp, Serratia marcescens
atggtcaataacacatcctggatcgtttatacctttctggtggtcattacctggggagtctggggggcgttcagcgcctggccaaccacccactatggctatcccgaccagtggatctacatcatctggtcattaaccatgctaattccctgctatttcgcgctacgcggtcagcgcttcgatacctccggcaccgcgattctgtatggctgtctgatcggctttaccggcgccggcgggcaactgctgctgttcaaaacattggcgatgggcgcccccgcctatctggtattcccaatcatttccatctctcctgccatcacggtgctgatgtcgctggcgctgctgaaggaacgggtaaaccggctgggcggcctgggggtactgctggcgctgttgtcgatcgtcatgttcagtatcagcagcggtgacggcgatcgcgacggcggcctgctgtggctgttgtattcggtggtgatttgcgtcgcatggggagtacaggcgttctttatgaaacgcgcctccaacctgggcgttgccgacagttcgctgtttggttatatgacgctgaccgggatcctgctggcgccggttgcctggctgatgctggcggacaagggcgccagttatccgttgatggccacgctggctaccgcgtgcattcaggtattgaacgccgttggcgcactttgcctggtcatggcgctgtcgcgcggtaaggccaccatcatcgccccctgcaccaatgcgctggcgccggtattgaccgcggtgatttccctgatcatttaccagtctatgccgagcagctgggcaatcgtcggtattgtgctggcgatttcaggttcgacgatgatggtctattccgaagaaaagcaaaatgccgccaagctgagcacctccctataa

SEQ ID NO: 450075 - DNA, 981 bp, Serratia marcescens
gtgatttacctgggggttgacggtggcggcaccaaaaccgccttcgtgttgatcaatgacgccggcgatgtgctggcccgccatgaggcggcaaccagctactacctgagcgtcggcatggatgccgcgcgcagcgtggtgctcaacggcattggcgaaatctgtcatcgtgcgggcatcacccccgccgatatcagctttacctttcttggcctgccggcctacggcgaagtgtcggccgacgtggagcggctggatgcgatagcgcagtcgctgctgaaccgcgaacgctatcgctgcgataacgacatgatctgcggctgggccgccagcctgggctgtcgcgacggcatcaacgtggtgtccggcaccggttcaatcgcctatggcgaataccaggggcgtagcgcgcgctgcggcggctggggcgagctgttcagcgacgaaggcagcgcctactggatcggctgtcaggcgttgaacctgttttcgcgcatggccgacggacgattgcagaaagatctgttctacgatctgatgcgcgaaaaatacccctgccgcaacgatctggacatctgcgatctggtgttcaaccagtggaaaggcgaccgcggcaagattgcctcgctggcgccgatcgcctgtgaagcggcggtcgccggcgacaagcaaagccgcgccatattctttctggcggccaaagagctggcgctgatggtggatacgctgcgtgaaaccctgcgttggcacgccgatgaaagcgtacgcgtgtcctattccggcggcgtattcaaatgcggcgacgtgattctggaggcctttgcctatgaactcgcgaaattgaacggcaattatcatatctgtctgcctgaatatcaccccacactcggcgcggcgatctatgccgcgaaactaaacggtacgtcgctctctgggcaggcgttgggcaaactgtcactcggtgaatacaatggtcaataa

SEQ ID NO: 450076 - DNA, 873 bp, Serratia marcescens
atggcgattatctcaaccaaatacttattggcacaggcgcgtaaacagggctgggcggtcccggcgttcaacattcacaacgcagaaaccattcaggcggtactggaagcctgccgggaacggcaatcgccggcgatcctggccgggacgccgggcaccttccgccatatcggctgtcaggaaatgctggcgctggccgcaacctacgcaacccgttatcaactgccggtgattttgcacctcgatcatcatgagacctttgaggatatcgctggcaaggtcgacgtcggggtgagaagcgccatgattgacggcagccatctcccttttgaacaaaatatccaactcgccgctcgggtagtggcatattgccaccagcgggactgcagcgtggaagcggagctcggacggctgggcgggatcgaagacgatcaggacgttgacgaagcgcaggcatttttgaccgatccggcacaggcgctcagttttgtcgagcgcaccggcatcgacagtctggcggtggcgatcggtaccgcgcacggcatgtatgcccagcggccgaacatcgactttgcccgtttgcaggagatcggcgcacgggtggcgatcccgctggtgctgcacggtggcagtggcgtgccggacaacgacgtcaggcaggcgattggtctgggcattgccaaggtcaacgtcggcaccgaattgaagattgccttcgccgacgcggtgaaacgctactttgcggcgcaccccgatgccagcgatccccgttactacatgcgtgaagggatggatgccatgaaacgcgttatccatgaaaaaatcaccctgtgcggtgctgaggggcgactgaatgcgggaggtgaacggtga

SEQ ID NO: 450077 - DNA, 1146 bp, Serratia marcescens
atgtatcaacaacccaccgctgcctgctggaccgagcgggaaattcgtcagcaacccgaggtatggctggccaccgtcgacgccatcgagcggcaacgccaggcgctggagagctttctggctccattgctggcgcgccccggcctgcgggtgatactgaccggcgcgggatcgtccgcatttatcggcgatacgctggcgccgatgctggctcgcaccctcaacgcgccggtgcagtcggtctctactaccgacattgtcagcgatccggccggttttttgcccgccgataggccgctgctgctggtgtcgtttgcccgttcgggatccagccccgagagcctggctgcggtggcgctggccaaccagcataacgccgacagccaccacctgctgatcacctgcaacgccgaaggcgatttataccgccgtcatcatgaccagccacgggtattggcgttagcactgcccgccaatacctgcgatcgcggcttcgccatgaccagcagcatgagcagcatgattctggcctgcctgtgtgcctttaaccttgctggcatcgacccggtcgcagtacaggcgctggcgcaaagcgtggccgccttgctggaagcaacgcgtgacgtgacgcgctcgccgttacagaccgccgatgcgcaacgggttatctggctgggcagcggcgcactgcgcggtatcgcccacgaaagcgcgttgaaactgctggaactgaccgccgggcagacggcggcgttctatgagtcaccgctgggcttccgccacggtcccaagtctctgattaatcggcaaacgcaggttatcgtcctgatgtccaacgacccttacacccgccgttatgacgaagacctgctcaatgagctgcgtaacgacggcgtggcctgtcggattgtggcgctggccggcaggccgtcggcggagatcgaacggggtgagcatatctacctgcccaatgcgcaaggcttcaacgatggccaactggcattggggttgctggtattcgcccagctttatgccttggcgcaatcggtgcatttcggcatgacgccggacaacccttcaccggaagggcgagtcaaccgggtggtacaaggggtcactatctacccttggcacgcgcaaccatag

SEQ ID NO: 450078 - DNA, 1176 bp, Serratia marcescens
atgctgcatgcacgtcagcagcagacgccgttgctgattgaagccacctcgaatcaggttgatcagcatggcggctacaccggcatgacaccgcagatgtttcaacagcagttacgatcgctggcggaaaaactggatttcgatccagcccaactggtgctgggtggcgatcatcttggccccaaccgctggcaacatctgccagccagtcaggcgatggcgcaggcggcggtgctggttgagcactacgttgccgccggctttcagaaaattcacctcgattgcagcatgtcctgcgccggcgatccgcagccgctcagcgatcggacggttgccgagcgcgcggcacagctggcttacgtttgcgaacaaaccagcctgaagctgtttggcaaaagcgaggtggtatatgtgatcggcaccgaagttccggtgcccggcggtgcgcaagaggccttggatacgctcgccgtcacccaggttgccgcggtggagcatacgctggcggcacaccggcaagcctttgcacgccaagggctggcggatatctggccacgggttatcgggctggtggtgcaaccgggcgtcgagttttcgcaccatggcgtggtggatttccaacccgaaccagcggcggcgctgagccgctacgtcgctgagcaacctcacctggtatttgaagcccactccaccgattaccagttgccgcaggcctaccgcagtctggtacaggggcacttcgccatcctcaaggtcggcccggcgctgaccttcgcgctgcgcgaagccttgtacgcgttggagaacatggaacgcgaactgctaccggcggcgcaatgcagcgatctgcgcgcccagcttgagcgggtgatgtgccagcggccggacgcctgggaaaaatattatcacggcaacgaacggcaacggtatttcgcgcggcatttcagctattcggatcgtctgcgttactactggcccgatagcacggtgcaagcggcggttgaacgcctgctggacaaccttgctcaccagcccttgccgctaccgctgctgagccaatacctgccgctgcagtatcaccgcgtgcgcgccggacaactgccggccgatgcccgcagtctggcgctggattgcattaccgatgttctgcgcgcttacgccgcagcctgccagtga

SEQ ID NO: 450079 - DNA, 804 bp, Serratia marcescens
atgagcatgagtgataaaaaaagcgttcgtggtaccagtgagcggcgggaaaaaataatttccttgctgaaacagcagggagcggtgcaggtgagcgagctggcggcgcagtttaatgtgtcaaccgtcaccatccgtggcgatctggcgtttctggaaaagcgggggattgccacccgggcctacggcggcgcgctgatttgtgaaccgccggtgatggccagcgaacgcagcattgaggccaagcaaaccgaacacctggcggtaaagcagcgcattgcccgcaaggccgccgaaatggtggttaccggtagcagcatcattcttgattccggcaccacgacctacgaaattgcgcagcagctacgggacaaaaaagaaattatcgtcatgaccaacggtatgaacgttgccaatgcgctgctggatgccacggaggtcgaactgctggtcaccggtgggcatctgcgccgcagttcccagtcgttctatggttcacaggccgaactgtcactggacaattaccattttgacatgctttttctcggggttgacggcctgagcctgagtcagggcgttaccacccatcaagagaatgaagcgcgcctcaatcgccggatgtgcgaggtgtccaaacgcatcatcgcggtagccgattccagcaagtttaatcgcgtcgggctgcatcgtattatcgataccgcgcgtatcgacgttctgatcaccgacaccgccatccccgacgagatgcgcagagggctggaggccctgggcgtggagctgctgctggttgaacacgactaa

SEQ ID NO: 450080 - DNA, 1485 bp, Serratia marcescens
atgaacgttaaggttttcactgtttgcacattagggtctctgctcatggcagccattttaaccggatgcgcggttaatcccgattaccaccttccggccaaggcaatgttcaacagcgtgggaacacaagtgcctttcgtcggagcttctaataacaagtcggtgagcgagactgctttatcttcgcaatggtggcaactttatcacagccccgacctcgaccgccttgtcactattgcactggccgagaacactgacctgagggtcgcgaatgccaatttggaacgcagtcatgcgattgtggacttagaccgatatcaaggccagccaaaacttgggatcgatcttggagtggatcgcgcacaaacttccgccgaacagtatctttccagcgcctatctcaccccttccgacacttacgactttaaattatccgcatcctatgaactcgaccttttcggacgtattcaacggggcatcgaagcagcaacagccgatagcgaggccattgaagcagcccgtgattgggttcgggtcaacgttgtggctgacgttactagtgcatatctcgacgtctgttcgatgggcagtgaactggcggtagccaatcgttcccttaaccttcagcgaaaaagcctcgtgttaacgcaacaacttcaggccggcggccgcactaatcgccttgatgtcacgcggatgaaaaatctcgttgaccagattgaggcaaatattccggcgatgcaagctcaacgtcgtaatgcacttttccgactggccacactcaccggcaagccgccttcacagttcgaacgcgcgctgacacattgcgttgttacgccatcgttggaacaaccaatcccgattggcgatggtgcagcattactcaggcgtcgtcccgatatacgtgccgcagaacgacaactggcagcctcgacagctgacatcggtgttgctaccgccgaactgtatccccgtatcgtactggggatttcaattggctcggcaggacgtgtcgacaacatgctgagtcatgcaaccaacttatggagtgttggccccggaatttcctgggagctcaatcagaacggcacgcgagcaaagattgctgccgcaactgctgcacagcgtggtcaacttgctcgcttcgacggtgttgtccttagagccttacgtgaggtagaagtcgccctcaacaattacacgcaggatctggcacgacaaaaaagcctgaaggccgccagaaaccaagcctcaaaggcagtatctgatgcacatatattgcaaaactatggtcggaatggtgcattgacgacactcgataccgagagaactctcatcacaaccgaggccgctctcgctaatatcgggacacaagtttcccgcgatcaggtcgttttgttcctcgctcttggcggaggttgggagactacagtacaccccttgaaggatacgtcactgcaatctcacatgagtacctggaaatga

SEQ ID NO: 450081 - DNA, 993 bp, Serratia marcescens
gtgaaatcgaccgctgcaccactggctacaatcggccgccttgtgttaaccctcatattcattgcgattgcgatcgtcgctggccgctggctctggaattattatcaggtcgatccttggacgagagacggcagggttcggatcgacgttgcaagcgttgcacccgacgtacccggaatggttacgcaggtctttgtcgaagacaacatgacggtacataaaggacaacctctcttcattatagatactaagcgttatgaagatgctcttcagcatgctcgggcttcttttacagctgctaaggccgggctcgagaaggcacaagccgacgtaatgatgcaaaccactcttctcgctcagtcgcggcgagaagctgcacgaaatcgcaaactcggtagcttagtgtcgaccgagctcgttgaacaaagtgacactcgggtcgagcaattcctagcaacactagcgcaagccaatgcgtcagtgaaccaagcccgagcagcgatagcccaagccactgcggccttaaatactgcacagctcaatctggagcgcactatagtcacttctcccgtggacggagttgcggcaaacgtcagccttcagcctggagactatctatccgccgggcaggcggctttcgggattgccgatacgagttctctatatgtcgacggttacttcgaggaaacaaaactggataaaatcgacgtcggcgatagcgtaacagtccaactaatgggcagcgatcgacgacttgaggggcatgtccagagcatcgcaccgggaatcgacgatcgcgaacgcatccagagcggcaatctgctggcgaatattaatcccacattcaattgggtacgtcttgctcagcgtatacctgtacgcatccatatcgatcatataccgatagacatgcagatggccgccggtcgcaccgctacggtcattattcaccctaaggtcagcaacacaaagacaactgagagagtgcgatag

SEQ ID NO: 450082 - DNA, 234 bp, Serratia marcescens
atgattgcgattggtgaaatcaacctggggggggtgtacatcagcagtgcactcgtcgccgccagcctggcgggtctgtttctactgatcctcaggcgcgctttcctgtggtcaggctttcatcgactagtctggcattaccgcctggccaatctagccattttcatcattatttgggctacggtggcacgagttctgccgatgctggccggaattattgggagctctttgtga

SEQ ID NO: 450083 - DNA, 2037 bp, Serratia marcescens
atgatcgcgtggccatcgtatcgcgcgctcttgttcgcattcagcagctacgtagcggtcattctcgctctctatgttgctttggcattggaccttcctaatccatggtgggcaatggcgactgtcttcatcgtgcaaccgaacagaccgttcatcggcgcgatctgggcgaaagctttttaccgtgcagcaggtacgatcgttggtgcgatagtcgccatcatcgtggtaccgaatctggtaaattcacctgaattgatgattctagcaattgccgtttggattgcgctgtgtgtgtacttcggactgcttgatcggtctccgcgctcctatttgttcatgctgccgggatacaccgccgcacttgttggtctttcaactgcaatccaccccgatgcgattttcgaagttgccatcgcacgatcagaggaaatcatcattggtgtccttgctccggccatcgtacaaagtattctgtttccgcgcagtatttcaaccgcagtctttgagcggcttgacgccattattgcggacgcgcgaacctggattgctgatggtcttcgcacgttaacgccgctgccggcgctaagccaaattgccgcgcggctaactgaaatgaacctcatcgcggccgactggcgcttcgaaggtacgttctctcccttacgacggaaagcgctgtgggcactagaggaacggctgattattctgcttccgcaaataaccgcagtagaagacactttggaggcactcaatcataccgagttttatacggatgaactagcaactgtggtaagtcaagtcgcgcactgggctgcaagcatagatgcggaaaaagacctagcgaaagcagcaacggagagcgatattgcggcgagtattcccacactcaaccaagaatcccgatgggaagatttactgatcgtatgccttggcgaccgactgctcgagcttatgcagacttggcaagaatgtcttctgctagctgcggctgtcaaggagccaataatacattcagacacagacatcgcccatttacttggaaacgcgagaccacgagggcttcacaccgataagaaacttgcttttctgtcagcgatcattgcgagccttacagtcatcggtattgcggcatttgcaacagcaatacagtgggaaggggcacctttcacgattactgtcgccgccatgtgctgttcgctgttcgccgtagccgacgatcctacaccttctgttcgagccttcttgattggtactattctcgtcttacctataacgttgatttaccagtttgcaattctcccggcggtcgacggcttcgtcatgttagctgtcgtgctgttccctgttgtgagtctgctcgggctactctccacttatccaaagatcatggtgagtgcactaagcgcaactgtcgccttctctgccatgcttgctctaggatcgaattatgtctcagatctacctggggtcataaacaactatttttccttcctgttaggaccggttttcgcgcttataggcctaggattggcacgagttatcccgatacatcgcgccgttgatcgtatctttctcgcgggctggaaagaattggctgctctgacgaacatgcgatcattacccagcgctaatctttgggcaagccgaatgcttgatcgtgtcggtctcctcctaccacgcatatcagcaattcgccctagggatgaatccgagcttcgtgaggtgctgcagggcctgagattgggaacctgcattgtcgagctgcgacggctacacgatcttgttaacgtcggttctgggagagagatagatacagtcctagcggaactgacggtgcatttcaattcactcgctgctgggtcgacggtttccatatcctccaatattgtgagtcatctcgacgctatcatcagaggaatgctacagcttccgaattctgttgatcagcatacgggcatcagcgctgcaatgcgcttgcggctcgcgttgtcaccccatgcggcaacctatcagtcaggagatataaatccatga

SEQ ID NO: 450084 - DNA, 663 bp, Serratia marcescens
atgatttcaggtattactcacggtctcgaagaggtagcgcaatgcgctagtgcacttggtcatatgcatcggttagaacttcttgaactccttaaaggtggggcactaagtgtcgatgaattggctgatcgcgctgatttaagcgttccgaacacctcacgacaccttcagattcttcgacgagcatcgctagttgaagcgcaacgccacggcaagcaagttttctaccggatcggggatatcaccgaatacaaggcgctgatcgcggcgttgcgcgccgtgtgtgaacgtaatgcggttaaggtgagagagctgcgtctggactatttacgagcacgggagcaattagagcctatttcttgtgaagacttgttatcccggcttaaagacaacgctgtgacactcattgacgtacgcccgcaagacgaattctcaacaggacatctccctggtgcccttaacattcctctaggcttacttgagcagtgcattaccaaccttgcccctgatcgggaagtcattgcctattgtcgcggccctcattgcattctttccttcgaagctgtggcagccttgcaggaactaggttacaaggtacgccgcctggaggatggacttccgcagtggaacgctgcagggctgtcaatggtcccagccgaatga

SEQ ID NO: 450085 - DNA, 150 bp, Serratia marcescens
atgaaacagacccgctataccgaagaacagatcgcttttgcgctgaaacaaggcgaaaccggcacccacgccggggacgtctgcagaaacatggggatttctgaggccactttttatatctatggactaccttcgttttacaagcactga

SEQ ID NO: 450086 - DNA, 921 bp, Serratia marcescens
atgagtaaccacactcatgatttaaacaagaaaaaaagaatgtcagaatggcttactattaacgaagcaacatttatagtaggtcaaaaaacaaatataactgagagtgacatttatcgacatgcattatgtgggaatatttatctttctatttactttcaatctccggtgattttaaaaaaaataaaaacacacaaaggaaaagcgaaactacatccgataaaaggttcattaattcagcaactatgcttacttgacaggcatcgattccttaatggtaacaatttaaccataagcactgattggaatttaatttatccaacgagtttaattatagacaccttactatatggttatgaatattttttaatccaaaaattactggctcactcattggggattccattaccaaaaaccggggtaagcactgtgaattatggtatcaccgtaaccttatctggagaaacgtttatgctcttcgaaaaaatgacaatacagaacagaataaaacaacaaatggcactccttcctaaaaaagtcgcatcgagactttatgaggatacttctcataaaaaaacaaataatgatcccacgaaaaaaaactttccagcttataatttacctccggatgcatgctttgttatacgcccatcggaattagagagactaaataagttaccttataatagcgaacagagtaaagtagcatccactcgtatttcaacaccattatccagacttttctggcttgcatgcaaaaacaatgaaactatcagtccgttaatcatgcaaccgtacaaactattgtccatttttgaacaatgggcatctgaggaaggcattactgatcgattcagtggcgacacactgaagactgcgcttgagcgcggctcgcccccttccctgccaacacaaaagtaa

SEQ ID NO: 450087 - DNA, 1011 bp, Serratia marcescens
atggcatccattaaagacgtagcaaaaaaggccggggtctcaaccgccaccgtatcgcgagttctgaataatcaccccagcgttgttgcggaaacacgcaaagcggtacgtgatgcgatggattatctttgttatgtgccaagcaagagtgcttttcaacttagcggcaaatgttccgggttgattggtgtggtgttgccgaatctggttaaccctcacttctgtgagctgttggcgacatttgaagaagaggcaagatatattggtaagtcggttatcgttaaaacacatcaaaatcagccgcaacaggataagcaaattattcataccctgatcggtatggggatcgacagcctgctgtgggtgccgaccgaagcggaggccgaactttctgagtggctaacgatcaccaacattccggtggctgtagtgacgcaggtttcccgtttttttaattccgtatccattaatcaaggtaaaggtgcagaaagcattgcggaacattttatgcaaacggggcatacctcctttggttttgtggctcaggaaggtgtcgataatcgaaaggtgtcctcctacaataaaaaaatcagcagccatggtctggctctagccaaagagaaccagttctggatagccaaaggcgtgggagaaaaaatatcaggtcatataaatatacttgatgtcatcatcgaaaaattaacgaagcagcataaaatctgttcctgtcttttagtttataacgatgtcgccgccagttatattattgatgggttaaaagaaaaaggcgttgcggtaccgaagaatatggccatcgccagtttcgataacaccttattggcgcaaacaaaaaagatcaccagcatggcacaaccgataagcgaaattgctcacctggcctttcaaatggtgaaaaatcaagttaggcaggaaagtatcgaaatgcatgaaattgtctcccgattaattatacgagaaagcagcgttaatattcatatcactaccctgtaa

SEQ ID NO: 450088 - DNA, 1356 bp, Serratia marcescens
atggcgagtgaaaactactacgatgtaacagaatggaatgtgggtaatccgtatgatgatattggtgaggtaattaatagcattattgccaatgttaaaagcagacaaacggatagtgatattaatgaaggagggaaacctggcgcggttatctatattccaccaggtgattatcatcttaacactcaggtggttattgatataagttatctgaaaatcatgggttctgggcatggcttcacgtcttccagcattcgttttaatactccggaaagtgactggccaaattggcatgaagtgtggccgggaggaagtcgcatacttgtcaatatttcctcaacagctgacgatgaagaacatgcaggtgcagcgttttatgttaagcgggatggagacccccgaattagctcagtagagtttgctgatttttgcattgacggtttacactttgtggatgatggttcaggcaatgatgatccagaaaacacatacaccaatggaaaaacaggaatttatattgccagtgctcaagactcattccgagttactggcatgggcatggtgtatttggaacatggtttgactatttataatgctgatgccctggacgtacatgataatttcatcgctgagtgcggcaattgtgtagagctgcgtgggtcagggcaggcgtcaaaagtgaccgataacctgattggtgcaggttataaaggttactcaatttatgctgagaattttggtgggctattaattacggcaaacaatatctttcctcggggtaaaagtagcgtccatttttctggggtagtccgctcatctatctccagtaatagatttcattcattttatccgggaatggtggtgtttgagggaaaaagttctgaaaacctggtatcggcaaaccattttttccgtgaacgtgaaccttgggcaccgatgcagccttataataacggtttagacgatttatatggtctgctgtgtatcaatggtgatcataactccatcattgccaatcatatttcagaaagccttaatactcagtatattacgccgtccggcgcgacaccggtgataatccgggtagtgtcagggcagggaaattatatttctgataatcatattgttgccacaaccgaagtttcgtcaataccgatgggtgccacaggctcatgtttctctacacaagtgagcgcgttactggccactgacagcctgaccgagcttgacgtgacaaccgtactgatagaaatagaatcggttaaaaatacggtaattgattcgggaagtgacgcacaggttgtaatggacaaaactgccaatgcattcagagccacaccaatgccagcggcataa

SEQ ID NO: 450089 - DNA, 153 bp, Serratia marcescens
atgttgtccgtgaaagaggtggaagccctgcgtcaggcttggttcccctggtctgtcagtactttgaaaaaccaacagacacttatggcgaacaaaagggaggccatggaagtcgagattcactgggattgcgcaaacaatgtccagtcatag

SEQ ID NO: 450090 - DNA, 795 bp, Serratia marcescens
atgaaaacaccctacgccaccacattgtttgatcccgacgccaccccctgcccggccgtcgcacgttatcttgattttgtcgattacgaagcggaagtgccggttcacactcaccgcaaagggcaattaatcattgcgctgtatggcgcagtaacctgtcgcgcggaaaatgagatatggatagtgccgcctcactgtgcggtatggatccccggcgggatccctcatagcgcaaaagccacctggaacgcacaccttaattatttattcattgaacctggagcagcggcactgccggatcgatgttgcacgctggcaatttcgccgttgattaaagaattggttgaccgattaacccgcgaaagcgttgattacccgccggatagtcatgtggccaggctgaccagagtgacactcgatgaattagccacgatgccgcagcagaacttcagtttgccggtctccgcgcatcccaaaatacgcgccatggccgatgcgttggtgagtcaccctgaagatcggagtacgtttaaagaatgggcgaaacagctggcgctcagtgaacgttcgttggcgcggttgatgttgcgcgagacggggctgaccttcgggcgatggcggcagcaactccatttgattattgcgctacaggaattggccagcggcgtatcggtacaaaatgtggggggaaaactggggtatgagtccgttaatgccttcataaccatgttcaggaaggcgatgggcagcacgccagcgcactatttttccgagcgaaaaacaggggctcactga

SEQ ID NO: 450091 - DNA, 2010 bp, Serratia marcescens
atgttccatcgtgcaggcgcagcacggatctcatccagcctgctgagcgatgcaactgccttgctgtattccggaaagagctttgcggcagcgatgctcgcttattacatcgccttatcgataggcctggaaagaccctcctgggcaataattaccgtttatatcgtttcccaaacgtcggttggcgcttcactgagccgatgcgtctatcgtctggctggaacggtaatcggagctggggcgacggttttgattgtgcctgccttggtgaatataccgatcttgtgcagcgtgattctcgcaggttggattaccttctgcctttacttatcactgcttgagcgcacgccccgtgcctacgcctttgtactggccggctacacagcgagtttgattggttttcccggtgtagctgatcccggcacgatttttgacaccgccatcacccgggtgcaggagatcgctataggtatcctctgtgcagcgcttattcaccggtatattttgccaaagcgcatagccggtctcttcaatagcaaaatctcggaaacgctgcgctctgcacgcctgatgattgcggacacgttaacaggcaaacccgatgaggttgccgggaacctgcgtctggcgctcgcgttgcagttcctgcaaggcatcagccaccatatcccctacgattttgccatctcggtacctgtccggcatgcccgaaaagccattcatgacaggctggcgcgcttgttgattgtgagctgtgaattgcgtgatcgcatgcaaatgatcggtgtgatacctgccgacgtggagaggctgctggaagatgtcctgaactggcttgcctgtgaggatgagggggaacgaaaaataacggcagaagcgctgaaagaacgcagcgtgaaggtaaccgagcggctcgctgcacatgcgctgacatttgaagaagaactgcaagtgagttttactcgccatcttgaggagaccatcctcctcctgcagcaatgcgagcgcctctcagcggcaatgcatcacgcgaaccccacgcaaatgcaggcggcaaacacgggggtgaaagggtatgttttccatcgtgatcaccttacagccgcacgtaccgcgctgggggctttcgtcatcatcgtgagtggttgtttggtgtggatttactctgcctggcctgatggcggcacggcggtttccatccttggcgtctgctgcacactgtttggcagtttcgacacgccggccccgcacattgtcaaatatattattggttcagcctggggcgtgatgatcagtctgctctacagctttgctgtgcttcctcaggttaccgatttcaccgtgctggttgcggtacttgcaccgatatatctgctggccggatcgctgcaggcgcggccacccaccacctttttggccatgggcatcacattgacgctgcccattttatgcgagttgagtgcgcactacagcggggacttcgccgtggcggtaaacaccgccatcgcattattttccgcgaccggctttgccgtggccagtatgactttgctgcaaacagtgcaggcagactctgccataaatcgtctgcttcaaatttgcaggcgcgacgtcaggcgcagcgtgaagggcggttttactccggacgagttgtactggacgaatctgatgatagacagaacagccttgttgcttccgcgtttgcagcggagcaggcaatcgcaaggaaaggctcttaaccaaatgttgcactatttgcgcattggcctggccgtcatgcagttacggcgttttcatacgcaagccggcagtgaaacagccagagagatcaatgaggtgctttcgcggcttgcccgcgagacagcgacgggggcattacgccaacgtattgaatccattattggcgtttattctgccagggcgcataaaccatcgcgccaactcatggacagtctgcttgatctgcattgtgcattgaaagaacaggataaggggcaggctgatgattaa

SEQ ID NO: 450092 - DNA, 216 bp, Serratia marcescens
atgattaatgacattaatatcggcggcgttttcttccccggtctgctggttattgcgatcgttaacttagtgtgcacgttgttatttgtgcctcttctcacttttagccggctctatcgtcatttgccttgccgcccgctgattgatttctcaacttatgttgttactttgttcctgcttctgcagggggtgaacgcactggggtttttagcatga

SEQ ID NO: 450093 - DNA, 864 bp, Serratia marcescens
atgaaatcatttctttctctgttaagccgttatgcgcttacgttaagcgcagtcgtggtggccaccctcctggctttcatgatgtggaaacattatgcgcaaagtccatggacccgggatggccgggttcgtgccgatgtggtgcagattgcccctgatgtttccgggccggtaagccgtgtcgcagttagcgataatcagtgggttaatcgtggcgatgttctctactcgatagatccgcactggttgaaattggcggtgctcagcgcacaggctgaagtcgacgctaaacgtcatgaaatgttaatgcgccaggatgccgccagacggcgttctcagatcaaaggcgcgatttccggagaggatttacaacaaacaaacagcgcggcaaacgtcgcggcggcgaattaccaaggggcgcttgctgccctggaactggcccagctcaatttatcacatgctgcggttcggtcaccggtcgcgggctatgtcacgcatctccggcttcgccctggcgactacgctactgccggcgtgacaaaagtcgccatcatcgatgccaatagcttctggattgttggctattttgaggaaacgaagctgcgacatattcgtgtggggaacaccgcacaaatcgcgcttatggggttcgaatcccttataaccggtcatgttgaaagtatcggacacggaataggcgacagcaatgacgatacgggcgggcttggcctgccggaggtcaaccccacttttaattgggtgcggcttgcgcagcgagtaccggtacgtattcatatcgataagttaccggtggggatcgaattagtggcagggctatctgcaagcgtatctatcacgccttga

SEQ ID NO: 450094 - DNA, 906 bp, Serratia marcescens
atgcgcgatctccccccaacagccacgctgcgcacttttgaagtcgccacccgccacaccacctttacttcagccgcggcagagctttttattacgcaaagcgcggtcagccatcagttgaaaaatctggaggaaatctggggcctaccgctttttgagcgcggtaaaaccctcagcctgacgcccgcaggcgctgcgctcgccccccttgtgcgcgaattctttagcaagctggaaacaacgcttgccgatcttcgcgagcaaaatggccgggtacgattgcgcgttaacaccacctattcttttgcgctgaagtggctgttaccacgcctgccagatttggcgcgtttgcatccggagattctggtgaccctggaaagcacggataaagccattaactttgccagtacagatgccgatgtggcgatccgttttggtcacggtaattatcccgcgctgcacacggagttcatgttccgcgagcagctattcccggttgccagcccggcactattacggcgctttggaacaccgtctgaacctgcggaactgctgcgctatccgcttttgacgcgtgacggcgccgatctggtgcccaaatgggacgtctggtttaagctgatcggcataaagacggatgtgttgcacgaaagcgtacgcttcgccgacaccaatatgacgattgaagccgccttattggggcaaggcattgcattagcgcgcagcggacacgttgaaaaagagatcggcgatggcagcctggtgcggctctttgacgtcccttttccttctccggccgcttattatttcgtctgcccgagaggcatcgaaacgcagccgcacatcataaaattccgtagctggctactggcggaatcacaacaggcgcagctcagttatcgttaa

SEQ ID NO: 450095 - DNA, 810 bp, Serratia marcescens
ttgcttacgttattcgccgccctgctgcatgccggctggaataccttattacgcagcggtactgaccggttgtggtcgatgaccatcatgtgtctgacgatagcccttgcctgcgccgtaatcgtgccgtttctgccactgcctgccggtgccagttggcagtacgcgctgctttcagctgtgctgcacgttggctataacctgtgtctggtacgcagttatcaatgcggtgatctcgggcaaacttacccgattgcgcgcggttcttcgccgctgatggtgacctgcgcggcggcagtattcgccggggaaaacattgcatttaacgctcttggcggcatcatgctggtttccgtggggattttaatgcttgccgtgaaagggggaaaactggcgatgccgggtctgccatataccctggcaacgggcgcttttatcgccgcgtatagcgtggtggatggtatgggcgtgcgcgtgtccggcaacgcgctctcctataccctgtggatgagcgcattatggggtgtgctgatgccggtactctatatcgtgctgcgcgacagtaaaagcttactgcgccggcgacccggtgtactccaggcggcggcaggtggtctggtttcgctactcgcttacggcatcatcatttatgccatgatgggcgcacccatgggagtagtctcagcgttgcgcgaaaccagcgtgctgtttgccgctgtactgggttatctgtttctcggcgaaacgttaacgctgagaaaagtgctggcgtgcacggtaatcgccgccggtatgctgatgatgggttaa

SEQ ID NO: 450096 - DNA, 891 bp, Serratia marcescens
atgtctgaccatcccacacttgctcttattggtccgggtgctatcgggaccaccatcgccgctgtactgcatgaagttgaccgaacgccagtcctttgcggccgtaccgcgcatccgcagttgattttacgtcacgatgagggggaagtcgtggtgccaggcccggtattgaccgatccggcggctatcagtcacccgttcgatctggtttttgtcgcggtgaaaaccacccaggtcgctgacagtgccaactggctggccgccttgtgcgatgaaaataccgttgtatgcgcactgcaaaatggcgtcgaacaggaaagccagctggaaccctacgtcaagggtgcaaaggtgctgccttcggtagtgtggttcccggcacagcgcgagccggatgcctccgtctggttgcgtgccaaaccgcgccttacgctgccggatgtacccgaagcgaaaaggatagccgctgtgctcaaaggcacaggctgcgcggttgagctgtcaaccgactttacctccatcgcctggcgcaaactgttgcagaacgcggtcgctggtttgatggtgctggcgaatcgccgtgccgggatgttcgcgcggggggatatcactgcactggttctggcttatttgcgcgagtgtctgaccgtagcgcgtgcaaagggggcgttactgagcgataaggttccgcaggagatccttgacggttttcatcgggcccctgcggatttaggcacctccattctcgccgaccgccaggccaaccgcccactggagtgggatattcgcaacggcgtaatacaacgttatgggcgttcactgggtattcctacgcccatcagcgacgtgttggtaccgctgctggcggcaggaagtgaggggccggggtga

SEQ ID NO: 450097 - DNA, 126 bp, Serratia marcescens
atgaactgcccccagaagttggacggtgtaaattcaagccagtcctgcattctctatattttggcgggcaacctctgcatgatgctcattaaactcaatggtcgttacgctcccatcatgcggtaa

SEQ ID NO: 450098 - DNA, 420 bp, Serratia marcescens
atgctgtccgccattcattatctgaccgaactgaacggctcgaaaaagcgcatcctgggcgatgcgcctgaacatattattaccggcccctggaaacgcctggtgtacgatgcgaaggggcggatacaacgtgccggttactcgcttcgcctgctggagcgtcttcaggatacactgcgtcgacgggacatttggctcgaaaacagcgatcgctggagaaatctccgtgagaagctgtcgcggggagaagaatggcaggcgcagcgggtccccgtctgccgagcgctgggacatcccaccgatggacatagagacgtgcaacagttggcggtccagctgggtgaaacttttttgtctgaagccctgcggtatgagcgagtctggtggagggcgctggatgaggggggggggacgacatag

SEQ ID NO: 450099 - DNA, 297 bp, Serratia marcescens
atgaagagaaatattgcgctgctgggctgcgcgctgctgatgtgttcgcagctggcttacgccggccttattatcgagggcgggttgaatggcaataccggcggcggcggcggaacgaccattgatgtcagcataaacggcagtgtcaacggcaacaacggtaccggtgtgaacgtcggtggccagaatggcggctcgcaaaagccgggtacttccgccagcgagctgcaaaaagagatttacgcgtcgatctgcgccagcccgtttatgaagaaatacgcgtctatttgtcaatag

SEQ ID NO: 450100 - DNA, 597 bp, Serratia marcescens
atgcacagcgtcgtgatggcagagaaagaacgtgtgcggcctataggaggcataataatgaaaaatattaatatcgtcatcgatgacgagaatcgctatttttcctcgggtttgcaagccagtatttcgatatattctgaacttaacagcaaggcgtttcgctttttaaaccagggcgatgcggagcgaccagatatagtattcgcttcctcgatgcggcgtgcccagcgttggcgaggaacgagccagggtggcgcacccttggtcgtcacggttaaagaaaagcccgttttttccgccagcagggctcgcgtgctataccgcacggacgaccagatcaagctgtttgaattgttgaacgagatattatctggtggtaagccggtgtttaccacacgcaaagcgctgacccggcgcgagcgacaggtagtgggatatcttcgccttgggcttgatcaatcacaaactgcaaggctactggggttaagcgtaaaaaccgtgcatagccataaacgctcggtaatgagcaagctgatgctgaaccggcatcatgagtttatctattggatgctgtcgcacgaaggagagtattcttaa

SEQ ID NO: 450101 - DNA, 849 bp, Serratia marcescens
atgcgaaaaataacgaatttttggtttggaaaaatagctgtaaaaggctttttaatcgtggtggggttattctcgtgcggcgcatatgccggctggggtatggacgtgaaagttgctccttcaccatacatgccctatgtgagggattatacggttaaaatggtctattgggatactaacgatacgacgccgaacccactttatcgctgttcattacgagattgcagtttgatgtacggtgttgcaacccctggggagggtagttttagggctatatcttccatgacttttcctgaaataacgactagtaaaacccttggtgagttggccgggtattttatccgccgtggttatatgaaccgagagtattcagcaagcgaatatggtggtaaaaatgaaacccgagaaacctgtttcaccctgatgcgttttttcgataatggagtggttgcggggtatatgccgcttcctggcggccgcgcttgcgttgttgcacaggttttgccaaccatttgcgactttggggagcgccagcttgagctaaatcacggctttgtacgagctgaagatatcaacggcaataccgtcagcacgtcgctgcatatgaagtgcagttctgagcttggggtgcgcgttatggccgccgatcgttcggaccgcatttatttcaatggtcagcaggggttccgcagcgagttaaaagtggacaatatgaatttggggcagggcaaatatctccaggtgacaccggcgggagtgacattgaacctgagctctactctggctggttatgacggcagcatcggcgtattgcagggatcaaaaactatcatcattaccttgccgtaa

SEQ ID NO: 450102 - DNA, 807 bp, Serratia marcescens
atgctaagattaatttttgtttttcttatcgcagtccctttttttgtaaatgcatataatattcttggttctggatcaaggcagcaagccaacttcccaatagtttactgggattgggccatgagtgtttatgttgatagcgaccacaacccctgttatggggtttacgactgctatattgtctatggtgagctgtttagcgataacaactttagctcctattctcgttatccaaccaataagtcttcatatggttatgctacgttaggtgaatttatgtcaaatttaaatctgaggataacaggcaaaagttataatgtggctaccgctacggttcctaatgggatgcaatacccctgtgtcaacttagggtatcagataggttcctcttcgcccagggttatcaatccgacgggctgtgttggcgggccgggcgggaccacgccgccgcctgtggcttgcaaggtgaactcgcaaggtattttcttgcagtacccaacgcttagggagaatgaattaaatggtaatcgtaaagaggtgaacgtcaacctgtcatgcaacagaagcagcagcgtcaatttgcgagttacggggctaaataacgtgggtcttcttgccttggacaagaatggcgccttatattcgtatttatatattaacaatgtgcctgcgatccaagggatctcgcttaaaaatgtggggagcgatggcgttaatgtgaatatatcatcggttctgatacctaatggtgatgttttagcagggggatactccgcctctgcggtattgcaggtaaatattccataa

SEQ ID NO: 450103 - DNA, 525 bp, Serratia marcescens
atgaaaaagacattgttgccgctggcgctgttgtgcataagccaggcctgctggagcgcggcgccaacggcggcggtcaactacagcggcgttttggtggctgaaccctgcgtgatcccgcctgggcaagaaaatattgagttggacttcggtacggttatcgataaatacctgtatctcaatcaacgtacgccggggaaggaatttactctgcagttggcggagtgcgatcttagcctgggggatacggtaagagtatccttcagcggcacggaaagcgttgtactgccggggctgctggccataaacggcggtggcgcgagcggtattgctatcggtttggaaaatacgaccggggaatcactgcccctgaatcagttcaccgggaagcagcggctgcagccgggaagcaatggaataacgcttaaggcgtatgtacagggtgaacctgaggccataaaaaacagaactatcggcagaggggcatttagcgcttcggcgacatttttattgagctacgagtaa

SEQ ID NO: 450104 - DNA, 489 bp, Serratia marcescens
atgagacagcttggtgtggtttgcttcatcctgctggggtttatggcgcgggcggcttcggcggcggaaaacatgagctttaaaggaacgctgagagaggatgtgccctgcgagatcaacggcgggcagccgataaacgttaatttcgagacggttggcgtaaataaaatcgatggtgaacgctataagaaggcattttcggtgagggtgacctgcccgggcgaattcgatgctccttataaaatttattatctcggccagcccagtgacttcgatactttggcgttggccaccaatatcaaagggctgggtattaaggcgcagtggcaaaacaacggtgtgtttgcggaactgagcgtcggtgacgcgattaacggccaggccgatatggatctccaattccaggtggttccgatcaggaagaaaaatgcagacctgatgccgggggcgtttaacgctaatgcgtcgcttcgccttgaatatgactga

SEQ ID NO: 450105 - DNA, 510 bp, Serratia marcescens
atggcgcataaattaaaactggccggttgcttcacctctctgcgtaatgtggcggtgttcctggcttgtgcgggggcgtctccaatgctccatgcttcggcaaccgttacggtcagcgtcaccgtactggaggctccgtcttgcgtgatcaacggcaaccgcacgatagaggtggactttggggaagttattacggtcagcgtggatgggaaccgctatttgaaaaatgtggactataccctggagtgttcaggcatcaagtccaacgccatgcagttgagcgtgcaggggaatgcgacctcattcgatccttcggcattgcaaactaacgtcagcgactttggcatagcgctgcgcgctaatgggcagcctgttggcatcaatagttggctgaaattcacttacccgaataagccgctgctgcaggcggtgccggtaaaagccgctggcgcgaagctgccgggcggcgcctttaccgccggcgccaccctgctggtggcttatcaatag

SEQ ID NO: 450106 - DNA, 663 bp, Serratia marcescens
atgcaacggataggcaacagactgaaacggcacctgccggatcgccatgagtggcgatactacggcgccttgggcgggctggcgctgatggcgccgctttccctcggcgcgatgctgtggctgctgccggccgcccaggggcaacgggtggataactggtataccgatggggccaacggcgtactgcaggtgcgcggtgcgctgacggaaagcgcctgtcggctggaaatggaaagcgcgtggcaggacatcagcttgggggaaatcggcaccgggcgtttgcaaaacgtcggtgaccggggcacaccggtggtctttgagctgcggctacaggattgcttacgcagcccggccggtaaccgggacgcgcataccggcgctctgagttgggcagcaaaccaaccggcggtgacggtgacattccgcgcggtgcaggacgcggacaacccgcagctggttaaggcgcagggcgttaccgggttggggctgcgacttgaagacggccgcggtcaggatgtgcggctgggcagccgcggtgagcctttgctgctgacgccggggcagaatgcgctgagctacaccgtggcgccggaacgcacgaaggcggcgctggtggccggcagttatcgcgccacgctggactttagcctgagctatgactga

SEQ ID NO: 450107 - DNA, 438 bp, Serratia marcescens
atgcaaggggccattatagatgccgcctgcgccattgccgccggaagtcgggagcaggtaatagatatggatacggtgccggtcgcggatattattcgtgatggtcgtggtatggcccgttatttctctattgagttgattaattgcgtattgtcgcgagctgaaagcaatcggcccgattggaaaggatttaggataacgttcgacggtgaagccgatggggggctatttggtatgcaaggcggcgccaaaggtattgggttgcaaatttccgatgccagcggaaatgtcgccacgccaggcagccctttgccgttagatcatatatcgctgggcagcatgcgccttaattatgaaatgcgtctggttgccaatcagcaaccgttgcgggcgggagcgtactcttctgcggtgcgttttaagatggactactactga

SEQ ID NO: 450108 - DNA, 543 bp, Serratia marcescens
atgaaactgaacaaaatcatgatggcagcagtattggctttcggcgtaacctctgttgctcacgcagcggatcagggacacggcaccgtaacctttaaaggcgcaatcattgacgcaccttgctcaatcaccccggaaaccgtagatcagaccgttaatctgggccaggtttctaacgtggcactgaaagacggcggccagtccacgccgaaaagtttccagatcaaactggaaaactgtgagctgaccagcgcaattccgggtaaaaacaacgccgtagccatcacctttaccggcgcatcttcggtagatgacgccaagctgctgggcattaccggtaccgctaaaggtgccggcatcgccatcaccgacggctccggtaaactggttgagttgggcaaagcttcttccgcacaaactctgggcaatggcaataacaccctgagcttcgccgcttacctgcagggcagcaaggcctctggcgcggtagttacaccgggcgaattccagtccgtggctgactttaccctggcttaccagtaa

SEQ ID NO: 450109 - DNA, 753 bp, Serratia marcescens
atgattttccatataaataacaacgttcttttcaatgagaacgaatgcacgctagctcatattgataatgcggcgactaaaatagttctgctaaagcccagcgccaggctgttatcgctatttattcgcaataataatgttctgttactgcgcgataaattgcttaatgatgtctgggtcgattacggcctcaaggcatccaacaataatttgaataattacgtatccgggttacgcaaatcgctggcgcagttcggagaggaagaacttattgtcacctacccgcgacaagggtttaagttcatcgcctcaattattcacgaggtgaatgttgatgaaagaaacataaagaagaccagcagtgacgataacgtaaaaggaaacatgcatgaaaatgcaaaaaacaagaagaataaaattcggtggtcactgcggcgcctggctatgataatctccaccagcctggcgctgttttccgctatcgtggtttatcaaaatagcacccgggtcagcatgtatccattaggcaattatgaacgttgtcaaatttacagcatgaactatggcgacggggacttagtgaagataaagcaaattattcggcaagccggctttagctgccggggtaaatccgacatatattattacgataatatccgcgacgaagttacgcaggaggacaccgagctgttgaccttctgtcccagagaaatcaacagcccgtgtatttacaattatatcgataagaaatag

SEQ ID NO: 450110 - DNA, 489 bp, Serratia marcescens
atgaaagctgggggttgtaatctggttaaacggtatcgctacgggattttggcgcttattgcgctcggctgcagcgctttagccggttactttttgttttttagaccgcaaattccggaatgccgggcggtaatgctcatctctgacaacgttggtgggcgcagcgttgatcgcgtggtgctggtggggattgttcccgatggccggcgccggatcaccctgctattgaacggcagagtaaatgatgggaacaatcggtatgttatcgatcgcatcgtgatcatggagtaccggcggcagggaagcaactacacgctgcatgtcgagaaaagcatcaggaaggcgtttgactccctggagccaggaaacctgaaccgccgtttgccggcagaggggcagctgctgcattggcgtattgagcggatcgacagccggcatttcttgttcgttgataaccatgcgccgttattcgtttgctccacattataa

SEQ ID NO: 450111 - DNA, 786 bp, Serratia marcescens
atgagatacataattaataataatataaagtatcatgaagatagatccgagctgatctcgctgcatgacgacattccgccgattgtgctgacggccacactgaaccgcctgctttccgccctggtgcgcaacaataacctggtgctttcccgcgaaacgctgctgacgcaggtgtgggaagcgcacggtcaggtcgcttccggcaacaacctcaacaataccatttcgattctgcgcaaagcgttctcttcgctcggcgaggaagagatcattgtcaccctgccgcggcagggatttatgttcaccgcccaagaactgaagacggcagacagtctggcggaaaaaatgatggaacccgttccagagtcaaccttgctctctcacgtccctgtctcgcaccgtattaaacgctttaaatccttcagtctggccgtgctggtcatgctggcggtgggtagcaacacctgggcctggtttgactcgggtttttcacctttccatggggtggcggtcggcacaatcgacaattgcaacgtgcgcttcgtcgcctcttatcatatgccgggaaccggcggcgtcgatttggatcacctgcgagacatgctgaagaaacggccggatattcaatgccgagagccgggaacgctgctttattacgacactcagtcactggcgcccaataataccgtgagaacccgaagttcctatttttattattgcccgcaatcgcaaatggcgggcggcaaggtgcaatgtgagaacttttatgaaagctgggggttgtaa

SEQ ID NO: 450112 - DNA, 348 bp, Serratia marcescens
atgaaaacgctctcaagacactcggagctggcgaaggcgttcgcgtacgccctgtaccagtggctggcactgacgtactatccagagggtggctgcgctgaagcagataacaacatcgctgaaaatgccctgcggacggtcagtctgggtcgcaagaacttcatgttcttcggctccgaccacagcggtgagcacggagcgctgttgtacagcctgatcggtacatgcaaattgaacggcgtggatccagagaggtacccccgtcatgtgctcaacgtcatagctgactggccagtcaatcaggtccacgagctgttacaatggcgcgtaagcctgccagctgaataa

SEQ ID NO: 450113 - DNA, 1419 bp, Serratia marcescens
atggagcagatgagtgccaaaggatacattaaagatgggaaacttgacgaagatcgctttgacgctcttcccggcaaattttggactgaagggttgccaatagcagatttttactcagcttgggatgtccttggttatgtcatagccaactccccggctagtcgctatgcaggcagcctctacaataaggagcaatcagtattatccgaacctgtgaaggttgcactgttggagcacatctctccctccagagcaaaagcactgcaaccacgtctcacaaaaaaacaagttgacattgaacactaccgttcacaggaacttacagcactactgctttcaaaaaatgatccgttcagtacattcacatattcacccgtagatacctcatggagcgactactactccatacaactcctatggtcgcaagctccaaagcagttggtatcttggttaaacacaatattctctgaaccaatcaagtctcctcgtacccacgcgcttgtggttgaagctcttaagcatatttgtttgtgcgtcagctttgacaagcatcatgagcaaattgatgcgcttttgcagagcaatgtgagtgtaataatctggatagggcttcatgctcttgaaaacgcccttaataggggagtctggggaattgaagccctttcaaaaatcgaccatatcgaatcagccactgttcgacgtaccattttgtgctggctgatcaacgaagccaactaccttaattcggagattaaaccacaactcatcgcttgtttaatccaatcgttaaaggctcctctcgcagacgatgagctcaaggatattcttcaacctgttcggggtcgcctcggcaggctacaccatttcacgccttggattcttgaatccatgctcgtacccatgctggaaaaaagaacaatcgacatctctcaagttgcccatcagtggttgacagagctgactacccaatggcgtacagcactcaagaatgagggtctctattttactctagatgcggacggtgcgttcaccgatgagctggctattgcgaccaaatacctaagctcagcagatcgagtggagattgtcagagaacttaggaaagtctttgatgcactggctcggaccatcaggcggccgatgagcgcgcagataagctggaaatcctacaacaatgcgcaccaagtaaacctctggctctatgcgctcgctcgtaggattacaacattggtgcctgatgagttaccactgttgaatgaacttctacttgaaagcgaagaaattatagaacgaatcaacccctcaactcggcgctggagttcaagcaaagacctgctcacttatttaaatggcgatcccgaacagattgggtcacatggtctacatcaaattattcagagagcaatcgagccacggtga

SEQ ID NO: 450114 - DNA, 1329 bp, Serratia marcescens
atgcacactggacaggctcttgatctgatatcccgttacgacactctgcgtaatcctttgacttctctgggtgatttcctcgatccggagctgatttcccgttgccttgccgaatctggcaccgtcaccctgcgtaaacgccgtcttccactggaaatgatggtctggtgtgtcgtcggtatggcgctggaacgtaaggagcctctgcaccaaatcgtcaaccgcctggatatcatgctgcccggcaatcgcccctttgtggccccgagtgccgtcatccaggcacgccagaggctgggcagcgaggcggttcgccaggtcttcacacagactgcgcaactgtggcatcgctctgtcacacacacccactggtgtggactgacgctgctggcaatggatggtgtggtctggcgtacaccagaaaccccggaaaacgaggcttccttcccgcgactgactcatgccggacaaccctccccttacccgcaggtgaaaatggtctgccagatggagctgacgagtcatctgctgacggctgccgcctttggcacaatgaaggacagcgaatacacgctggcagaacaactgatagagcagactgctgataactcactgacattactggataaaggctattactcattagggctgctgaatgcctggagtcaggcgggggaacagcggcactggatgataccgctgaagaaaggcacacagtataaggaagtgcggaagctgggcaaaggtgaccacctggtcacgctgaaaaccagcccgcaagcccggaaaaagtggccggagttgggagaggtcatgacggccaggctgctgacctgtactcgtaaaggtaaaacctgccagttcctgagctcaatgaccgatgccatgcgctatccggggggagagatggttgagctgtacagctatcggtgggaaatcgagctgggataccgggaaataaagcagacgatgcaactgagcagactgaccctgagaagcaaaaagccggagcttgtggagcaggagttgtggggtgtgttactggcttacaatctggtgcggtatcagatgataaagatggcgggagccctgaaaggctactggccgaatcaactgagcttctcagaatcatgtggtctggtgatgcgaatgttgatgacgttacagggagcgtcaccaggacggatcccggaactgatgggcgatctggaaagtatggggaagatggtgaagttgccagtgaggagagaaagagccttcccgcgagtggtaaaggagaggccctggaagtatccaaaagcggataaaaaaagccagtcagttgcttaa

SEQ ID NO: 450115 - DNA, 366 bp, Serratia marcescens
atgaacaatcactcagaatccggtaccaaaccggagaatcttacctgccagcagtggggactaaagcgcacgatcacaccctgtcttggcgctcgtctggtgcaggaaggcaaccgggtgcattttctcgctgaccgggccggattcaacggtgctttcagcgacaacgatgcattacgcctcgaccaggcctttccgttgatgctcaaacaactggagttgatgctcactagcggagaactctctcccagtcatcagcactgcgtcacgctatatcacaatggactgacttgcgaagccgatacactcggctcctgcggttatgtctacatcgctgtttataccgaacagcctgaaccccattaa

SEQ ID NO: 450116 - DNA, 876 bp, Serratia marcescens
atgaaaaaatcagaaggtctgcaggccatcgaaaagccgttagcgtcactcccacatgctattggcaaacatatttttggccatattcaaaagctcattcactacgagccggtgattggcatcatgggtaaaaccggtgtcggtaagtcgtctctctgcaatgccctgttccatggcgaagtcacgccggtcagcgatgtggcggcctgcacgcgggatgtgctgcgcttccggctccgcaatggcaatcacagcctgatgattgttgatttacctggtgtgggtgaaagcgagcaacgcgacgaagaatacgccgcactttatcgtcacatcctacctgagctggatttggtgttatgggtcatcaaagctgatgatcgggcactgtcagtggatgaacacttctatcgtaaggtgatgctggcgtatcagcatcgggtgttatttgtggtgaatcaggctgacaaggctgccccctgccatcagtggaataccaccagcaatacaccatctcatagccaacaatcgactattgaggccaagcggagcgcagtacagcagctctttctgccgcaccatccagtctgtgttatatcggcccaaactggttgggggctggatgcgatggtagaggcgatgatgcacagcctgcctgaccgggccaccagtccactaacgacacaattgcatggcaggctctgcacagagccagtaaaaaagcaggcacgcgagcgctttggtaatgcagtggatgaaatgattggcactgtggagtcatcatcttttctaccagcgcctgtaagagctgtgattcgaacagtacgggaagcagtggtgactgttgcccgtgccgtctgggactggattttcttctga

SEQ ID NO: 450117 - DNA, 1131 bp, Serratia marcescens
ttggtaaaatcacttagaccaataaaggatatgctggatagtgagccgttaactgtgcctacatcgtggccaaatgctaacgcgcgattacttggtcttggagctggtttacccgtggaccctctagatcgcttagcacaatttagtgcttcagattttgagagatttacacttgagtgggcatccgactatctagcgcaattagaagaagtcaatgaggtccaacaaagaggtggtgcgggcgacaaagggcgagacgttatcgtctggttggatcctagtgaggtaatccctcggcgatggcgcttatatcaatgtaaacactatggaacaagattggggacagctgccggtatcgccgagattggaaaggttgtctactacacacttcgaggcgactataccattcctgaagagtactggtttgtaactcatcaaggtgttgtaggcccactgcaagacttactagatgaccctgacaagatgcggcagtatgtgttggataactgggatgagcaatgtgcaaaccaaataatgaaagcctccgttccacttaccccagaactaagatttcacattttgtcattcccatttagtatttttcggtcaaagcaacctattgaaattattaacgagcatgcaaaaactcgttttcatcttacagttttcggattgccattaattaatcgcccgaaacctcctgcgcccccttcaacagtttcagctagtgaaattggttacatcacacaactatatgctgttatcggagaaagcttgggaatgcatgtgactcaagttgcagattttgtagctcatgcaccactcaagaaccttttcgaacgttcgcgtattacattttattgtgcggaaaatctaaaagagcttgcacgtgatcaaatggcagataccgcctttttcgatagcctggttgatgagttttgcgatggcctttatcacgtatgtaatgaaatggcagataccggtcttaaaaaaatgcgatcaacaattttagcagcacaaagtttacaattaggtgggcatgcattggctccgcatgtcgttgccaatgatcgtgaagggatttgtcatcacatggccaacgaaaaccgtgtcatatggtgtgacttatga

SEQ ID NO: 450118 - DNA, 402 bp, Serratia marcescens
atggcaagaaaaaccaagccgttaaccgatacggaaatcaaagccgccaaacctaaagatgccgattaccagctatatgatggtgaagggcttactctgctaatcaagtccagcggtagtaagctctggcagttccgttactaccgacctctgaccaagcagcgaaccaagcagagcttcggagcctaccgagccgtctccctttctgatgcgcgtaaactcagagccgaatctcgagttttgttggcgaaagacattgatcctcaggaacatcaaaaagaacaggttagaaattctcaagaagccaaaactaataccttcttgttagttgccgagcgttggtggaatgtgaagaaagccagcgttacagatattaaggctcatacactggttcaggcctga

SEQ ID NO: 450119 - DNA, 567 bp, Serratia marcescens
atgcgaacagccagcattagcctctcaacacgccgcttgttcatgtggcaacttcttactatcgcccgcccagccgaagcggctgaggctcgctgggatgaaatagatctgaaggcgcgagaatggaaacctcccgcatcacgaatgagaatgaaccgtgatactgtcccattgtcagatgaggcaatagctattctggagatgatgaagccgttaagcagtaaccgggaatttatcttccctagccgtataaaacctaaccagccaatgaacagccagaccgttaacgtatcgctaaaacgggcaggttttggtggtgtgctcgtttctcactgcctgcgttctatcgccagcacagtacgcaatgagcaagggttttcacctgatgtcattgaagccgcacttgctcatgtagacaaaaatgaggtacgtcgtgcttataaccgcagtgattatcttgagcaacatcgtccgatgatgcaatggtgggctgattttgttatggctgctaatcgcggaagtatgattgaaggtggaataaaaggagtacggcttgtgggagcgtga

SEQ ID NO: 450120 - DNA, 630 bp, Serratia marcescens
atggcagttccgtatgaaccagcggagttcaagaaagaagcttttaactgcccgtactgtcaggcttacgctaaacaaaagtgggagcaattatatcctttctatgaacaagatgcctttcctatgcatgtgtcacaatgtgagcgctgtggggagtattcatattggtttaaaaaatcccttctgattcctgcttctgcgaatgttgaactgcctaacccagacatgccggaagactgtaagtccgactatatggaagccagaagcatcatcaatctgtcgcccaaaggagccgctgcgcttctccgtctgtgccttcagaagctcatggtccatttaggagagccggggaaaaacattaacgccgacattaagtctctagttgagaaagggctgcctcctcgcatccaacaagctgcggacatttgccgtatcgttggaaatcaggctgtccaccccggagagattagccttgatgatgacccacagttaacacatggcctctttaagctgttgaatatcattgtcgatgaccgaattacgagaccaaaagagatcgaggcgatgttccatagtatgccggaggggccacggcaggggatcgagaaaagggacggtaagactagttaa

SEQ ID NO: 450121 - DNA, 1275 bp, Serratia marcescens
ttgtacgtggataccataccctcagacctcgcgcttgcggcggcttggcacgagtttggagacccagcgctgtctagccagcaaagcgtcgctgccagcctcagagaattgccatctctggagagggggcaagaaacgctgtggacacaactaggcccggccgcccgtgaggcctggcgacaggatctgttcgatcaggtgaatgaggaacctgaattagcccaggggctcctcaattttgcttgccttcggctcgagcagacggcattcgccgaagtcgagccagtgcttttgcgattgatggatgacgaggaacatctggcgtttgcgaatcgacttgtcggcactgatgtaaggcaactgcaactgaggtgcaagggactactgcggtccaagcagggttcactggacctagggggaccggtaggccggggcgagggagccactgagttgcctagcgtaggagcccaaacttggctgagcgacccttccgtggagcaagtaatctatagggcgcttagccagattgaggaagaattttgtcgcgaatattcggagacctggggagaggacgaggaggcccatacggcgcgactcctgactctgacgaaggaggcgattggcaacgtaagcagccagttgcgccagctctcagttacgacgcgggcgaggtatccgagcctgacagtgaaggtgcgtcaacccagcaagcgggaggaaggggcgaacacaccagccggtgctccgctgggggcagacgtgctgttcctgagccgtatcgtggaaaagggggaaacagtgattcagcgtgcgacccttatgcaggtgaaaaagcgcagaggcactgattcggggcgggggttcagttcaagggttggcatcgacctgaagcagtgcgaggacatactcaagcagtcagaacacacctactatctgttcgcgactccggcctcgcctcgcccggttctctgggttgccccagctcggctcgttaggaatttgacccagctgcacacgattcggcgatgcaggtgcgggacgccagctgctcctacgcggatttttttctgcacgagcttgttggcctgtgggctggcgacgagcatgaggacatcatcgccgtcgccaacggcgttcctcggcttgggcgaacacctcgccacattgttgaaatcgaggttcgccgccaatctgattaatgcttcggggagaaatacatgctccaactttagggcaggatcatctaccgaggcagggttagtccagtctaattga

SEQ ID NO: 450122 - DNA, 2598 bp, Serratia marcescens
atgtctgaattagcacaagaatcaatcgcaaccaatgacttcgaaaaatggctgaatgagcgtaataactggcttcaaacggcagcaaaacagcttattgagaataaacggttacccaatgaggtcgaactcactgagctggttcgactctgcaaactggaggcggctaaacaagatgactctgggttcttgaaggttgaacctggctcattctcagcagggttactccaacgaaatgttcgtgttgaagaagtaagccaagtatttggtgtaaatgccatcaagcctggggcatccttaccattcggcgctggtagtctagctgttatttatgggcagaatggttcagggaaaagtagtttttctcgtctgctcaaacaactctgtggctcacgttcaagggacgaaatccgcccgaatgttttcagcaacgaagagcatacatgtagtgctcaatgtcgaattaccattgatggtaaacccgtagaaatcaattggcaggctggggttgccccacatccgatgctcaagtatgcccaagtatttgactcgaaaactgcgactcaatatatggggcgcactgaatcaagctacgaaccaagcagcatgcgttttatatctttgctcattcagatctcaggaatggtttctgaacaactaagtagagagaaggaaaaacttgtccgtgctcttccacttttcccaagtgaccttacagagaccgccgaaaatacttggttcaactctcttaaagcatcaacctccgctgagaaaattgagtcgttttgccaatatggtaatgatttggaagatgaacgtattaaaggtgaagctctgttagcagagaaagacatcaagggacgcctgattgcaataaataaggaagagattgccactgaaaacattaagcaggccatgaggttattgaaggaaggacttgcggatgggaaagccgaggaattgtttaaggcaaaagaattggctgttgcagcaagaaaggctgccaacatagttgcgcagcaggcattcacaacagcccctctacaaggcgttggtgaaacggcttggaagctaatgtgggagcaagccagaaactactccactgttcatgcttaccatagccgcgaatttcccgttactactgcagatgcatattgtgtgctctgccaacagaaacttactgaggaaggctcatctcgactcaaaagttttgaggctttcgttacggctggtttagaaaccacggcaaaaactgcggaagccactagcgctgaactcattacgaaggtcgttcaattaccttcgatagaggattggattgctcggctggctcaattgaaatttgatgagacctttgctcgtacctgttatgaaactttgaaagcaaggcgctcacagtttgaggcatgcaccgccgttggttctatcgtcgcattcgattgggcgcttattgatcaggtagttgaaaaacgtgctgtcgatttaattgctgagaagattagtttgatgcaattgcaacaagatgggcaacgccaacaacttgaaaaacgcattaagcaactcaaggcactgcaatggttatgtcaaaacaaattggcaattctcgccgagcgtgaacgcttggtggcagtggatttgctagataaagcagtgagactaacggccagcaattctttgacaactaagcgaaccgaactagggaaaactgagcttgatgctggatatcagagtcgttttgatgcggagttaaaggtacttggtggacggcgtttgccggtagtgccgcagagcaaagctcaaggcaaaggagtaataacttttgggctaacccttgtcggggcaagggctggcttcactcctgatgtaatactcagtgaaggagaagcccgcattgttgcattagcggcattcttggccgatacgactggttcgaatcagttagcccccttcatctttgatgaccctatttcgtcattagatcaggacttcgaagagcgggttgtagctaggcttgtcgagttagcgaagaccagacaggtcataatcttcacacaccgcctttcgcttgtttccatcattgatgctgtaattaaaaagcacagtgagaatccggctaatgaaaaaattaaccatacagtgcaatcgcttagacgtttagataaaatttcgggaatcttggcacaacacagcttgcgggatgccaagcccgaaaagtcgcttaatatgattagggatcatgtcatccctaagctcaaaaagcatcaagtagatgcagatgctgatgtttatgatcttacggcaaaaagtgcatgtagtgattttcggataatcttggaacgaatagtagaatttgtccttttgaatgatgtagttgtccggttcagacgtgatgtcaatactaaagggaagctgcggggtataaccaaggtaactgcagaagactgtgatcttattgatgcgctgatgaccaagtattcagtttacgagcactctcaatccgatgagctgcctctagttccggttgaacttgatgaattcgaaaaagatgtattggagctgattgcatggatcaatgagtttaaaactcgaatcggctga

SEQ ID NO: 450123 - DNA, 726 bp, Serratia marcescens
gtgaagtactttccgcaagataatcaagttagagttaaagttattcggtgggatgtggatgattcaagcaggaatcctttacgtggctgctgggaccctatgacggcttctgatgccggctgtcggcttttcataggatatgacaacgaagatcgtgatgggtccgtggtcggtgcgccatttaatatgggcaaagaggtatcaggtttaagaacgatgggggaagtagccgctgtttttgcccgaaaagggtgtttgaatcaagagagaagcggtggggcgcaatttattggaagaagaaactgttttgcattggcttggaaatatcccaccggattctatggccccttgccgaatggagccgtagattgcgcgttgccggaaattacccctacctactgtagtatcagggagccctatattgaattggatcacggctcagtaacaagtgagagggtaaatggccataccgtcagccactcttttagggtggcctgtaataataattttaaagtattgattgttgcgcagggtggaaaaggcgatctgccgttaggcggtggcatcaccagccacctgaaagtcaatggcgacgatctcggtgccggggcggaagtggtcggcccggcagggaaaagctttacgttaagctcaacgctgagcggctcccccagcggcgccggtgaatttcaaggttcgaaagtgattattttaagtcttccgtga

SEQ ID NO: 450124 - DNA, 1425 bp, Serratia marcescens
atgaaaaatagtgtgcttgcggatgccttaataaatgcaataaatcaagagggtgataataactctctcgctaagctaattaataaaaataaatccgaaaaggatgaaattgaaaggaggaaaactttagctcatactatgagtatcggcgaactattgaaggtgaaatcagagtacgctcttatcttaaaggataagggggcatcgccgggaaaaagaagtattgcatctaatataattaagttactagattttgaaatatcgaaaagaaacaaaaatataccagtggtgtcttacttaagagagaatcgcttagaaatagtaaaaattcttggtaaaaaagaatataaaagagcatatagaaaagcatatatagaatcaattgatgccagaagttttaagagaactaaaccgccagagttattaccagggaagaaaagtagtgacaaatctttcttgttgttgactgagcaagcaattgaaagagatagaaggcgcaaggaacttattgagaaagaagcaaaggcggaaactgagcgaatggcagcgatttcgcgaatctcatcaactatgagcaggaaagaactttcagaagagatactgcttattccaaaatcaaaagatagtaaagtttcgctaaaaaaaaccaataaaccaataggtaatggagatgaaatatattacttcaataggagtgtatacctagagttgattaaatcactacctacttcagaggcatttaaaatagcaaaaaacaaggagttgtctagaaaatatcactgcgatagcataagccttggcgactacacctatttcaattcgctagcgtattatttggcgttgcgaaaactatctacagatagctctctatcaatagcaaaagaacagcgtgcttccgaagtgtttttatataattttactggtaataaatataaaaacaaaatacaattattcttgggagggagtataaaagtatgtagcagtccatcttttattcagagtgtggatgttaaaatgatatctactaatgttgaaaaaattgttagcataagaaggattagtgatcagcagagttttaaaaaacgtgtaacattaaatttcaaagggaagtgtgcaattacaggtcaagaagttagtagtatattgcaagcctgtcatattgaggaatatagcaagtcaaaaaatatggataccagtaatgggattcttctcactgctgattgtcatcaaatgtttgataaccttattctaggtataaatccggatgatttaactatccattttaatgttgattgtgtttattcgcgtttatttgatgggaagaaattaggtgagcatactatcggtttagataaagaaaaaattaggaggaaatggagttcatttatacataatagaaatctacttcgtggcgaaataaattaa

SEQ ID NO: 450125 - DNA, 435 bp, Serratia marcescens
atggttcagagatataaccctgattacgtcatgcacgcggctcgttttgagccgtttgcacgcgaagctgagcacggtgaatatgttcggtttgatgcccaccagcagacggtgagcgcgcttgaggctgagcgcgatgcgctggcacaacgagccgatgcgctggctgtggagaatgcaggctttaagcacgcgctttccgtaattttggaacatgtggatgtaaccgataaagggcaggccggagtggtggcgatgattgccaatgatgagttgttcaactccgaaaccccagccactgacgcagcacttgcagctatcaagaagcaagctggtatcgaagccgttgaagaagccgcctattcactttacgggaaggggtacattttcgacacgattatgggttacgccaccgagctgcgggaggccaaatga

SEQ ID NO: 450126 - DNA, 123 bp, Serratia marcescens
atgagagccgaacaaatagacattaaagacaaaaacgcagtgattggctcattaaaaggcactgtggcagcaaaggcaaatatcgaatgttatctgcgaatgattgatgcagaaaaacagtga

SEQ ID NO: 450127 - DNA, 213 bp, Serratia marcescens
atgctcgacataatcaacgcagcggaaaaaattagagccgaaaacgcctcattcggatacgaggcgggcaagcttgaaatcgcaaacgatatttggaatggctgcctaaacccatctgagcgtcttgaagtcatgaacgcaaccaatcttgaagggttgagcacactggagaaattaagagcatgtgtaaaaaccctggccgagatgttttaa

SEQ ID NO: 450128 - DNA, 537 bp, Serratia marcescens
atgacgcatccaactgtagttaatggaatagacttccgcgaaatggtatccgccgaagagggcgagccaattacagacactttcatgatcgccaaagcattcggaaagcggccgtctgatgtagttcgtgcaatcgaaaaggggcatttctctgatgatttccgcgctgcgcatttttgcgctgtcgagaaaatcaatgacttagggatatttgacaagaagcagaaatactaccgaatggacttcagtggtttcgtaatgcttgtgatgggttttagtggcgctaaggctgctggcatcaaagagggctacatcaacgccttcaattggatgagtagtgaactgaagaaatatagcgccagttatgaagccgagcgcaacgcggtaatgctggagtacatgaaagagaaagatgtcgccagtatgtcaggtcgattgcttaatcgctggggcaaggtgaagaagccgcagcttttagcgcgtattgaacaagtagagaagcacggacagatagccattcctggcctgccttcgtga

SEQ ID NO: 450129 - DNA, 237 bp, Serratia marcescens
atgaaagagcgcccagtgatgccggcgaataacgaagagcagctttatgcaaaagccgcggagttcactcgcatgcatgcctgcatgggcgcggcaaaactccaacgcgagttgaaatgcagctactggatggcaagcgggttaatccagaggatggaaaacgaaggaatcgtaaccgccccggcatggaatggcattcgcacagtgattcatggaggtagtgatgccagcaaatga

SEQ ID NO: 450130 - DNA, 219 bp, Serratia marcescens
atgcggagttggggcattcttggctttatcgggatgctttctcagcacagctccatgcagcacaccgatccgaaaggccaggtttccattacgtttgaactcacgaccattccaacgcacagcgatattgtcagcaatgctgcggccggtttccggatcatcaagtcgctgtgcatttgcctttgccctgttggcgataacgttggcagcctttcttaa

SEQ ID NO: 450131 - DNA, 849 bp, Serratia marcescens
atggctgtagaccaagaaaaatctcaatttcagatcgttgcatctatcgttctcttcaaccacagctatgagcaggtggcgggcaccttgacgtctcttttggccgagcgctgcgttgataagattgttttggtcaataacggcggtgccgattgggccgatgctttggataatgaccgtatcagctatatctctgctgagggaaatggcggatttggccacggacacaacctggctatggggcgctatctgggctcttgcggctattttttgatctgtaacccggatatcacttttgaaccaggtgccttatctgaactgtatcgttttgcgcgggaagagaatcatcagttcgtttctccccgcatacattatagtgatgggcgtctccaacacagttgccgtcttttgccaaccccggcaaatcttttcctacggcgcttcctacctaagtggggggcgaagatggatattgattatgaattacaacgggctgattacgagagaatatttgctgtccctaccgtttcaggctgcttcatgttgctgaagtcagagttattggcgcagttggaggggtttgatgagcgttacttcatgtatctcgaagatgttgacttgtgccgacgggcgctcgaattcactgacattgtgtactattcaggaacaacaatcacacacgtattcggtaaggggtcatacaaatctatgaccctattgggataccacatacgctcagcgattctttattttaataagtggggatggttttttgaccggaaacgttgccgttacaaccagcggtacttgagttctatcccgatggttacttatcgtgatttacactaa

SEQ ID NO: 450132 - DNA, 1260 bp, Serratia marcescens
ttggaagccaagtcggttctcgatactatcgtttccgttgaatcccagctgaatgagttgaccttcaaagaagcggagatttccaagctctatacgaaggaacaccctgcctatcgtgcactaatggaaaaacgcaagacactgcaaaacgagaaagagaaactgaacaaacgcgtttcaggcatgcctaaaacgcagcaagagattctgaaattaacccgcgatgttcaggctggacaagagatctacatgcagctgctgaacaaacagcaggagctcggcatcaccaaagcgagcactgtgggcaacgtccgcattgttgactcggcagtgacccaattacgccctgtcgcgcctaagaaaacgctgattgtcttgttggtgacgatcgtcggttttattatctcttcagcactcgttctcttgaaaaatatgctgcatcgcggggtagaaaactcagaagagctggaagagcgcgggatcaacgtgtatgccagtattcctctctctgagtggcaacagaagtcagaccgtgaaacattactacggggcggcaaaaagaagaacacgcgttcagattctctgttggcaataggcaaccctgcagatctggccattgaagcgattcgtagcctgcgaaccagccttcacttcgccatgctcgagtcaaaaaacaatatcttaatgatttccggtgctagccctaatattggtaaaacatttgtcagcataaacctggcagccgttattgctcaatcaggacagcgtatactggtgatcgatgccgacatgcgtaaaggctactcacacgccctgcttaacgtcaattggaataatggtctctctgatatcctgtctgggcagacaaccgttgaaaaagccgtgcgaaaaaccagcgttgataatatggactttattccacgtggtcagatcccgccaaacccatcagaattgttgatgaacgatcgttgcagtgcgttattaaaatgggctagtgaacattatgatatcgtgctgatcgatacgcctccagtgctcgccgtaaccgactcttcgattatcgggcgcatggcgggtactgtcctgatggtagcgcgctttggcgtcaataccgctaaagaaattgaagtcagtatcaaccgtttccaacagaatggaatcgatactcgcggcgtcattctcaatgccatcgaaaagcgcgccagcagctattacggcggctacggatactataactacagttacaaaaacaatagctga

SEQ ID NO: 450133 - DNA, 1173 bp, Serratia marcescens
atgaaaagccttggtgatctgattctgataaaagataagtctgggaatgttccgttagccttaaaagatgggcttatttatggtaaaggggtacatgcagatacgttaaaaaactcctcgctgctcaacttcactgatgggcggacgctatggccttatagaacgaaagttgctaaacaagagatcagcaatgatcaaaatattcgcgttatcacggttggtgattcttggatggagtggaaagctatccctcaagccattgccaactttgtctactcacgatacgggaagggtggtgatggctggatatcgtttaatatcgacggtggtacaacaaccaataactgtttaaacaatttatccatcgagcataacggatttactgtctatgatgcgtcaaatggcagcgcgccgaacgcagacattggctgttcgcatgacgggtttgcgctgacgtctgcaaaccagttcgccacactgcaaatcaacggcgccaactgcaatacgctgcgcatcaactattacgatggtgacggtacgtttaactatcgcgtagatgggacgggtgattgggtagctgttttaggaagtaatacgaaaacgaaaaaatacgtcgatattaccggtctatcagacggcgaacactcactgcggattaacaccaatggtaacaccgggacggttgcgctatatgggtttaacgcagataaacctactggcgccacgctatacaaatgcggcaatggcggcatgacaactccgatgtatagttatgttctgccacacattccgcattttgttgaatatatcaacccggacgtcgcaattatcatcatcggggtgaatgactaccgtcttagcgaagatgtaaacgcattttatacggggtacagcaatctgattgattcataccgctcagttaataaagatatgggaatcattctcatttctccgccaattccaaacgcaactggagccacggatatgtcaatatttaacgacgcagtgcgggcactggcagtgagaaaaaatgctgaattctacagtggatatgaggctttcccaaaagtatgggcagatggtgatgccgctgggctttggtttaataacctacaccttaataacgttggcgctcagttcctggcaactcagaacacagataaatttctttaa

SEQ ID NO: 450134 - DNA, 399 bp, Serratia marcescens
atggataaattcaactatttgaaagagcagctgacggcggcgctggcaacgtggcagcaaaccaacggcggcaaaaccaccgtgggttggatgcacgcggcgaatcctgaagttatcgaagccctactggcagagctggaagcgaaggataagcgcatcgccgagctggaagaggaattctcattcatcatggggcagaacgacggaatggagaatgaactgcgcgacaaagatgcacgcattgaacacctggaagccaagctggctacgccggtgcggttgccgctgctgtattcgcccgatccgtggatgtcaccagacccaggcggaacatggctggataaagaagacgtgaaaaaatccattcgcaccgctggcttcaccgtagagggggcataa

SEQ ID NO: 450135 - DNA, 321 bp, Serratia marcescens
atgccgtcacgcgacaccggcacgctgtccaccacgaacggcgcgttgccgccgttgaaccgcagcccggtgccgcgcgccagcccgccgtactggtgttgccatcccagctcgctgcgcagcgccaccgtcgtgcccggggtcacctgccacgcggtgtccgcgcgcagccccagcgtcgacaccgtcgcatccgtgtgctgcttgtcgccgcgcagcgccgccgcgccgccgctttccgcgatgccgttgttttcgaagttcacgtacgccaggttgacgaacggctccaggttcagccactcgccccgcacgctgtag

SEQ ID NO: 450136 - DNA, 867 bp, Serratia marcescens
atgttagctattggtgaggccattggaaaaatcggaacaaactccgcaaaaataaacattcttgaaagtattggtaatgatttatcaaaactcctaccattgtttgataatagcaatgaaaaactaaagcagttcattcaactagccaaagattatggtgttgcaccagatccatcatctattgatgaccttataaaggtaaatgatattttccaagacatggaaagtcaggttaatggactaaaaattgaaattgcatcagggctagcaaaagttgatttatcaccattacaggactctcttgacaaagttaaatcggttctaacagacccagcaattcagcaaggactggttgatttggtcagcaatgttgcgcaacttgctggctggtttgtccagacagctgcggcagctggaaagttactaaagtttcagaacaacagggttgctgttcttggcggtaacattgacgaaaataatttagatcaagtaacaggaagaataaaacaactccaagacatgattaataatcggtcatcattaaaaggggacggacaatcttgggtcggaaagattttaggtgatgatgattctgtaggtgcattaacaaaagaacttaatggtcttctggtagttcagcaaaagttaaatgaaaagaggttcgtcggtaataatctacctactgggctagcaacagtagttagtgagcagtttggtctcggtaaaggcgaaacgaatggtaagcctaaatctgatcctggtgcaaaaaaaattgagtctgcattcaaagctacagaattaaattacatgcggcagatagctcttatcgaaacaacaggttaccgaagccgaaaagctacgctttga

SEQ ID NO: 450137 - DNA, 900 bp, Serratia marcescens
atggttatcactcaatacttcagtgatcctcaaattcataaaagcgccatccatttatgtaatacaattgaaccagttgttatgattcaaagaatgctttctaaagccatggaaattcacaataacaatatcgaagtgaaagaatactccataaacaatggattaactgcgattgttacatctatggccgtagttgattatatcgagtcaatccttggcgctgaagatagtggttataacattacaaaaggtgttttgtcagcggctcattttggagccccgcaaaagcgaatgcgttttgtcattatgggtgttaaaaaagagatagcccaaaatataagtttgccagagggtacttttacagaagatcattttagagcagttgaggatgcaattaaggatattgaaaatattcaaactacagttactgtcaatgagggtagtattggtattaaacttccaatgctacaaaactctatcagtgaattaggtcaacagctccgtgattcggatacactttataaccatgtatcgacagaaactaccccacatgctttagaacgatttaaagtaatccaacaaggttgtaattttcacgatttaccactagatcttaagacaacctattcagacagctcgagaactcaaaatacaatttatctgcggttaaaatataatgaaccttcagggacagtagttaatgtaagaaaatcgatgtggattcatcccattcataatcgagcgttgagcattcgtgaggctgctcgcttgcaaactttccctgatagttttgtattttgtggagttaaagactctcaatatcagcaaattggcaatgctgtacctccgatattagcaaaagccctagcaaatcatttatgctattttttagacaattga

SEQ ID NO: 450138 - DNA, 927 bp, Serratia marcescens
  misc_feature (695)..(704): n is a, c, g, or t
atggcgttagtctaccaaacactatctaactcgttaataacactgctcttgatgtattttgcggtgaaatggtatccaacacttcaattctccatggagagcttgaaaaaactttttggatttggctctaagttgttactggccagttccatcgtcacaattgttgataactcctattcaattttgattggtcggtattttaatagtcgtgatgttggttattacactcaggggagaacagtaccggatcttctctcctccaatctgtacagtgtgttacaagcggtcatgttcccggtaatgacatcgacacaagatgatcgggagcgtttagtaagaatctataaaaaaagtctaaacatgaccgcatttataattatcccaacgatggttggatttagctttattgctgagccatttgttcgcgttttcttgactgaaaaatggctgccggcagttgtcgtcattcagtggctatgcttggctcgaatggttacgccaatcagcgcactgaactgcagcatactcaatgctaccgggcgttccgatatctatcttaaagtcgatctcatgaaactgccattgacttttggtgttctgttcattaccgctccttatgggttacgcgctgttgtcatcgggtatttcgcggtttctgctatatcttttttcatccatgcgtattatcccgggannnnnnnnnnttatggggcctggaagcagctgaaagatatgacgccgatattcatcgcgacggcagcaatgtctgccgcgttgtattttatacacattgacggtggtatctatgaactcatggtcaaaatcgtagttggcattgtggtttatgtccttgcgagcctaataaccaaatctgactcatgtttggaaatcatcaggatacttagaagcaagttactgaaaagttga

SEQ ID NO: 450139 - DNA, 1011 bp, Serratia marcescens
atgctcgtaaccgcttttcacctttttctatggtctgaatctttaggcctgccactaccccttggatttgatgcaatgggtatctttggtaacgggtggatcggcgttggaatgttttttgtaatttcaggctattgcatggcaggctcaagtgggagagcgtttttaggtggtttttcatcaaaaaaatatggcctgtatattttaaaaagatacttgcggatagccattccgttttatatgtcaatagttttctggtttgttttaattcgcggttttgggattgcggaaaaaccaacaggatttcaagatataatatcccatgtcttatttgttcataatttatcagagaaaacattcttctcaataagcggggtttattggtcgcttgctgttgaaatgcagttttatttaattctacccgctctggttgttttgtttacaactattttggatagggttattttactgggcggcgtttttataattagcatttttgttaatgtttacagtgaaaaccaattgttaacatggggcattccatcttacctttcgcttttcgttttggggtggctttgcgccatatatcaaaatgagataggttcatttataaggaagttaaacgctcaatggatattggtcgcggcatttgcattgcttgttttctacaaaggacatggttttaacaacaaggttaagctgtatgaggtgttggtttcatcggtttttgcattgttaatggtatcgcttattagtgcgttttcaggaaagagtgtgccaagatttatgcgcagcgtagcatttgttgggaaatgttcgttttctatttatttgtataactatattttctgggctttggatagagccgacttaacctcgattaaattgcttatggcctttgctttcgtaataggatttggcatcttaatgtatctggtcgttgaaagacaatcagagaagttaaggaaaaaagcaataagaaaagcagaggttaaattctcagtgcgataa

SEQ ID NO: 450140 - DNA, 738 bp, Serratia marcescens
atgccattccctgaaattattaattggaccatgccaggtgtaggatttccgaaagccagcgactttgaaactatggctctggatgttcctgtcaaagcgggattgctcggtgcgtatttcacaaccgaatatacagcagaccccctctataattatgcggaccctacaaagccgcttaagaaaattggcaaccctctttttgaggggccgtatgccgtatgtaacgcgcaaaactgctttgataccggcattccgtcacagaacgaaatgagcgttatctcaatagcactgcgctcagatactgctgtgtccgccgggcaaggtatggtggtgtcgaactatgacggcgtaggcggagattcactgcggcttactgacacatccgttatcgctaacgcatgggtaactgtgggattaacgaatgcgattacgccgatcgtgaacattccaggcacagattttgttatcggtaccggtcaattcaacccaggccgttctgtatcgggtttctataacccgaccgcaaaaaacattgtttccaactcgtcgctaggggctggccggcaagtgcaatcaggcactctactgatcggtggccatcgtagtgctgggcagtttaccggctgggcgcatgtttcggttgtgctggtgttcaatcggttgctgactgtcgatgagtacaaatcgatctgtctctatctgcggttcacattcggcccgcagttcctgatttggtaa

SEQ ID NO: 450141 - DNA, 192 bp, Serratia marcescens
atgttcggtttattcctgctcgtttgctacacctaccagccgtgcgattacgttccgcaggggtgggtatatatcgatcgttccaactgcctcgaagatattcggcagcagtccctgccggcgcagtatgcgtgtttgccggttgacggggtgatcccggagcggcgccaggaggtcgaagttgctgactga

SEQ ID NO: 450142 - DNA, 780 bp, Serratia marcescens
atggcctcaccaaccccacaactcaagtcttctaagctcatccaagagcttggagagatgttgcgccttggggaaactcttgacgaattgtcatatcgacgcattgtgcgtgagttggagtgcgatgaaacggtaaacggaatttctgcgttaggttttgcgcatgcagctgctggtaaaattgaaaaggccattgacctttttgaatgggctacgcagttcaatgagcagtcgatagcacttaatttttgttatgttttgcacgtgagcggtttccaccaaaggtatcaagaggtcattttcccttttgcagacaagtttggtacaaaaggcttgaccataagtgctgcaggtgaagcgtacacgcaaggtgatgccgagcttttcgagcattatatgaataaacatatttccttgctatcagaagatgaaggcaggagttttgctatggaatacaaagacagaatcaagcaagagattgctgacgcgtattcgagcacaaactgcacgggcgagcagttcaggttgttgaataaagttattcatcaagttttgtctaagtataatgcgcaaactgtattaacagaagtcagccacaatggtgcgggatgttatgtcgttgatattaaagacaaatccccacgtgagatagctgaaatgaattataagttggctgagctaatatgtatggaagagctattagatgattgttctctgatagcacgattttctcctgacaggggaattagtcgagaagatatctatgcctatcaagagtaa

SEQ ID NO: 450143 - DNA, 1860 bp, Serratia marcescens
atgtcaaataatggtttgccagtcactgacgtggtaggggtttctgttacccttggccagagccgaaccgccggtgcatcagcaggtgatgcctatgcccaggcggcgcaaggtagcgcaatttcggcggccaattctgcagcgaaagcttcgcaggctgaacttggcgcagtggaagccgccgacggcgtggctgagaatgcagtcatcgcgacagatgccgctactaaggctgaggctgccgcagaaaacgcacagaacatcgcagacgcgaatacctactacacaacacctaccgatccagacggaacgattgcgggcatagccgggacaccagacgggaaaatgttccgagttgctattcctgacggcggcggtgtaacagtcattttcaattactacaaaaatgcggcgggagttgctgaatttattaactcggaggccagtgagcggtttgtaacgtcagtatcgcgccgcgtaatgcaggcattgcgccgcgttggtgcgttagaaagtaaaacgaagcgcattgcacaaagccgcgagcacttttctacggcgcaggatatgtcgggcaatgtgctgacatcattcgaattcggccgatttgacgcgtatggggctggtaataggctggttaaatctatcgctaaaaaactacggataactcaaaaaatgttaaagccgatgcgtgaccttggtaatctcattgcgataaaagacatgtctgataatgtcattctcgggtttaaagatggaatgttagttgctaaaggcattcacaaagacacattaaaaagctcagcgataatgagttttacggatggtagctcgctgtggccataccgcgctaaagtggcaaagcatgatattggcagcaatcaaaacctgagaattatcactgtcggcgattcttggatggagtggaaagctatttcacaggctatcgctaatttgatttactccaaatatggccgcggtggagatggatgggtttcatttaacattgacggcggaacggaaacgaacaattgcctgaataacgtgtcaatcgttcacaacggatttactgtttatgatgcctcaaacggtagcgcgccgaatagtgacattgggtgttcacatgatgggttttccctgacatctgcgaatcagtttgcgacgctgcaaattaatggggttaactgcaatacgctgcgcatcaactattatgacggtgacggcacatttaattaccgagtcgatggcgctggcgactgggtggctgttgtgggcggcaatacgaaaactaaaaaattcgtcgatattaccgggattactgacgaagagcattcgttgaggattaacaccaccggtaatacaggaacggttgcgctatatggatttaatgctgacaaaatcactggtgcaacactatacaaatgcggcaatggcggcatgacaacgccgatgtatagttatgttctgccacacattccacattttgttgagtatatcaacccggacgtcgcaattattatcatcggggtgaatgactaccgtcttagcgaggatgtaaacgcattttatactgggtacagtgacctgattgattcctaccgatcagttaataaagatatgggcatcattcttatttcaccccccgagccaaatgcaaccggcgctacaaatatgtcggtgtttaacgatgcgatcaggagcctagcagtccagaaaaatgccgagttctatagcggatatgacgtgttccctaaaaattgggctgatggtgatgcggctggcctttggtttaacaacctccacctaaacgacgtcggcgcacaactgctggcaacacagaacgttgaaaaattcttgtaa

SEQ ID NO: 450144 - DNA, 738 bp, Serratia marcescens
atgccattccctgagatcattaactggacaatgcctggcgtaggattcccgaaagccagcgactttgaaactattgctcttgatgttcctgttaaatcgggattgctcggtgcgtatttcacaactgaatatacagccgatcccctctataactatgcagaccctacaaagccgcttaagaaaattggcaaccctctttttgaggggccgtatgcggtctgtaacgcgcaaaactgtcttgataccggcattccatcacaaaacgaaatgagcgtcatttcaatagcactgcgctcagataccgcggcttccgccgggcagggtatggtggtgtcgaactatgacggcgtcggcggagattcgctacggcttactgacacatcagttgtagcaaactcctgggttaattcggggctgacaaatgcgattacgccgatcgtgaatatcccgaatacagacttcgtgatcggcacaggtcagtttaaccctggtcgatctgtagcgggtttctatgacccgacaacaaaaagtgtaatatcaaactcgtcgctcggtgccggccggcaagtgcagtcgaatacactgctgatcggtggtcacagaagcgcagggcagtttactggctgggcgcatgtttcggttgtgctggtgttcaatcggctgctgacagtcgatgagtacaaatcgatcggcctctacctgcgtttcacgctcggcccgcaatttttgatttggtaa

SEQ ID NO: 450145 - DNA, 993 bp, Serratia marcescens
gtgagagtaaagtcgatcagcccactaagtaatgtatataagtggcatttggccatatttacagtgacagtctttatcttggggtggggaagtgtggctggcaacctgctgcttatttatctttccattcctgttgtaatgctttttttatttttccatgatcaagcaaataaataccctatgcccaagagagggctaatagtcagagtgtatagaattaaaaagccaggtgttctgtggagtaggacgtttttggattttgcacttgctttctatgttttagcatgcattgttggacgttacttcattgaagataatgttgacttatttattatgcttgctagcttatctattgtttttctggctgtatctatctattttcttgtgtcgacatctaagttcttagatgggctcatgggagtgaaagtaaagaaaatatgcagaattggtgttaagttctcatgggtaattgttttctttgttagttattccatagcgaaaaatataatgatggatgcggctgatatcacttctgaatcagcggcaacaaaagtgaccgtaatagttcagtcttggatttggtttgtttttatatacagcacggcattttatatgttgtcattctttctctctcttactgatgcaactgaaagattcaatatcagaggggtgatttttacagtaagatatacggctatgccaatggtagttatgaccgtatttttttggataattgcctttgtctcttttaatcttaatgttggtagcgtatttgattatgtgattaaaaagaccttacaatatgacacgagggatacatttttatgtcataacgattatatgaaagtcaacgagtttaaaagtgctagatttcttaaagtgagcgatggtgattatagaatgtttgttcctgtgaagtacacttatgatgtttatctattaaagtgcgagaataaagataaaccatactataaatacgttaaaataaaataa

SEQ ID NO: 450146 - DNA, 261 bp, Serratia marcescens
atggaaactacaataacaatagataccacattaattagcggtgtaataagtgcggccgttgcaattcttgtggcatgcataaccgtgatattgatattaaattcaaacaaaaagttagaaaatgaaaagtatttaaaacaaaagaaggaagagttattttcatttcaccttaactctttatctatcgtttattatttatatcaagccagtcataaagaaaagaaagccacttccatttctaatagtgtaatagagacttaa

SEQ ID NO: 450147 - DNA, 360 bp, Serratia marcescens
atgagaaaacatacgtttgtcgccctcctgttactgtgtatgacgcctgcgctggcgctaagtgcagaaccgtcccctaaagctgtcattaaaacggcccccgtttaccctgaacaggctctgttgaaaaacaccaatggtgtcatcaaggtgaaatacgatatcgagcgtgacggcacggtcagcaacgtacggattgtgcaggcaaagcccgccggagtctttgacgaatcagtgcaaactgccatgaaaaactggcgctttgaacgcgatcaaccggtgaaggatcgtgaattcacctttaacttcaccaccaaaccgaccaactcggtttatggcaatggagttccgtttcgctga

SEQ ID NO: 450148 - DNA, 921 bp, Serratia marcescens
atgaagactgtttcgattaaacacacgtactgggatatagctgctgacgtctatttccctgctgatttcgatgagacaaacaaatatccagcaattatcagcgctcatccgattggaagttgtaaagaacaaacgtcaggcagtgtgtatggcgcagcgctggcaaaatccgggtttattgtgattgcgtttgatgccagtttccaggggaatagcggtggagagcctcgttatctggaagatcccactatgcgggttaaagatttcagtattgttgttgattatctggtgaccctaccttatgtcgatgaagatcgtatcggtgtgctgggtatttgtggcggtggtggatatgccattaatgcagcaatgactgagcgtcgcattaaggccattggtaccgtcactggcgcaaactatggtcgtcttatgcgtgaaggatttacagcgttcgacccgattggtgcgctcgaagcaatggcacaacaaagaacagctgaggctcgtggaactgagcttcgtgtggatgatttgttgccaccatcaccggaggctgctgttgcagcaggattgacagaaaccgacttgtttggtgcaactgaatattaccgttctccaagaggctatgcgccaaacggggttaaccgggcgcttttctctcatcaaactgtcgccgtagggtgggatgcatttcatctggcagaagttcttttgacccagccgctgatggttgtagtaggggataaagtgggtgcatttggagcgtatcgtgatggctgtgaaattattggtcgggcagcttccaaagataaagaacttgtcgttgttgaaggctggtctcattatgacctctacgacaaaccagaacctgtcaaacaggcccttgataaactcatccctttctacaaaaaacatttataa

SEQ ID NO: 450149 - DNA, 828 bp, Serratia marcescens
atgggcatcacacgggcagcattatcccagaatttaaaagcgcttgaggaacgactcaacaccaagcttgtttatcgaaccacccgcaatatgtcgttaacggaagaagggcagcgtctttacgatgtgttgatatccgcatttgggcagattgatgatgctctcagagatgtcggtgatacccagtttgaacctacaggtttactaaaaattaattcttcccgtgttgcggcaaggatgcttgtagagccacatatcagtgaattcctgcaccgttatcccaaaacgcagatagaactgatcatggatgatggattgtctaacatcattgctgaagggtgcgatatcggcattcgcctggggcagagtctggcagagcatatgacggcagtgcctgtatccccacggataaaactggttacagtggcatcaccagactatttacaaaagaatggtattccacaaactcctcaggaattgtgcaattacaattgtctacgattacgacataaaagtagtggggcacttccatcatgggaattctcacaaaaagaaaataatgaagagttcgaaattgaagtctcaggtggatacattaccaacgacgatgaaagcatgattcgtatggccgtcaatgggactggcatcattcaacatctggattttgctataacagagcagattaacaaaggtcagttacaacaaatccttgaggactggtctacatcattccccggattctatctctatgtgtcatcacgagtaaggatgccttctaaagttcgtgcattcatagacttcatggtcgagaagcgttcgaaagattga

SEQ ID NO: 450150 - DNA, 933 bp, Serratia marcescens
atgaccagtcgtcctcaaatgattattaatgtgttgcaagcaaatcctggtgagcaattcactgctcgtcagttagcacaaaaaataatcgatcattatggtgctgagttggctgagaaacgtaaaaatccgcggtttgctagcgatgaggatttcctgagccagataacggccgaagtaggtggtagtcgtactgtgaaagcaaaggccatgtgcccacaagtaatgacgcgtgataagcctagacctagacttttttattgggggcaggaacctattgataccaatcaggaagtactgccttcggaaatagtacccataccttctgtcgaaacgtctaacttcactgaacatgctctttatcctctgctgattgaatatctttctgaagaggaaaatttactctgccgtcgtatcgatgaaaaacgctcaagtaataacaaaggattgggcgctaatcactggttgtaccctgatattgttgcacttcaacctctcgataaggggtgggatattgttgtgcaaaattgtgtacgtcatagcgaggggcgcttaactcgcctttggtcgtttgaagtcaaacgtcagcttaatcgtagcaatgtacgtgaatgttttttccaagcggtgagtaactccagctgggctcattttggttatttggttgctactgaaattaatgaagataagcaacgtggtgttgagcgtgaacttcagatgctatgtgcgctgcatggtattggggtgatactgcttaacccagaagatccggggaatagtcagacattgattcctgctcgtgagcggaccagcattgattggcaatctgtcaatcggctagttgaggagaatcgggatttcaaagagtttattgatctggtagctgagtatctccaaactgggaaagtacacaaagctttgtggaataaatag

SEQ ID NO: 450151 - DNA, 717 bp, Serratia marcescens
atgccggtcatgcagataggcacgctgcgcttacagatcaatcgtaaagcgattaagaacttgcatatcagcgtcctgccgcctgacggcaaagtccgcgtttcagccccggaacacatgacagaaacggcgatacgaatggcggtcgcttcccgctttcgctggatccgaaaacaacagcaggatttcgccagacagccacgccaatccgagcgggagatggtcagcggagaatgccactatctttggggtcgtaaatatcgcttgtttgtgatcgagcgccagggacgtcacgaggtgaaaattgctggaaataataaactccagctttatgttcagccgggaaccagcaatgaaaataaggagctggtattaactgatttttatcggcatgagctgaaacggcaggtcgccaaattacttcccgaatggcagaccagaaccggcgtttccccgactttctggggcatcaaaaagatgaaaaccttttggggtacctgtaataccaacacaaagcggatctggctcaatttggaactggtcaagaagccgcctgaatgtctggagtatattctggtgcatgaactggttcacctgctagaacgtcatcatagcgagatatttcgtctgcatatggatagatttatccctaactggcgcgagcgcagggattttctcaataagatgcccctagcatttgaggcctgggattattga

SEQ ID NO: 450152 - DNA, 3096 bp, Serratia marcescens
ttgagtaccataggccagcgcgaacgcgccacacagcagcgtttgattcagttttttgttaaggatttaggataccgctatctgggacgaagtgccgggtataccggggacagcaatatcgacacggacatactgagcgcatggctgaaacagcgcagcgtcagcgataccctgatcacccgcgtacttcggcaactggattccgccgccgcgctgggcgaaggtaaaaagctgtattacgccaataaagaggtctatcgcctgctgcgttacggcgtgaaggaaaaggaaggcgcaggtgagcagaatcagaccgtgtggctgattgactgggcaaatcctgaagccaatgatttcgccatcgccgacgaggtgacggtcaaaggtgaatacagcaagcgcccggatctggtgctgtacgttaacggcatcgcgctgggcgtgattgagcttaaacgctcgtctgtccacgttagcgaaggcatccggcagaatctcgataatcaaaagaaaacctttatccgcaatttctttaccaccatgcaactggtgatggcaggtaacgatacgcagggactgcgctacggcaccatcgaaacgccggaaaaatattatctggagtggaaagaagagaataccggcacatacacgcataaactcgactttcatttaagccgcctttgcagcaaatcaaggctgctggatatcgtccataactacatggcctttgacgctggagtgaaaaaactctgtcgccataatcagttctttggcgtcgaggcggctaaacagcatattgctcgtcgtgaaggcgggattatctggcacacgcagggatcgggtaaaagcctgacgatggtctggctggcgaagtggatccgtgaaaacgtacccaattcacgcgtgctgattgtgaccgaccgcaccgagctggatgaacagatcgaaagcgtgtttatgggtgtggatgaagagatttatcgtacctccagcggcaacgatcttatcgcgacgctcaatcatcctaacccgtggctcatctgctcgctggtgcataaattcggtcgtcgtagtgaagcagaagacactgcggcaaccgacgacttcatcaccgagttacagcaatccctgacaaaaacgttccgcgccaaaggcgatctgtttgtcttcgtcgatgagtgccaccgtacgcagtccggcaaattgcataacgcgatgacggctattctgccggaagccctgtttatcggttttaccggcacgccgctaatgaagaaagataaaaagaaatcagtggaggtattcggcccctatatccacacttataagtttgatgaagcagtggccgacggtgtggtgctggatctgcgctatgaggcccgagatattgaccagtatctgacgtctgagaaaaaagtcgatgactggtttgaagccaaaacgcgcggcctgtcgaatttagccaagacccagcttaagcaaaaatggggctcaatgcagaaactgctttccagcaagtcgcggctggagcagatcgttaacgatattctgctggatatggatacccgtccgcgcctgatggacggacgcggcaacgccatgctggtatgcagcagcgtgtatcaggcctgtaaggtttacgagatgttcagccagaccgatctggcgggaaaagtggcgattgtaaccagcttccgtcccgatgcggccagtatcaaaggtgaagaaaccggcgcaggcctgaccgagaaactgtttaaattctcgacctaccgcaaaatgctggccgactattttgagcaaagcgaagagaaggttgccggacgtatcgccgagttcgagcgggatgttaagcaacgctttattaatgagccggggcaaatgcgtctgcttatcgtcgtggataagctgctgaccggctttgacgcgccgtctgctacctatctctatatcgataaaaccatgacagaccatactctgtttcaggcgatttgtcgggtaaaccggttggatggggaagataaagagtacggctatattatcgattataaggatctgttccgttctctggataaagcgataaccgattacaccacgggcgcgtttgacgattacgatcgcgatgatgttgatggactgttaaaaaatcgtctggagcaggccacgctggatctcgacagcgcgctagaggtagttcgcagcttatgtgaacctgtcaaggctccgcgcgaattgcaggactatcagcactatttctgtggtcagtcgggggaaaaccaggcgatattaggcgaaaaagaggcgctgcgcctttcgttctatcagaatgtcgcccgcctgctgcgcgcttacggcagcctggcgaatgaaatgcaggaagcgggctataccaatgaggaagtggaaagcattcgcgccgaagtcgctaaattcgagagactgcgctacgacattaaactgaccagcggcgatctgctggacatgaagcgctttgagcccgccatgcgccacctgctggatatgtacgtgcgcgccgacggtagcgaagtgcttatggatttcgaagagttaagcctgattgagctgattgttgaaaaaggagcagcagcaaccgctgctctgccggacgagatccgcaacaatcaggatgcgatggcggaaaccatcgaaaacaacgtgcgtaaaaccatcgtggatgaaaacccggtgaacccaaaatactacgggcgcatgtcacttttgctggatgaactgattacccttcgacgccagaatgcgcttgattatcagcagtacctggagcgtatccgggatttgagcaagcaggtcatccgcccagaacaaaccaacggagcatcctatcctgaaacaatggatacgcaggcaaagcgtgcattttatgataacttcggtcatgacgaggtgctggcaacccgtattgatacgacaatccgctataccaaaaaagcggagtggattggcgatcgttttaaggaacgagagcttgctcgtgcactgcgcgaagaaaccgccagttataacgtcaatattgatgacgttcttgagcttgctcgcaagcaaaaggaataccgctga

SEQ ID NO: 450153 - DNA, 1068 bp, Serratia marcescens
atgatgacatatacacaaggcaatttactggacgcgcccgtggaagcactggtgaatacggtgaataccgtcggtgtcatgggtaaaggcatcgcgctgatgttcaaagagcgcttccccgataatatgaaagcctatgcactcgcatgtaaacaaaagcaggtcatgaccggcaagatgtttatcactgaaaccggcgagctgatgtggccgcgctggatcgtcaacttccctaccaagcagcactggcgcgctgactcccgcatggagtggattgaagacggcttgcaggacttacgtcgctttttgatcgaagagaaagtgcagtccatcgccattcccccactgggcgcgggcaacggcggcctgaactggccggacgtccgggcgcggattgaatctgcgctgggcgaccttcaggacacggaaatcctgatttatgagcctaccgataaataccagaacgtcgccaagaacaccggcgtaaaaaagctcacacccgccagagcgatgatcgctgaactggtgcgccgttactgggtgctgggcatggagtgcagcctgctggaaatccagaagctggcatggctgctacagcgcgccattgaacagcatcagcaggaagacgtgctaaaactgcggtttgaggcacacaattacggcccgtatgctcccaacctgaaccatctgcttaacgcgctggatggcacctatctgaaagccgagaaacgtatcccggacagccaaccgctggacgtgatctggtttaacgatcgggaaaaagaacacatcaatctctggctgaataacgaggccaaagcgtggctaccggcgcttgagcaggtcagccagttgattgacggctttgaatcaccgtttggtctggaactgctggcgaccgttgactggctgctgactcggggagaatgccagcccacgctggattcagtgaaagaggggctacaccagtggcctgccggggaacgctgggccaaccgcaagatgaagctctttgacgataaaaatctgcaattcgccataaaccgcgtgatggagttccattgctga

SEQ ID NO: 450154 - DNA, 657 bp, Serratia marcescens
gtggcctatgactacagcgccagcctcaacccggaaaaagccctgatctggcgtattgtccatcgggacaatatcccgtggatactggataacggcctgcactgcggcaacagcccggtgcaggcagaaagctgggttaatatcggcaacccggagcttatcgataaacgtgccgggcatctggtgcctgccgggacgggcgggacgctgcatgactatgtgccgttttactttaccccattttcgccgatgctgatgaatatccacagcgggcgcggcggcattacgcagcgccccaacgaagaaatcattattctggtcagcagcctgcgacacgtggcgacgcaaaatgtccctttcgtgtttaccgacagccacgcctactataattgggtcaactactacacctgtctggaagacctgaaccagattgactggccgatgctacaggcgcgagattttcgtcgagatccggacgatccggccaagtttgaacgctatcaggccgaggcgttaatctggcagcattgccccatcacactgctggatgggatggtttgttacaataacgacgtcaaggtacaattagaagattggctgtcgcaacgcaatctgacaatgcccgttcacgcacgggccgggtggtacttctcatga

SEQ ID NO: 450155 - DNA, 576 bp, Serratia marcescens
atgtcagatattcgcacacagcaatttctttatcacttaacggatcttgacaatctggaagatattttctccgaagggctaaaatctcgcagcctcttgcgtggtttttcagatattgccgatcctgaaatcatagcttcgcgcagtgctttacgtttacaagagtacgttcctttccatttttttgcccgaaacccttttgatggcagggttcatcgtaataatccagataagacgttcgtcctcattgctgttcgtcgaagctatgcgcagacaaatagctggtcagtcattcccagacatccgttatctggttcagcgattactttgcttgattatgaaacgggtatggctaccattgactgggaaaccatgaaccgccgtgaatatggggatgataattgcaagtgtgtttgtatggctgagtgcctgtctccagccactgtaaccgcaaacaattttcatagcatctatgttccagatgcagcaacagaaacagttgttaacgccttgaagcaaaagtatagactcgacatgtatgtcaacatcaattctcgtatgttcccgggagcctga

SEQ ID NO: 450156 - DNA, 1374 bp, Serratia marcescens
atggtggatttaatggtgagtgagcagcagtcgggtacggcggggaaagacgtgcctgcggggtttaagctgactgaggtgggggttattccgcaggactgggaagtaaagaccattggccaactgaacccatttatcacaagtggctccagaggctgggctgaattctatgtagattatggcgacctgtttgttcgtatcacgaatatgagccgcaattctatctatttggatactaaaacatctgaaaataaatttgtttctcttcctgctacctcaacagaaggaaaacgaacacaacttaataatggcgatgttttaatctctataacagcagatatagggattattgggtatatcgacgaatccattgcgaagcctgcatatattaaccaacacatatccttagttcgatttgatgatgattctattgataataaatttatcgcatatttcttagccagtgagaatgtgcagaaaaaattcctcgcaaactccgatgtgggcgctaaagcgggaatgaaccttaatggtgtgcggtcaatcatttttgccgttccaaccatacaagaacaatcagctattgctgaggcattgactgatgttgatacccttatcgttgaactgaaaaaagtcctggccaaaaaacaggccatcaaaacagccacaatgcagcaactactgacgggtaaaacccgtttgccgcagtttgcgttgagagccgatgggacagttaaggggtataaaaagagtgaatatggagaaatccctgtcgattggtgttttgtagagcttggtaatctgtttgaacaaactataaatagaaaaaaaatagattccactgaggaaataacctttattggaatgcaggatgtttcagataacgcacagctatccacatgtttattgatgaaaaagtgcgatatcaaacccggacttacttattttgagagaggtgatgtccttgtagcaaaaatcaccccttgctttgaaaatggtaaagggtgctatacccaaacgctgacaactaacattggttatggaagcacagaatttcatgttttgagagccaaaccaaatgctgatcctgaattcatttattactggacgacggatattcatttcagatcgacgttgaaagctgaaatggtcggtagcgcaggacataagagagttccatttcatgccattcaggcttataaaataccatgtccagaaaataaagaagaacaaaccgccattgccgccatcctctccgatatggataaggacattcagaccctgcaacagcgtctggacaaaacccgccagcttaaacaggggatgatgcaggaactgttaacaggaaagactcggctcatagaaaggaactag

SEQ ID NO: 450157 - DNA, 2445 bp, Serratia marcescens
atggctatcaagaaaaccgaactctactcctccctgtgggcaagctgcgacgagctgcgcggcgggatggatgccagccagtacaaggactacgtactgaccatgctgtttatgaagtacgtttccgacaaatataaaggcgatccctacgggatgatcgttatcccgaaaggggccagctttgacgatatggtcgcgctgaaaggcaataaagaaatcggcgaaaaaattgacatcattatgcaaacgctggcggaagagaatggcctgaagggcgttatcagcgaagccagctttaacgatgaagacaagctcggcaaagggaaagagatgattgaccgactgtcaaagctggtcggcatctttgaggggctggatctgtccggcaaccggaccgaaggcgacgatctgctgggcgatgcctatgagtacctgatgcgccacttcgccaccgaatccggtaaaagcaaggggcagttttacacgccagcggaggtgtcacgcgttttggcgaaggtgatcggcattacgcccgatacaccgcaggatgccacggtctacgaccccacctgcggatccggctcactgctgctcaaagtcagcgatgaagcccgacgcgggctgtcgatcttcgggcaggagatggacaacgccaccagcgcgctggcgcggatgaacatgatcctgcacaacaacgccaccgcgaaaatctggcagggcaataccctgagcgatccgcagtggaaagaagccaacggcaaactgaaaaccttcgacttcgccgtggcgaacccgccattttccaataaaaactggaccagtgggctggatctgaagaaagatccgtttgagcgcttcgtttggggcgttccaccggagaagaacggcgactacgccttcttgctgcacatcattaagagcctgaaaagcaccggcaaaggggcggtgatcctgccgcacggtgtgctgttccgcggcaatgccgaggcgaatatccgtgaaaacctgatcaagcagggctatatcaagggcattattggcttaccggctaacctgttttacggcaccggcatcccggcgtgcattatcgtaattgacaaagagcacgcccacagccgcaaaggcatttttatgatcgacgccagccggggctttatcaaggacggcaacaagaaccgcctgcgcagccgggatattcaccgtatcgtggacgtgtttaaccaccagcgcatggtgcccggctacagccggatggtgccgttaagtgaaattgccagcgaacaaaataattacaatctgaatatcccccgctatatcgacggtggcgaaccggaagatctgcacgatctgaccgcccacttacagggcggcattccggcacgcgatgtggatgccttacaggattactggcaggtattccctgccctacgcgacgtgctgtttaccgacgatcgccccggttactgtcgggcgcaggtagaggctcagcaggtgaagccgaccattctagcgcatcaggaatttaaggattttgccacccgcagcctgctgccatttaaggcgtgggtgaaagaggcggcgctggcagatattggcaaaggcgataaaccgaaggaactgatccacgatattagcgagatgctgctggcgcagtatgccaacagtgagttgctgaataaatacagcgtgtatcagatcctgatggactactgggccgacgccatgcaggacgatgtctatgtgatcacgcaggacggctggcaagccgctgcacaaattcgcgaactccagccggtaaaaggcaaggacggcaaaaacgtctggaaagaaacgcacgattttgaatttgacaagcggcgctacaaggccgacgtgctgccccgttcactggtggaaattcgctgtttcccggagctgctggacgcgctgaatcgcgcacaagagtgcagtgaagaagccagccgtcagttagccgagtttatcgaagagcagaccggagaagacgatctgctggacgaggcgaagaacgataaggataaggtgacgcaaaaactggtcaatgcccgtctgacaaaattgaaaaaaaccaccgccgacccagatgagctggcagcgctgacccactgccagacgctgattaaagcagaggcgaatgcgaaaaaagcgctgaaagccgcgcaggaagcgctggatcgcgcagtgtttaaacagtatcccgcgctggatgacgcagcgatcaaaacgctggtggtgcaggacaaatggctggcgacgttgcaggccggaattaaggctgagattgagcgcatcacccagcaactggcggagcgcgtgaaggagctggaagagcgctatgccgagccgttaccggcgctggaagcttctgttgaagcgttgagcgagaagatgtccgggcatttgcgggcgatggggctggtgtggtga

SEQ ID NO: 450158 - DNA, 240 bp, Serratia marcescens
atgagtgaaaacgagatttatcagcacatccagcaggcgttatccagcgcaccacgtaaccaatataccgtcgagctgcatctacaaatgattaaatatgccgacgaactggaacacattacggcaaaagccttttgcgaaggcaccggtctgagccagagtctcggcaccgaattcagcaaaatgcgtaacttaacccgtcgactgaaagccgccggactgaacaccgatctgctgtaa

SEQ ID NO: 450159 - DNA, 150 bp, Serratia marcescens
atgcttgccgtgctggaacaaaacagaacgatgaactggcaaaccttaatcgagggtgtggcgattgaagaggacagacctagcgatatggatgacgctattgtggaggaaagcgatgacgacgatggtctggcgaacttcaaactatga

SEQ ID NO: 450160 - DNA, 837 bp, Serratia marcescens
atggcaaccgggctgcgtattctcggtgtatccctgcattttttggggcgtcattatgtcgggcgtgattatctccagcaatctcttgactggtatgaacatggcgaattaagtcactctttccgttttggtcttgatcaagagagcgccggtcaggcctttctgtctcgtttactctggttacagggtgagtataaggccgcgaaacagatggcatggcgcggtgttaaaaaagccgctcgtttgcagcatgtctgttctctttgctgtgcactggctgaaggcgcttgtatgacagcagcactggatcgtaatccgcgttgggttataaaggccgcaaactggcttattcatctggcaaaaaggcatgatttatatttctggaagacatacggcgagctgtttcttgtttgggccaaacagttcagtcataccgatgttagtcaaaccacactgtttagctcgttgcgggcgatgggattagattggcaatattcccccttgttgtcagaaattgataccgggttatcgctgagagccacccgccaggatcatgaaaactggtgcacgcctgagctgatgcgtctttctgccactcaattacctcctcagaagcaacgcctgctgttggagaaggccctggacaaagcgcgtcagcaacaggctcatggctgggccctccgtattgcttattcattggcgacattgcaggctgaagccggggaaaaatgggctgctaaacaattgatacaggacgctttacatgatgttgatgactcagacaatgcgacggatgtaagaagtgctattgcgctatgtgcccgaataggggcctga

SEQ ID NO: 450161 - DNA, 825 bp, Serratia marcescens
atggcgttagtctaccaaacactatctaactcgttaataacactgctcttgatgtattttgcggtgaaatggtatccaacacttcaattctccatggagagcttgaaaaaactttttggatttggctctaagttgttactggccagttccatcgtcacaattgttgataactcctattcaattttgattggtcggtattttaatagtcgtgatgttggttattacactcaggggagaacagtaccggatcttctctcctccaatctgtacagtgtgttacaagcggtcatgttcccggtaatgacatcgacacaagatgatcgggagcgtttagtaagaatctataaaaaaagtctaaacatgaccgcatttataattatcccaacgatggttggatttagctttattgctgagccatttgttcgcgttttcttgactgaaaaatggctgccggcagttgtcgtcattcagtggctatgcttggctcgaatggttacgccaatcagcgcaccttatgggttacgcgctgttgtcatcgggtatttcgcggtttctgctatatcttttttcatccatgcgtattatcccgggaagttatttggttatggggcctggaagcagctgaaagatatgacgccgatattcatcgcgacggcagcaatgtctgccgcgttgtattttatacacattgacggtggtatctatgaactcatggtcaaaatcgtagttggcattgtggtttatgtccttgcgagcctaataaccaaatctgactcatgtttggaaatcatcaggatacttagaagcaagttactgaaaagttga

SEQ ID NO: 450162 - DNA, 285 bp, Serratia marcescens
ttgccgttcggctgggcgaagctcttgtggcggctgaaagtcagcggcgtgcgcaccgcgcgcgtgccgttgatgggcgtgcgccaggaatatcaattcagccgcatcgggccgattattgcgctgctgctgattgaggcgctgcgcgagcctttcgccaagcgcaatatcgacgcgctggaaatgtcgtggatcctggaaaccaataccggcatgcggacgattttagaacgcatcggcgcggttccctataagcgctaccgcttatacgagaaaacgctttaa

SEQ ID NO: 450163 - DNA, 960 bp, Serratia marcescens
atgcataacgacggacgcttcgacttccacaacgccctgcgctacagcagcgacgaactggcgaacatcctcagccactgctttgaaaactacatcgtgcgcttcgttgtcgacgggccgaccttcgccgcccgtttcggcgccgaagatctcagcctgaacgacagcctgatcgtcacccaccgccatgaaccggtggcggtggcgctgatcgcccgccgcggccggcacagccgggtcgcggccttttccgtgcgcccggagatgcgcggccagggcctgggcaaggcgctgatgcagcggctggtggcggacgcccgccaccgcggcgaccggcggctgtcgctggaagtgatcgaaggcaacgacgccgcgctggcgctgtaccatcgcgccgggctgcgcatcgtgcgcaccctgaccggccatcaggcgccggcggaagcgccgccaggcacagcggaactgcaggcggtcgatccactgaccgtcagccatcgcgccgggctgcgcatcgtgcgcaccctgaccggccatcaggcgccggcggaagcgccgccaggcacagcggaactgcaggcggtcgatccactgaccgtcagccatcgcctgacggcggaaggcgccaccgatctgccctggctgatcgcccccgaatcgctgttcaagctgccgggcaaaccgcaagcctatacgctcaatcgtcaggcctacgccgtggtgatgcccggcgccgagcactgctggctgcgcctgatctacgtgccgccgcagcaccgcggccaggggcatgcgcgcgccttgctggccgccctgcaaacacggttcgcccctttgccgctgactgccaacgtcgttgtgcccgaggtggccgcccccttctttacgcatcttggctggcggcaggatcccctgcgacagttcgagatggatatgctgctggacagcccacaagaataa

SEQ ID NO: 450164 - DNA, 621 bp, Serratia marcescens
atgaaagaaatgataaagaacattttaaaccaactgaaatatgcatctgaggcggccgcctgggagcctcgtgtatatgacgcagttattaacgctgcaaaattaattgaaaaccaagataaaaccattgactgcattaaacaaagccaactgcacaccgttgactatctcagcaaaatgaaagggaattacgtttctctgcagagaagtagcgccgcgaattatgccctcagcaagaaaatcgaggcacagcgggatgccttgcttatggctatcggtggaaccgaagacggaagaatcattgatattaccaagcctgaagaagccacggagcaagcggtaattatcatccgtcaatctttcctcgacctaaagcagtatcgcgaccttgacgaaatcccgttcggcgccgttgagcaggatcatgaagtggcccagctgcagcgccaggtcgatgaaaaagatttgttgctccaacaggcaaaagaaaatgaacgccgcgcgatggattgctttgcgcgcgcggtggctttcgctaaaggcgctgaaggtgatccgtgctacatcaccgagctggcaaaagaagttgctgacttggcagacgaggtgcggaaaaaatga

SEQ ID NO: 450165 - DNA, 582 bp, Serratia marcescens
  misc_feature (561)..(570): n is a, c, g, or t
atgagcgttcaatcatatttagattctatagctagaaatgcgattttgaaagatagctcggtaacaacatcgatagctacattaaaagcaagactgaatttatattttaatgctacagatgtgactaatcattttacatttggttcaaacaccagatatacgatgctgccaagaaaatacgatcctcagtctgatgttgactatatgattgtatttaacaataccggctaccaaccacaaacctatctcaataaattgaaaaactttgttgaatattattatacatcatcagaaataaagcaaagccacccaactataaggttaaaccttaatcatattacttttgaattagtcccagcaatatataacatattttatggatatcaaatccccgcccctgctgataatttccaatcatggataaatacagatcctaatgcttttaatcttagcttaacagaaaaaaacaagaataatcatcacctaataaaaccattaataagaattttaaaatactggaatgctaatgccggatatgtttttgagtcttatgaattagannnnnnnnnnaaaacatcgtga

SEQ ID NO: 450166 - DNA, 570 bp, Serratia marcescens
atggaactatgcgctataattaaccccctcatgttaaaaaatattattattaggtttgaaatgaatagacaacttatagaaaaaattaaaaatgaatgccttcgcattgaagaggatgcgctctattcgtcgaagtcacattataatgcctctgttccatgggataaatgcaatttaatagttggcgtggctatagcaatattagctgcacttactggattaagcgctgtaaaagatatgacaatagtaacaatagttatatccataatactgacgattttgactgcaataaatactgctttgaacccaagcaagaaggcgagtcagtacaaatccgcagcaggagaatataataaccttaaaaataatgtacggatatttcgcgagatcgaactacatgaaacaaacttgccagataaagaattgaaagagaaaatacaagtactttctgattataggaatcagttaaatattacttcaccaacgatccctcgctgggcttataaaatgacccaatctgacttcaaaaatgattttgttacttacgacgttgacaaggaaaataaatga

SEQ ID NO: 450167 - DNA, 471 bp, Serratia marcescens
atgcaaatctctatttctgattattttggtttgttcgtacacacgcacaagaacgttcttacctctctgaaaattgatgaaaacgacattagctggcgttcggataagcagaactatttgagtgagcgtgctcttattatcttcaagcttgataactttctgtttgaatataaaaatgaaaacgatagacatcggcttatcctcaaaggtaaaaatgcacttgtgtcctacttggtgaaccacaaaaatctgtcattaaatgaagctaaaaacatcaacctcgcagatgccttaattctgctttccagcgaattaaacgaggtgaagatccccgatgaagccattagatttctacaagaaaatgatttcaattttcatggctatgactcaaagcattttgtttaccaatattcaggttatcaggactctgaatgggatcccgatctctgggataaacgcttgctgaaataa

SEQ ID NO: 450168 - DNA, 318 bp, Serratia marcescens
atgatttcagctaatggcaaagtaattttcgttgaagatgaaagaattaacactccatttatctacagagggagcctaaacgatgttgaactgcgtgggtggctgcgcagtgtggagcgagcgctagaacagaaaagctcctcaacaaattttgtcgaagagctgagcatgcaactcgaaaatgcgaaaataaaggaagctgaaagaaacgaatttatttcagcaagcgtttatcccagagatcgggatcccattcagagtcctgataacctgaatattggtaaacaaaatgctttgagtcatagccatgaaaattga

SEQ ID NO: 450169 - DNA, 486 bp, Serratia marcescens
atgagcgagatttggaagcccgttaaaggttacgaagagcgctacgaggttagcgatctcggtcgtgtgcgcagcatagcgttcatgcaacgctatttactccgcacaggcgttgaagcttttcgccaaacaaaggcgaaaatcatagcgcagcagaccactaacagcggctatgcgctggtccacctgcacttgaacgggcaccgcgaagccaaaacagtacacagtcttgtggctaaggcatttcttaaaggcgccaacgaaaccgttaaccacattaacgggaacaagcttgataaccgattggtaaacctagaatgggccacctatcaggaaaaccaccggcatgccgtcgctataggattaaaccgacaggcgatacaggtatcacaccccgtcacaggtgagatttacccatcaattagccaagcggcgaaagccagcggcgttaaccacaggacagcgtcaacatggaaacgcctttag

SEQ ID NO: 450170 - DNA, 633 bp, Serratia marcescens
atgtccttcgcagcacgctttaaagctcgtcgcctcgaattaggtaaaacccaaacacaagtcgcagaggaagcgggggtaagccagcaatcaatcgagtcgatcgagagcggacgcacgaagaagtcacgtaacttagttcaacttgcgcgcgtgctgggttgtagtcctgaatggctgcttaacggggaggacatcgtccctctcgccgatatcaacgtccgcaaggttccgatcttaagctacatccaggccggcgccttaaccgaggcgagcccaatcagtcagttcgacggagacatggaatatctaattacagaactagacctttcaactgcggcattcgcattgcggatccgtggtgactctatggagccagagtttaaggaaggtgatttggtggttatcgacccggaagtgcagccctatcctggtgagtttgtagtggccaagaacgggagccacgaggccacctttaaaaagtatcgccctctgggcatcggccctgccggccacaccagctttgaattggtccctctaaacccagaccatgccactctacggacaaccgaaacgccgcttacaatagtgggcactatggttgagcatcgcatctaccgccgtaagagataa

SEQ ID NO: 450171 - DNA, 213 bp, Serratia marcescens
atgaacttggcatccaggatcaagcagagaagaatcgaattgaaaatgacccagacaaagctcgctgagctctctggggttagccagcaggcgattaaccgaattgagagcggcatcatcgcacgtcctcgttatctgctggaaatggctcaggcgctggagtgcagcgcatcatggttggtgaacggcgacaacccgaacgataaggcgtag

SEQ ID NO: 450172 - DNA, 1470 bp, Serratia marcescens
atggctacctggaaccagaatatcagctccggcggttttctcgccggcatcggcgcgcagaacgagaacgcgccgaaagcatccgacgtgaacgcgacgttgggcatgatccgtgacaacaatgaagctcaacgctctggtcgagataatctcgggctccagctgctgggagctgctggcgagatcgctaacacctggaagcagacagacctgcaacagcgccagaaggcattccagcaagattacgccaacgcttatgcgtcgggcgatcgtggcgcgatgcgtgggctggtcgccaaataccccgaacagttcgaggctgtgcgcaacggtatgggcttcgtcgatgatgaccagcgcaataccgtcggcagtctggcggcatcagcgcgtctggcgtcgcaaagccctgaagcaatggggcagtggctgcagaagaacgcgggcgatctgacgcgcgttggtattaatcccgccgatgtggcgcagatgtaccagcaaaacccaactgccttaggcgagtttgcggatcatctggggatggctgccctaggtcttgataagtactacgatgtgcaggacaagctgcaaggccgtgagattgaccgcggtagactcgcggaaactgtgcgtagtaatcaggccagcgaggccaacacgcgccgcggccaagatatcacaatgcgcggccaagatatcagcgcgcagaactcaatgcgcagcgccggcggggcggtccccgcctctgtacgtgagtatcagtattttaatagcctatctccggagcaacagaaaacctatctccgggttcgtggccgccctgatgcaggaggcggtggcaatgtagtccagttggctgacggccgtacggtgagcgtgtcaggtaagttgcacgggtctggcgctaacgcattctatgaggggactgatgactccgggaatatggttcgcgtacctgccagtgcaattgcagcgccagcgacgtcagcagcgaatgcccaaaattatgcgatgaaaaaggatattgacgcgatcgccaacgctgattcaagccagcttggtttcatgacaggagtaactggcggagcagggacaccatcaatcgatgctgagcttaggagccgcctgcctggaaataccgaccaacgtcaactttacaatgccactcggcgtatccaagggcgcatgcaaaaccaaggtgttgcagctgcgagggatatgggggcgagcgggataaacacggtggcggaagcgaagatgtatttccaaggaatgccgcaagttgattattccagccctgaagctatgcagcaatctctgcgcgatatccaagaatacaccgacaactataaccagcagtatcaggttaatgtcggcggtaaacgccaaacaccatcacaaccgacagggcagccaaccccaactggggttcacacctctaaatcgggtattcaattcaaggtggaatga

SEQ ID NO: 450173 - DNA, 1776 bp, Serratia marcescens
atgaaagttaccgctaacgggaaaacatttacgttccctgacggaaccagcaccgaagatattggggcggccatagacgactattttgcggggcagtcagctccagcagcgcaagaggcccagcccgccgcccccgcggttaaagagccgactatgttggacagcgcagagcaggccgcccgcggattggttaacatcccctttgacgtacttcagggcggcgccagcctgattaatgcgatcagtcagggtctgggaggcccaaaggtgcttgatgatgtgtatcgtcctgttgaccgtccgacagatccctacgcccaggcgggtgagactatcggggggtatctaacacccggtgtcggtattgcggggaatatggcccttggggcgctggcagaggcgtccaatcagcaaggtgattttgccgaaaatgctgcaaaaaatgcagcgatcaacctcggtgcgcagggcgcactatcggcagctggtaaggttattggtcgaggtgtaacggccgctcgcgggggaatcgcacctgaggcgaggcaggcgatagatttcgcggaaaaaaacaacgccccgttgctgacaacagatgtcgctccacctggcactttcgccggccgctccgcgcaggctctcggggagaaaatccctgtaaccggcaccggtggcgttcgcagggggcagcaggaagcacgtagtcggctcgtgcaaaactatgctcagcagttcgatgcggtagcacccgaagaaatcgtcggcagtctccaaaggcagaccaatagggtaaagcaagccgcagggcagcggcttacccaagtgaatgacgctatgcagagtgcgggggtgatcgaccccgtgcgggcggtcgcttccatagacaaagagatctccagtttatcccggcttggcgcagcgtcagatgcgcaaacaatcggcaaattacagacctaccgggatgagttgagtaaaggggctgactttgggttgctgagggatttacgcacccagttcaggcaagacgtcaaaggggatagggtcgcgtggcctaaccaatctcaggctgcggtaaatcgagtatatgcagctctcacggatgatatcagcagcgcggtgacggaaaacctcggtgccaagacggcctaccgttataaacaagcgaatgcggtgtatgccaatgaagcccagcttgtgaataacacgcggctcagaaacgtgttgcagaaaggtgagctaacgccagaggtcgtcaataatttgctgttcagcaataaaccgagcgaagttcgtcagctataccgctcactcgacgcccgggggagaaacgccgccaggtcttctgttatcggcaaagcctacgaaaaatcaggcggcagcccggataaattcctgaacgaagttaaccggttgtcgtcgcaaacggggatcctgtttaagggctcagaaaggcaatatctgaacgggctgacaaaatatcttgaccagacccgaagagcagcccgcgccggtgtagtaaccccgacagggcaggaacttttccaggtagcggtccctgctggggttgcatcggatgtgctcggcactggcggtgtggccaccggcacggctctcagctatggcgcactggcgagggcttacgaaagccggatgttcaggaacgccatgcttaagctggccaatacgaaagccggctcgccggcgtacgagcgggtcctgaaccaggcagcggatgccgcaaggccgctcgcagccaatcagatcacgcaggagtag

SEQ ID NO: 450174 - DNA, 387 bp, Serratia marcescens
gtgaagagattttcactgttaatgttagcggtactcccctttttcgctaacgccgactgctggatcgtagaaggcctgcacgggtcgatatacagcccgagaaacaattacaaactagcagaagatagctatagcggtaagtacatgctggccatcaacggtgatagcgcctctgtaacgtattcaggtgtagatgctggcggaatcatctaccgcgcgttatcacctaacacgattattggactgtcttccgagccagataaaaaccttattcagacctgggtcatccagagtgacggaacggtcctaatgactaaaaccgccgatggctttggtgcattcgacagcgcccaggcaatgatcggaaaggtttcaggaaaatgctga

SEQ ID NO: 450175 - DNA, 249 bp, Serratia marcescens
atgaaagttgaggcgttgcgtagtaaagaggaaatccaggaattcaaaacgttgctggtcgagatgaataatggaaacacgctttatcgtgatcttttcgtattcctgtcccataccggttataggatatcggatgcccgtcgggttgagttctcacacatcaaagatgatgagctagaggttagagaacaaaagactggaaaaatccgccgtgttaaattgcatcctgctgttctgaccatgatgtga

SEQ ID NO: 450176 - DNA, 723 bp, Serratia marcescens
  misc_feature (669)..(678): n is a, c, g, or t
atggatttaacatatgaagaattaaaacagcagcgcctgcaaaaattctttaacgattgccagcagcaagtgttgtcacaaattatcggacctttcggtctttcaacggccatgtttgtagatcgcaacggcggaaatgttacaacgctgcataatttcgagcgcgaagagtcggatttcattgcagataaagacatgtccagtcatgcaaaatcacgccaagattaccagcgcaaagagtatgaaagtaaagattttacaaaaaaaagcaagaaactacgggctggtagcgttgatggttatacgggtaaaacgaccaatgctgcggatatggatctcgaccatgtcacttcattaaatacattgtccaaaaataagaaagtgcatcttgctctggaaaccggggaaggtgttgaaaaagttgttaaaatggctaatgccgacgaaaatttggtgaccacacataagtcgattaaccgttcaaaaggtgcagctgaactggatacttttgcagaaaaaaatggcgaaaggtttgagctggatcctgagttagtcgcagcagcgaagaaacaatcggatgaccatatttcggcaacgcttaactcggcgctgattaaaaaacagggcaaagagttgttgcagacaggcggccaacaggcgttgcagatnnnnnnnnnngttgcagatggggctgagacaagcacttggtttactgctcactga

SEQ ID NO: 450177 - DNA, 624 bp, Serratia marcescens; identical to SEQ ID NO: 86487

SEQ ID NO: 450178 - DNA, 582 bp, Serratia marcescens; identical to SEQ ID NO: 86486

SEQ ID NO: 450179 - DNA, 873 bp, Serratia marcescens
atgttaatgaaacaagaagttaaagaaaaaaaacagacagtagaactgatcaatgatgattgtttaatcgctttaaagatgcttcaaagcgattcaatagatctgatcgttacgtcaccaccttacgcagaccaaagaaaaaatacctatggcggagtaagtgcagacaaatatgttgagtggttcaccccaatagccaaagagctactgagagtgacgaaatcatcagggtcatttgttctaaacataaaggaaagagcgattaatggagagcgccatacatatgtaatcgagctaattttaatgatgcgaaaattaggttggttatggacagaggaatacatatggcataaaaaaaatagttacccagggaaatggccaaaccgttttagagactcttgggaaagatgcattcactttacgaaaagcaaaaaattcaacatgtatcaagaggaagtaatggtacctatgggggattggaaaaactcacgacttaaaaacatgagtgatactgataaaaaaagagatgaatcgagagttgggagtggtttcggtaaaaaaatagaaaactgggtcgctagggatctcgcatacccaaccaacgtattacacatggctacagagtgtggaaaccgcagtcacagcgcagcttttcctgaaagcctacctgaatggttcatcaaactgtttaccacggaaggcgacaccgttctggatccattctccggttctggaaccacattaaaagttgcgaaagcaatgaaaaggaacgctgtaggcattgaaatattagatgaatattgcgagataacggcaaacagagtaggtttgaaaaaattaactcaaaaaaaataccggtatacagatgattga

SEQ ID NO: 450180 - DNA, 759 bp, Serratia marcescens
atgattgaatcacggattatttcagaatttatagaatcttgtattgatgaagattttcatcaaaaaaagcaagaaaaaataagggcaataaaattatcagatataacaaaaaggaaaaacccttatttatttaaagcgaaaggactaacatccgcaagcgacttaataaagtcaataatggacgcgacagtctcctctggagaggagactgtttttggtaatttcatggaaaaaattgcaatttttacatgctctcaagcatttggcggaagaaaatccagtgcggtaggaatagatctagagttcgaaaatgagaatacaaaatatctaataagtgtcaaatcaggcccgaactggggtaactcatcacaaaaaaagaaaatgcaggataacttcattaaagccaaaaaagtcctagggacatctggaggaatgaaagcaaaatcaatagcttgcattgaagggtgttgttatggttatgatgctaaccccgaaaagggaacccacgtaaaactatgtggtcaagatttctggacatttatatctaacggaaactccgagttatacagtgatataattgagcctattggaaaacttgccgacgaaaaaaacaaagaacttatagaattaacaaatgctaaactaaatctttttactgctgagtttatttcagaatattgcaatagtgatggttcaataaattggtctttatttgtagcaagaaactcaggttcaaaatcaaactaccatagcaactga

SEQ ID NO: 450181 - DNA, 498 bp, Serratia marcescens
atgaacagtcttttaacgctggcgaaggacttagagcagaaatcgaaagcgcagcaacagactaccggcgagatgctgaaagccgcattcagcgagcacgagcagtctgtcagagcggaattgagcgaaagcgagaagagaatcagcgccgccatcctcgaccacgatcggaagctgtcctcagccatgagccagcgcacgaaagggatgctgcgcatggtcagccaaacgtggctgacaatcgtcctggtgtccacgctcctgatagcctcgagcgcaggcattctgtggtggcagagtcagcagatactcgacaattacgcgagcatccgggagcagaaggacgcgctggagaagctgaacgcgagaacgtttggcgtgagtttccagagcgacagcaacgggcagtttctggtactgccgaaaggcatgaaagcagaaacgggctggacggtggaaaacgggaagcgaaacgccgtgaaactggtacgggagtag

SEQ ID NO: 450182 - DNA, 2379 bp, Serratia marcescens
atgagcaaatataaggcgatagtgacaaccgccggggccgcaaaaattgccgcggcatccgctggcggcaagcaactgaaaattacgcatatggcggtgggtgacggcaatggcgtgttgccgacgccaaatccggcgcagacgaagcttatcaatgagaaataccgcgcgctgctcaatacgctgacgatcgataaatccatcgataaccatatcattgccgagtttattatcccggccaatgttggcgggttctggctgcgagaaatggggctctatgacgatgccggcacgcttatcgccgtcagtaatatggcggaaagttacaagccgaaactggaggaaggcagcggccgcacacagacgctgcgcatggtgctgatcgtcagcagcaccgaagctatccagcttattgccggcggcgatactgtgctggcaacgcgcgattttgtcgatgatgccatcaaggcgcatgagaagacccgcaaccacccggacgccagcacgacagcgaagggcctggtacagctgagcagcgcgacaaccagcaacgacgagaccaaagccgccaccccaaaagcggtaaaagacgtcaacgacgccagcgccaagaaagcggccaacctttcagatctggcagatacagccgcggcgcgcggcaatcttgcactgggaaccgcggcgacgaagaacgtcggcgttgaaggtggcaacgtgatggccgtcggcgcgtttggtctgggctcgggttccaggcatcgtgatgatgcttactgtaatcagggcgaaatttaccgcgttaataacacctccaaaaacgccccaggcaatcaggtttatggcgtcttgagcctgccttgcgacggcggcccgtcgggcggctatctggcggtgcaaagtaacgctgatgcctttattggccgctcgactattcctgccaatggggtgacctggtttcaggtctacaccactcggtttaaaccgactgctgcggacgtgggagccttgaccgatgctcaggcggcgcaaaagtacgcgctgcgctccataaaggtcaacggtaagccattgtccgctgatgtgaacctggtagcgggtgacgtaaacgcatggagcaaaaccgaagctgatggccgttttgtgaaacagggcggcgatacaatgagcggcccgttaacgctgccgcgtgttgtgttcccgaatgagaataccgccagtgccgatactgatgtaaaccgtgaaaacggttttaccgttgaatcactggtcgctacgacaaacaaaggctacccggtgccgggcggcatgggggtgttgtttaccggcaaggtgaacgaatttcgcaacgtgcaatttgctgtgggatcgggtgatcgtgcgttttatctgcgttcaatgcggaaagatagtgcggagtcgacggtatgggcgcgggtatacaccacggactacaagccgacggccgctgatgttggcgcactgactgacgcgcaggccgcgcagaaatatgcactgcgctctattaaagtgaacggcaagcctctgtccgctgatgtgaatttgttggccggtgacgttaatgcgtggaataaaaccgaagcggatgaacgctatgtaaaacaggccggggacaagatgtcaggtcagcttatcgcgccctcattcgcaagtacccccgaagccatgccaaatggtgctggggcttatgccgatcagctgagtttacaggcatcatttttccagcctaactggcaatggccggtgaatagtggtggaattttcgtgcccatcgccaagggaacatcaactcgcaaggggcaaggttacccggcagcggtcagctttggctatctgatgccgagcaatcccgaacacgcgcaccccaccattcatgttaagggcgatagcaatgtggattgcgcatgggacttcaatccctatacaggcaaaatcagcagcaaggcagggacgttcgttaccgaaagttggtgtcccttccctgtgggctatgtgatgttactgggcaacgcgagtgatcccaatgcgctttatcccggaacacgatggcaagatttgaacggaacgggctatgacggtcgggtaatcagcttgggttacgatgctatggcgattggcggtagtaaccacgtaaccatcggagcgcataacctgcccgaccactcccaccggggagggatgagcggcccaggggcgcagtatgatggcatgcaaacagggacagacaatagcggaaactactcgaaaaacctcaccgccggcacatacaccaacagcaatggtaatgagttcgttcgcaacgaaccgatcaatgtcacgaacgcctacgtgcatgtgcgcggctggatgcgcgttgcatga

SEQ ID NO: 450183 - DNA, 243 bp, Serratia marcescens
atggaaaatcaacaccgtaaaatcgctggctatcgcgaattgacccaggacgaaatcgactgcatgaacaaggtcaaggctctgggagaagaactgggcaagctttacgactacctgctcagtaccaactctgacaccggtgggcatcaaatagatatgcgttggctcaatgaaggcaggatggatcttcagaaaggcatcatgtgctgggttcgcgcagtcgcgcagcccacgactttctag

SEQ ID NO: 450184 - DNA, 315 bp, Serratia marcescens
atgaatgccatgtcaagtgaccatgcaaaaaaactaaagctgatccgcaaagcagaagggttaacgcaagctgctttttcggagatgctggggattggcttgagtacagtaaaaaattatgaaggagggcgaagagaggttgggctatccatcatagataaggtcatcaaccacccccgatttgaaaaatactcaatgtggcttatgagtaacgccaacaaaacgtccgaagcagcggggcaaatctccccgtctctctcccctgatgggcacgacgacacatccgaccaccaaaaaggccagaaggctggctaa

SEQ ID NO: 450185 - DNA, 264 bp, Serratia marcescens
atgaaattattcttccttgttgataaatcaaatttatatcaaagagttaaacttgctgcgccgttggtctttggtgtgataacaattctcattggtcgcaatttgtccttaaaattcgccgtctcacctgctgagaaaatgcctaaaaaaaatgagacgagagatttttttgagttcgatctccctgaaaataaagcgatcatttcattggcgattaagaacccatccaacccattagctatgcagctaatggacgaggattaa

SEQ ID NO: 450186 - DNA, 2010 bp, Serratia marcescens
atggcagctaaatccgttgttgaaattgatgttcaggacgagaaatttcaggcgttccttgaaaaattcaatgattaccaaaaggcgctcgaagggctgcccgaacaatggcggggggctacgcaggggatcggtgattctgccaaacagaccgagaaggtgctggggagtacggaggcgatcacccaagcatttaacgatggggttgcagccatcgcctctgttaatgatggcctcgaccgtttaaatggaaaccttgagaaagccaacaaaacgcaatcggaatttaacaaaaagaaccggcgtgccagcacctttttaggtaaagccagcaaagatgcaaaagaacttgccggccacataaaaaatgcgacaacgagtctgctctcgtgggggaccgtgttagggctgttttctggtctggcgggtgtgggcggtctgtgggggatcaaccgtctggccggatctgcctccgcgcaacggtttactgcgatgggattggggacgactgccggcggccttaacgccagcgcggtaaactatcagaaggcgctcgggaatcccgtcggtacgttgggggccattcgggacagccaactggatctgagcaagcgctggcagtttaaggcgatggggattgataaccccgatcaggatccggcaaaactgttgccgcagatgataaaaagcgcgcgtgatatttttgtgcgcaacggcagttcacagcagggcgcggaagcctatgggctgaccaactacttcactctcgacgatctcaatcgctttaaaaaaatgagcgatgctgaaatcgatgcaatgaccaagcaggcgcagaaggatacgcagcgtctgcaattgaccgaccagcagttgaggcagtggcaagatttcaacattcagctggatcgaagcaaggtcggtatagagaacaccttcattcgtggattggcaccgttgacgccttcgttaaccaaactctctgacgctgttgagggggcgctcgatgagttattaaaatcgccagagttaggcaaatggattgacggggtttccgacgggcttaaaagctttgctggttatatttcctcaggtgatttgcgtaaagattttgatagtttcatgacctccattcaggaaatggggatgactgttgataatgtcgttaaattcctgaaaggcgaaactatcaatgactggatgaaaaagtctgaggatagtgctaattcatcggctgagtgggttaaggaaaaaacaggttgggatccgagaacggttggcccctggattaagtcccatgtcgttggtgacagaatggagggtttaaaacgattccgtgacggccaagatgatggtggcgaatcgtggtggaaattgcgggctggtaatgatggcattttaaataacaaatggaaccaaccagagcaatacgctcaatcttcaaaaaaacgaacctcaggcgcagccccatctgactatgatggatattttgaagaggcagcccaaaaatacgggttggatgcgaagttgcttaaatctgttgccggtgccgagtcgtcatggaatacacgtgctgtgagcaaggcgggcgctcaaggattgatgcaggtgatgccattcaacttcaaaaccggtgagaacccctataacccccgcgacaatattatggctggtgccagagtaatgaagtgggctaaaaatcaggccgggggtgatgttgaggaaatgctgcgctggtataacggtggaaagaatcgcggtagcaaggagaatcgtgaataccccggacgagtacgggagcagttcataaagctctacggatcaggagcaccgggttctacccaaagtaatccccagcagcaattcacccaacaatcctctagcaaaaccgatcagatattgcagcagattcttgataatcagcgacggggaggtagtgccggcgtggtggtgtacaacaacaccggtggtagcgccattgtttctagcacgcaactcggaggattcggttaa

SEQ ID NO: 450187 - DNA, 366 bp, Serratia marcescens
atgactgtgatggcattaccggatgcgcagcaactgctggccatgccggattctgattatatgaactcggttcaacgggcgtttttccgtcagctgctgcaggatgagcggcaaaagctgctgctgcacatcgatgagctgaaaaaagagatcgacggcggcgaagcgacgggcgatgaggccgataaggcggcgcgcgaagaggatctgcgcctgttgttccgccagctggatcgcgaaagccgcctgttgccgaaaatcgatgcggcgctggccgcttgcagaacggcgaatacggctactgccgggaaaccggcgaacccatcgggctggcgcgcctgctgctgcgcccgacggcggaactga

SEQ ID NO: 450188 - DNA, 1257 bp, Serratia marcescens
atgtataaaatacagagtgtagccataaacggattctggcaaagattagattgcttttgctcctttaatgacgatgtcaacattatcattggccgcaatggtactggaaagacaacttttatgaatattttgcattcaattttatcacttgattttgatggtattaataacaatgattttaatagcgccgaaatcaaacttaaagacgggagaaaatccaaaacaataaagataaataaaatagaaaacgaaactactcctttctctaaaatacagtaccaactatcatctaaaaaatataatttacgtgttatgaacactgatgatagaagattcccccttcattataggcgcagggtgcaagaagaatccgaggaattaagaagcgagctcgaaaaattagtcgcactctcatctctgtctgtgtatcgcttaagaaacagtgacgatctagaagttagagataaatatggcactcgtttcataaaccctgtcgattataagctttccgagttaatgcaagagctcacaaaatatcagcttgaattatcacaacaagcaagagacattgcacttgaactacaaaaggaggtgttagcctcgattttatatagcaaagaggacattgatgacaaagcttacaatattgactttgataaagaaaaagagaaacaaaatcttttaagtgcttatactcagcttaacgccattgattacaatatacgtcgtaaaataaatttccacgtagacaatattgataacaccatatcaaaattaaagcaagacaaaaagaaggtgattgatatacgatcaattgaagcgttaaggaaaacccaaaaaatcatcaaaatgtcattaacatcaaaagacaaaacatctcaagttttcgcacctatcgagcaattcctaagtattctaaaagaatttgtaactgataaaacttttgagtttttaggtggcgagttatttattaaaaacagtcacggacctattaaacaagagagtctatcttccggagagaagcaattattaatcttattcattgaaactctacttcagagggaacaacaatacatatttataacagatgagccagagttatctttacatattcaatggcagagaaacattatacctgcgataaaaaaactcaatcctaatgctcagataattgcggccacgcactcccctgaagttgcatcaaaatataaggagtctattttcaacatggagaagctcgttaatgtcacacaatga

SEQ ID NO: 450189 - DNA, 858 bp, Serratia marcescens
atgtcacacaatgaatcaaatgttgaaaattttggctggtcagatgaagccgaaaatgtcattagcatgttctataatgctgacgtaatggtttacgttgaaggaatagatgatattggattttgggagatagtttttagaaaaaatgggcgactaaatgttgaagtccaagatgttggtgggtgtgacgctctaattccttatatggaaaaaattgcatctgggcaaataaatgcaattgtagctagagatgctgacctcaattttttctcatcaaacatagcaaatcacaccaatataatttatacaagaggttactctatagaaaatagcattctcgatgaaaaggtaatatcgagaatccttaagaacattggaaaatatagcgcaagagaaatccaagatatagatgtaaaatcatggcttagagagctttacgataatgttgagaatttaatatctcttgacatttataatcatgtgaatcttcgcggacaatccgttgttggcgattcatgcgaaagattcatgaaatctaaatcatcatgcttcacgtctacagacaaaataaacgactacattcaagatttacctgatgacttcaaagagcaaggtttggcaataaaagagaaacttcaattcccgaacgaaaccactataaattgttggcttcgaggacattttcttttttcagcagcacttagatttataacgaattatctatctaaagatgaaaggaaaaaatccatatcgaaagatagtttttacgctaatatgttaacggcatttgaactatactttacagagaaacatgatgattatgaatattacaaccgaaagatagcattaatagcatag

SEQ ID NO: 450190 - DNA, 1083 bp, Serratia marcescens
atggtttctgataatggatttaacccggactgggtatcagcccccggagataccataatagaccttatggacgagcatgggttcaacgaagaggagctcagtcgaagagttggtctttcgctcactaaaggccgtgagttaatttcaggtgatcttattctgactgagcaaattgcatacaagcttgaattactcttcaaggtcagcatgaatttctggcttagccgagaagataaattccgtaaacacaaaaacgagattattcgccaaaataatgaatgggtgcagtctttacctacttcggatatgagtaaactaggatggattcctaaaggcctgagtggtagtagaaaaattgaatattgcctgaatttctttggtgtatcatctgtacccgaatggttgagttattataaaaacaaacagactgctatagctttcagaaagtccgatgttttcagaacagaggaaatggctgtaattacctggctcaaaaaagctgaatacatctctcgcaaacaaaaaacttatgcatgggatagggaagtactcaaaaatagtctgggagcattaagaaaacattctctagaacctaatcccagagtatttctgcctgtgatccgtactatacttgctgacgctggtgtagctcttgtgatactccccaccccaactggatgcccagcaagtggtgctacgtgtttttttgaacctgacaaagcgacgttgataatgagttttcgttatctgagagacgatcatttctggtttactttgtttcatgaagttggccatctggtcctgcacaattgcgaacagcaccgcattgagggaataaaaggtctttccgaaaaagaagaacaggaagcgaacctattttccagtaacgtcctcattccccctatgtatcgggcagagtttgattcgctaaatgggcgggattggaaaaatattattaaatttgctcgtaaaattggggtatcaaaggggatagtgctgggacagttacagtatgcaaaaaaaatcccctatgaccatttttccaggttcaaagtgaaatataaccgtgaagatctgtgctga

SEQ ID NO: 450191 - DNA, 939 bp, Serratia marcescens
atgaaacgtaagcacctcattgatgatatttttaaacagcttgaagtattcagtacccacgaaatcccgcttaaggggttagattcacctgataaaacaacgacgctagccgctcaaatactcgacagtaagcgtcgcattgaatacgtaggggctattggcagaaataaaatatcgccacttcgagcaaatccgcatagtgaaatttttgatccactgagggccgcgtggttgcatgtccataatggtaacattgatgaggcgtgctggcttctcttcctttctactcacttcggcaaacatctaaagtatggatggcgactgtgtgcagacatttatggtggccttggtggagaagtatggacttgggagaaagttattgcagaagtggatactttctacatttggtatgaggactgctatcgtcagatgttggcagacggtcaaaaaagaaggtttggcaaccacagaaagtatgaatcccttagacctgatagcaaacgctcccttccgcgtgttattagttcttacgtagcgtgggttggaaacgcaggtagccatgaagcgcgctttgctgaagcaaaagccgcatctataagtcaggaagattactttgatattctctaccgaagcatgaaagctgttttgtcatttgggcgtgccggaaggttcgacttcctgacgatgctcatcaagttcggaatcattgatgccaaaccaggaacactgtatctggatggggcgacaggtcctctggacggggcgaatcttctgttttacggagaggcgagaaattctgccaattataaagttctagacaatcttttggcccagcttagcgctttcatgaatatggggctgcttgaaatgcaaatccttgaagatgctctatgcaactggcagaaatcaccctcccgctacgtttactttgggggatag

SEQ ID NO: 450192 - DNA, 1026 bp, Serratia marcescens
atgtataacttgggattaggattacttttacttaaccgatatgtgtttgacatccagctctctgtttacatgtgggtaattaatatggaaattgagaaagatacgattgatgatgttatgcgggctgtatttgaaagtattctcagagatggggttcttgttgagacaactcggggggcgacaaaagaaattctaggtatacacatcattttaaacaacccgaactgtcgaattagcaggaccgagtccagaggcaagatattcacctgtctgggggaattgatgtggtatctctcaggcagcgacgatgttgattttattagctattacattgcaaaatatagggagtctgcggaaagcaatggcaaaataaatggcgcttatgggcctcgtctttttggtattaaagatggagttaatcagattgaaaacgtcatccatctgctgcggcaacgtaacacatccaggcgagcagctatacaactgtttgatgctaatgacatagcccacacattcaaggatgttccgtgtactgtcggacttcagtttgcgatcaggaatgattcgctcgatatgtttacatttatgcgctctaacgatgcacgtgccgggttggttcatgatatatttgcattcaccatgcttcaggaaatggtcgcaagaactctcaaattaaatctaggaatttatcgccattacgccgctagtttacacatctacaccgatgacatcccctcaatagaggcagcactcgaagagggatatgcctcatcatctccggtgatgaacccgatgccggaggaagctcttagtgactatttaagcacgattgttgaggctgagaaaaatattcgagatggcgaaattccagatatcgatgagttaaatctgagcgaatactggaaagatatccttcgtatgctggcgatattcaggagcagaaaaaataagaataagccagttgcactagctattgctgataaattgaaaaatcagtcatttaaaatttatcttgagaagttgtga

SEQ ID NO: 450193 - DNA, 876 bp, Serratia marcescens
gtgagaaaaatactagaccccagggtcgtggtggtgttgtctgccatcgcgtcgtccgacgctacttgtgaaggtgtgatagaaggtggttaccaggtaccgccgctgccgtacgtgaccatatacccaggggggccgacaacgccggggactatattgcacgtacaaggtgtttgccagttgtatgggcaggtatgggatagacctgggcctggcagacggtctacattatatactgggcagtacagtgaattggatgcatccgggaaaagatactgcatgggggtgcagatcgctgggaagggtgtaggggacccacgggcaactgctgagctcgtgttcgatcgtatgaaggcgggtgtgaaggtgccgtactggcaggccggaagttctggttcttggactaacgttaacgaatccatttgtttatatgctgctgtcgtcggtatagcgccttatccggcgggacagacagtgtattttaaaaagcatggggccactatgcctggatggcctgatcattgtacaccgcgtggggtgcccaaacccgttttatgctcgatcgtagggcgtggtgaaatcgtgcaccagactgcctctgttggtacggtctaccgtcggaataaggttactcttggggtggaatgtgatggtactgcgtctgtggtcctggatgtaccccgcaaccccgcggtacttcgaaccgagaataaacaaatcgaatccggtatttatttaaatcgagatggagtttattccgcgacggttaccgcggctccccatggatctgtggacgtaataagtgtagtgaacacagatgttaaatttgcagggacgtataacggatcggtagtggtgactgccacgtgggattag

SEQ ID NO: 450194 - DNA, 948 bp, Serratia marcescens
atggactggctcgaggcctatcgctgggtgaagagtcgacggcgacatgcgccgcccaatgcggatatttggcatttgcgtttccactgggccgagcgtagagccgccatttatcggcgagtgcgcaacggcgattaccgtttgctgccgatgcagctttaccgctatcgcgatcgcagttgggtgcaatggagcgcgcaagatgcgctggtgctgaaatgggtctgcttgcgggtggaaaatgacctgcccacccatgaacgctgcgttcacctcaaagggcgtggtgggggcaaactgtcggtcgagaatgtatggcgtgaactcacctgcggtgattacgcctttgtttatcgaacggatatccgcggttattaccggcatatccgcaaggcgcaagtactgagcctggtgcagcagcatattgatgatccggtgcttatcgatctgattgagcagtatttgtattacagcgtcgaggacgggggcgagatttttaccccgcggtacggcatttgtcgcggttgtgcgcttagcccgctgatcggcgccagtctattgcatcatgtcgacagttatttttccgcgcaggaaggaaccttttattcgcgctatatggatgattttttgctgtttacccgtacacgctggcacctgaagcgctgcgtgaaacgcctgcacggattttttaatttgggtggatttgaaacccaccccgacaaaactcaactggggagaattgaacatggttttgactggctgggcgtgtgggttacccctgagggcaccaccatcgcgccgcgcgcgttagaaaattaccgtactcaacgcctgcggctttacgagcaggcccgggggcggggactgtcagtggcagaatccgacgcacgggtgcaggcgtatgaaaaacgctggaacatatgggcagatggaatgctccgacgatga

SEQ ID NO: 450195 - DNA, 534 bp, Serratia marcescens
atgaacgggtatccgcggtttctcaatacggcgctgattgccgggctattggcgctgagctgtgccgcactggccgacaatgtacgtttgcatggcgcattggtggcagagccctgtgtgatcgcgccaggggacgaaaatgtgaggctcgattttggcacggtgatcgacaaatacttgtacgccaatgaacgcacccacgggcaggcgttcgatattcgcttgggggagtgcgatttgagcctggggaaaacggtcaaggtgaccttcagcggaacggaaaaccagagtcttaaggggttgctggcgattgaggggggcagccaggcgtctggcatcgcgatcggtatggaaacgcagggcggccaacctctcccgctgaacaaggccggtgagggataccggctggttgctggcaataataccctgacggtgctggcctatgtgcagggtgagccggaggctatcgctcgccgcaccatagagcacggcccgttcagcgcgattgccaccttccgcttggaatatgaataa

SEQ ID NO: 450196 - DNA, 426 bp, Serratia marcescens
atggcggcggagaacatgacgtttttcggcaccctggtcgaaccccctgcctgcgcgattaataacggcggattggtggacgtcgatttcggcaatcgcgtggggataaaaaaggtcgatggggtgaattatttgcagccaatgaactaccaggtcaattgtgatcccaacgcgcaggcttgggcaataacgctggaaatcgttggcgtctcggcggattacgatcgggcggcggtggtgactggtgtcaaggatctggccattcagattaaacagaacggtgtcccgtttgagcttaataagccgatacccatccaactgacgaacctgccccacttggaggctgtgccggtaaaacgccagggcgcgacgctaaaagaagggccatttgaggctacggctaccctaaaggtggtttaccaatga

SEQ ID NO: 450197 - DNA, 534 bp, Serratia marcescens
atgattagggcgaaagagatggctgctgaacgcgtatatcgattgccgctggttatggcatgcttggcgcttgcgagctggtgggcaaccgcaccggtgctggcaaaaaccgctacggcgacggtaaccgtcaagattacggtagtggagccgccgtgcgacatcaacaacaacaacttgattgaagtgaatttcggtaatgacgtgatgaccacccgcgttgacggcgaatataaaaaaatgccgatcgtctatgcggtgcagtgccagggaggcgcggccggcgctgcacggatgcgtattgaaggtaacggcgccacgtttgattccgaggtattaaagaccaatagaacagatttaggcatcgcgctgctcaacgttaatagcggcaagcggctgccaattaatagatggttgaacttcaattatcccgcattacccgtgcttgaggctgtgccggtaaaacgggttggcgccaaactcagcggcggagttttttccgccggtgcgacgatgatggtggaatatcgatga

SEQ ID NO: 450198 - DNA, 651 bp, Serratia marcescens
atgcaacagagaaaacagaggagcggcttcctgtcttgccctgaacggcaatacctattggcccgagtggctgcggtgatgatggtgccggtggtgatcggcagcatgctggcgctgatgcccgtggccagcgcggcagataacgggaacgttgacggtgccaatggggtgttgcatgtgcgtggtgccttgaccgaaagcgcctgtcgcctggaaatggcctcggcttatcaggatgtgtggctgggggaaactggtaccgcccggttggcgcaggtaggagcgcagggtacgccggtggcggtgcagttgcgtttgcgggattgtttacgcagcccggcaaacagtcgcgatcagcgcagcggcaacctgctgtggaacctgaatcaacctgcggtttccgttagcttcgttgcaccggcggatacggataatccgcaattgatcggggtgcgtggggcttccggcatcgggttacggatgcttgatgcacagggacgggacattcgtctggggagccgtggggcgccgctggtgctggcggcggggcaagatagcctgacctatagcctgatgccggaacggacgcgggctccgttgcgggcaggtgcttatttggcccatatcgacttcaggcttaactatgattag

SEQ ID NO: 450199 - DNA, 753 bp, Serratia marcescens
atgaacctaatgaaacaatccttttttcctctgatgagcggtctgctagccggtgtgttgggcctgcagcaggctcaggcggcgatagcgctggatcgcacccgcgtggtgttcaacggcaacgagaaatcgaccagcctgagcgttagcaacgagaacaaacaactgccttacctggcgcaaggttgggtggaagacgcccagggcaataaaataaccaccccgttgacggtactgccaccattgcagcgcctggagccgggggcaaaaagccagatgaaggtacaggctttaccggccgccaacctgttggcgcaagatcgtgagacgctgttctacttcaacctgcgcgagatcccgccaaagagcgaaaaacccaacacactgcaactggcactgcaaacgcggatcaaactgttttatcggccaaaagcgctaatcagtgccgaaagcgcggcaccctggcaggaacagctgacgctaaccaaatttggcgacaaatttcaggtgaacaacccaacgccgtattacgtcaccattgtggatgccagcagcaaaccaggggcggtgggggctaagggctttgaaccgctgatggtggcgccaaaaagcaaagagacgttgaatctgggggcgtctgcgctgggcaatgcgccggtactgacctacgtcaatgattacggcggccgcccacagttgcagttcagctgtagcggggccgagtgcaaggctaaaccagtcaagccaagctga

SEQ ID NO: 450200 - DNA, 2532 bp, Serratia marcescens
atgatgatgccgagctggactttattgcccttccgcccgcgtgctgtgggtatttatgttgcctgcgcattgggtttgtttgggtattacgccagtgcggaagaggtgcagttcaatactgacgttctggatgttaaagatcgcgataatattgacctgggccagttctcgcgtggcggttatatcatgccgggcgattacatgatgctggtgcgtgttaataagcaggagttgcctgagcaaagtgttattttttacccggcggaacaggacgcgaacgatagcgctgcatgtatcagcatggcaatggtggaacaatttggcttaaaaccggacaagaaagaaaagctgacctggtggcatcagggcgagtgcttatcgttggagagcctgccgggcaccgcggtgcgcggcgatttaggtaccgccagcctgaccctgagcgtgccgcaggcctacctggaatatgccgccgataactgggatccgccgtcgcgttgggatgaaggcgtgccgggcttgctgttggattattacctcaacgcgcagacccagcggcaacagcaacgcgggcagcatgggtataaccttagcggcaacggtacgctgggcgcaaacctcggggcatggcggttacgggcggactggcagacacggctggatcatcaaaccggcagcggtgagggcacacgccaaaattgggactggagccgttattacgcctatcgcgcaataccgcatttgggggcaaagctgtcggttggtgagaactacctgtattccgacatcttcgatagcttccgctttaccggtgccagcctgatcagcgatgacagcatgttgccgccgaacctgcgcggctatgcgccggaggtcaccggggtggcgcgcaccaacgccaaggtggtgatcagccagcaggggcgggtgctgtatgaaacccaggtcgcatccggtccgttccgtattcaggacatcaacgatgcggtttcggggcagttggatgtgcgggtggaagaacaggacggcagcgtgcaggaattccgtatcgataccgccagcatcccgtatctgacccgaccggggacggtgcgctacaaagtggccagcggccgcccttcggactggaagcacagtaccaacggcccgctgtttgcgaccggtgaattttcctggggagtcagcaacggctggtcgctgtacggtggcggtgtagcgggcggtgattacaacgcactggcggtcggtatcgggcgggatctgatgatgttcggcgcactgtcgttcgacgtgactcagtcgcgggcacgcttgccacaactggaggacggcaccctgaccggcggttcctaccggctgagctactcgaaaaacttcgacgagtacgacagccaggtcaccttcgccggttaccgcttctcggaacggaactatatgtcgatgagcgaatatctggatgcgcgtacctacggcacgcgtaaccagaacagtaaagagatgtacaccatcagcttcagccagcacttccgcgatcttgggttaagtgcctacctgaactacaaccatcagacttactggaacagtacggcgaacgatcgttacaccctgacgctgtcgcgcaattttgatattggtgagttcaggaacctgagtctgtcgctgacggggtaccgcaataagtataacggcgtcaacgatgacggcatgtatctctcgctgtcgatgccgtggggcggcagtgggtcgctcagttacagcggcagtttcgaccgcaacgacaacacccaccaggtggggtattacgatcggctggacaacggcgacagctatcagttgagcagcggcatcacccgcaacggcgcaacggcgagcggttattacacccatcagggcgatatagcgcaggttaacgccaacgccagctatcaggaagggcgctattcatccgctggcctgtcgctggaagggggcgccaccgccaccctgaaaggcgcggcgctgcacagatcggggatgattggcggtacccgcatgatgctggacaccggcggcgttgcggatattccgatcggcggttatggcgtggtgacgcgtaccaaccgcttcggcaaggcggtggtgacggatgtcggtagttattaccgcaatcgggtcagcatcgatgtaaacaagttgccggagaatgccgaagcgacacgatcagtggtgcaggccaccctgaccgaaggggcgattggttaccgccgatttgaagtgatcgccggtgagaaagcgatggcggtgatccgcctagcggacggctccacgccgccgtttggtgccacggtgcaaaaccacaaaaagcaggatgtgggcatcgttaacgacgacggcaatgtgtacctgagcggcattaacccgaacgaggaaatgaccgtgcgatgggatgggcgggcgcagtgcgcgctgacattaccggcgcaaataccgccaggcgatgtggccaagctgttgttgccgtgccgcctgttgccggaggcggcggcggaataa

SEQ ID NO: 450201 - DNA, 534 bp, Serratia marcescens
atgaaattgaataaaatcatgatggcagcagtattggtattcggcactatttctggttctggcgcacaggctgctgatcaaggacacggtaaagtgaccttcaccggctccattattgatgcaccttgctcaattgaccctaagtctattgatcagactgtagatctgggctcagtgtctaacgtttccctgcttaacggtggtaactctgacccgaaaccgtttgaaatccatctggaaaaatgcagcctggacaccgctaaaaccgtgaccaccacctttgacggtgcggctggtaaaaatggcctgctgggtatgacgggcgatgccaaaggcgccagcattgcgattaccgatggtagcaataatgtcattgaactgggcaaacctaccgcgggccaactgatcagcgcgggtgccacagaagcaactctggccttcagcgcttacctgaaaggcgacggcggcgatgataaatctatcgttccgggtaaattccagagcgtggctaacttcatcctgaactacaaataa

SEQ ID NO: 450202 - DNA, 774 bp, Serratia marcescens
  misc_feature (713)..(744): n is a, c, g, or t
atgtggaaacatggggttctcggtgattttgttgaaaaaccaacttacggctcatcggctaaatctcagccagaaggcctcgtgcctgtattgagaatgggcaatttacaagacgggaagatagattggacaagcttagcgtatacatctgacccagaagaaataaaaaagtataagctattcgcaggtgacgtactgtttaatcgtacaaatagtcccgagttagttggtaaaacctcgatttttcggggggaaagagaagctgtatatgctggctatttgatccgaattaaatgcaaagaaaatttgaaccctgagtttttgaattaccttttaaatagtcaagatgccaaagattattgttatcaggtaaagtctgacggcgtaagtcagtcaaatatcaatgctcaaaaacttatagcatatacaatcagtgttccatcaatggtagaacaaacggaaatcgtccgccgcattgaagatattttctcatttgcagataacatcaaactaaaaactagtgtcgcattagaacgagtaaataatcttactcaatctattctggctaaagcttttcgcggtgaactctctgctgattggcgtgccgccaaccctgagttgatcagaggtgataacagcgctaaagctttgcttaaaaaaattcaggcacaacgtgaagctatcgtaaaacgacctaagacaactattaaaannnnnnnnnnnnnnnnnnnnnnnnnnnnnnnnctattaaaaagaaggctgacagccgtatga

SEQ ID NO: 450203 - DNA, 246 bp, Serratia marcescens
atgagcaaaaaaatcatcaaagttgttgaagcgttgaaacatgctggggaaccgcttagtggccaacaattgttggcggcggcgggctaccccagcgacagtagcaccgagcaactggagcagttctttttagatattcgtgatgctcttgtaatcgaagagtctattgtaaaacttgatcgcggtgacgatagccaagattggttcactttggctaaattaccaatgaataaagcaaagaattaa

SEQ ID NO: 450204 - DNA, 1623 bp, Serratia marcescens
atgaaagtcgacaaactgcatattcgcacacgtttcaaaaatcttgaaaatgtgaaagtggactttgatgaagaccacctaatgacagtcgtggtaggtcgtaatggttcaggtaaatccaacgttcttgaagctttggtcgctatattccgaaatcttgacttaggagaagccccaacgttttcttatgagttgtactttcaacttggtgaagaaggcggtgtcaagtggtatgacgttaaggtggatgcagatccaaaccgaggaacattagcaaagcaatatcaagtttctgtcaaagataaacacaatagcaaagcggatttcaagctcatacctttctctaaagtgaagcgtgataagagaactaagcaagcggaatttcttcctaactttctgtttgcctattattccgggccatcagatcgattagaaaaatattttagaaagcatcgtgatgattattatcgcgagctgctctacaacgacctagacttgaaagctgatattcggtcgctattttatgcaaagtctcttcatagccaatttgttttgatggctttttttcttagccctgagcttaaaagagaacgcacatttctagaaaaagagcttggcatagaaagtcttgactcaatacattttgtattgagacgtccggcatgggaaagagacaaagaggacagattctggggcgctgatggtgtcgttcgtgaatttatagatctactttatccccatgctttagctcccgtgaaggtgactcgaaatgaggacactagtctcacaggaaaaaataaaaaaaatgatttcattcatatatttctgccatcagttgaaactctgcatgaaatagccaagcagctaacgccgagtattttctttaagatgcttgaaagcacagttctctctgaaattatttctgaagttcatgttcgagttaaggtaacttacgctcaaaatccaatcacattccaggaacttagtgaaggtgaacaacagctactgactgtattaggccttcttaaattcacgggtggtaaagattccttatttttactagacgaacctgacacgcaccttaatccctcatgggccgttaagtaccttaaattcctgcgtgaattcgtacctaaccatgagacctgccatttgctgatggtaacacatcacccattagctattgctgaattagataagcagcaaattcaagtaatgtggagggactctaaatttcaagtacatgcacaagaaccagaggagagccccaaaggcatgggctatggtggaattctcactagcgacatgtttggtctacgaaccaccttagataatccaacggaacgtttattgcgattgcgacgtcgctttactgaaaaatctgaattatcccctattcaggctgggcgtttaaaaaaaattgataaagcgatagaggggcttggttttacgacagcacattgggatgaggaatacgctcagtatttgcgtgtgcgtagagaagtggaaatagaatctgaagctgctaccgtcacgcctgaacttaaacgattacgtaaagagcgcgccaaagcgatcgttcaacgcatacttgctgtagaacgggaagagaataaaaaatga

SEQ ID NO: 450205 - DNA, 864 bp, Serratia marcescens
atgaggcacttagacattgatttcaatcagctccaattaccggatggttggcataagaaagcacaggagctgttagattcgcttaaagcggcgcaaaacgataagcaacgctcagagattattaaaaaaaatcaggatcactggaaagcggtgaaacatgtactggaatccttgttcaattacaagtgttggtacacagaggctccacagcaaggaacggatgtagacgtcgatcattttcgtcctaaaaagcgagtgcaagaaacgctactgacggcagaacctcatgatggttactggtggctgactttctccctccaaaattatcgttgtagctgtattgtcgcgaatcgtcgaagaactgatgtaaaaactggcgttacaggcggtaaagctgatcactttccactgtgcgacgaggggatgagagcgagaactccagattgtgacttggaagaagagcaaccgatattactggatccattaaaggcaaccgacgtgcaattgcttcaatttaaacctgatggagaagctatgccccggttttctaaggaaaagcatgcccgtaagtttatgcgtgccgaccagtctattttattttataacctcaatcattcagattttgtccgttgccgcatagaattacgagaccagattgataaggaagtcaacgctgcaaaaaggtactttaacaaactggagacaggcgacgcggataacgactttgcatatgaacagacaatttgtcgtttgttggaaatgacaagtaaaagggcaccattttccagtttttgtatcgcttacttagatgggttcaagcataaaccggaatatgaaggggtgcttgatgcagtctatttatga

SEQ ID NO: 450206 - DNA, 1143 bp, Serratia marcescens
atgatatatcaatgctattcatgttctaaaacaacattcgaaacaagctgtccgtggtgctctcaagatgcgtctggaacatttcgacaaatgacgcctttagatccatcctattaccctgatttccagtaccagtctaaaggaatcataaaagatttatttggtaagaagaaagagcagtctcaactcaacgccctacttgaaaacgttcttttgaaatatgctacactgaaagacccttattttaccaactatattcacacatcaagattttcgtataacaatcaggatggcaacagtaacataaatagtgaacacaatagtgattattcagagatccaattattccaggaagtactgattagaaaaggctttaacgaactggagcagttaccatcattgttagacaagctattgctgacgacttcattcaactctatttattcagggtttgcccgtgaggttaaacggcatatcaagccaacccttaccgagacattaaaatcatggatagaagaggccggtacaacttatcgtgcagatctttcgttattcctgtattacctttggagtaataagattcagtaccctgctataacatataacgagcaggcagaaagtacaccgggtactccgttattatcatttgacactatcaataaattccttgctatctgcgagagtatctattttgatattttagtagacagattggctagccgccttgaacactttaatccaaacaaatttgtcacaatgtatcttgtcgatgcaatggatgggttccaatttgaggccttcctggttgaaatattccagactataggatatgatgttaaagaaacaaagaaaacacaggatcagggggcagacttattcgttacccgcttcgggaagaatatggttatacaggcaaagaattattctggctccgttggcaattcggcagtgcagcaggcaatttcagcaaaagcattttatgggtgtgatgaagcaatggttgtgacaaactcttacttcacccgctcagctaaggaattagctgattctgcaatggtccgtctgattgatagaaaagagcttcaaaactacctggatgattacaatcagaaaataattgaagatttccagtcagaatcctga

SEQ ID NO: 450207 - DNA, 1014 bp, Serratia marcescens
gtggcccataacgacagctacctggttctcgatgagtcgaagctgttagataaagacgtactggcagccgctaaaattatgcagaaccgcgtgtatacgttatcgggtggtaaagggaaaacacgttcggcaatgtatgagaacaaagttgctgaatggcaggtaagcatttttagtacgggtgagtgcagccttcaacaactggctgcttccggaaacattgagcgccttgaaggcgaaaatgtgcgtgtaatcgacgttcatgcagatgccggtgctgaaatggggatcttcgaatcactgccagatggtattaattccagcaatgaacttgttcatgcgataaaggatgcaactcaccgctattatggcagtgccaaacctgcctttctcaagcgcctggtagcggatattcaggatgatcgtgagagtgtgaaacgaaagctcgaaaaaggcattgagttcttcctcaacaagcatcaggtcgatcgtaactccggcattcatgtacgaatcgccaaacgctttgccatcgcttatgtagcaggttccatggctgtgaaatatggtgttttaccctttacaaagcaggatgttatgaaggggatctcaacctgctacctggactcccttaaggtggttttatctgaacctgaggtaatgaagtcaccattaggtcgttcgtttgatgcaattattgattattgcaaaaaggatgatcttttaaatctgattggaaatgatcgcgtaacccaaacggcgattaaaaagacaccggtcattatccacaaagttaaaggacgtacggtatatgcagttgataaggatctggtacataactgcttgccgaaaactcagcgcaaaggcatcttgatgctattaacaaagcaaggggtattattatccgatacgaacaaggagtacagtactattcagattgtctataagcgtaagcaagttggtcgtcgctactgttttatctgcaaaaagcttgataagcttatgacacaatag

SEQ ID NO: 450208 - DNA, 207 bp, Serratia marcescens
atggcagttacccgcatcttaaaaattcaggaagttctgcaccgttgtagcatttcaagagcgtctctttatcgcttaatttccaaggggcacttcccctcgcagctccgcttgtcaccggaaggtcgtagtgtcggctggcttgaagaagacatagagggatggatttctagtcgtaagtctatcaacgatggaaagcttacatga

SEQ ID NO: 450209 - DNA, 528 bp, Serratia marcescens
atgacagaaaagaatttaataccagtttaccctgagctgggtgcggattcacttagaaagctgacaaagattgcgtcacagcattatccgggctgggcaaaagaagaaaaaaggagtggtgaaccgctgaatatgaccctgagttattgtattgaggtagcctataacctgctggaaaagtcccgcacaacccctccactttatgatgctttacccccaccccaaacggtcaaagcccggaccctctacgatatttatcaacgcattacgacccttaaaggcaaaggcagcaccgtagcacagatggtgtcgtaccttaatcaggcgcaatttcccaccccggatgacctgttcgcgaacaaaccactgacggcaacggcctgtaatccatcacgctgggataagcgcgatttggccgcaattatcaccccgaatgggcagcccaccgggctactgagagaatacctgcaggaactgaacaaacgcggtcaacgcaaaagagcacctggagcgaatagcgtgcgttag

SEQ ID NO: 450210 - DNA, 930 bp, Serratia marcescens
atgagcagggctgcgttgcgtcagatcgcgccagtgatgcaaacaaccgtgtttgatgcgtatattggcggtctggctccatcggggcggagaggtatcaccagcctgttaaaccgcagcgccagcatacttaaaggcggtgcggatgctgcagattatccgtgggaacaacttaactacgcctccgtcgccaaagtgcgcgcggcaatgctggataacggttacgccgtatcaacggtcaacatggcgctgtcagcactgcggggtgtggcgcagacggcctttaatctcaattgtgtggatgccgaaacgctggctcgtatacggtcagtgaagcgcgtgagcggcgatgtccagcgcaagggaagggcgctgggcaggcaggaaatccgggcactgattcaggctgcaaaacagcatccgcaatctgtacggcgctgtcgtgatgtcgccattgtgctgatgctttgcggaacgggcctgcgggccggggaactggttaaacttgagcgccgggactatgtcaacggcatcctgacggtgaggcaagggaaggggcgtaaataccgtgaaattcacgtggcggatgcagtggataaggccatacgcgcatggctgaaagtcagcgcaagcgaagctgatggtgcgttgttcggacgaattcagcgtaacggtaaggccgccagccaacctctgactacgactgggttaacgggtatcctggctgagttacagcagacgtcaggtattgcacgtttcaccccacatgatatgcgacgcaccttcatcacccgcttactggagcagagtgtggatatcaacaccgtccgccagctggcaggccacagcgacatatccacgacgacgcgctatgactatcgtggtgaggagatgaaaatcagcgccagtcagcagcttaaatgctggtaa

SEQ ID NO: 450211 - DNA, 549 bp, Serratia marcescens
atgaataaagcaatcaaaaacatcgttcagggcttgtcaatttgcctgattggcctggcctgcgcggcacaaggtgcagacggcaccatcaaaaccaaggtgaagtttattcagttcacctgtaatctgacggccgccagcaaaaatatgcgcgtgcccttgggggatatcaaccgcagtcagttggctaaagccgggagcctgagttcgccggtattgtttgaattaaaagcgaccggttgcccaaacacaagcataggcgatacttacgttacagtgcgtttttcaggcacggcagcgtcggaggatgcttttgctttggatcaagacagtgtggcgtcgggggctgcagttaagatagcgactgtgggctataatggcggttatgattatgtcgttagacccaatgagaattgggggaagagcttttatccaaactctaagggggagataaccatgaagtacgcggcgcaatatgtcgccctggatgatcgcgttacccccggtacggccaatcttaccactcaaattgatttgttttactattga

SEQ ID NO: 450212 - DNA, 555 bp, Serratia marcescens
atgatagcaacagtaagaaaaagaatgccgctgctggcattattcagcgcagcaatgttatccccgccgctctacgcggcggacgggagtattaatgtaaccggtcgggtggtggagaatgcctgtgcggtagccgccgagtcgaagaatatcatggtggattttggtgagcaggcgggtaatacctcattgggcggcagaggttatagtcgaaccataaggcttctggattgtccttcgggggctaagcaggtgaagattagatttgaaggcaccgctattagcgataatgggagtgataggtatattttcgcccccgataatcacgggcagccgggagttgcacagaacgtcgggttcgggatatcccatattgatgatagtactagtattaaagttaacggtgagtcgaaaccttatgaactgaaaaacagcggttccgggagtgagaataacattacttttggtgtgtttctgcattggcttgacaagagcaagcctatcccacttggcgaggcgatgggcactattcagttcagcattctttataactaa

SEQ ID NO: 450213 - DNA, 540 bp, Serratia marcescens
atgatgatagcaacagtgagaaaaagaatgccgctgctggcattattcagcgcagcaatgttatccccgttgttatacgcagcggacggcaatattaacgtcaccggccgcatcattgagcagggatgtaatctgacagttgaaagccaggtgctgtccgtattgatgggcacgataccgcgccaatattttaaaaggccgggaatgagcagcgagcagacacctttcactctctacgccaccggctgccctaaagaacgtggcgtggcgttgaaatttgacggtgcagctgcaggaatagaacccgacctttttgccctggataaagattcgcttgctggtggtatcgcagtcagaattctgggggactacggcgggcatattcaggtgatgcctggcggcaagggatatacctattaccccgagccagacggctcgctgaaaatcagcggcgcggctgcctatattgctacgaaggcgcaaacggtcactcccggcagcgccaacctgaccacgcagatcagcctggtttacccataa

SEQ ID NO: 450214 - DNA, 780 bp, Serratia marcescens
atgctaatggatcttgattttcagggtaggcgcgtgctggttaccgcaggtaccaaaggggtcggcaaagcggttgtcgggctgttaaaacagcagggggccacggtgttaaccaccgcgcgccatatgcccactgaatctattgcagacgctttcgttgcggcggatttgaccacaatcaaagggtgtgacttagtcgtggaagccgttcaggagcacctgggcggtgtcgatatcatcgtccacgttgcgggtggttctaccgcgcccggcggtggctttgcggcgctgggtgaagaggagtggcaacaggaactcaatcttaatctgttgcctgcggtacgcttagatcgtgcattattgccaggaatgctggtgcagcaggacggggtgatcattcacgtcacctctattcagcgtgaactgccgttaccggaatcgaccaccggttatgcggcggcaaaagcggcgttgtcggcttacagcaaaagcctgtcaaaagaagtatcccctaagggggttagggtggttcgtgttgcgcctggctgggtagaaaccgaagcatcggtagcaatggcggaacgactggcgcagcaggcaggaacggactacgagggcggtaagcagatcattatgaatgcacttggtggtattccgctgggccgtccctcaaagcccatcgaagtggcgaacctcatcgtcttcctcgcgtcgtcctgtgctgccactatcaccggtacggaatatgtgatagatggtggcactatcccgacggtgtaa

SEQ ID NO: 450215 - DNA, 327 bp, Serratia marcescens
atgagtaagttatatagcccggaatctgccgcaagcggcgtggagcaagtcctgcgcgtactggaaggtcgctggaaactaattattctgtttcatctattcgacggaaaggtccaacgctattctgattttgaaaaactgatccccgaaatttcgcagaagatgctggcgcaacagctgcgacagctggaagctgatggcattgtgtcgcgtaaggtgtatccccaagtaccaccgaaagttgaatatcgactcactgagtgtgggcaggcgctgtgcccagctctcgatgcattgctgaaatgggcggaaaaacgcgaggtttag

SEQ ID NO: 450216 - DNA, 1059 bp, Serratia marcescens
atggctggtgaaacacaaaacatatcattaatggcagataaagtttcaagcgagttgtttcgatggtttaaatgggaacaagtcggcacatcaaatgaaaattttcagtgcttaaaaaccaaagagcatggaacaaaaagtggcacccacccaaatgatgtggtttttaaataccacgatccttacctaaatagaacagtatttttcaatattgatctaaaaagttatgcgaagggctcaataacagctacatccatgagaaatgccttatcatcactagctaattccatcgattgtgcggaaggaagtaaggaatggaaggagcgatactcatacataacaggctcatcagaagtcagaggccttttatttgcatataatcacgatgggaattttgatcagttattctatgatgttttccacacggtaaaagaagcaccaggagtgaaggggaaaagaggcataaatttagacaatctacctttaaagcaaggtcaaaagatacatataattgagccgagaaccataaattaccttcagtctgttatttctgatcttacgaagctcagccacctgggtgaattccctcaaggtgataactatcaattctattatcctgacctatccctccataaagtaagtgggttaccagagaatctgcctgccactatagaatctctgacaggaccattttttataataaaacatggagtcgtgaagcaatatattcaaaagaaagatgccatagaagaaacctttaagcagggatatattatctactataatggcgaaggtaaagacgaacacgaattcgtatatatatttgatacactatcaaaatatcagctcttggatgggaatgaaaagataagaatcagattaattcatccaaacatatttaaagacgtacgtggcatatataatcgcgcaatagaaacctattcccgagaatggggttttgataatcacaagaggtcaatcatcgaggccattgattttaatgttgttgattttacgaagccgagttttagttcaactgaaattggttgggagcgataa

SEQ ID NO: 450217 - DNA, 1119 bp, Serratia marcescens
atgaaaattggattatacagtgtaactgacaaagctttgtttgatgcattaaatcaaacaaaagtaacacatgatgatatgaagtctctttttttcaaaagagggatgattatttccaaagacacgaaaagaaaggccctcgctttagatttctctcgctacttccatggatttgatgactacaaaagactttccgaaatattagggacagtgggcaggaaagagagagtatcctcgaacataattaacacaactcttgaaaaagataacattgaggctgcaataaaactcgtttgcgaagacttacaaaaagatggtgaccaaaccgactttatttatacagacaaaggtattgaagtaaaaataaaatacgtaaaacttgactacaaaatgagtgagtttagacagtcatcttccagagaagctactatccttatagaacagaatgatagtggtgagttcactacacggttccctcagaatgcaaaatctagggaattcaatgagaaactcgtaaataaaataaaagaagaaaatactgacactacaatatcagtagatgaaataacacttgagagcgtaaaagatcatgaacagcgaaccgatttctttaaagagttaattgataaaataccaaaccacactcggattgacgtgtcagatgtatatgtcactcaccctgccctagaggaaaggaataaagcgagcgatatcgatgatgatgatgacgaagatgacaacaacccaactgttgacacaggttatcatatatctaaagcatcgttaaaagggcggggtgttttagggtcaaaagaactaaatgatctgctatcgcagggattctacataacaaaaatagtttgggtgtctgttgtaacaggactcattgactccaataaatatgagtttgaggcacaatttgtagatccagacaactgtactcttttctcgtatttaatcaggggtcagtataaatacaagtctgttggtgaatacacaaacagacaaaacgtagaaaaagacaaggaagtgttattatcctcactaattgagagtgccgcacgtgagatttcagataaaattatcgaaaggaattccctgaagatcaacgctgcataa

SEQ ID NO: 450218 - DNA, 678 bp, Serratia marcescens
atgaaaacaaaatggttcaatgcaaatttccaaaaatcttatgatgagatttacaagtcaattatagaaaaccctttcaacgaagaaaatgggtgggggttcagcataaatcagtacgatgatgatactttattcgcaaaatacattgagcgcatagagttaaaggaaataataacagacccttacggaaacgagactgcctttgaatattttaaattcatacagtttaatttttggctaaaaaaggaaagcactaaaagctatcttttagtaatagagtccgcaccacgctctattaaaggatttatttccaacgtgatgaaagccacatcctctgactttaatgtatccaacctcacaataaaggtggaggacttcataaatttcatcaaaaatagatttataaacgtcaaagttcaaaaagcaaaactgaaaggtctaacctttagcaaacatacctcaggtgatttagaaatagaatcatccgtagatgcgcttgaggaaatagatctggtatttgaaaaatcaaacttcaagatagaaaaagcaaagttgttaattagtggcgatagtggcatcgaagcaattgaggtgaattcaaatggctcaattatatttacagaggacacatttaaggacatatttaaagccattgaaagcatcaacttacaccgataa

SEQ ID NO: 450219 - DNA, 330 bp, Serratia marcescens
atgtctcttttctcccttcgtcctgacacaacgctgcggctgcccgttttattgggcagccaatttgctttcaatatcggtttttatgcggtcatccccttcctggcgatattccttcacgacaatatgcggctttccagcgccattatccgattggttatcgggttgcgtaccttcatgtttatcctcggtgtcacactctctgacctgtacggcgcaaagcgcgttatcctttggggctgcatgatccgagttgcggggtatctattgctagagtttgggcagtccctgaggcccatcattctggtggcgcgtaccttaccggcatga

SEQ ID NO: 450220 - DNA, 609 bp, Serratia marcescens
atgtttcaatttgtttcgatggatgttatgtctgaatatgcgcttcttttcctaggcactgtcctggtcaacaattttgtgttagttaagtttctagggttgtgcccgtttcttggagcttcacgtaacattgaaatggctatcgggatgggcttggctacaacgtttgttatcacctcggtgtcaattcttgcctggctggccaaccatctaatgcttatccctctgaacctaacctatctgcgaattctggtttatatcttggtgagcgctgtgattgttcagttcacagaaatgatgatgcgtaaaaccagtccaacgctttaccgtttattggggatttttcttccgcttatcacaacaaactgcgctgtactcgcagtacccttgattagtggaaacctcaaccatacttttatgcaagcggctatttatggttttggcgcttcagtaggattttctatagtgatggttttctttgctgcgatgcgagaacgcctatttgttgcaaatgtgccagctccatttaaaggggcatcgatttcacttatcaccgcagggctgatgtcactggcatttatgggttttgcaggcttggttgagtcctga

SEQ ID NO: 450221 - DNA, 543 bp, Serratia marcescens
atgatagttactacgacaccgcgactcattattcgggcattcaatgacaaagatgcctctgcactattcgattacctgtcatcgccgcgtactccttgctttcaggacgaaaagttaaactcactggaagaggcaaaagatgaagttcgcaaaagagcacgcgatgccagccagtttgctgtatgcctcaaagagaatgatggggttattggacacctcttcgcagacaatgcggaagagccagatagaaatacttggtcagtaggttggcattttaatcagcgctatgaaggcatgggttatgctacggaatccgttgcggccctgtttaattatttgttttctgaaaaacaagcccgacgtctttatgcctatgttgaagactataattttggttctcagaggctttgtgatcgtcttcatatgcgacaggaagggtgttttaaagaattcgtcgcgtttagaacggaagagggtgaggaaagatacgacaatacttttgtttacgcgattctgagaaaagattggaagtcaaatggatag

SEQ ID NO: 450222 - DNA, 1218 bp, Serratia marcescens
atgcaaaaaacaaaatgtgtgtctcttcgttcactgcaggcattgtgcctaacaagttttttcatcgctgatgttcgtgacgggctgggaccttttctggggatcttcctgacggaacatcactggcagccggatgatattgggctgataatgaccgttggcggaatcgcagggttgctgacaacacttcctgcgggagtcatcacggacaaatccagttgtaagagattgcttctggcgctgctctgtctagtcatcactacggcgacacttctgctatggttcactcatggaaatgccatggtcgcgttattgctcattatcagcggaataagcgcatcttttgttgggccactcatgacgggtataacactgggtctgacagggcaacatggattcaacgcccaagtggggaaaaatgaagcatttaaccatgcaggtaactttttaactgcgttgattgccggggggcttgcctggttctggggcgttggggggatttttatactcatggcgtgcacgacattgttaacgctacttgcactgatggccatacgcagcagtgatatagacaacaacgcggcacgaggactggaatctccgactcaacaacacgtacctgatttcagtgtgctcttcaaaaactcggcacttttggttacagggctgacactgttgttgttccatctggcaaatgcagcgttgctgccgatgctcagcatgaggatcgcctctactcctggttctattaacccgggtttgtatgccgcagccactataattatttcccaggtagtgatgatcccggtagcggttcagatttcgggacagatagagaagtatgggtactggcgattgattatgctggcgctactgataatgcctgtgcgtgctgctctggcagcaactaccggagatcctgttatgatgataccggtgcaaattcttgacggattggccgcgggcattctgggtgtggcagtaccaagcttcatcgtatctctgctgcgcggaagcgggcatgtcaatgccggtcagagcgtagtgatgcttatgcagggagccggagcgtcaatgagtccggcattgacggggatgatagctggtcggtactctttttcagtggcgttcggtgccctcagcattatcgccatggcggcactgcttatctggtggcgatatacccccgtgctatctgcactaaataaggtagaatag

SEQ ID NO: 450223 - DNA, 1797 bp, Serratia marcescens
atgccgacgatccaactaccgttagctaaagggctgggtaaagactaccgcaatgcggattatgttgaccaactgcctgtcaacatgttggcgacgccgaaagaagtcctgaacgccgccggctatctccgctcgttccccggcattgaaaaagctgctgatgttgctggggcgtctcgtggcgctcaatttaacacagtgcaaaatctgccatacagagtcgccgggggaaagctatacaaaggtgaggaaatcagaggtgacgtagaaggatctgaacgggtcggtttagcgcacagcaccacgagccaggcagtatcggccgaaggtgtgatgacactatatcggtatgacgggaccgataaggttttggacaactggccagagcgcatcgtcgagaaagaagggtatacccgcacagttaaagaatggactcataccgcaggtaacgacgactttatccattttactgttgacgatattgatggcgagaccaccatcactattaccccgaaaactgctggcggcagtgtaggcacagcaattgacgtccctgagttcatgtggaacgtcactcagtcacaagcaaagccagttgaaggcaccccatacctggcagaccttttagtgacagggacaaaggctgatggtgaaacggtaaaaatcacatacaccttcaaccctaatcagcctgaaggggcgccagctgaaagcattgttgatgctacaactttcaaggcggtgcaagtagttcctgaagtggttagggtgtatgcgcagtatgaaataggctatacgcgcgatatctgtcgaaatcgtggcaggtatatttgggtgaaagacggaacaaacacgttcggggttaccgaccttgacgatgagtcacatcctgatcgttttcgccccttctatagcgcggagtcccaacccgatggcctgttaggtattgccgcctggcgcgacttcgttgtcgcttttggaagcacctcgattgagtatttcggtttaaccggcgcgccagatgcaaattccgctatctacgtcgcgcaaccctccttgatggttaacaaagggatagcagggacatattgtaaatgtgaattcggggattctttcgcaatactcagccaccctgcgtgcggggccccttcgatctatatggttaactcaggccaagcagtgccgattgccactgcaacaatcgaaaagatcattcgagaataccctgggtgggagcttgctaaagcggttatggaagctgttcgattcgattcgcatgaactcctgcttatccacttaccgaagcatgtgctttgctacgacgcaaccgcctcccggagtggccagcaatgggccgtgcttacgacaggtgaatcaatgggcggtccgcacactgccatcgattacatattcgatagcgacacgataaccgtagctgataagtcggaacctcgcataggccggctacgtttcgatagttcagcgcagtacggtactaaaactgaacacattctctataccccgctattcaaagcggataatgcgcgcatttttgactttgaagtcgaatcttcatcaggagtttctcaatacgcagagaagttatttatttctgccagtgttgacggggtgggttacgggcaggaaaaaaccatcccttggaatgcgcctttcgatttcaacaggcgtgtcatgtggcagcgatgcggaagggtaaggaaaaacatcggcttcaggattcggatagtaaccggcgctcctgtgtccttatcggcgtgcagtatacgagtggaataa

SEQ ID NO: 450224 - DNA, 657 bp, Serratia marcescens
atggcagatgacaaattaaagacgcctgttgaaattcagcaggtgcgtgtcgatgcatctattctccctctcgggttttcgcaggcgtacaaactctacgttattcaatccggctctgacctaggaaacaccgctgcaaaagcaaaccaagccgctggcggtgcttatgacgcgcaacaaaagaatgatgagcaggacaaagtgttgaaccagcatgctcagcggatcggagctgcagagcgcactctcgccgaccatgatcaacgcatttcccaggctgagagtgaaatcacgagccaggggcaacgtctaacggcggcagaaaataatatcgccgcccaaggcgatgccattgagttgatctcggctgattacatatctaagtcggtcactgctcttcaggcgctgtccagcccattaagcgtagctttgtcctacagcgtaggtggagttcaagtcgtcggcccacgccagacaggatggactgctgcggcgggcactgcgtttctcggcgcgtttgacgcagatgcgtcgttctctgccggagcaacgtactcgcaagccgaagtacagtcattggccgatgcgctgaaagagtcccgccagcgcatcaaagcgctggaagatatggcgcgaactcacgggatgattgactga

SEQ ID NO: 450225 - DNA, 1089 bp, Serratia marcescens
atgtttatccttgaatgtttcattcattctgaggaaaacgttgagtctgttatttcactcattaattcagatattactgagcataccaaagaaattatcattgaaagcatggattttgaagttcagcagctgtcgacagttgaaaatatcaggttatctgtagtagatggagcctcattcactgtttatgacctcttgtttaaacatgggcgtgtcgctgccaactgggataacatctttgactatatgtttaccgatgtcgacgatgagatattgtgggagttttttgctcaccatccggaggcgctttcaggccataaggtcagtgttcctgaggagtctgttgataatgttgtaaatcacatcatttcagcagcagataagccagacgtgttgtatgcacagttgattagcgtgctgcctgtgagcatcgaccaagcagtcagtgacctgccactgacaaaatttaaagcactttgtgacagcaacagagttttgttgtcagaagcgctctataaagacgtactcagtatttatgaaggacaacgtcgcaagggcctcaatgagtgtctgtcacttatgattagaaacaacgttgctgtttttgaaagtaatattgagttttacttgcaagatgacgaagatttcgataatgaacttattgagcttgtgctcaatgatgacgatatagcgttgacgactaaagttccaattatcgacattatctggccgcactataccaatagtttcttcgaccatataagcgtgaatagtaagatcagtatggctcttcttcttaatgtttcggaagatgacacccggcttgtgttcttgaatcatcttttagagtttgaaaaactgccttttgaatacatcaatcgtgcacttatggccttcgtgtcggaagagtacaatttgattgcggataaaaccaaacgagcaaaagtactcaaaactgaaggtaatgagatccttttaaagtatttaacgcatcgctactttatcagcagttataaagacaagggggaatccttcgaagtgtatcattaccgtaagatgtttctggacgaatcaccagaggatgattaa

SEQ ID NO: 450226 - DNA, 516 bp, Serratia marcescens
atggcaatgactaagtgcaaagagtgtaaaaaagaggtgtcagacaaagcgaaggtttgccctcattgtggagtaaaggaacccgcaagaaatctcggaaaagaaaccgcacagggttgcttggggttagtgattttggtcggtattctcttttttatcttcggcggtgatgacgataaggacaaaacaaagccagaaaaaacggctgaggctaaagagtgcgcagcgacagacgcccaatgtttattcgacacttacatggtcgacgcagtaatcccttgccgtaaactggtagagaagtcatcgaagtacgattttgagtggacggatgggatgcttacgccgatgtttacccacatgcggaatgactcttcaaaaaaccaaatcacttatattggtgataaggtgaaatttaccaacggtttcaatgctaaatcgacgatgacttattattgtaccttcgactggaaggcaaaagaggttgtcgaattcaaaatcgatactggcaaactttga

SEQ ID NO: 450227 - DNA, 1713 bp, Serratia marcescens
atgattggcgaatcgctatcagtaaagcgcatttccgaattagaaaaagatgagatcgtcaatgatattgacgtatttccgctaaccaggccactcggtgatatatttcgcacgattggcggttcattatcacaaataagagacttatttaactttaaatatgccgttgagaccattgatgacggtctgttaaagacgttaaacggccaggtttttcatgtgtggcagttgcccgccaaaaaatatgttaccgaatatttgaatgacaatggtgtagcagttcctacgggtggcgaatttttaaacgtaaactctgttggtaacattccctcacctgattattttatggccccgttatccagcggtgacattgttttctctgttacagacataggtggcaaggctgcacttacgatagataaagactctatcgtagaagtcattaatttacttgtcagctctgataaggtaaggcttaaatctggtggtgtacttggtgatgtggttaacacattatttgattctgttgatactgcctttgctgttaccgataataacggagctttatcattaagagtaagaaccgatggcacgttagaagttaataagctatccatcgatgataataaaactttccttcctgatggccgcacattatctaatgcgttgtctcaattagatgcaccagattttgatgttcagattgttaacggctcgctttattctctggatcttcacacacaaaaacggcatttaattcaatcagatggcgttagttctgccgaaataaaatcaggtaatgttctatttacggctggaaatgactatttctatgcagagttaccatccggtaaggtatacaagcgctttccctcggttcggcttagttgcatcggcgactctctcacaaatggctatatcaatggagtagattctgacgcctatccgttcaaactcggcgcgctgctcaacatcccggttgaaaaacgtggatggtctggtcgtgcaagtggtgatatcgcgctgcgaatgggcgccaccgtggttaaactgacggtcaccggcaacactataccggccagtggtgccgttgttgttacgctgattgacccggcaacgggctaccgctcaggaatactggagaattttccagaaggcactcttgcaggtgtcaccggcacgctgtcacgcagtgaaagcaatgtctggacgtttacccggaaaacggcgggcagtgccgttccgtgccccccaggcagcgaatacctgcataacggctacccaacggccaacgatggcatgttaattacatggatggggcgtaataactatgagtccatgttcgcggaagtaatgcgcgaccaacagcaattcacccaatggataaccacactgaacaaacagcaaatcgtgattggcatcaccaacaccgccgacgagccacgcggcagcgccaactatgacgccatccggcgcgttaacagcgagctggccgctgcctacccgggtcgctacttcgacgcgatgcgctatctgattgaccacggcctgagcgatgccggtattacgccaacagcgcaagatttgacggatatcagccaggacattatcccgtcttcgctgcgtatcgataacacacactttaacgcggttggctatcagctgattgcaaaccagctttatcaactgatccaacaactggggtggaaataa

SEQ ID NO: 450228 - DNA, 903 bp, Serratia marcescens
atgtcaaaaggtttaaaaattgtgctgccaatgacgtttactgacagcagtctgccggtgctgagtaacgatgccattttgtcaaaaggctcgctgctgctcattgacccgacccacccgctggaaacctggccgaccggcgtgccagcggataatgtcacgctgccgaacattgcagccgagtttgccagcaagttgattagcggcaacatcgggccgacgcttgtcacaatggcggggatgaatggaggcattgagcgcacgactaaaggcgggctgtatgctctagttgacgcagtccaaaccgttcaaagcggcatcaatatggttgcgccgatttcaattatcgaatacatggttgcgaaccagtctcatgaattctacgtctctatgtggtcgcacgtaaccaagccaagtaacgtgacggccacagctgaggtgcaggggcacattcaccgttcatataactatggtgaaacgtcttatccgcggggcggtgtgttctcgctgggaactgtcagttctcgtattgaacccagagacggtaatcgaagtgggtactttgcagataacatcaatgcgatcggttcgcgcttgatggctgtctccggtgttcccaatgctaaatcatcggcagcagacccagtgatgagggcatctgattacaccgctgaacattatcgggcgttggtatcgatgggccctgctaatgctgaatcgaaatactcggcagttgatcaagctaaacagctacaaagctgggtgttttatcgtttgtacattgaggatctaaccgtgtccggtcgaacatttgattcggttcgtgagatcgacctgcgactctataatactgaattgaattcttccggcgggcgttatcatggtgatacctggaacgactag

SEQ ID NO: 450229 - DNA, 207 bp, Serratia marcescens
atgagtacagtaaagcacgcttcagtcgtcatgcaactcgatgatgggcgcatccttcaacgtccgctaactatcgaagagcgcatgttcattatgccgttgcttcaatacgaggggatcttaaaggccatcccatgtgaaggcgttgcattcagcgggaaagagattaaaccgacagcagcgccggagggcggcaatggtgcataa

SEQ ID NO: 450230 - DNA, 957 bp, Serratia marcescens
atgagtttcgattataaaaaagcacgtgtagactgccacaacgattttcccgctagagttttatttaaaacagaagaaaaatttaaggcgctaattgataaaaaccatggagcagcacctttcactcccataaaaatggcttataatgatgatgtcacatttcaaacatgcattgggcatttaggagatggtcttgagtttttgccttttagaccagactatatgtttgatcactgctttaaagtaattgatgaagccggaaaaagacaattttctacccaaggcggacttaaagggattgtacagggagtgggtaataaattgctcagcttacctaataaccgctggggggatataattgaattgcttgcctgtaatattccagtgttaacaggttattatatcacaaaaaggatatttgaatccgaggctcagcgcatagtaaatgataaagataacaagtctaggctggcaaaaagagcaagggcatgtttccactcaggtcaatatgaagaatttattaaaaagtttgcttatgattctaacggtgtgttttcaatttcagtcgctctagatagtgataacttgctaagagctgcaaaatttttgatgatgatgcttaaaagtcaaaaaggcactaaaactaaaaactcagtttttccgttactagatctatccaatggtggtaaccatttctcacccaataaaaagtgcgaattcattacatctgttatattgtataatattagaaatgagagggctcacggttcgacattaagcccatttagaaccagtaaatccgaaattagtagatataaaggttattatttttcaatgctctgcgcttatataatttcacttggtatatttgaattaaatggttttggtggctacacatcaaatgacgtatatagttgttgtgaaataaacataaaagcaatgaaagattttttttag

SEQ ID NO: 450231 - DNA, 1734 bp, Serratia marcescens
atgaattattcagtcattctgaatcatttgaacgaatgcggatacaaggtatccgcaattccatcgaagacggaagaaatcggatgcttaaccgtcgagctggaaattaatggtctgccagttactctttggcatttcactgttgctgagctctcaaaaatgcccagcttttttcttgccgacccatcaacattgcccagactcgcacataccgcattcaatcctggaagtctatttgcaagtatttgtgtgaatgtccctgatgctgtttccgttaattttgaacggcctgagctcgcttttgaagaatcgctcaaaagacatgttgctttgttaactcaggctttgagtgatagcgaatggaatactcaggagttacttcgggaatttgaagctgggtggttgagcattgtcgagaaagacaccaccccgcttctttgtttaactgaaagcgaaacagcagaagagttgtgcgttcttaaaccacgaaaaggccacttaggcttaggccaatattttttaggatattcagaaggttctgtttctaaaaatactttttcaccaattaatcagattctaaaggctcgcaagtcctcaaatggtataggattctttgtgccgttaagtgtggcaaaaccagcaccatggaaaaaggatgaacttgttgactggtatcttgatctgctttcagaactaccggtggatgtgctaaccaaattaacacaacaatttgctcaaaagcgttcgtatgagttttggttagtctttagtgctcgaaccccttcgggaatcacatggtttggaattcatttttcccaaaagcactctggcaaaggtcgaaaaacgttgcccttcaaacagtctcatctgactgaatggttacttgaacctgtcgaggtattaacttttaacaaagaaaggcttatgcccaggagtggagcagaaaaatcccttcttaacaaaaaagttatgatagtggggtgtggttctgtgggaggagacgttgcagataaactcgcagcttctggtgttggctctttagatttatatgatccagatacactttccctaaataacctataccgccatattttgcctccgatgtatgtatcattccataaatcgcaagcattgtggcacagccttaccagcaaatacccgtggctggaagttagaagttatactaacaagttgctggatttaagaagtcgtgaattactgatagagtatgaccttatcatcatagcgataggagcacctactcaggagcgattgtttcacgactacttgaataacaaaaaaattaatgttccggtaattaatacatgggtcgaaggatatggtataggtggacacgcagttctggcaattcccgaaacaaaaggttgcttacggtgtgcatatgtcgaccccgctgatttttcaagggggctggcttctaacctgaattttttggctccgaatcaagatttaactaaaaatcatgccggatgtggcgatgcatttctgccttatacctacatagcctcaactcaaaccgcgctcattacggctgatctcagtattaaatgcctacttggtaaggttagggaatcatccagagtgagctggaaagggaactctgaggatgcaacagtgaatggattcaaactaagcgggagataccatgcattcacccggacattagaggtgctacctttgctcaatgatgcgtgtgatatctgcaatgaataa

SEQ ID NO: 450232 - DNA, 1029 bp, Serratia marcescens
ttggttggtggttggacctttaacattgctttctcagaagtttttattaaaaaatatagtgatgttattgatggggtaagtttaacttaccaaagatattctgacattgctctactagttagtcttttttttgttgctatcggatttattttatggtgtatttgcgtatttctagcccttcgggatttgagtaagcgagatattgccctaatccgtgcatatgggtttgaaaatattgatccgcaagccgcggagagaaacctctctttcagagagaaagcaaaaattttgcatgtggactttaaagcatttgattcaagagacaaaaataacaacttgatcaaagcaagttttattcggcaaacgattagagaaagaatacatcatactggtgcaacaaccgcttatgttgctgcacttggtagcgtaccatatctatttatgtttggtagctttatgacggatgggcatttgcctaaaaagttatttgattttgaccgagataaaaatgctttccatccccttgatgctcctccaacaaatgcaaatttaataaaatgctacaatggggaaaaaattactgacagcaaaggtgtgccatcaaataatgggcgagtcataggtcttgcaatttctttcacgatggaaattttagaaaaagatcttcctgatgaatttattggacacactttgcacgctcaacttaatacaggattccgatttgataatcttcctgaggaggaggaacaagaaaaaatagtaaatagccttagttacattatctcagaattaaagaaacaggcagatgaagtgcatctttttatttctgctcaagcatccgttgtcgtccggttgggtactctctaccaggagggcttacacggtgtagtaacaatatggcactggaatcccgctgccaataaatatgaatggtctttattaccaataacaactccaaaagcttccggagccttcggtttgatctgcctatactccaaccagatatcacgtactttctttgagatatag

SEQ ID NO: 450233 - DNA, 708 bp, Serratia marcescens
atggattggccaaaggagtacagcaagacgactcaagcggtaagagatgcggcgtataaacactactatgttgaagcaatcacccggtcggttctgctaccgggacaggagaaaaccgcttatcacgatggactactaacgacggattattaccttttcctgtttaccagcagggagaatccgaaccttacaggatattttacctgtggcttgtacgcagcaaaggggtggttcgagttgaacggacagcgacctgaggaaatttcatcgtacaatccccttacgggcgagtcctccggtggtagtaaaaagagtggctgcgggattactaaaccgctgaaagctgaatcagatccaagaatgaaacgtcttatcagggtactccagacgttcatttctctgacggacgatgagaaaaggaaaatcaaaggtgaatcaaccacactgactgttctacagaagctcataaaagcgtcaaaagatgcccccagcacgtcaaatatcaggtcggtaaataccactctgtacaaagcgctcaaggatggtcgtcatggtggtgcccgtacattcactcaactagttgatcattacgaggttcttcttggtgtgactttcaagaagatatctattgatgatttcaatcaggagatcgacgatacccgcaacaagtcagcgacatatccgtatatccctttggcatcattctga

SEQ ID NO: 450234 - DNA, 1371 bp, Serratia marcescens
  misc_feature (1292)..(1301): n is a, c, g, or t
atgaaaccatatattacgcacaataatatccttgtaacagattcaacgctgaattatttcaaagaagttgttttcagcattccttataatggtgtgccaagtttaaaatgtccattttatcgtaatatagcagtatttcttcagcatgttatttgtgtcgctacttgtagtcgtaagaacaagaagaaagcaaagattaaagcgaataagaaatggtcttattctgtgcctgtaccatttgagctgggtcgggagaaacttcccggcgtatttaagaaaagcgggtcgaccaatgagcgtgcaatcgaggcattggcaagcgcgggagtcatcaaactaaccgggtattccaatgttaagcactcatgtcgggaatatgctgtttctcaacgttttctgcgtaagttgtttggcaccgacagagaggcataccttagccgcaaggatcgttaccattatctgactgacattttcaccaagcgtaaaagttactcatttgacgagctgattggtgttgcgatcgaccgtgggcagaaggctaaacatcagcagtctaaacgcgatatccctaacgctgctttcagggaacgggttgtgagtgtatggggcaaccttgagccgcttgaaatcaatctggatgcactgctggattactataacgagaatcccacgaagaagaacaaaatattcatttttaacttcctgtcgcgactggctgaaacaggcgtgaatttggtaaaggaatcgccattgatagtgtcctacaggcaatcgtataaaaccgcatacattggcggaagatcctttgaggttggcactggctttcaaagtctaccgtctgacatgaagtgggcgtgtctggctcgtggtcacaactatgacatcaagggatgccagcttgagatactacggcatgagctgttgagtattggcgtctcggacaaatcgctggaggtgctggaaactcaatatatctgccgggtgttacgtgtcgcagaggagttggtaaagcaatttaggttctccagcgtattcaatgccgggttcgttacgctatcgctaaaatccagtacccgacgcttgttgaatcgtgagctaggtaaggtcgaggctgagcgagtactgaaacgctggaagcaccttctgaaacccctgaggcgagatctggctgcgcgtaaacgaaggaagtcagatgtgatgcgccggaagctgttgtcgcacatgttacaggggctggaaagtcgggctgtatacgattatgttgccaaccataagggcgtttgtgcactggnnnnnnnnnntgggtttgtttcatatgaggaggtaacggactggtcacattcatatctgttgattgagaaaaagcattaa

SEQ ID NO: 450235 - DNA, 810 bp, Serratia marcescens
atgacgatgtgtcgggtactgcatgtcgcccgggccgggttctacgcgtggctgcacaacccggtctcggcgcgtgataaagataaccagcgtctgctgacgcttatccgtgattcatattcactgagcggaggcgtatacggttaccggcgggttcatggcgatctgaacgaaatcggggaaacctgcggcaaaaaccgggtgggccgtattatgcaactgaaccggattaaagccatgcggggctataaagcaccacggtgtatcgccggccgaccttcggtggttgctcctaatcgcgtacagcggcagtttaccgttgtccgggccaatcaggtctgggtcaccgacatcacttatatccggacctggcagggatggttgtatctggcggtggtcatcgacctctttgcccgtaacgtggtgggttggtcgatgaagccgaccctctcacgcgaactggcactggatgcgctgatgatggcggtctggcgacgtaaaccggacagcgaggtcatcgtgcactcagaccagggcagccagtacggcagcgacgactggcaacggttctgtcgggccaataacctggcacccagtatgagccggcgtggcaactgttgggataatgcggtggccgaatcgttcttcagttcactgaaaaaagaacgcatcaggaagagaatatacaaaacccgggatctggcccgggcggatatcttcgattacattgaagtgttctacaaccgggcccggcgtcacagtcaccttggcggcgtcagtccggaggcctttgaacgggcctcgtcgtga

SEQ ID NO: 450236 - DNA, 3528 bp, Serratia marcescens
gtgctgcatctacaaccattcgatgacgaaggcatccaggcatttctgcgtgtataccttgattcagagcgaatcatcaagctccagtcacacctcgaacgcttcggatttacccattggcttggcaacccgcacacactaaaactgattgccgaaagtgctgcacatgacaaaatcccccgcaatcgctccgaactattccaatatgcagtggaacaattggttagcgaacataatgacctgaagacaaataacgctttcgctcttaaggatgctttagacttagcaggagctgtttgtgcagcacttcttcttacaggccacacggctatttctcttaaggcaaaacacacccgtgttaccgatttccctctcgtcgaacttgagaaaataccaaacggcaacaggatcaaagatttgctgggcactcgcctcttcagggcgcttgataacaatcgcttcgaatgcattcaccggagcatcgccgaatacctagctgcttactggctgacacgcgaaccgttggctggcagaaatcagcgacgactgcttggaatgtttcatcagcatggcatcgtgccctctggcctgcgcggcattcacgcatggatgtgcatgagttcgaagctgtcccaaagtgtaataagcatggatccagccggtgtcatcgaaaatgcggacctgactaagcttgatattgaatcatccaacttgctactagaacgattggaagagtgctatacgagtaatccaatggcactttcgtggtggcaccccggcgccgctactgaactggccaacaaaggcctagtggaaaagctggtaaacatcgggaaagatcgaaataagccagtccgactgcgcctttttgttcttgaatccctagaagcagcggcagaacttgaaccgttcaaaaaactcttgttggattgtatgcacgacagcacggaagattatgccattcgtcgagcagcactacaggcattgtttaatttcttaccaagaggtgaagttcttgagtgcattcatgtcctgtataaatatgctgatcccgactccgttagactagccttcgaccttgcttgcttggtcaattttgacggtgtcgaaaataaactacttgctacccttataattggctgttcatatcagaatgaacgcttcggtgagctggataagttcgctctgctgaagtctagcttcccggtgccgcgatgtccttcactgttggattatctgatcgaccaaatgccccaagagccattcagtaccgaattttatacccgacaggataatgaatttcgcgaattgcttattgccttaaccttggcggccatgacggcgaataagttatctccgactcaagcttggcgtgtgttccgtttcctctattcagttccactttacacattcctagatttctcgataactaaacatttggcccaagatcactcatttcgccaagccatacaacaatatgtgatgctcgactgtacagatgatgagagccttactcaacgatatgagcggctgttagagctaggtcttgattgttcagaaagtgatataatcgcgatgttggcgagactggatgtcgacaatttaaaggacgagcgctggaagacactggtaaatctcgttcatcatgataacgagcacggtgttaaactgcgtgccgctgcgttactttttgccggcgaccacccgcaaagacgagcttgggcaaataacatagaactagacttcagtcggcaagcccgccgagaactcttacagcacgaaaatcagagacgcgaggaacagagccgtcacgacgcaacagccatattggatgagcataagacagcgatggcagccataaccttgggcgatcacagatacctgatgaaaccggctaaaacctacctgcacggatctcgttataccaatgatgcagaagacgggtatgccgctatagtgcagtgggctggtgacgaattggcaaccgcagtttttcaaggtttcgaaaactatcttctgaacattcaaaaacatctatcgtctgaagcgagcagccagcacttcagctacctcagactgtacgaacgcaacatccagaacatggcagagctttccgcagagatcatcttggctgcagcaatcgagcatatgcgcactcgaaattctttggcatgtttagcggacgaagcgctattggctatctttctttcaactaaacaactcctcttcgaggcacccgatacgctgaaaagactggtatacaagacgctaagcgaacgcaatcttctgatggaggcaataaagctatggttcgaacccagtatatttagcggcgagaacatcccacagatttttccagatgcccccgaactctacaagcaaaccgagaaaatcctaacgacgttggcaagcaactggctagagtgccagcctgacctgcccgcgcactctcagcactggtgcttgcagcatctggctttcaatgagccagacacacttcctcgcgctctgcggcattggggaccagaaaattctcgtcccatgccgttattcattgaagctgtgcaactcatcgtgaacttcgaggaaatgtcagtacatctcaacagcaatcccgtgaaccctgaactattgctggcacttagcgagtttcagatgctcacgccaactgtggccactacccggtggatcatcgaaagattcaggggtttgtaccccatgaccggctggctcaagggcaacttgcacgatgaaggctggccaagaccggaaaatgaatacctgcaacgcctgattttccagctaagcgaacagcaaaccgacgaagcgctctcggccatgaacctcctgtgtgaagtaccctgtgatagttacaccgatttcctatgtgaacgccgcgcccttcaacgtcagcacagcaagggaaaggcataccagcaacttacattggaggcattgcttgcaatcaagtgtgacgacccccctcttaccggagctgattttttggccttccttctcgaacaattggatgttgtgcagcagcggatcaaaaatgacgagatcaactcttggaagctgttttacaaggacgatggcgagacgccacaaggagaagaatgttgccgagatcgtttgataggaatgtttgaaaatatagcggagagtatccgattcgtccccgaaagacgcgtggtcgaccaaaaacgagtggacatcatgtgcgaaactaggggtatcacattacccatagaaatcaaatgtgcttggaaccgacaactttggagcgcggccgatcagcaactcgatgacgggtatgtcagcttccacagaggctcaaatctaggcatctacttggtgctgtggtttggcgagcaatctaggcgacctccacgcccaacagatggaagcttgattcccagcaccccggagcagctaaaggcaatgctggaggagcgtagcgaagccgtcaagagcggacgcgtgacggtagtggtgatggatatgacacgcagcctgcgtacgaaatga

SEQ ID NO: 450237 - DNA, 267 bp, Serratia marcescens
atgaaaaaaagaaatttcagtgcagaattcaaacgcgaatcagcccagcttgtcgtcgatcaaaactacgccgttgctgaagtggctaaagcgatggatatccgcaaggccatctacaccacgaatgccatagaagcgctgaacagcgtgccccatgtagtcataaagaaacgcaaggtgttcccaacggacgactcaatatggacggttttttatctggcgatcaaggatgtgtccaaaaaatggagtataccgctccagaactga

SEQ ID NO: 450238 - DNA, 204 bp, Serratia marcescens
ttgcgcattctccaacaattgctgagtaaccagctgttgctctcgctgttgtataagcgtttcctgaagcaacagcaattgctcttgcatagaagaaatcattgcctgcttttcttcgttatcgatcatcagatgatgctcagcaacacgaattttttgttgcatatcatcctgcttttcattttcttgcttaacctgttttga

SEQ ID NO: 450239 - DNA, 147 bp, Serratia marcescens
atgagagaagtaacgaatttgactgtgatcgagattaagccggaacaagccacgtctcccctcgctgaagtcatttgcctccgaattagggaatttttttacatcaataaaggtgctgcccaccgctccagtgtgctggaaccgtag

SEQ ID NO: 450240 - DNA, 555 bp, Serratia marcescens
atgacgactgttttcatcgctggctcgataaccatcaaagagcttcacccactcatcattgagcggataaagaagattgtggatcagaaatttagtgtcgtggttggggacgcaaatggcgtagactcatctgtgcagcaggagctattgaatatgggatgtgacgctactactgtgttcagtagctctcctaagccgcgtaacaacttgggttcttggccagtgcatgttgtgaaaacagatcacccacgaggctcacgggccttctacacggcgaaagatattcaaatggctgagaacgctgattgcggcctgatggtctgggatgcgaagagtactggcacactcagcaacgtcattgagttgctttcccgtaataaaagttcagtagtgtttattaacgatctgaaggagtttgtaattataaagtcaccgcaagatattgataagttaatgagttttatgtcacctgctaatttaaaaaaagcagatgacaaaataaaaatgtgtgaaaggttaaatcggcttaacaatcagcagatgccgttgatttaa

SEQ ID NO: 450241 - DNA, 588 bp, Serratia marcescens
atgcaagtaaacataaaacaaataaatggtaactgggatctaggttatgcaatggataaacacatgctgaaaagcacatttactgggtacaactcttatgggcaccctacgttcaataacgagcgcactgaagtaggagagtcggtttaccagctcaaataccacgatgcttgggatcaaattgatccgctggctcagtgcctctatgatcacgcagtccccttgtttacagatatccatttaatcatcccaatggcagccacaaacccaagagcgcggcagcctgtcaccgcgattacggaagcgttggcacaaaagatgggcaatgggatggttagttttaatgatttgctgttaaaagcggcgggtggtacgcccctaaaaaatctagaaacggtagaagagaaaagggctgctgttgcaggtgccttttcatatgacgacaggatcggcggcaatggcccctacaatgcactgatcgttgatgatcttttccatactggcacatctatggaggctgcatgtgcggcgcttagaggttataataaaattaataaaatttacgtagcagcacttacttggaaatga

SEQ ID NO: 450242 - DNA, 216 bp, Serratia marcescens
atgagaaacgatatgctgggagacaaagaacttcggtacaaaattttaaccggactcgaaatctgtgagggtaaaccctttcttgagcgctttgttctgcttgtgggtaaggcgaaattgttagagttcggcctgaaaaaaatcctcaaatcgtttttagacttgaaccttcccgaagagaaattagaaatattggctatagtaagtagagattaa

SEQ ID NO: 450243 - DNA, 1359 bp, Serratia marcescens
atgaaatttcttgagtcaataaatgaaagaataaaaaaaacaaacaacttaattaagtcagacataactgtgacagatgaactattaggtccagataaaaacctaccttatattttaaaggatttcttatactcaaatgaaggtttcgatttttctaaaattaatgatgtagaaaattgtttttttgagattgaactttttaaattcagcaaagaggaatatggcattgaaaaggatttatttggaaggtgggatttcaatacatcattatatcataatttcaattatcaccttatgggtttcgattatcgcattgaggtctctaggaaagaagatgtaatagaaaacaatagtatcttaagagatctaagacaactaaatgttgcagatgctgtagttattgatttagagtttttcgagtttcctcaatgggacaagcaatttgacgtttcgagaaaaatttgtaacattgactttgataatataaatcacacagaattgcgtgactattttaaagataactttctacatgttgaaaaggaaaaaattcatctaaagataataaaaggaaataataaaaatggtgaaataatctatttaccattatatattggattagggactaatgagccttttgggttggcaattaaaaaagaaggggataaatcacggtggtataaactatcactcgactctgatctgccgtatattgaaagaggtgaaataaaagaatcatttcatagtaatgacactttagagagcatactttcagattcttttttaatagataacgacaattcatgggatcaaaaatcaagaaccatggttatgacagcaataaataataattaccaaaacactgaggaaagaaacaacaatttactaaaaggccatattaagttcgattataaatcgataaataataaagtttccattgaaaaaccgatttcgaggttagaaccatactatgataaaaaaaacgttgaacgtatgaaagtatgggaagaatacattaatggaaaggatatttttttagaaataaaatcattactaaaaaaatctcaagaagaatatgaggctttttttgaactttgcaattgcccatataaaataatatctgaaatcgggactaaaaaggttgttgatttaattgggcgaaaatataacaaaatactgaaaacacaagattataacatgcttcccgattgcgttagacatggcaatgtaaatacaattgctggtgacttatataagttaggtatcgattctagcaggaacagagtatcctcccttttaatccaactattgataaaaacaggtcgatttaagcaacatttagatggaagctttaaagtttag

SEQ ID NO: 450244 - DNA, 123 bp, Serratia marcescens
atgttctctgtgttttctggcaataacagtatgcaaatcaaccaggatgcacagatgttcccaatcacggggctataccagccggtacttactggattgtggatcggccatccggtggtttaa

SEQ ID NO: 450245 - DNA, 1464 bp, Serratia marcescens
atgtctgatgatgagcgcagccagattctgcatgatatgggcataaacacctctgccagtatggatattcctgtctggcagagagcggcactcgttgccaatggtcttgcacaaacgacagcaggcaaagtactgcctttaattgcaggacttggcatcgggcgtgttttgggcgtattaaccgggccggttggcctggctattactggtctttataccgcctatgatatctcaaacccagcgtttcgagtgacactgccctgcgtggtgcaagttgcctggattcgcttaaaaaactcccgccagttccggcttgccccccaatcatcaccagccacgatgcctgctctcacatacgatcaacgctgggggtttggacatgatattcaccaacctgcgcttacggttgcgacaattccaccgtcgaaaagtatcaacaccggtgcgatgcaggagcaggatattaccggtatttcacggctgagcccgctgttgcaaacattaccctcactggcgacctctgcacatgttgccagccatcaatatatggaggtaattatcaatggtcctttggcgagtgtaaaagatggccctggtttccgtggatttagcctgggagaaaaaggcatcaaagaacatgccgttctgctgaatcctgacaaactcagccagcttgttaacgccggagtgttgttgaatgttgtttctgccgtgctagcgcaaaagcacctggctgatatcagtaaaaaattgacggaaattgttgaggcggtgcatgaggtttctgcattccagaataatgcacgtaagtcagagatcattggagccatacagtatctgcagcaaattacccccacggtcctggaggggcaatgctcacccgcaatacgtcaaaaactggaggatattgaagtccagttttccgccctgcaggcacacttactgactgatattactgctgctggcgacaaagtgtcagcgcttaaagaccgtgggctctttggcagtacggagattacaaacaagatccagatccaacaaaagatccttgatgagcgaatccatggatggggcctggcaattaaggttcgtgcgcaagcgttacatcttttgactcatgcagaaggtgacacaacactcgtcaggcagcgccataaaaccattgtggatacctaccagcagttcgacaacgtgattaaaaacgttgaacgtcagctacagcagagaatacaaggtattagtgcattggcggaacagagtaatacgacaaacgccaacaaagtattgctgcgaaaatgggcaacaacgacgttaatgcagcaaaagatggctattgaagaagcccatttgtcattcgggaaattccaacaaggattgttggcagaacaaccacaatctgcacgattactggtagaaatgcagaacgggaaaccagtgaagtgttttgaattgccgctagtatga

SEQ ID NO: 450246 - DNA, 1893 bp, Serratia marcescens
atggataccataccgacacaaaaaccaatccctagtgaagatgtcagggattttaaatttaacatcggaaaagcagaccaattcatcacctcgcacgagtttttctacactgataggtttggcgtcaaacgttatactgccgaaggtatgaggcattttttggcacctttaggtaacgcatatactcaagagcaggcagcaaaggcgattgaattaggagaaatacccgatggagcattgttttatatctggagtgatgattcagaaactttagcatatgaaaataaaaatatagctggggttgcttcgccaacggggaaaagcattaaaagcggagattatatagactctctggcaaatgctattgaagaaatcaatgctgtgttaccagcataccatcagcatccttctatggtggccgcttttatcgataaagataaaaaagtagcagcatggtttgaggatgggaaatggaatgcagccggagttactatggagtttgcacagaaaagcatagattccagcactacgtttaaggcataccagttttccagtgctatggtgccattcgtatatgacatggatcgcaaggtggcattatggttcgaaaaaggtaagtttaatgctgctggagtggccgatgggtttgccaaaaaatctcttgctgcatctgggagttttccaatattaaacatgagcccatataacgttgcctgggtaattgataaggataaaaaggttgcggcatggtttgaaaatgggttggttaactttgccggggtttctcaaagccttgttgacaagatagcggctaaaatgggggctgtatctggcggagcaagtcttaaatacactgatggccgcagcctgtatggatttcgccttaaaaaggtgaaactcattaatggcggcaatgttcgcctgaatattggctatatcggtgattcgtggtctgagtttaatcggctgccgcgcaatatggccgacagattgtttgcagattatggtggtagggccggtgctggttggcttcaattcaatactgagggaaacagcacctgggaaaacatgctcgttacccgcgctaattttaccgagtacgacgccagctactcaaacactgcgccgccttacggcagtgggcccgatggcatggggtattacacatcgcgtactgatgcaacgatcaaagtcacgaacatcaaagccacggagataaagctctattactacgacggtacaggaacttttcgctactcgattgatggcggagcaccggtggccgttgtcggcggtggcacaaacacaattaagaaagtggtgatcagtggcctgacggatacgctgcagaccctgaacattgacacagtgggcaacaccggtgttgcttcgttgcttggtgcgtatcttacgtcggcggcaagaggggctatcgttaataaaatgggtaatggcggcacctttggcgcccagcatttatttttccaaagccagataccgaattatacgagcgatttagaccttgatttgattgttataaacttgggtacaaatgactacctgcagagccgtggcactgctcaatatattaacgcgctgagaacgatgattaacacataccgaacggcattaccgaatgtcggcataattctcgtatctccagcgcagcctaatgctacaggcgctccagttccagcaatgactgcgtatcgtgatgcaatgcggcaggtatcacgtgataacaacgttgaatggttcagtttttatgacgatatgccagcggtgtggtctgttggtaatggtctaggggcttggcaagatagttaccacttgtctgatgttggtgctggtgcatatacaaccccaatttacaattactttattaaaccgtag

SEQ ID NO: 450247 - DNA, 774 bp, Serratia marcescens
atgcaaggtaccaacacatttttactgcaaaatatctctttccctcctggtgagggggttgattacagatcgcttgatgaattcgacatcaccaatccattttatgacattccatacttcacaaatatgattggtgcatacttcatcagttcgcaaatgacaaatccactaaataatcatgcggatttaggaacgccattaatcaagattggcaatccagaaattaatgcaaagtatgcatctgttagtgatggtaattattttgatactcaggttagagtcagtggagcgaactcaacgattatcgaaattgcacgtaacccatcttcgagtgtggacgcatggtcagtttcaaactatagcggtaataacgcggtcggtagtgactcgatattgcttcgtaaagatcgccagatggaagtgtatacctcaaatggctctggacttgcatcaaccgtaatcaatatggccgatgctggcgctgccgcagatctggcgatcgtcgctggccgatttggtccgagcgatgttaccggctcagtatatcggccggcaactggcgatcttcttcagggctctatttctgctacacgcgcgacgaatgcgaaccgcaattactgcatcggtgtgcgaccagggatcaatggcaatggaaacagtaatgtttccgcagctctcgtttacaaagaaagactgagcgacgcaaatctgttggctgtcatgcagtatttacgcaccacattcggcttacgttacggcctctggtctgcgtaa

SEQ ID NO: 450248 - DNA, 756 bp, Serratia marcescens
atggatacctttttgaatgaattcactaatgacatagagcgggcgagagccttagaaaatattatggtttccgctgcaactggcggcgataaggagaattcacagcggtaccttttacttcgccagtacttcattcaatcatcggttcttaagcctttgttacctgcattcgttagagaatgcagagatctgaaacaattctgggggtttattaaaccaactgaaggctaccaagcccggtcaaactttatcaagaagggatttaccccactttttgactaccttgaaggcaagaacacatcccctgcagatataggaatttctgatgggctcagaacattcgatgaagcaggagtgcactcagtgtggaccaaagctcttgaaagacgacacacagatcctgatggcgcgataacttcggcacgaactcttttagagaccgtttgcaaacatattcttgatgaccttcaaattacgtataacagtaaaaatatcgagatgtctgagttgtataaattagtagctacggaactaaatctatcagcacatcagcatgatgaattgatttttagacaaatcctaggtggatgctctgctattgttaatggactcggcaccttacgaaacaagttgggtgatgcccatggacagggaaagagacctattaaacccgcgccacatcatgcagaacttgctgttaatctagctggcagtatgtcgatatacttggtgcgcacctgggaaagcaagaaatga

SEQ ID NO: 450249 - DNA, 240 bp, Serratia marcescens
atgacactgatggatttgcctggagccggggaaagtggcgcacgtgataccgaatattctgcactttaccgtgaacagcttccccaactcaacctggtgctgtggctgattaaggccgatgaccgggcgctggcagtggatgaacatttttaccgccaggtggactggccccgccccggtagacgatcctgccctatagtttggactgaccccaccccggtagacgatcctgccctatag

SEQ ID NO: 450250 - DNA, 261 bp, Serratia marcescens
atgaacaattctgaaggtctgcaaccgctgcagaaatcactttctggcttgccgcaatgggtgtctgaacgcattctgcagcagataaatcagttaacgcactacgagccagtgatcggcattatgggcaaaactggagcgggtgagtcttcgctgtgcaatgccctgtttgcgggtgaggtatcgccggtcagcgatgtagcagcctgtacccgtgaaccactgcgttttcgttttcaggttggagggcgcggtttatga

SEQ ID NO: 450251 - DNA, 1161 bp, Serratia marcescens
atgaatgagcagaattatcttcagaaactgctaaacaggtcagcggttgagtggaagacgttgggcgaaataggtgaagtacgtatgtgcaaacgtattttaaaatcgcaaaccacttctgatggtgaaatcccattctataaaattggaacatttggtaagaagcctgatgcctatattagcagaaagttatttgatgagttcaaagaaaaatacagttaccctaaagttggcgatatattaatttccgcaagtggaactattggcagaacggttatatttgatggtaaggattcatattttcaggatagcaatatcgtctggattgagaatgatgaaaaaattattttgaacaaatatttgtactatttttatcaaattgctaaatggggggtatctgaaggtggaaccatcaaaaggctatacaacgagaatcttagaaaacttgcggtaccggtaccttttcctgagtctcccgagaaatcacgtgccgaacaagccagaatcgtccgaattctggatgcttttaccgctcttaccgctgaacttaacgccgagcttatcatgcgtaaaaagcagtacaactactattgcgaacagttgctgcgctttaaagagggagaagttgagtggaagatgattggggagatcacgaaaaaaattgcatcaggccataataaggctcgtcaagctgaaggtgatttccctgtttacggttcgactggtttgcttggctatacaaatgaaccagtatactcaggaaatttgcttctggtcgcacgtgtcggagcatatgctggattggttaatcctgtatccggccattttgacgtttcagataatactctaattattcatccttctgattcatggaatgtacgtttcgcatttcatcaactgaggcatatgaatttaaatcagtatgcagtaggcgcaggacaaccccttattacaagtgggatgttaaaaaatctgaaggtaccatttccctcactgaacgaacaaacccgtatcgcgagaattctcgacaaattcgaaataataacagcgtcaatcagcgaaggccttccccgcgaaatcgaactgcgccaaaagcagttcgaatactaccgtgatttactgctcagtttccctaaatcaaatacacaggaagtcgcttga

SEQ ID NO: 450252 - DNA, 1317 bp, Serratia marcescens
atgagcaagacactaacacagatagcccaagaactaattgatgccaataaaaaagttcaactagtctatgcttttaatggtacagggaaaacacgtctatcacgtgagttcaaaaaccttattgctcctaaaaacattgataatcagagcaatgccgaggccgaaccatcacgcaaaaaaattctttattacaatgcttttaccgaagatttgttttattgggataatgatttagatgctgacgtcgctcctaaactaaaaattcagcctaatacatttactgattggcttatcacactactacaagagttgggagaggatcgtaatatcactactaactttcagcattatacgagtagcaaagcgacgccaacatttaatcaggaatatgagcgtaaaactagagatcagaataacaatgagattgatgtcacgatccctgcattttctgaagtaacattccatgttgcaaaaaatgatcccttaacacctgaaactcctgataaaatcacggaagataacattcccgtcgttcagggacagtacgaaaaaataaaaatatctaaaggagaggagagtaactttatttggagtgttctatactctttattagagcaggtaatatcaacccttaatgaatcggacgttacaaatcgtataaccgacgagtttgataatttggagtatatatttattgatgacccagtaagttcgttagatgacacccatctgatagaacttgcggttgatttggctaagttaataaaaatgagcgcatacactgagggtaatggtttaaagttcattatcacaactcatagtccattgttttacaatgtgttgcataacgagttaaataacgattttaaaaaattcaatccggatggaacttcatcatggatctataaacgagggcaatccgaaaagtacaggttatataagcagggtgatggtacttatgagcttaataaatccaatgaccatccattttcttatcatttatttttattgtcagaagtgtgtgaggcaataaatacagatcaaattaaaaaatatcattttagttttttaagaaatattttggaaaaatctgcaacattcttaggccatcctcgttgggaagaccttcttgacaaaacagccgaaggtaatcccaatccattcgcgagcagaataatgaacctatctagtcactctgctcatgcaggagaagaaactgctgatattaaagaaatagacaaggagagactgaaagaattagtgacatatctgattaatacttacgggttcaaaactcaggaagcattaaatgactga

SEQ ID NO: 450253 - DNA, 546 bp, Serratia marcescens
atgaagaaaaatttcacaattaaaataaggcgttatctaataaaccgctttattgatatggcaatggaacaaaagctgactaagtacaactatgctaccaggttagaaaacgacaaatttgaaataatgggatgtgaaccactcgataatcctgtaactcatttcgaaaaacgggtcgtacaagcatgctcatttaggattaatgcatcacttgaactggctattacccttaaggtaataaaagatgaaacccatccagtggtgttatttggcgatcacacttggatgcagttatatggcgtaacgcgtttcgggcgactttatcgaaaactaccaggattattacaaacatgcatcattggattaacattaaaaatccagcaactaattaaaaccactactaaatataaatggctggcgggccttgtaagtttctttatgcttgcggcaaaggtatggcaatctggggctatcgataaagcctggataggcattagtgctgcatctggcttattatttttgtggttactatcattttggcgatag

SEQ ID NO: 450254 - DNA, 555 bp, Serratia marcescens; identical to SEQ ID NO: 422956

SEQ ID NO: 450255 - DNA, 594 bp, Serratia marcescens
  misc_feature (439)..(448): n is a, c, g, or t
atgaagctaagtaaatattctttgctggcaatactctttttttcatgcggcgcatcggcaagcgtgacgctagccggtacacgtatcgtttatgaagaagataaaaaagaggcaaacatttccgtcaccaaccaggatcacaatagcccggtgcttattcaaacttgggtagaaagtttctcgcctgaagataaaaaagaggctccatttgttgtcactccgccattatttagactggaaccagaacaggataatattatcagagtcatttattctggaggaaatctgccacaacataaggaatcgatatattggctgagcgtaagatcaataccctcaaccaagaaatcaaaagaaaacaagttgctcattaccgtacaaaataaaataaagctattttatcgccctaaaaccctatcaagagatgaagccatagatnnnnnnnnnngaaaagaggtaaaggaggtcgatatgatcgcgccacaaagcacgaaaaaatggctattgccacaggaaactcatggtaaagaaataaaatggcaagccatcaatgactatgggggagtgacccgtgcgataagcgcaccattatag

SEQ ID NO: 450256 - DNA, 126 bp, Serratia marcescens
atgctcggcggtgcgcttgaggtgatcaatgactggtcctatgcggtggttgatgctccagtactggacgatgccgatgatgatatctgggttgacctggaaattgccaaagaattagagggatag

SEQ ID NO: 450257 - DNA, 165 bp, Serratia marcescens
atgtcagatatccagaaaaatgttgtagtcggtaggcgaaaaggctgccccaattaccctcctgaatttaaacaacgcctggtggccgcgtccggtgaacccggcatatccatctccaaactggcactggagaatggtataaacgccaatctgctgtttaaatag

SEQ ID NO: 450258 - DNA, 279 bp, Serratia marcescens
atgatctcattgccgaccggcacaaaaatctggctggtcgccggcatcaccgacatgagaaacggtttcaacggcctggcagcaaaggtgcagatggcgctgaaagacgatccgatgtcaggccacgtctttatctttcgggggcgcagcggctgccaggtcaaactgctctggtctgcaggtgatgggttgtatccgctggcaaaatggctgcagagaggccgcttcgtcagacccttggcccgtgatggaaaaaggcggtgtggtcggcgttcctga

SEQ ID NO: 450259 - DNA, 807 bp, Serratia marcescens
atgaaaaacaaacataacacaactctaagtctggcacagcaagcgttacctgcagatgtgaaagatggtgttttacctcatcaaattaaagtaaacttttttgatggcgacaatattatcgagatcgaggcttcagaaaaatataaaatcgaggggagtgagtatttaacctccagactaacccagaaagctaagaaagcgtcagctaaagcggacacgtttgcagtcttaaagcatatccctggattactcggctcagcgatagacacgggtgtcgtaacttacgcagcaataataacgggcagtggttatttaccactcgcgataaaagcagcgcttttatcgaaagatgccatcaatgcatttctggattatcaaggaagaaaaaaccaagcagccggaggagaagactttccgggtggaaatgacctcgtcaagaatttgatatataaaaccgccataatgtgtagctcatcaccacaacaggccactgcctggtcgcagcatcttgcaaattacatcaataacggcttagagatatcaggattcgctgcaaataggtatgctccagcaaaagtcagcgagaatatgaaaactgcaatggatcttatttcattaggaaagtctgggcttaaaatgattggcggcatagctgaagcccaaagcacaatacatgctaaaaatgaaaaagaaataaaaaaatatttaaccagtatagacacagctgaagtagataacttagatgaaagtaacaaaacacgaagcggggtcatacgaaggaaaaacaggaggacactgtcaatatga

SEQ ID NO: 450260 - DNA, 138 bp, Serratia marcescens
atgatgaggttttatcatatcggcattcacatttggctgatggaagaaatgcccactcacgacttctacgtcgcctggattttgttacctgacgatatctcgctaagcgagaagttcgaatcagaaaagcagcgctga

SEQ ID NO: 450261 - DNA, 396 bp, Serratia marcescens
atgaaacgcaaacacctttgggtattgaacccttgtctgctggcaatgcttgcgccggcggcttgggcagaagatcagaaaaccagcaacgaagagcagttggtggtctccgccagccgttcgcaccgcagcgtggcggaaatggcgcagaccacttgggtcatcgaaagccaggagatcgaacagcaggtccagggcggcaaagagatcaaggacatgttggcgcagctgatccccggcatggacgtcagcggccagggccgcaccaactatggcatgaatatgcgcggccgttcgatgatggtgatgatcgacggcgtacgcctgaattcatcgcgcagcgacagcgccagctggattcgatcgatccattcaatatcgatcatattgaggtga

SEQ ID NO: 450262 - DNA, 588 bp, Serratia marcescens
atggaagaaaataaacatcaatttaacgtctctattgttggagactcgcccttgggtgtgcttggattgacgtcgatgctcaattcgatagggatacatgttctaaccgtgacggcgcggcttgaagatttattccaatgtgaagcggaaaaatatgatgcgatattgatcgacatttatcttgtccgtgaagcacgtatatggaaagtggtagagcatgtaaatatgctgtacggcggatgcttcgtcatttttggtgaaggggcagaacgattaagacgacatatgccattcatacatcgtgctgaacaccctgtgagcatgatgaaaaaagtaaggcaagcaatatctgctcacaaaaaaggtcatcactgcactcctcgtgtgccatctcattataaaaatatcagcgcactggaagcctttgttttaaacgaatggattaatggccggactgtgactgaaatagcccagcaaagcaagcgaagtgtaaagacaatcagtagtcataaacgcaatgcaatgaaaaagttgatggtgagaaatgacagggagttgtattggaaactcaagggcgagcggatgtga

SEQ ID NO: 450263 - DNA, 1200 bp, Serratia marcescens
atggcggattacaaagtccctggtgtgtatgtggaagaaccctttggcttgtcattatcaatccagacaggtcaaacggcagtgcccgtttttgcgtttgatagcggggtcaagtgggttgacggtaaagacaaagacaaggcaatggagttcgcgtcatggctggaagttagcgagtatatagacacgcattacgcccccctgacgaatgacactgatgcattgaagagggctaatgcattgaagttggaagaaacttctgaagataacctttatttgtctcttaaactgtatttcctcaatggcggtggccattgttatgttgcccctgtcgccgcgtttgatgcgctcgtgccgatattggacgatgcgacattgttagttcaggccgggacgtcgcttacaactttcaaagagaaagtggctctcttgtgcgttaccggaaagtcgttgtttgccctgtttgatggaggggatggttccgagcgattgacaagttccaaggatgtggagacgttgcaggcgcaatacgcggcaacacctcatgctgcggtgtattacccctggctgacggcgccgaaggaggcgttgcccgatgagccgaagaatcagccgcatcctgaggtagacatcccgcccagtggtgccgtggccggtgtgtatgcgcaggtcgaccgtgagcgtggggtgtggaaggcaccggcgaacgtcgcaatcatcggggcgatgcccaaatgtaaaatctcggatgctgtgaacggggagtgcaacgtaccggcgcaaggtgggaaggctatcaacgttatccgcgcatttcgtggtaccggtccgttgatttggggggcgcgaacattagcggcagacaaggatacctggcgatatgtgcctgtacgtcgtctgtttgatgccgcggagagagatattcgcacggcgatgagccaggccctgttcgaacccaacagcgcacagacctgggaacgggtgcgtggtgcggtggaaagctacgtgcacagcttatggcaacaaggggcattgcagggggagtcgccggaacaggcctatttcgtgcagattgggctcgggagcacgatgacccaggatgacatcaattctgggaagatgatcataaaagtcgggttggcggcagtacggccggcggagtttatcgtgctgcaactgatgcagaaggtaccggcctga

SEQ ID NO: 450264 - DNA, 1617 bp, Serratia marcescens
atgagtgacgtgtataaagtaccgggagtgtatgcagaggaagtcggcgggctttctctaagtattcacagtggcgaaacggcggtgccgctctttgtgggcgtctttaacccaaaagaacgctccgatacgtcagccaaagccccggcctgcattcggatcgacagctggctggagtttacccgccagtatgcgccttcggatcggcttgtggtcgacctttcccaagctgagagtgctcgcgtcagggatgtgtcctatatgggatcgcacagtctccgtttgtacttcgagaacggcggtggcccctgttacgtgcttgcgattgacagcgaaaaacgcaagcagaaggacacgctggcgcaaatcgttactgccatcgagcagtgccccgaggtaacgttgttgtgctggtgcgaatatggtggccctgacattgataaagctgtttataccactctgggctcgttattgggtgcgggaggttcgccgtttgggaatgccgggcgctttttgctgacggatgcctggcctgagggggagcacaacgcgccctcgcagtggacttttcaggttcccgagttggaggcgagttcgcaggtggccagttatttcccggctctgcagacggggtacgtgcgggactatagcgactatatcattggcgctgataacggtgaattaccttacccacatctggtgagcgtcaagggattcttgcaagagcaactcgcacttttacacgaacttcctacaacgcgaggcattaactttaaggcgctcaaagagaatgccgaggttcccttagatattcttcaggaggccattgctgaagcggacgccaaggctaaagaagccaaaattaaagaagacggcaaagctaaagaagagccgaaaccaacaccgctaccgtttgagtcgtttgttacgctgattctgcaaacgcttaaggatgaactcccaaatgtgacaaagaagagtgcgccggtggtattgcgcgctagcgtggcgatggcgggggtttatgcccgtgttgaccgtgagcgaggcgtgtggaaagccccagccaacgtaggtgtctttggcgtgacatccctggtggctcagggggtgagtaaggataaacctgactcacttacaaaatggccgtctatcgccaccgtgggacttgacgatgcgatgaatgacaagttggtcaaggctggcatcaatgcaatccgcgcgtttcgggggaagggcattctggcatggggggcccggaccatgctcccgcctgaaaagacggactggcgttatatctcggttcgccgtttgttcaataccgtcgagcgtgatgtccgtgaggcgctgcgcagcgttgtgtttgaaccgaacagcgcgatgacctgggaactggtgcgcagtgcggtggatcactatctcaatgcactgtggcgtaagggggcgctgcagggggatacaccagaacaggcgtactacgtgcagataggattgggggccacaatgagccaggttgatatcgaccacggcaaaatgattgtaaaaattggggtggctgcggttcgtccggcggagtttatcgtactgcaactgactcaagacgttggggcccgctga

SEQ ID NO: 450265 - DNA, 1251 bp, Serratia marcescens
gtggtggaaagagaggagtggttggagccaggtatccggttgaaacagtcggtgacggcggaccgtgaatggggcggagagcagccgagtgcggtaccggtattcattggatggggcaatgcgtcgacaatgccggcatcgttgctgcctgtcgccacatgggaccaacggcctgattgcctcagaggaaaggagggcacgtgtctgcaggaaacggtgcggcattatttcgacaatgggggcggtgagtgctttgtcctcatgggcgaaccgctttcccctaaggtggaactaacaagggaatggtggcgcaaggtcagtgtgccgttgttgcaagagccgacagtcactttggtggcagtaccacaattggccgaatggttggaaagggggctggccccgatggaacctaaggaaccgatggatccatcggtgacggtgactgttgcggaggcatttatcaatcaatggcgtttgttaactgcttgtattaaccggcccgacctgttttttgtgctggatgcccccaggagggcggagatcgccagcgcgtgcattacgcaattgcgtcaaacgtcggtcttgtggcgtgaggcgatgcgagtggcgctctatggtccccatctggagacggattaccttctaaaagacaggaaatctctggtgctgcctccctgtggggcggttctgggcgtctatgctcggagtgacgtgatggagggcgtatggaaagcgccggcgaacgagcggttgcatcatgtgatcaagccggagtttgacgagaccagcacccatagatggttttatgtcgataacgtatcaattaatgcgatccgcagttttgtagggcgtgggacccgtatttggggctgccgcacattatcccatgggacgccttttcgctatgtccaggtccgccgtaccgtgacctggatagaagcgaatctgaaacaaatttgccgttttgccgtattcgaaccgaataacgaaatcacctggtttcagcttcgagggttgtgccgtgcctggttacggcgactctggctagaagggggcttagccgggacggatgaagcctctgccttttctgtccgggtgggtgttaatgagagcatgactgcggctgatatcgatgccggtaagctgattgttcagattgaagtggcggtactgcatgcagccgagtttattgaggtgaggttggaattactcaccggccgtgtgcagatgcaagggagtgaaacatcatga

SEQ ID NO: 450266 - DNA, 2199 bp, Serratia marcescens
atgtcattcaaagaccgcattgaccatgtgatccagatgggaaaagagttgacggagtcggttagggtcactgagctggctgaggtcgttgtaggggctagcgccttgctggcgaagcctgaggccggatggtcgagcaaagtaggcaatgcgttaatgcgaaatgagagcgcctcccaccatcgtcaggatgcctcgggaggcgtggtggcgcaagcccctgtcgccgtggatgtgttgatgggggggaaagcgttaacgtcaacgttaccgtccgtttttgtgactgatgcacagacgcgtcacgcggtcaatgagctcccttcggcgacgttgattttgagtattccgcaggctccaccgggagggtatgcaacgctggagcaggtgatgcgcttgtgttctgtcgggaacccgggggtgttgaaaatgtcaggttcgacggtgtttgacggcatcgtgggcgctgtcaaggtgacgtcggatgccgcaggaataaaggtcagaatacagctgaaacaccgtttgcagatattgaaggcgacgtctcactgccggatttggaaggcccagaaggatgagatgctgctccgtgaggtattgcaggctcatcagattcacgtgaggggcgctatccagttggcgggcactgcggttgaacagcggtttcagtggaactgcacggactggcatttcttgcgcgcgatactggggatgcacggtgcctggttgtggcccttggcagagggcaacgtggcgatccatcgccctcgtttggggggaaagacgcacactatatcggccaaacccggcgcagaggagcttatgccattggaggccgaatggcattactcggggttggtacaatcgcgaaaactggcgatgcgcagttgggatatgagcaaacaggcagtggtgacaatgagggcaaagccggtagtgctgggggagggggggctggccccttcgtcggtgaaaccgctcggggcggacggtgacgcgacactcatgggaatgtggcccggtccgttgcagcaggcggccgtcgatgcctggctgctagcgcaacaggcacaggcggtcagggttcgtttgacattaccttgcacaaccgcgtgtcaggtgggagatacagtatcactgaaagggtttggggggcacctggatgggaaaggggtcgtgacccagattgaacacgggtgtgatgtgaacaaccgtgctggcagaaccgtggtggccgttgggctggataacgcgtcgatggcaccgccgttgccgctcccctcgggcctggttatcgggcaggtggcgccctatcaggaggatcctcgtggaaaaacctggaatcgggtgccggtgaaagtgccggtgttgggcgcagaagtgctttgggcgcggatggggcacgtttatgccagcaagaacagtggcgtgaccttttaccctgacgtcggtgatgaggttgtgctggggtttgacggctccgggccggtgatcctgaatgccttgcataatccgaaacggccggcggctattgatcctgatgcgaagaatgcgaaaaaaggggtgctgctgcgacaccacggccagcgtattgaactgagttttgaccgtgataagtcaactgcgacgttggcactgggggcagataaaaagccggaacaacagatggtgatcgacacgcaggcgggtatcacaacgtcgagcctgaaaggggatcttaccgccgaggtgaaggccggctccgtggccgtgaaagctaaacagaaggtgacggtggttgccgagtcgacaatggcgctgacgggacggcaaggggtggtggtcaacagtgacaggaatgtgaagctggatgcgaaggagaacctgacggggctgggtaaagtgagtgtgaaaatggccagtgcagaaggaaaattggcattgtcaccggaaaaggctgacttgtcagccgggcaggtccaggtgacgggacagatgagtgtgcgcgtcaaggggaatgaggcggtgacggtgactgggacgaaagtcggtttggccggccaggccaaggtgtcgctctccgccccgacagtaaacattgacggggtggcggaggccagtatgactgccccccatgttaaggtcgctggcgaaataacggatgtgggtgcctcagggatcacgaatgtgaagggcagtttggtcaatctggggtga

SEQ ID NO: 450267 - DNA, 453 bp, Serratia marcescens
atgaacgaacagtacgatgaattgatccgtttatacggacgtggctggcaatttccgttgcgtttcaagctgcatacgtcgccgagtgtggagagttcggtcgtcatgtcgacaggtgcggataacgtggcacaaagtttggcccttctgtttcagactcagccaggcgagcggatcatgcgtccggcctatggttgtgacatgcactctgtcatgtttgccaacctctccgaagggacgtttgccgccttacgtagttggattgcggagagtgtcgctcgccatgaaccccgggcggaagatgtgaccattgaactgcaggaggtggaacgtcagtggggctcattgcgcatcacggtgagatattgcctcgcaggacaaccccgacaagtctcgggccagatgcagagactggaaggcgcggatggaggtaccacgtgggcgctttcgtag

SEQ ID NO: 450268 - DNA, 318 bp, Serratia marcescens
atggtgaacggtaaaccggggtgtgtgatcggggatttggcgaaggtggtggtaccgggtattccctatatgtcagggaatttttcggtgccgggcgtgggcatgatccaactggtggtggcggggccggatcaggtggctcacaaggttttgagtggcacgccggtgctgatcaagggcagtgagtgtcaggcggtatttattcccaccgcaccggcaacggatccgagttcgggggtaccggacccaacggttggggtacccacaccggggcgggggcagttcatggtgacacagctcaaggtaatagcgaactga

SEQ ID NO: 450269 - DNA, 3681 bp, Serratia marcescens
atgactgatgacacgaaaaagtcggcagggatgacggtggcacataacacgcaggcattcgaactggatgaccgttcgattggagcacgacttgatgcttttcgagagtactgccagcgtttgccttatgccgacgttgtctacttggatggcgatagcgatggttggccaccggcaaactgggcacaggtgatttttgggtatgcagcaggggcgtgggcgaaggatgcgtcgctcatggctccatggcatcaggctggagaggtcgcctgggcattcgagcgtgagcggttagtgaaattgtacgagaacccggagctggctgatgggcagttgcctccagagcgcgctttcttgctgagcttgttgggcatgctggaaacgcctcgggtcttgtttaatcaatttccggcgcaacaccgctcaatgtactaccaacagatgctggcacttgaagcccgtcaggcgaaggccgatcaggtgacggtgaattttacgttggccgatggcgttcgggaacaggttttacctgccggattgcggttggaggcgggtcaagatagcgcaggcaatacgctgcagtatgctctggagcaacctcttacggtgaatatggcacgggtcacggatctacgctgggtcgtcgccgatgcgtgtacgccgggaggctatcgggcgcgggtcgtatttgatgagagcgcagagcaaccttggcccgtggatggcgtgcgtctgtttggcgcctctccggctcggcccggagagcagcctagaacggatgcggatcgcgttgttgagcatgggcggatcgtcgagtcatcagtcttgagcgttgcagggggagagcggacttggatcgtggagctacaggaagatttaccgggtgagtctccgttatgcgcggcgataagtatggaagagacctgggtggtattgccctgtgtgcagggggcctcacggaggttgtggtcgatgacattgccggcgaacggcggtattccaaccgcggtgacgacgttggatggactggtctcgacgttgccgttgctgcgattgttgagtgccgaggggaaggatgtccccagagtcagaaatcttacggtgaaggtgctaggggcggtgggtgtgctctgtgcccgcgatgatggaacggtgttatcggaaggtgggttaccctttggcgaaagagcaaaggccggcagtggtgttaatctgatgtcgccggagtggtggctgttggggcctaaattaacgcaggtgacgtgtacaccgacctggacagggttgcccacgacatcgttttcggaatggtacggccccgatgttacgcaagccaaaccgcattggttgttgctcgatcaagacttgaatgtgacacgtgatcctgtgaagggaaaggcaccagatagcctcaacgcgcataaaaaagatacgctggccagtcgtgttaccaatgggaaagagatcgacgcacaaattatggctgataacggatatccgtcggttggtctattgaatcaacctaaaaatggctatttctccgttgaaggcgtgttgatacacgcggggaagcccccctctgaggcgcagtcgttgtcgttatttggtggcagcgagaagcctgaggggcagccactgacaatgtcactgaaaaacgtgccttccgttgcctcgacgtcaacagtgccagatgatgaggaacctgcttgctggccatggtatctgcggttgcaactgaatacctcattccttcacgatgaatatgacgtacatgaggcggcacctctgcaaattgtgaggtttcagacggagcaggcacatgtgcaacaggttccggccatgaagaagcaaggtaatcactgggtgtatgagatggtcgaggtggtcggtgcggatagcaagaagatctcaatgcccgcaatgaaggaggagagagtgacctttgtcacaccggtgccggtcacggtgccgaaagcgcagtggcatccgccgtatacgccgcaatgggctgacatgcggattgattaccaggcgacggacgcacaggttgatcagcgcgtcatcttgccgtttgggttatctcggcaggaggtggcgaaagaggtgttgccccacgctgacgtgtatctcggtctggaggggattgaggccgggcagctgttgacgctgcactggcaactgaaaagtcccggtgcattcgtgttggaatggcagtacctggctgtcggtgagcgttggatgcgactgtcggtaaacgatgccactgacggatggcaatcaagtggaatactgtcggccgactggccgggggatgtgtgtcgagcatcgacctgtctgcctgcggggcggatgtggattagggggcgggtgtctgaattgttaacgccggatcggaatttggttgcgcttccaacagccccttggttggccgggatagcgaccaatgctggtttggcccgattgcaagatgagactcgggtggccgatgcccattttgcggccggtttgtcggcggggagcatcacgcaggggctggatatgccggacacagtgcaatccgtcacccagcgttggcgctcttttggtggttgtgctgccgaaacgcacgcggtatttgaggcgcgagtggcacgtcggttacgtcaccgggagcgagggttgaacaatcttgacctgatgttgttgttgcaggcagagaatgacgggatccgggagctggcggttttaccctcctcggaaccagagccgaatggctcgcggccacaaactattgtggtgatgccaacgttggcattgagtgatagcacagatccctgtcgacctggattgagtcagccgcatttgaacgacatggcaacgcggttgcaggccgtgagctcaccttggctgacgttgtcgtgtatcaatccccagtatattcccgtcagtgtcagttgggatgtcacttatgcccaagggatcagtcgttcgacgggcaatcagcgggtgcaggtcgcattggaggccgcctttttaccctggatgcaccctgtcgataatgcgcagccggttattgggcgcccggtaacgcatggggcggtccacgatattttgcgtcaattgcctgaagtgacggcgatcaatcatgtttacctcaatggtgacaatcagaaagcgcctatgctgttggcggagcagattgcggttctgtcgtgcattcctcttgaatataccggtctgacgctggcttgggagaacccgaaattcgagcgatttggcgaatgttggttgaaaaagggcggcgaagccattgtgcaattgatgatgccaattcacgaccaggagcctggtgtttcacataagccgattgaggtgtcccatgcggatgtttatctgattgaccgggatacaggattgcggttgccggacacgatggtgacgagtttgtccgaagaagatatgaaggaatacaaagataaagctaaagcagaagctgaagctgaagctgaagcagatcaacgacaatatgcggatccgcggggatgcgtaccggatgaccacagcagagagcgatatttcagggtccatgcgcctctcgatgcctgcggtatatttcgtattggggcaaccctcacggttggtacgaagacattccagtcggcgagtattggggaatgtctcgttctgcattgtgtgcgttga

SEQ ID NO: 450270 - DNA, 3618 bp, Serratia marcescens
atggcagaaaattccaaggccgtatcgacagcggcgaccccagtgagtgaggcggtgcaggagcaaatccactttgacacgctttgggcgaccacgcaaagcgcgttggcactgtatgcggagcaatcctggagtgcgcggggggaggacgatcctggggtgacgttgctgcaggctctggcctatggcgtatcggatatcagctatcgccacaccttaccactgcaagatttattgactgaaaaaaacgatgacgggcgtgaccctgcgatttctttggatcataagggtaacctcttcgctcctgagtttgggccggagtgggcgctgacaagcagtccggtgacgatggaggattatcgtcgggcgatcctggatttagtgccgttggcaaatggtgatgagaagaaggacgataagacgttagaaaatcgtttttgttttcgcgatgtgcagatagcgccacggccgcgtgagcaaagttatggatatgtcaatgacccagataagtacgcctttcgttttgcttcatcggtaaagctagctggcaatgagtgtctctatcatgtcgccgggcactatcagttatgggtcacactgacaccaggaatgacagaggcggcggctcatcaggccttacagcacttcctgaaaaatcatcgcaacctgtgtgaatgggaaatcacctcgccgtgtgttgttcccgtcacagtgcaaacaccctcttttcaattggtgttggaagacgatcagttggtgagtggggatgccatcgcgaaggccgttgcgcaggccatttttgcaatgaaccaggtcttgttgcctacacctgaacgtaggggggccagagagcggttgatacagggcgagagtgccgagcaaatttatgctggtcctcgactgacacatggctggatctcccatcttccccctgagcgggcaatgtctggtgagactttggcggcgagggtcgatgttccggtccatgctctgtcggctgcagtggtgggcaaggtgcccgggatcagtgcggtcaattggaaagcggggggcgagcctatagcgattgctgcgggtacgcaaacgcaactgtggttcaaggacgacggttcgctggagcccgaattccgccagatgattgaactttacaggcatggtcaacgggtcccggctacgttatgggacatcgattcggtggtcaaggagtatcagcggttgaatgatgtggcgtaccgagccgacgtggagcctgcccgcaagatccccaatggacggacgcgcaatccgggattctatcgcacggtgggggcgagtttaccgccggtatatggcttgcagcaggctgcggacagagtagcctacgacaaagatgctgggcgtttgttgcagtttttgcgtccctttgagcagtgtttggccaacagtgccgatcagctgaaaaaattgccgcgattactggcgttcgatggacgagatcccaatgcttctgtatgggggggcgcggactggccgagtagtcaggatgacgccctggcccgtgagcagacgcagaaggtgtttgattcaacggttctggcagatattcagcagattgtgtcgacacaatcgaaggatatcgaaaaggaactggccattttgaatcacctgcagggctactttggtgaacaacgcgcttcgcgcgtgttaaacatggccactcaggggggggcggaatttttacatgtgcagcaaggggccctgcggcaggtgacgcgtttagcctatgagcgcgctgccatcagcatcagcaaagtgtcggcgttacaacgcaaaatagccgcccgactgggcatcgggaagaggctgtttgacgaagacctgcaaagagaagggggcttccctgacaaaccactgccgttttacgtgatagagcatcaggagttgctgcccatggccccaaagccagagagcttctctacgccctggccgaaagagcaaaccgtgggggcttttaagtacgttggtgagatgttgaggttgaagttagagggagcgactaccttgttgaagccgggcatgcagattgaattgcagcgggagggggcgtcccccctacagctgtcttctcttgtgatccatgcggtggaggggaactcggtttccattcagttagcgcaacatgattggttgcgctcgtacatgtccatattgctggaaaagggggggcactggaattggcaaagtgcaaagccctggccggcagagcaaaacgtggcgtcttttgagcacgttggtgagatgttgacgttgacgttggagggagcgaccgccttgttgacgtcgggcatgctgattgaattgcagcaggagggagcgaactccctgcagctgccttctcttgtggtccataaggtgaatggaaacacggtttccattcagttagcgcaacatgcttggttgcgatcgagaatgtccatgttgctggaaaaggaggctcattggaattggcgaaggggggagtcctggccgaccaaacaagctgtggcgtcttttgatcacgttggtgaggtgttgacgttgacgttgcacggagtgactgacgatttggcgtcgggcatgctgattgaattgcagcaagcggagaaaccggacctgcagctgtcttctcttgtggtccatacggtgaaggggaactcggtttccattcagttagagcaacatgctcggttgcgatcgagcatgcctatgctgatgcaaaagggtgttcactggaagtggcaaatgtcgcaggtttggttgaagcgggtggtctatgatcttgccttcctgagagctcctgaaccggagcagacagaaaatgtggtactgaatgtccacccctccttcccgattgagttggttgagaagacccgttttgttctgcgccccaaagcacgctggatgatctggccaactaagaatgatttggttggccatggtgctgctaaaaaaccggatgttgtggttgaagtggtgaaggccgaaccactcaatgagacggtgacggtcaagtggattggcaacctgaaacaagagggaattcaggacccggagggcaatccaacagtggtccctgtgaacaaaaaagagattaagggtctaaaaccatcgccccagaattggtcggaggtacaggatgcgcagcacccttatgcctggtcggtgctttgcacgcgcgagagttttgcgttcaccttgagtctggtattggatcgttcatggctgaagggcagtcagacaccggaagaactggacaggtggatcacgcaaattgcccgtgaagagatgccgagccatctcaatttacaggttcattggttgaatgaaagcaactttgataattttgcaaaaacatatcggacgtggcagaagggggggcgacctgttggcgatcagtcgtacgaattgttgcgtctgttggggatcggcgaacgcccagtcgatggccgaggagggatagggtttgcccagatcgcgtcgcagagcaagagtcaaattattgaagaacggctccagaaagagccagatgatgttgagcgcgataggttgcttcaacaagaggcggtggtttatgtacgtgacgcgggcatgaagttctga

SEQ ID NO: 450271 - DNA, 1710 bp, Serratia marcescens
atgcgaaaagtcatcttggcgcgattgcggttccggttgcatacgcaggagcggtacgctgaggccattcaagcccgctgcagcctttggttcagggatgaactgatgccagagttgcgtgtgctgttcgccgattgcgcggagggtgagacgcgaacgattgagcgcttgacggtgaatgtgggagaggtccccttgtcccagtttgaatcaatcatgcaggcacgcatccttagccaattgaaagaacagctgtttgccttgccagcgccggtgcgacaggtccccagggcgtcaatgcgacaggcagcctggcaacatggcgcagtggaagggttggccaccgcagccaaaatcgcaaccgagaaagacgggagccagagagaggatacgatgctgccggcgtcattcactcaactgttgcattatctggatactggcgtggtgatggatgctcgcccgtggctatttcaggcggggcgtgatgcctggctacgtgagagtcttgactcggcgacaacggtgcaggaaggcgggaggcgtctttcgccgcggatcgcattggccgtgcgactcttgcaaccgcgtgcacgtcaacggctgataacgagctggccgggccaggtcttgagtcatgtgtcggcttggttgctgacgccgcgtcgcttgccgtctatgccgtcatccgatgcggtatggatgttaccgttggcggcactgcttgcgttgcgtcaccatccggtggcgagtgactacgtgtgggcgttgccaacaaggcctgttgtctcgtcagcgcctgtgccgttttttggggatacaggagttgaccctgtggctgggtttgctgtggtgacgacagggacatcggccgtaggagagaatgtgccgtcgatggggagagaaccgcctaacatccggacatttgagtcctggctggttgcgctgtttgacggggggatgccggacgatttgcaaggtcccttgatgggatggttgtgtggcgctacgccggatagccggccgccagcaacatatttgtcaggggtgtcggcgtcagtccggcgccaactgcaggctacctgtgagccattgttgatgccgacaccacgtccgcttgccctgacgccggatgtgcgctcaaccgagcgtgtggcggttgccggtacggaacgttctatgcccctgccagcggcaaggcggatcactgagtctgatgagccccggatcgtggcgggggcgggcgttgtggtgctctggcccttgttgccgagtttatttggtcagtttggctggcttgatgaggggcgttttgtcgatgacgagtcgcgctggcatgcggtggcgtgtctggattggctaacctggggtgaagcgccgttggcggaatggcggacgccctgtacccgattattgtgtggccttgatccggacgtgccgtttgatgctgtttcgccctcactcctacgtcaggccgagctggatgactggttgggcagagcgcttataacggtgccgctgctggaccgctgtagtggcggtgatatacggagttttttcctgcagcgtacgggaacgcttgttgacgagccaatgtcgttgacaatagagccggatgcgcctgatgtcttgctgagccagttaccgtggccgctgacaaacgtaatgctgccgtggttatcggcaccagttcgtgttaactgggttgtatga

SEQ ID NO: 450272 - DNA, 1533 bp, Serratia marcescens
atggcaacgcgtctgactcctgatgtaaacgcctcttcattgaccgtctcgcctgccgaacggtcggctgatgggatggctcgggctgtggtggctctgcgtcttgtgaatgcgaaggggcgagtcctaactgaccgggaagtttctttcacgtgtcttccagaaaacagcgttgatgtcagcactgtcacacgggtgggggacacctatacggtaacgataaccgccagggaggttgctgttttgccaacgctgacgttggaggttgctgtggacaacgtgaaattggagggggtgtccaccgttgtccccttttacccagaagacaaaatgtcactgattacaggcgagttacctgtcagtgaggtaagccttcagggtgatggaaaagtcaatttacctcagttgagagagtgcttcaaagcctggaaggtgccgagtgaagaaagtttttctcggctcattgatgtggcgtcgttgccattcaagcctggcgcaggattgacgggtggagatccgtcaacggaaagtgaagtcgttgatgttggtggcgtaaccccatggcatgttaaggaagggaatggcgtggcggtggcaaaggacggggtagcactgaaacttgctgctgacggtgggctgctgctggacaaggggggggttggtattaaggcggcggctggcgttaaggttgataaggatgggatggcggttgtcacgagcggccccctgaaggtaggaactgatgtttcaatcactcttgatgagaaaaaaggactcaagactgacaaggaaggacatgtggaaatgtccctcgcccctgcggtatttgacgttgttaacggattgcgattgacgtgtcagccgttcggtggcttgtatttggatgcgcaaggaaaactggcactggatatcgataccatccttgggggcgtctatattcgtgtgtatcaaggtcaggtcaaaatttgtattcctgagacttatttagaactacccacaaaggagatctgtttctacgaaaggggttcctattctggaaccctttggaagggagggaagtattatatccagtctacaaacgtgggggggtattatattgttacgttttcaaggagggtattagcgggggatatgattgatgtaaggttgtttcaacaagatggtagctggaagtatttgtgcacgcatgaagtgactgaacatgaaagtgaaggcgctccctttgggctaccgagcgtcagcgaattgaaggtggaagtacaaggcggtggacagccaataccgggcaatacactggtttgttcttatcacttcctggataagggaggaaaggaggggaagtctttttgccgttttgagtactacattgagaaagatgagagatgggggactgttgtcagtgacacattcacgtggacgattactgataaatacgtcgaatacgatgttcgcgcatgggtagagccgaaagaagagggcgggacttctgggtcgatagtatacagtaagccaatcactattaagaaggtgtag

SEQ ID NO: 450273 - DNA, 891 bp, Serratia marcescens
atgaaggcttcattaatgagacatcgaaaaggtgtcagtgagcatgagggggaggaaggggaggcctcttcttctctgggagctcatcgagatgtcacagaaagaaatgttggaggttttttttataataactttgatttttcacgcggagatatgatttttggattgacggaggcggtcgatagctatcgaggggtgtggtcaaaattatctcgccaggcagactatcttgccgcaattttacgtgccgaccatatgacggcaatccgtgaggcttttacgcatatggatcatgggaagggcggttttagtgcgtataaggtgatgcttgccgtatctccagatcagtgggaggaagagggtcaagacttcatatcaaaatactgtgaccaaatcaggtctgtggaaggctctttgtatgacgatatgtgcaatctccataatgggtgttttcattcatttaataacttacccatggcaaggaagtattttgatttcttagcattacatgaccgttacagctttgcttatacgttttctgattacggcgagggcttgtttaagccgcgtgaggaagagaatttggttaggcgtgttttgagtaagtttttttctcgagggagtaaagctggcttagagatgattatccgctctggtgggagggataagattcatttcgtactggatgacattgatatcgaacgtgtcattaataaatcaggtggctcttccatcactaattccgagctccgttatctgtatcgccatcgtcgtgaaattaacggtaagggaaaggtccatttttataaaaataaacaagaagtattggcaccttgggaaagtgatcctgcgcgttggtgtaaatataagcccgccgctagtgaagagtga

SEQ ID NO: 450274 - DNA, 621 bp, Serratia marcescens; identical to SEQ ID NO: 266551

SEQ ID NO: 450275 - DNA, 855 bp, Serratia marcescens; identical to SEQ ID NO: 315142

SEQ ID NO: 450276 - DNA, 573 bp, Serratia marcescens; identical to SEQ ID NO: 263951

SEQ ID NO: 450277 - DNA, 1740 bp, Serratia marcescens
gtgacgttgaaggatgcgcagggcaacgcggtggcgggtcagttgccgaccaagggcagcgtctcggtgccgaatgcggtgtcgcaggacgtgagctggacggacaacaaggacggcagctatgttgccagctatgttgccggccaggccggtgcgggcctgaaggcgacgctgacgcgcactggcgtcacggccacgccggcggtctatgccatttatgctgcgcctgaagttaaggataataaggtcaccatcaagggaagtggtcaggttggccagaaattgcaggctgagtacggctttgtggcgaatggtacgggcgctgatgactcagcggtcaagtggcagaggcggaacagcagtggcgagtggaagccatttactagtaacagcgagttcgatgggaatgtctataccccgggaagtgatgacgcaggagatgttgttcgcgcctgcgttacccctaagggtaaagagcaaagcatcaaggggagtgaggtttgtgttgccgagtctgacctgatcacgattgctggtaccccagaggtgcgggatgtaacacgtatccccgatacgtccctagctggcaaggctcttgatgtgagctacacctttgtttcgaatggtactggtgacgatggctccatttatcaatgggagtactgggagaatgatgaatggaaggtaccgaatgatccaaaggccaaggaaaagaggtggacgccggatagtagctatgcggggtactctgttttccttagcatcacaccgagagggaagagatatcctctgattactggcaatgacgtctattctggggtggtgtacatctatagtgctccgaaaattacgggtttgagcgctccagcttcgtccccggtcgacaaagaacttgatgtaacgtacaggtttatttcgaatggctctgggaatgacgtatccacttaccagtgggagtacttggagggggggcgctggagggtgccggatgctcaggcggctaagcagaggaagtggacacctgatgtcagttatgcagggtatcaggttcgacagtgcgccacaccgcgaggagatagcgctcatgcttctggattgactggtgaaaaggcctgcagtaatccggtagatatctataaattaagcctgccgatagtcactgtgaatctgcccagcatatcgctggccgataagccgattgatgtgacgggttataactataatccgaatggtgctggaagtgatgtatccacttaccagtgggagtacttggagggagggcgctggaaggcgccgaatgctcctgcggccaaaaagaaggagtggacgccagacgccagctatgcagggtattcggttcgcttgagtgtcactcccaaggggagtgctaattctactgcatctggtgatatcgttcacagtaatgaggtggaggtttacaccctttccaagccagatattacatggatagcgtgcttttatgaggtttccatgtggccgccttctcgccaaacgcggttgaaagcgacgtggcgcaccgaaaaactccctaagagtggggtttctatatacgtggaaaatagtgacatgggtaacgctaaaggcgggggctttaatagtgcggttggtggcgatactggtttggtgtctttatattttagggatcgctttgggaataagagtgaggaaaggctctactcatataaaggcgctatttcctgcgacattgacgagcattaa

SEQ ID NO: 450278 - DNA, 2382 bp, Serratia marcescens
atggctgatactgaaagaaacaataaaaagataaatatcacagaactgaaaaatgcctttaaagaaggcgccattcccaatgagcaagattatggaaacctcattgacttagctgctgttggggggagggttctgggagcaactgaagaggatgcgactgccctgcaattaggggatggcttgaagtatgtcgatggcaaactcgctatccttcctactcctgccggtggtgtcttggtcaataaagaaggtgtctcggtcaaggtggatggcaatgcgctggcggcgacagagaagggcgtggcgctgaagctgcaccaaaacggtgggttggccgttgacgacaacgggctgcatattaagacgggcgcggggctgaagacggataaggatggcgtggccgtagcactggttccaaagtcaggattgacggtggaggggaataagctggcggtaaacttgtctcaaacctcaggcctggcctttgatgataaaggtgccctgaaagttcacgtcaatactgaagaaaaaaacaactacatcacgtcgaccgataaaggcctggcgattacagctgagggcgtcacaaaaatcaaagaggcgcttaaagaagtctctctgacggcgttagagagtgcagtcaaaggaaccgacagtggcgccagctctgattataaacccaatggcgaggtggaagcgcagatttcacaagcgctggttaatgcctataaacagcggagcaatagcaagataagagagacccccactatcgttcttatcccgcagctgaagaaaacgttcgacctgaaacaagaactgaaaaaaatgaaaggtattcctgaagatacgacattttatgggttcataaaaggaaatgattacaaaaaactttggggtggcatcgtcaaggggttaactcccgacgggatgttgcagcttaccgacaaagatggcggcgagattaacgtgcttggggtaggtatctcgcacgataaagaagggccgttccccgtgatggtcaagttgatgttacgggttgccatgccggcggtaagtgaacaatcgacaataatcctggataagcacagttatcaaactggcgagataatgaagtgtgttgttacgctcaaggatcaggacggtaatcctgtaataggcatgaaggcttggattaaggattatgttgacgtgccccagcataataataggatgattgatgagtggaaagaaggtgaaaaccgaggcgaatacataggcacttttgaagcgggagctcatggtaaccatgaaagtgccgagcgccataaagcaagtctgcaattgcctggggggagtgagaagagagaatcaggtgagttcttcatttttgcggccccgacagtgaaggacgtgaaggctgaatcggcgacggttgaggctggcaagtccctgggagtgagttatacctttgtttccaatggcacgggtggtgatgtatccacttatcagtggaagtacagggaagggacttccggtgactggaaggcgccacaatctgcggatgcgaagaagcaggattggataccggatgtgagctatagggggtatcaggtacgtctgacgataacgccgacaggcaagttacaccctgagtttcagggggctccggttgatggccctgaaatcagtatcttcgtccccgtttctctgaccggggttagggttaatggccatgtgtttgcccctgatgctggttttccgaccacggggtttaagggggcgcaatttaccctggagctcgataatgctaaagccagcgattatgactggacgtcttcttctccctcttgggtgacggtaaaaaacggtgtggtcacatttaccggtatgggggatggtatggaggtaattattacagggattacaaggattccaaaaacaaccggtcaacgacatattgaatataaattcaagctgaaaaaatggttcacaaacacgggagatagcacgaagggataccacgacgcagcattattagcatttgaggggggccactatgccagtctggacaaagacatggtctatgaagataacatatacaagtccccgtatagcgcaagtgcgaaacgaaggctacactacctcgcgaacgagtgggggcgattaagcaactacctaggagccggatgggtcgaggacccccaggacggggtcgatatcactgcaccgttgtactgggtaggtatagacaagcgtcacgtaggagggaacgaattgcaggggttatcgctcaagtgcgaagcagaccccggcgtcgcggcaagtcagcgggtgactctcatcttggataagggtaccggctggcaacaccgccggcggagtttctacgttaaggaattttga

SEQ ID NO: 450279 - DNA, 1161 bp, Serratia marcescens
atgcttcccattaaacaacgcacaaatttgctagtcctgcggcctcgtcatcgcactgaaaaatccatggcctgtttcacacccgctcacatcgagaatgcgtatcagtggctggttcgtcggcgaagttattatcccgataacgccgacatatgggatctgcgctttcgctggccacaagcgcaagagcacatcctcaacgccgtcaatacccgatcatatgtcctgtctccgttacaggttgtgaaaaaggcctccggtgagtccgttgccctctggtcttcatccgatgccttggtcctgaaaatgctcaccagcatgctggaaacgcagttgccggtgcatccgctctgtgagcacgtccgaggacacggcggcgggcggcagagcgtccggcgcgtcgacgcccacctccgtgaacgacgagccccctttgtgttccgtacagatatcaaaggctattacgccagcattgacaaaacccggctgtacgaccaactctgccgacacgtcagccacccagtgctactaaacctcctctggcagttcctaaactactgcgtagagcagggcggaaacttccacaccccgcgcagagggatcagccggggggccgccctgagtccgctactggccgcctttcacctgtatgagacagacctccactttgaaaaacatcaaccgcgtgtccgctacgcccgctacatggacgatttccttatcctggcaccgactcgctggctgctgcggcgggcggtgcgtgacctgaagcggctgatgacggaatacggcttcacccttcatccggacaaaacgcagttgggttacaccgcccaaggatttgactggatgggattatggtttaagacgggcgggatgctgaccatcgcaccccgcgccgtgagtaagcaccgccagcagtgccgccggctttatgagcaaatccggaacctgagtccgcacgatcaggtagcccggatggcacagtaccgcagacggtgggtccgggccttagtaccgcgcggacagcgtttggcagtaggtgcgcatattttgccagcaacacccgaaccggggactactaacgtttcgttggccactatcttgttcacctcgccgcccgcggtcagatcggcagcacgatcgtctcccgtgcggtga

SEQ ID NO: 450280 - DNA, 159 bp, Serratia marcescens
atggtgtatgagtcccccaccttaaacctgcaagggagccgtataagggaaatgattattttagatgtggccgtccatgcggtcaccctggtgatatctgagacgaagtatcatttagccctgagatattcaactcagacagagacacagagagaataa

SEQ ID NO: 450281 - DNA, 885 bp, Serratia marcescens
atgtctgaagatactattgtgaaagtaaataccgcgctaaaaacggtgttggagacgtattttaacaaggctattgatattcggtttgacctgccagaaatgaacagtgtgcagccggcaccaacggtaagtgtatttttgtatgatgtacatgaagatttggaattgcgacaaagtcggtacccttctttgagaacggtaccagacgcctcacatgcgagctgggttaatttaaattgtaactacctgattacgtattgggaaactcaatcaccgggaaaagacagtaaaggcccggatagtgcccccaataaccaggcgatacagaccatcaccaagacgctgcaggccttgttgaaccatcgtgtcttggaagggattgagggagcctatgctcgagtgatccccccgcaggaaaacttgaccagtttaggaacgttttggcaagccttgggaaaccgccctcgattatcactgttatattccgtcaccgtgccattcttgttgaacgatggagagaagcccgtgccgattgaaacctttgatgcaagggttatcgatatcaagacggcgctttcgagtattacattgaacgcacctagctatgttgccggcgataagatgacggtgacggtgacggtgaaaaatgcgcagggtaacgcggagactggcctggcatcggtactgaaggtcgaagtgccacacgccctatcgcaggacgtgagctggacggataagcgcgatgggacttacgaggcatattatgtcgctggccaggctggtgtcggcctgaaggctacgttgatggtgggggtaacgagtgtgcagtctgcggtgtatgcaataacagcgaaggtggctaacaagaagacaacacaggcatag

SEQ ID NO: 450282 - DNA, 858 bp, Serratia marcescens
atgaacggcaaaggtgcaagtaaggacaatcttgagaacgtgtatggaaagtgtgtgcacggtccagacgaagatacattcatgaggaatacaaggccgttggaaacaaggcgaacgcaggtaggtgatgtaatgacccacggcatgcgcagtgagcctattgtaggaacaaaagtcagcatggcttaccgtcatgtgaaccgagaagtgggtgtcactgttgtggatccctgtcaatatggaaggcaggggttgctgcatatgctgatgcttgatccgtcttgtaaagtagatgttagagattatgagcgggtggaggaggtattttcaggtagttttccggtagagcggtgtctgattttacgtttgccgttcaaaccagcccaggccttgcaacagttgctgtattttgatgataacaggttgactgctacgggtttttcgcgcctgattgtgctctcaccctttgaggtcaatgtggttgttaggcgagcgctggtttgttgtggaatacgccttccggttcgcattgtgtgtgcacacagtccagtggaatggctacgccgtgtggtgttatcacaagggttattgacgcaggagggggatgatgagatgttgccacgcatgccagcattgaggctatcttccgctgagcgtgaagtgttgtcgaattcgttgaaggaaatacctattcatctgcaatctcaacgacgaggctgtagcaataagacattgtatgcattgcagcgtaaggctctcaggaaactgaatgcgtccagcttacaggagttgatgcagcgttttgtgtcgacgcgtcagtacggccggctcagagatgtcggagggggaaaggcgtga

SEQ ID NO: 450283 - DNA, 204 bp, Serratia marcescens
atgagaaaaagcgtgatgtatgctaatcgtcctcggagtcgcttgctcgtattgatggagcaagcggcattgctggagagagaagcgtgttttgaggatgccgcccattattggctggcgagtttagaattagccgagaaatggaatattcggcactggtgtgaagctagagcatccttatgccaaaaacgggccatcacctaa

SEQ ID NO: 450284 - DNA, 1083 bp, Serratia marcescens
atggaacaagagtattcgaaaaaaaataaagcaaagcctgctgatgatgttgatgctctcaccaatgaaatgtcgcgcgcttctgtttcgggggagagtgtctctcaagggttacaacaatcgagtgttgatcgttcaacacaatccgtcaaaaacgtatcgagcaccaatcaaccatcgcttgatgagtctgttaaaatagatgttgataacttcctcaatcatcaacatgccaataaggtaattaaagactattgtgaaagtcgtcatgccagtatacgtttgtacgtggaaaaatttttacatgtatcgtatccgaagaaagaatatgagagttatgttcagtactcggcatcagcgataatgaaagtaatagaaaagaaatctgcccaaggcaaattaatgagcgaccccgcattcaaactcacggacgacgagaggaaatatgttcagcgattttattcaacaaatgcaggggctttatttatcaatacgcgtgctcgtaacctatatcttgtaaaaccactgccagttgcatacgaaacggttgataaagccatagcagctggagccggagaaaagggtacggatggcgtttctcttcttcctcagtatatgagagaaaaacttaaaagtgcttttggcaaaggagatcctttggctgtcatgcgagcctctttagccggtggaacgaatatctattctgagtatcagtatcgagggacacgcttatcagaagtgacgctaaagaattataaagcaggcgatgttcttacaaatgtcgcctttttgtcattctctcctgatgttactgatgggaaatatcatcatcagggaaagaaaacagcaagagatttttatggtaagtattctggtcacagcggggtgcctgttctttacgagttgtctcctcgatcacaggttagtgctattgagatatcctccgccaatgaacatgaaactgtgattgcacctggtaattacttcgagattttttcaataaaaaaagaatcggactgctgggttatacagctggttaatgcacctaaaaaaatatcttcttgcaaaatcatgtacaattga

SEQ ID NO: 450285 - DNA, 531 bp, Serratia marcescens
atggaaaagatatttatcgcactcgttacggtcgtcatgctgtgtgtcaacggtccggctaacgccggcgccattcaaggttcattgggcgtgacattgaccatcggtgcaggttgcgtcgttggcggaggtaacagcagtggttccatcaacgactttggcgccatcagtttcggcacttactcttcactgaacaacatcatcgacgctagcgccaccggcgcaggtggggccggtacgctgtcattgacctgcaccaccggcacagactacacggtggcgctggacaacgggcttaacgttacaggcacccaacgccggatggccagcacggcgggcgcatttatcagctataacctttaccaggatgccgcacgcaccactgcctggggcagcggtgctaacgcactgaccgcaaccggcaccggcgctgccgttcctttgactgtctatggccgcgtaccagcggctggttcgacaccggcagcggacacttataatgacactgtcatgatgaccgtcacttggtaa

SEQ ID NO: 450286 - DNA, 837 bp, Serratia marcescens
atgcagacagaacctgaagtattaaccggccctaccgaggtgatttgttccaccagcattgagcgcatcgtcaacggacgtaacaccgcactggtacaaattgaagctcttattcagctgattgatgacgtctcagcactcacgtccaccatcggtggtggaacagcaccggaatgggccatgcgtccggggcatcgctatgactgctggtttacggagaaagcagaaaccgccatgaaagccatcacgcgtaacatagaccgtagcatctggcgagacctgatgctgaaatcgggcatgctggcgctgatggacgctcaggcccgtgacgaatggtataaaaaccttgaagagggagagttgccggagattagcgaggacaatattctgactacctttgagcagttgcatcagcgtaaaggagaggtatttgaacgcggggtgatcaacgtatttaaaggactgagctgggactataaaacaaactcgcccagccattttggcacaaagataatcgtcaaaaatctggtcaactatagccgctggggcttccagttcacctggggatggcgacgcgatcagcttgtcgacctggaacgtatgctgatgttgctggatgggaaaccgctccccgacaatcgtgatgatattgcccgccgtcttggcgaccctatccatgggaacaagcactgcgcccgctatgaagatgaaatgtttactgttaaatactttcagaagggaagcgcgcatattacgttcaaacgtcccgacctgatagaaaagatgaatgatatcgttgccaggtattttccttctgcgctcccctcacgcacctga

SEQ ID NO: 450287 - DNA, 369 bp, Serratia marcescens
atgcaaaccttaccggtcgccccgaaacgggcggctcaaccttgcccgtcacctgttgttgtctggcaatccttactcacttatttactggaacagcattacggtttgacactaaacgacaccgagttcagtgatgacgccgttattcataaacatattgataccggcatttctctggctgatgcgtggaatttcacggtggaaaagtttgacctggcccgcaccgatcgtcgagggttctcctgcctggaacaatctccctttatcacggctatcgatattctccgtgctcgtcgcgcctctggcctgatgacaaagagaggttaccaggccatcacatcagttattcagggaggaagacgggtatga

SEQ ID NO: 450288 - DNA, 360 bp, Serratia marcescens
atgatcaatatcaccttatcactggctctcgacgcacccccgttacccatccaacgcaccattcagcgcgcattgttcttgctggaacagcatttgcgacaaccgggtgtttcattcacctccgccaataccacgcgcgactggttacgcctgcgcatggccgggctggagcgtgaagagttcagggcactttttctcgacaaccagcaccgtctgctggcccatgacatccggttcaccggcagcatcagcaacaccgaggtccatccccgtgaaatcgacactgaagcacaacgccacagcggtcgtgttggcacattgcccccctcgggacatgccgagcccagtgacgtgatgtag

SEQ ID NO: 450289 - DNA, 474 bp, Serratia marcescens
atgactgatattattgaccttaacaacaatcccccgttactgccacaacctgtcgctgacaacaccgctccggcactgacggccaccctcgtaccggatgaacaacgcatccatttctggctacagcattttggcaatatcccgcactggcttcgtattgagtcaccgatattctcctggctcgaccttctctgtaaggagtatcacggcgattattgggacttttacaccctcagcaacggtggagccttcattattccgtccaccgaaggcgagtacacactctttaacgcgctcaacggaaatggtgccattgtgggccatgaggccgcgggcatcatcgcctgcctcatcacctacagccaccatgcctgccgcacggggtctgatgcgatgacggagcactattaccgcctgcgggattacgccctcagccatcctgaatccaacgccattatgcgcatcatcgactaa

SEQ ID NO: 450290 - DNA, 531 bp, Serratia marcescens
atgcgcaatagcttgcggttcgtctcctggaaggacgacaaggccgtcaccagagacctgaaaactctctcaggctccaacagaataagctggcttacaggtgctggaagcgttctccaatgcctgggactgccgctacccacagataagtcgcagctggcagtcaaactggatcaatgcggccacgttcttcgcctatccggcacgccatcaagaaaacgcaaggggttcccgaagaacgactcagtaaaaaaggtggtgtggttggcgttccaggcggcgtcgcagaaacgaacaatgccacggggggactggcgtatggcagtgagccgttttattatcgagttcggtgaccgcctggacggtcacttcagggaaaaggcatttacacagaatgctgtacaggctcgccagatcaaaccttccaatcattaccttccgagtgaaatgtcactatatcccccggctttattaccctatgcacctttctccctttcccataaatatttgttatgtttgggctttcgttaa

SEQ ID NO: 450291 - DNA, 1710 bp, Serratia marcescens
atgacaccggacaatagtttattaatagacccaagctttgattttattgtcaacaatccgtcgcactatcaggcgtatgccactcttattcctggaaaagatccggatgttaatttttatccacaacccaaaggagagttccctgaaaattacaaacccaaagatagaacaaacacccatggtatagaatcatcaaatgatgaggtgtttaattatcgacattatcaatatgaaggtgaatcccctgggtatttagcggcgatagttgatcgtaatagagtgaaagcgcaggactccagtgtgcctttaactgatataatggttgttaacaccaaactagatctcaagtacgaaccagaggggtataaatatgcgagcacacaagtattaatagacatggatagagatggcacgctggttaatgcaaatggtgaaaggtataaagtaataatctttgcacattgtagaaatattttgtctaatcttgagagtggaattccaaactatcgctaccctgaagccttgaaaagaaacatagaaagggttaagggcgtgaaaaactatggtgtgttagagatagtcacattacgacgagatgacgtaaatcatgaatttaaagaaaccagaaagccggtagccttgttatttaacctggagccaagaacagttgctaaatcgactaaaaatcataatacaaaagaaagtgaacaagcatacacaccagagcatgatccgcatatagattcccaccctgaagttcgtgggccggtatctatcgttggcaccggtcacgttggcagaccattaaatgcaacagatttcaatactatcagcagtagcgatgtcagtgaacactcatcagtagaaaataaaatgcttaagaataaatggaaagactgcttgaccattgcatgggagagagaggcgtctaatggcgagtggttacgtatccagagtgacactaatttcctcaacagtaattcaacttattttccgagtgctgatgacattggtcatcgtgttcgtttcaaagccatcattcgaggacacaatcaaaattcaaatgggcgtgaattgattagtgaacccatccgtatttttgggaaagcccctgaaatcacaggggaagttctaattgcacctcatctatatgaagggataacaaataaagtggagattgattataacttcttatcccatggctgggggggcgacgcttcagttatattatgggaatggaaaagtcatgatggcaaatggataaaagacgaaaatgctaatcagaggctacgtttttattacccgcatgtttttgatggaagaagcaatgttcttcgagccagagttattcccagggggagagatagtgacatccttcgaggaaaagaggccataagtaagcccattgtgctgcagggaaagcttgagtcaccgaatgtaaaagtcagcaatgggaagcggataaccagaaaagctcttgagagtgcactattagaaaataatgacaatgtagctattcaccttaaagatggttcttggacaccagaaatttggttgccaagaccttcagtttcaactcaattcatatctatttttaacgaaagcccaaacataacaaatatttatgggaaagggagaaaggtgcatagggtaataaagccgggggatatagtgacatttcactcggaaggtaatgattggaaggtttga

SEQ ID NO: 450292 - DNA, 3576 bp, Serratia marcescens
  misc_feature (3173)..(3182): n is a, c, g, or t
atgcctaaagatagtaaactgttagataaaaagaaaaaaaacacacaaaaggaagagggtgccgatattgaggaaagtagagaaatgttgaaccacgataacgccttcacgaataatagtcatcgtaaattcaatagacgtcctttagctgatattgctaataacggtacggaatactccccccaagattttgccattactcttggctcatgctcttacagacccgtcccaaccgctgaacacaatcgatttaagtataaaaaaagtctttttctttttctccttctgattgcagcaacaggagggatggccatgtggttttttagcaataggagtagcgctctcaaacaaatgccttacactccaatcatggatattgacacgccggataactttaataaaccacatagcatcatcaatgcagcaggcagttttggaccaaggcatcaaaaaagacacgccccaaccatgggagccccagtagatacgaaccaaaaaactttgagagtgattagggcactacctcaaaaaagtgctacgcaacccacgactaaacatttgggaaaacatatttcttcaaccaatgacttgcacgatagctttttaaaatacaacccagcagcgttcaaaaattacctgctggataaatacgtaaaggatgaggcatttttgaatgatataaggcatgaggttgccaatatttcaggcgtgtactaccataatttcatttcaattttaatcaatgcacgcacacttaaagacataccctcctaccccgaacatatgcatagttttatttatgaaatgcaagagtatagccaagagatttatcagcatcaaacatcgaaaaaaaatgacaaatcactagcacagcagtggttagatgctgatgatgaccaaatatctactgccgagtcaaaacgggagtatctcatcgcaacggcaaattcttcatttttattttgcctcgaaccagagagtttcttagccattttagatgggaagtatgaatttaatgaggctgactccatacaaattaataatgtctacaaatattactcacaagacaatgatgactcaattgaaaaagccatgagtgatggacttacattagacccaattttatttcaccctagatttcaatcatatatagaggacattaatcactttataagacaaagcgatgaggaattaaccacttcatggagcagttattttcaccttcacgataaagtagtgatgaggccaatagctgtatcgaattatattaacaacagtacctttcaatcactctctcgccttgggctaagtggcttagacccgaatcaagttgtgtctgttgacgcagaatgttttgttggttgcaatccatatgtgacatctgtaaaagagttcctgacacctttaagccagattcatgcgggaaaatggcaggaaatggcgattcacaagcaaatatctgatgctttaatatacattcctttcagtcccgttcaatcttacttaaggattaataaagtttcattcccggatgaagtagagattaactttaaaaacggcactctagctattttaactcatggcaacacaataaaaatagatgaagacagaagcatttccttcggaaatgaaataattatgcatttagaggggatgagctcaattaatttgagcaagaaagaaaccagactttatgatggaccttatcagtcaatgcttttttcactagagcgtactcccaccatagaattagaaaatggtaaaatctttaaggttgaaaatggtggaggtaaaatcattttagatgacggcatagaaataacattaaaaaaagggagggaattaccgctagaaattaaaaatatcgaacatgccgggttatcattaagtcagtactcagacgatgtagatacactatacgatgaaaaccattcagatatacacgccagtaaagaacatcaaattataaaaatcctcaagtcaatactaaataatgaaaaactcaacaatgaattatcattgaaagacaagggaaagattcaatctataatttctggtgaaagtgtcgatggaattagtgttattagcgtcgtgcctgatgttgtaacctacccttggcgggaaaacgaagggtttacgcgggatttcattagcctggccttgtctgatgacagaaagctgtttatttctcttgccgacgcccctcaaccagcgtggatagttcccaaagattatggattggattacaacaagctcacacatgacaaattttataagaatagagagtggaaagaatgggtgtacatgcaccttcctgttggattacagatggataacataggtaatttacttgataacaatgaaatgctcggctttgattacaaacttgaagaatttagaggggattgcagtgacattgcacgcgccttgataaacacagaaaaaaaacatcatgtaatgaacatgcagcaacagatatcaacttacggtgagcgcgcacttaaacactttgaagaacaattaaaattggcacgtgatatattgctgtcagcagttggcggtggaatcgctcacacaataacaatacccttgagagggtcgtcgttactacgcaccttaatttcaggcatagtaggagcaacttttgatacagggatgctctttacagaggctatcacagtatcgagcaaagaagaaagggaggctatttatagcagtatgttacctagctttgccttgggcggggctacggcgatgataccatggaacggggtaagagggactagtggcaccaataaaaaactaccaagatttcctgcacctccaggagggggaggcttaagtggcgcatctaaaactaaccctcatgttccaacatttactttttcagatgctaaagttgaggcttcaaaagcgctcggtatgttcccagacaattatcacaactcattatatcaaggcaacacagccaggcctgaatttatttttaataacggattacactccctgaatgagcattcaaacttacattatcgatttaaatttaatggagatgaaaaactcattgcattcacaagtaaaaaagacattacaatagagaaccttcgaggaagaacaggagaaaaagtaacaaccgcctatatatatgaaatagacaccccacctaataaagnnnnnnnnnntaataaagctgatatggatggttcaaaaccaaacaagaagtcagagtcagaaggtaatcacgaaatggatttcactctttcagtccctgcggaaaatataaagggcgcatatattattgagtttaacaataatgatggatggcatgcaactggttatcagaataatcccagatgggtcccacagacaagagggagaggcaattcttttcataaaaattatttttaccgggaatctacaacatttacagaaattccattgcattcaaggaaaagtaaagaccctattggctatagaacccttggagatggacactatgtccaaattctttcaaaatcaacagaaggggaaagtacctttacctcccgtggcgttacctgcagatatggtgattaa

SEQ ID NO: 450293 - DNA, 300 bp, Serratia marcescens
atggtgctttatcttgacaatcaacatcgcctgctggcccatgagattctgttcagcggcagcctcaccagtacccaagtacatccccgtgaaatcgtgaaatcggcactgaaacataacgccgcggccactattttggctcactgccatccctctggacatgcagaacccagcgaagccgacaggcaaatcacctaccgtgtacaagacgcactggcactggttgacatcagggtgctagaccactgtattgtcggcggcctaagcgtgtactcgtttgccgaacacgggctattatga

SEQ ID NO: 450294 - DNA, 972 bp, Serratia marcescens
atggccgtttttaagttctataatgtccagttgcttcctgtagaaaaagggggcgagaatgtgggcgctgaaggttattgcaggctgtttgagtcattgggtgcattgattgaagaatgtaaatcgaagcgtttacgtttaagttcaattgcggtaaaaatgcgcggggacatgtatttttctcctttttccgtgacggtctatgaatatgatagagaggataataaaaaactggtttacggttcatttctaaagtttgatgatgtggacatcctggttgataccaatagtggggaaaccgaatatcgctcgaagggaaataccagtagccggcgttatgaccttgagttctactttgacccctctcgtcatattcttgctattcaggatgcaagaggacttcctacccgtaagcctcttattggtgcactgcggcatcttctgggcgggcatgctattcgtcttttcaagcagcatagccttgaaattgaagagttgacgtctgccgattctatttcagattttctcgatatgcctaaaaagggttacaagcgttataatggcgtagtgacgttttcaaattcagatgcgttcgaccgggcgatagaaggggagctgaaaatgacggaaaatgagctgaaagataagcaggtcgggaagtgggaggccagttaccggagctttcctggtgccattatgagtgatctgccgctccaggcgaagatccagatggggttggcgacaaagtacggtaatgccgaggtctcctatttggatgcgcagggtgagcgtcaaaaatatcaaatggaagattatccggtgcgggagcagcttaaagagcgtgagtataaagggataaagggtaaggcgctcgcggtattaaaccttattcgtaaagcgtccgagaaaacacgactcacgtcagggacagtcaagaaaaacaaaaaatttcttgataaagcgagtgattaa

SEQ ID NO: 450295 - DNA, 531 bp, Serratia marcescens
gtgaaaccgggaggcaccacactaaacgaacggttctatgcgctgataagaagagtgcctgtggtggggccgatatttcgtattactaatgcctatgcgttccagggtgcggcagggtgccattctcgtatggcgccattgtcttcatggtgggataggatcctaaagaaggtgttgtatattgtacttttggttgaggtgattattgtctgccacggtggagatatctcggcgatcccctggcgtgcggatgaaaccattctgtccgtatttcccagtattttagggtttggcataggcgttttcgctctgctttttatcatgcctgagagttttctggttttcatgtccacaaacagggagaagttgacatttgggccggaaattgttccggtagacattgcatatcctttaattgtttttacgttggccttaggatgggcggcgttgaacaagttttctgagaatgcctttacaaatgttaccagtatgtttttgtttgtcactgctgatacaaaatatttcacttaa

SEQ ID NO: 450296 - DNA, 2550 bp, Serratia marcescens
atgtcttcattatctggcaaaccggattcaatccaatcatcattaaaaattgagcctgataaattattttctgatggcgcggccactgcaaaagtgatccttgagctggttgatcttcatgggaataaagtcgaagatgaaaaaaatgtgagatttcttatttctcaaaatcgcggtgttaaagtgggggccgtaacaaataataatggtatatatacagctacaataatcggaacaggggatttttttggcaccgttgacgttacagttaacatagataatagagatctcagtggcttatcagctgaactcatcctgtatgctcaacctatagtaaaggaagtggagataactggaactagacggataggagaagcgttgaatttgacatacaactttgatgcaagaggaactcagggagatgattcatcttatttgtggcaatatcttgataatcatagccgatggcagaatgcaaatgtatccggcagcagaaatcagggcttcactttggtaggacctcatgctggaaacatgattaaggtatgggttttacccaaaagcaaaatccctccagtgatcagcgcgcgtgtagcaagctcgcctgtgatgctctttgatgtgcctgaaatccaggataaaaaagtcaccatcaagggaagcggtcaggtcggtcagaaattgcaggctgagtacggctttgtggcgaacggtacgggcgctgatgactcagcggtcaagtggcagtggtctgcggatggtaaggtttgggctgaccatccttcatcgggggtggtgagtgataatgccagggtatatacgccgggctctggtgatgccggggtgatggttagaggggttgtgacacctaaaggaaaaaaccagtctctcactggggttgaggttgccagtgtgggggtgaccatcttcgcggcccccgcggtgaaggacgtgaaagtcacttcgacgacggttgaggccggcaagtccctgggggtgagttatgcctttgttaccaacggtacgggcactgatgcatccacttaccagtggaagtacagacaagggactcccggtgactggacgacgccacaatctgcagatgcgaagaagcaggattggaagcctgatgcgacctatgcggggtaccaggttcgactgacgataacgccgaaaggtgcgttgcaccctgagctccccggtgttccaactgatggtccggaaatcagtatcttcgcggccccggcagtgaaggacgtgaaagtcacttcgacgacggttgaggccggcaagtccctgggggtgagttatgcctttgttaccaacggtacgggcactgatgcatccacttaccagtggaagtacagacaagggactcccggtgactggacgacgccacaatctgcagatgcgaagaagcaggattggaagcctgatgcgacctatgcggggtaccaggttcgactgacgataacgccgaaaggtgcgttgcaccctgagctccccggtgttccaactgatggtccggaaatcagtatcttcgcggccccggcagtgagggataacaaggtcaccatcaagggaagtggtcaggttggccagaaattgcaggctgagtacggctttgtggcgaacggtacgggcgctgatgactcaacggtcgagtggcagtggcggtatcagagtggtagtaagtggagcacggttcccgagctcgatgggaatgacttcatcccggaaggtgtttataagggggttgttgttcgtgcctgcgttacccctaagggtaaggagcaaagcatcaaggggagtgaggtttgtgttgctgggtctgacctgatgaccatctatagttatgatttttccatcactccgtcatctaaagctatcacggagggggggcaattcctcttctcagtaagggcggcaccaaccaatgggcaggcgtctattggtgtcgtatcgggaatagactggcgtattgctgatacatcgatagccagtattgataacaatggcaaagtaaaagggaaaaaagctggagatacagaaatccacgccagtggcaattataaagggattaaatttgacgacgtaacagctaccttatcagttaaggggaatcatctgtcgcctgtatatggtaagccttcagtaggagattctgagaaaaaatatataatccaacccccaagttattccttgaaaatgcgtacgggttatgttgttgatgctataggtacgtcagaggacttaactggagggagtggtgggaataatgtcacaatagataacctggctaacctgataagcatagaggtaacaacagggaggtataatcatgcacctaatgcagttaccatatctacaataaaattcaattataaagacgggcgaattgagtccgcaggattgagtcgagatatggataaggggtcgctacgcactgaggtctacactattccatctggctacgttcttcaggggtttattgtgcatgcagcgaaatactcgcatgcaatacagtttgtttccatgccacaagagtga

SEQ ID NO: 450297 - DNA, 1020 bp, Serratia marcescens
atggaacaaaaatacataaagagacctaagaagaagttaaccgacaatacgacctgttcaattcaacaaacaccacatgcttcagagcccgacaatcatactctctcatttttacactatcccagtctttcctctgctgaacagctaagccaaacgtcatccagagcgagcaaaccagaagaatatcaaccgagtataattgtgtatggggcggagggaaaaatcatagatgcgccactgaatgcatatgcgttagcgactcagagcgcgagggggatcccggaaaatagaggcggttctggtagagggctatcaagagaaaatgaggacgtaagtgctaatatggctatggctatgggtatactggacgacctgaagagtcagaagtacaaggagttatatgagaaacatagtgatattttccttcggtttgaggaaaaaatgaaatcgacagagaattcgatatttaccaatggggggagaacaacacaacgttggatgtcatccagagataaagaactttacattgataaattttttattcatgaagtaaatggcggcgaggtgtgttcaaggtacatatttcacagggagtatccatcctctgtatttaccaatgattatgaagggatgaaagagggagggcacagtcttacccaatttcagtgggttatgtcttttaatacccggcgtccgatgttgccagtttatgcagatgatatcgttaaatatcaacatggactgatttgtaaggggggtgataattataagggattgccaatggaaatagtgcgatggggcgtttccaatcagaaaacgctaggtttaatctcagggctgtcaggaaaggaattgcacgatgtttttcttaatgagacgcctaatggaaaatcaacgcaaaggatcatgaatgctgttggtctgagagcgggatctgtgtttgtcaactatgatgaagatgagtcaacgccagatattatagtaaaagtgaagcgtacaagaagagcatctttttcttga

SEQ ID NO: 450298 - DNA, 933 bp, Serratia marcescens
atgtttcggggattaaagatgctactgttgggctccttactgctgttttgtcagcatacattagccgactgcgataccaccaatggcagtgtcaccttgccgggcagcagctcccttgtcgtgtacaatgggcagctcaatgctcagggcactgccggtctatactgcaccggtcttggactatcgctgctgtcgcagaacaccgtcacggtcaaggttgcgtcgaccaccaacggcatggcgttaaccaataccgacggttccggcgataaaatcgcgtacctgatttatcccgacgctaactaccaatacccttacagcactggccaaactatcgattacagctcgctaaacctgctgtcactgatcctgatttccgccaacgtcaatttcccgctgtatatcaaaaccaccgtaggtgccaacgtgcgtgcaggcacttataccgacagcatcaacctgatctggaattaccatatctgtggtctcggtgtcttaggtgcatgcatctggtgggatggcgtcaataagcccagcacggtcagcgtcagcgtcaccatcaccaaagactgcctgataggtactgcgcctaacgtcaattttggcagtatggcgttggtcgggcaattcaatcctgtcaatcagagcatcaccctgacctgcaccaaaaccgagggatacaacacctatttcaccaacggcaataaccccatcaccggttggcgccgcatgaaaagcggtaccagcaattttatgcagtatcagatttacctgcctaatacgacgaccgtttgggacagtaccaacaaacagagcggtgccggcaccgggctggcgcaaagcatcccgtataaggcggcggtcaatacggcgcagagcgaagttccggtgggtaactatcaggataacctcagttttattgtcgaattctaa

SEQ ID NO: 450299 - DNA, 228 bp, Serratia marcescens
atggaaacaacggtttttctcagcaaccgctgccaggcggttcggttgccgccaggtgttgccctgcccgaaaacgttaaactagtgaaggtcatcgccatcggccgtacccgcattatcacgccggttggcgaaagttgggacagttggttcgacggggacgatgtcagcgccgattttatgtcatcgcgcgagctgccccctatgcaagagctggagacgctttga

SEQ ID NO: 450300 - DNA, 399 bp, Serratia marcescens
atgttgaaatacctgctggacaccaacatgtgtattttcaccttcaagaacaagcccgagcatatcagggcacgtttcaacctgaatacgtctcgcctgtgcatcagttcggtcacgttgatggagctgattgacggcgcggaaacgagccaggcgccggagcgcaatctggcggtgctcgaagggtttatcgcgcgtcttgaggtcttgaactacgatgcggctgccgcgacgcacagcggtcagatccgggccgaattgagccggcgaggactccctattggccccttcgatttgatgatcgccggacatgcccgcagcctggggctgatcgtggtgaccaacaacacacgggagtttgcacgtattaacgggttgcgcatcgaagactggtgttaa

SEQ ID NO: 450301 - DNA, 1683 bp, Serratia marcescens
atgaacttgtcacctgagatttaccatacactgggatatgtgcaatcaatgccgccatccgcgcaacagatagcctcagttcaacagcacacacacccttaccccatagatgcattcccagacgtcttacggcaggttatccaatcattgcacacggatacacaaatcccgatagagttgataggtaataccgtccttacggcagcgtcactggcttgccaagcccatgtggaagtgatccagtcccacatggcaaccgcggagccatgttcgttatacttcctgacaattgccgagtccggcgaggggaaaagcaccattagtaaaaaggtgatggcacctttttacacgttctctgagagaataaaacaggaacaccagacgcacttagccgactatcgtcgtgaacataaattatggacaatcaagtctcgagccctgaataatttatataaaagagccatcgaaaaaggacaggatggcgatgaagaaatagaagccattgatgaacatgcactcattgaaccccaaaaaccatactgcccaaatatgctctatgaagatgcaacccctaagaccctcattcaacggctcagcgaataccctgtcgctgggttgttatcagacgaagcaatcatattctttaagggttatgtaaaaaatcatctgggcttgctcaataaaatctgggatggaggaacgtacgcttacagccgtcctgatggggaaatgcgcgatattaaggcttgtttgacgctgtcgttgatggttcagccgcaggtgttaaacgattacttaaataaaaatgaggatattgctaaaggcagtggttttctttctcgttttctattttcaaatccaatcagttcaatcggtcaccgctacgggaataatgattatagagaatcagaccgaacattgcaaatactgcatgccaggataagctatcttcttgaaaagcaatatggccatttttatagtaacgccatgcaaaaaaggacactgaaattatgtgataatgctatggcgctgcaggcatattggcgggcagagacagaaagaaaaatgacaaccgggcaggagtggcgacatatccgtgacgtagccgctaaagcgggcactaatgccatcagacttgctgccatattcaccgcctttgaaagtgatgagggcagtataatatcagcatcctcactggaaaaagcacagagaattatcgactggcatataaaccaagccagtgatttcttttatccgatgtctgaaagctatcagttcgagcaagacgtgtatgacctgttcgcatggataaaaaataggtttatcgaaaataatggattacctttcttgaaaaacgacttgaagcaacgcgggccaaatagactccgtcacgcagaaaaactgacaccggtattgatgcagttggtgagttttaatttaatgggtatcgtacaaggctcccctggaggggcacattatatcgccatgccaaatatcaaccttccaaataactttatcgtcccacacaatttcttctccgcagggaaatgttttatttcattttctcaagccaacaatattcaagttcccccccccaaatggtcttcgctgtcaggtctgtgctgctggcgaggcatcctccagatgatgaatcaatacaccaaggtaaaaatgccgctataa

SEQ ID NO: 450302 - DNA, 216 bp, Serratia marcescens
atgactagactaaataacacatccgacctgatgcatgataaactggttgacatggtgttcattaccgaatttacggggttaagtgataaatggttctataagttaattcaggagaagcagtttcctaagccgatcaaactggggcgtcgttctcgttggttaaagagtgaagttgagttatgggtggtggcacgtatttctaattcgcgtgagtga

SEQ ID NO: 450303 - DNA, 624 bp, Serratia marcescens
atgaaaattaatatcgcaagctatgggtgtttgaacgataaacaccgagtccgtattaaagaaacattggataactcgattgatgaatacccaagaacactggtggtgagagtcgacttgttgctacccgataatacgtacaataacgactcagcgttgataacacgcttcattagatcactgaaggcacagattatttctgatttattcagaaggatgactgcagggaaaagggttcatgcgtgtaaagtccgctatgtctgggctcgagagttttgccaaagcggcaaaaaacattatcatgtggctttattctttaacaaagatacctacgcttatccggggactttccggtgttcaggtgaaggtgtatggcgacataatctttcgctcatgattatggagtcttgggtgagagcattatctcttcagacaaaaaataatcaccagcagtattatgcttatattaactttcccggtcgaggatatattcacctcaataaatcacgtggtagcttcacaggggattatgcagatgccataaattggataagttatttagcgaaggagtacagtaaaagtcattcagacggtcagcgtaattttggctgtagtcagtattga

SEQ ID NO: 450304 - DNA, 855 bp, Serratia marcescens
  misc_feature (800)..(809): n is a, c, g, or t
atgtttgattataaatcttcaacaaatggcttaactaaacaaaaagttatatatgtaggtggagctgataaagaaatgcaaaccgccgttctggcggctgaagaggtaaaaaaaaggcacgcaccacaaaaaatcatcggctatgtggctgattgggcacaatatgaacgaaaatttaatttagaagctatagatgcgactgcatacactaaaattgtctatgcatttttgggcattgtaggtgataaaggcaaagaaaaatctgaagttgtcgaacagagcgctaaacagtttggttttaaagagtttgaaataacacctttagatccctggggtgactttcagagtgccgtcagtcaacgacaagttactatgggatgggatgacgtactctatggccctatgtctccagaagtgtatgctaaattaaacccaggcaatgtaagaggcctggtaggccaagcattagcattaaaagcgaaaaatcctcagctaaaaataggctttagtgttggtgggtggactctcactgagccattttatcgcatggctaacgatcgcaaccatcgaaatacgtttaatcaatctgtagtcaattttatcaaaaaatggggttttgattttattgatattgattgggaatatccggggcatggtggcgaaaatgcagatttacaccgtccctatgatggcgctaatctgcttgctttaatcagtgagcttcgccacaagctggactctaatggattgaaaaacatagagataagctttgcggccggagcctcaagaaagcatattgnnnnnnnnnnaaagataactacaatcaacttgttagccttcctaaagttgacgtaa

SEQ ID NO: 450305 - DNA, 363 bp, Serratia marcescens
atggggctgaaattccagatgcgctactcggtgccgctgttcgtcagcggcaagggcgtgtggaccaaacaggacagcgaaaaaccgcgcgattacgcgaccgccagccaaccccagctcagctatcgtctacagcagcaaagcagcgaacgctggctggaggtgcgaaaccaaggcgcagtgcatgctcgtatctcgaaagtgacgctgcaaggccgcagcctgaatcccggcctgatgggatacgtgctgtccggttcgcagatgcgcttcgccttgccgcccgccggcggtttcagcagcggcaagctgatggccacggtcaatgacaacaaacaacctgtcgttattccgttgtactga

SEQ ID NO: 450306 - DNA, 1410 bp, Serratia marcescens
atgaaaaatgatgttcggcggctatctattttgtcaactgatgaaatagatgaactgtttggattacctcatttctcagatgatgatcgtcgattatattttgacttaagtgctaaagagcgcgagctattcgacaatacccgaacgttttctgtggcagcccatttagtattgcaactgggctatttcaaagccaaacggcagtttttcagttatgaacaagaatcgtcagtactaaatgacttggattacattgccgcgctgtactttcccaccaaaacgctttcaagactgaaaagtccctcaagaccgattagggctgaacaacaacgagcaattcttgatttattccagtataaacaatgtgataatgaggtaaaagttgatttggaagataaagcacagcgggttgcgatgttatcgacacaacctatctttatctttcgtgaattaacccaatacttagcattacaccgtattgtcatgcccagttatcggtatatgcaagagatgattggtagagtggtggcttatgaacgcacccgtattgctcgattacttagcacttgcatgacttcacttatcgatcagcaattagcggctttgcttcgggctgagtcaggagtatttcgcgtcagcgcattaaaacatgaagctaaagatttcagttataaagaattgcgacatgaagtcgcacggcggcagtttttccagcctctacatgagtttgccaagcagttcctcataacagcggggatctccaatgaaagcggcaagtattatgcttctatggttaagttttataccacttataaacttcaacgcatgaaaaaagagactgcacagttatatctgctgttttttgcttttcatcggtttcagcaaattaatgacaacttaattgaagcattgctccattgggtcgatcaatacgagaaacaggccaagcgtgccgctgaagaagcaatgaataatgcggttaccaatgcagcgaaaaatttacaggctgcgggtcatgtattgagcctgtttacggatgacaccatcaccgatgacacacctttttccattattaaagaaaaagcctatgcattgcttgaacaagagagattcccattagttgctgattacttacgcaatattgctttcgacaaaacggcatttgaatggtcacattacacaaaattatccgccacattcaaacgtaacttaaggcaactttttactgatctggattttgccggacgtgtagaagactctcctttgcttgaagctatcgcgtttttacaaaacttattgcgcacagaaaaatcaccaaggcaaactgaccctaattcatttccgactgagattattccggcactgttgcaaatagtcggtggtgataaacttatcatccccttttgctga

SEQ ID NO: 450307 - DNA, 675 bp, Serratia marcescens
atgctcggtgttcagcgtcagcaacgggaacggggtatagttcactcccgccgtgaccgcaccaggattgcgctggcgactgtccttcccgaacaatcccacctcattgccgtaatatttctcataagtcagtttgccacccagttgcggcaagctcggcaaccaggcctgcgcacgcacatcccagccattggccggccgctcctggtaatcagtcaggtccggcgaatctttccagttcgtcaaacgcagataaccattggcgtccagcttcagataatcacgccagtattccaatccaacgcccattcgactgtgcgaacgcgacaaatcatggtcgaggaaagcattcccccccatcatccagccgtcattaaaccggcgataccccacccccaggttggcctgggtccgtgcatcggtacggtgcacacttccttgcgcaaacgtcaacctgtcctgctgttcatgcaacggcaccaacaaatccaattgagagttcttgagcgaaaaattcttgtccgcctccaattgcacgcgcgcagtaccaaactggctcagccattgctgaacctcgctgcccgccgcaccggtcgccattccacgcgcctgagaggccagtgcatcaccgttcggttgactcgccaacagtccacccgcctgcgaggcccatga

SEQ ID NO: 450308 - DNA, 396 bp, Serratia marcescens
  misc_feature (287)..(296): n is a, c, g, or t
atgtattacctgaaagatatctatggcgttaaggccgagggggcaacgggaatgactctgcagtattacccggccggggcccatcaaatgaacatcagtatcgatcatcccgatacgttgatggacagccttctgacggctaatttggcacaggcggtttctgccatgcagaagcgtaaggaagggacctttgtttttcacttctaccacaacgacagcagcttcgatcatgtccctctggcatacagcttccaatatccgacgcaattgctggcacccgctctggnnnnnnnnnntctggggaaagcattggttaatgccaaaaccacttcatgcgacatcacatcaggccatagccggctatcaccactcaaacgactcgcggatcatttgtaa

SEQ ID NO: 450309 - DNA, 423 bp, Serratia marcescens
atggtcaaccatcgcctgctgaaggcgatcatcaaccagcagccggcggaaaaaccgcaggatgacgtgacggtgcagttggcggaacgccgccgcctgaaccgcatggcggaacgcgacgtcggcgactggctgtacgcccgtttcctgcaggacaaggccggcaccgatacccgcttcaacgccgagattatcgacgtgacacgcggcggcctgcgcgtgcgcctgctggacaacggcgcggttgccttcatcccggcgccgttcattcatgcggtgcgtgacgagatgcaatgcagccaggaaaccggcaccgtgcagatcaaaggtgaagtggtttatcgccagagcgacaccttgcaggtcaccatcgccgaagtacgcatggaaacccgcagcgtgatcgcccgccctgtggcctga

SEQ ID NO: 450310 - DNA, 174 bp, Serratia marcescens
atgagcctgaccggaaccgacaaaagcgccatcttgctgatgacgctgggtgaagatcgcgcggcggaggtgttcaaacacctctcctcgcgcgaagtacagctgctgagcggcaccatggccggcgagccaggtgtcgcacaaacagctcggcgaaatactgaccgagtttga

SEQ ID NO: 450311 - DNA, 690 bp, Serratia marcescens
atggaatatgaaccacaggatttttttgaaggccgtcaactggacatcgcacagctgatttatgatggtgatgaagtgaaactgaaagagaaacttccctctgtcagcaaggaagaactgaatcgacaggttaaggcggacatgaccctgttgttttggtcggtgctaaacgcaatctacgataaaaatacgccaaaaagactgagtattataaccgacatggttaaagcaggcgcagacccattgcaacccagaccagaaggaggaagcagcccagcggagttcgtcatgaaagccgacaaggggatttgggtcaaagccatgctcgacggcggtttaccgccaaacgcaaaagataaggtattcaatgagcccattgtattccaaacaatcaaagccaagaacactgaaacgttaaaggtaatgctggattatggcgcggatataaatatcagagactccttgcaacaaaccttattaatggatgctttttttagctcagcctttgagcacatgaccctactgctcaatcggggtgcgaatcctaacccggtaaatataaacaatctttcgctgttaacagcagtgaatcggcaaataaaagacagccaagatggctcagaatacaatgaacagtgtaagaaaatactcgagctcatgcttttaaaaggagcaaaggaaacgcagtaa

SEQ ID NO: 450312 - DNA, 717 bp, Serratia marcescens
atggctcgtaagtatgtttatggtgataaaccaatccgcacaacaaccgctgagatagttgaaaacgagtttgctggaaaggctacggctgctcaggtcgatgcaattttaaagaaaagatttccacattacaaagacaatacttatttgaatctgatagttaacgcagttaactgcaatcgtggtcactggagttttaacaggaccgccagacgaacagatgatgccacccatcgccaccatgaatatgatcgacttttcaagcgcggaaacgttttcgaggtctatgattccgcacttcatggtgtgtttgaaatctatgaagcttcagacggcaaatggctaacacgtccggttaaaagtgagtttgaaaaggccatagaaacagcgtctcaacttacctcagaacaacgtagagagaagctggctacagccaacaccacgccagaaagggtcattataaagagctataccttcaagcgtaatcccctcgttgtagcagaggtattagccttagctggaggtaagtgtcaaagctgcctacgtgacgcaccattcaagcgggaagatggtagaccgtatcttgaagtgcatcatgtggagtggcttgctaacggtggagaggactctgttgaaaatgctattgcactctgtccgaactgtcaccgcgaagcacactacggcacgcttgtgttgaagccgactaacattaagtag

SEQ ID NO: 450313 - DNA, 888 bp, Serratia marcescens
atgagcagcgctgcggatgatggattgatcgaatctgttaagaaaacattgatggacagaattaacacacccctgtttggatttatatttctatcttggattgtttttaattgggataatatacttttcgtgatgcttagtgatgtaagtattgaaaagcgaattaacgcaattaaaattagtggggattttttatttaaaggttttttgtgcccggtctcatctggcttcttgttaagtgttgcgtttccttacctacagtggcttgtttcctttctacaaaggtttgcgcagaagttaattgacgataataaaaagcaaagggaaagtgacgagtgtgctgcaatcattgctcttgcgcaagatcgcgctaatgcagatagtgctgttgaatcagaaaaagcacgaacagccttagagatagctgaaaagaataaagccattgcaagtgttaaatatgaaacagaacaaatggaaaaggaatacttagagttgcaagagaatattgctaaaggaaaggttgatttggcaaagatagaggataaagaagttcaggttaacatacatatacgaatggccacagaaaggctagaaaagctaaaaggggaggaagaagctatgatggcaagctttagctcttttaatgagctaaagagcagtgttctggatatgacggttaaaattaactctgcaatcgaaaagataaataatgatattacttccaaacaagaaatagcagagggttaccgaaagggaaacaactatagcgctgcgactgagggagagttactccttggtctgacacgtgtcgtacgtacagagttacatgaggttagcaaagaggtttctgatatcagagataagcttcacgcgaattttatattctga

SEQ ID NO: 450314 - DNA, 282 bp, Serratia marcescens
atgaaaaatataaaccaacacattgaaagagttaaagatttaagtgaacacataagaagagcaaaagcaatcctggagaaccaaggatccagagcaccgcgcttttttgtggaagaaagagagtatgaccgcgtcgtgagggttgataacgatctggtactccattgtcttcgcgaatttgtacaacggggagaaaccgaacttcggatgcttaataacgcgctcgaaactgcggaaaaagtgataaccggccttgtggcaagcgaacagccgagcgcctga

SEQ ID NO: 450315 - DNA, 687 bp, Serratia marcescens
atgggcctacagcaggcgattggcttggtgttgacggattttgtcgacggcctgttgttggaagttcacgacagttggcataacgggttttgtgatggtgtggaccaggagcatgtctgggaggcattaaaaatccgtgctgggcgggtggcaaagagctgtctcgataactggcgcaacgtgctaacggcgttccgtgacggggccatcagcgggatcattagtaacttgatgacaacgttgataaatactttcttcaccaccgcacgcagcctggtgcgaatgatccgtgaaggggttttttcgttgttccgcgcagccaaaactgtactgatgcgaccagagggtacaagccgtgctgaagcactagatgcagggctgaagattgccgtcagcggcgcattcgtcattggtggcgtactgcttgaagagcacctcagcaaaactctcggtgcgctgcttaccgttctgcccggtaggctgatcactaccctagtggctgtgttgacggggtgcgtcaccggccttggtaccgtattaacggtctatatgctcgatcgattagatctgtttggtgcgcagcaccagcaggaagacaatgcagtattaacgatgttacaggacggcagggcacaggccgatgcgcgtttactggctctgttgggatcggacccggaacctgtctaa

SEQ ID NO: 450316 - DNA, 1029 bp, Serratia marcescens
atggatttacatggtcatttgctttatgtagatattacccagatctgcggcatcggctgtgcgttctgcatgtatgcggataagcacgtaacgggtaagagtatggtgctgtcaacccaggcacgtgacaacctgtcggcgctcattaatgatccatccgtaaagcgtatttccgtgagtggcgaaggtgaaccgctcaacaacattcataccttttatgagttactggcgttgtcccgagggggcaacagttttgagtttattaccagcggtttttttcgccatgagaagatggaaaagatctttgatgagatcaatcgtcttgtctccgccaatggtgatacctgtaatattcgcctgagttcagatagccaccatattgagaaagtaaaatggcgtgcacatggatttagcctggattatgttcagcgcaaaaaaccttcatcgctcagtttttcatttcgttcaattgatatcgatcgggccttcactcgcgaatatctggtgagtgaactggcctcatggggaattaacgccagcatacagccagtcagcgtactggaagacaaattattaataggtgcggacacgtttagcatcgactacaaaaatctggttcatccggcaagagatacgccggagggttatctggacttacagggatatattaccgcgattgagtccaaagtggataaaccttttacctttggcagcctgaaccgtgcaccccagcccaatggcatggacgtgacaattaaacccaacggcgatgtgtttctgtacggtattgagaccgagcgtgttgcaaatatccattctgatgcgatcgactggcatcatctggcgagccatgtgcgggataatcccttgtcgcgcgcgttatatacccagccgttaaccgaactgctggcgctgctggaagacaccccgcagcttcgcgcgatcatcgcgaccgccaataatccttactggctggtcaaagagatggggaagcattccgggttgcttgaacaatggaaggcagcatga

SEQ ID NO: 450317 - DNA, 846 bp, Serratia marcescens
atgattgattcgcactgccactcgttctactcgaaacatgctgtaggtaccatcgacgaacttgtttgtgcctcgattgctgcgggggtgacggtactcaccatcactgatcatgctccgttcccagtggatgcgcagaaccgtttgctggaatcggaactggagagctatttcaccgatattgataaggcacagcaggcctataaaggcgagatcacgctgctacgcggactggaacttgattatatgccgggtactgagcgttataaccggcaattacttgcccgctatccaatggattttgtcatcggttcaattcactacgtcactgttgctgatgagccgatggtgaaggtctgggaactgccccggttagcggcagactcctttctggacaagtactttgctcagcttgaagcgttgctggaaagccggttgtttgatgcggttgggcacgctgacacgctactgcgcgcaatcccagaggatgtgtttttgcgtcgctttgaaccgttgattgcgccgctcgtacgcagcggtattgcatatgaactgaatgcttcgggcctgcgaaaatccagccttgatcctacgacgggtaaagaaattgcaggaagatggtcctatccttcccgagctttgctggagaaattactgaggaacaatgttccattgactatcggatccgatgcgcatgatcctcgtgatgccggagcggggatcgccgagttgctggaggtcctcaggccattagggcttcaatccatcagctattatcagcagcgtcaacgcattgatgttctgttggatgaccttcaatttcacactgtgccagcgtctcactaa

SEQ ID NO: 450318 - DNA, 1131 bp, Serratia marcescens
atgaatggactaaaaaccccgcattcacttgcgtggaatacgttgcacaacgaaccgctcgcaacccagttggcaatgtttcgccaggccagtcaacagatcaatacacaggatgttaaatccggttttcgcgcgttcgcggccgatttgttggcgcgcggtttgatcgacatgtccgattacgtcgctatttttggtggtaaggcgctgcattatctgacgccgaatgtgactggatcattttgcgatatgcgcaccggtgctgacgcgacaacattggcgggcatttatagccgagcgaaatatggcggagtgggcgagatacgctatctggcacggtgcgttatcgactatcttgccgcagaactggatgacacctcctcttcatggtcagggctgttttgccaagccaaagaggagggagagagtgttgtgatgatgaccacgggttggcgtaatgtgccttccatggccaatgtgctctacgatatcgtggttgaggaaattaatctcacgttggcgcataaaggattgcccaccattatcaacgttaaactgcccaggattgcgccgccgtgtgaaaattatgccagcctcagccaggccgagcgcgatcgggtcaatcttgtgcaggatcatgtgattccagcggagaatttttaccgctggagcggcgtgcatgtcattttcggagatgacgtgctggtgactggggcaacggcggacaaagtgttgtatgaatcgctgtgtaacggtgcccggtcatttcgtgccatttaccctgtggcgctagatccccgggtggcattaactgatgcgtcggtggaggatcggctgaacagcgtgagcgtaaagcaacatttggatgaaaacgtcgcgcaactgctctctgctccgggctatcagcccattctgcgtgcgttgcgtctgttatttggcgaagacaaccgggatagtttaccggctttcctgccaaatgtgccggtgctgacctggcttaatctgtataaatcagcgttaaataatgagtttttggctcagcctgcatgcgcgccgtcactggtgatgcttagaacatatctgatgcaaaatgggctgttgtgtgcgaagggtaaggtgctggtgaaatga

SEQ ID NO: 450319 - DNA, 792 bp, Serratia marcescens
atgacgtccgacattacccattacgtcagttactgggaaaacgcaccgggtcagaccatgccggcttatgttgccctggcactggtttctatgcgcagagctctgggcgatcgttttcttctgcttacgccgcgaacggtaagcgagcacatcgatgctggcatcatgaataaagcttgggcttttgaaccgctgagctttacgctggcgaacggcattgaagctattgtggcgaagagcgatttcattcgcatggcgtttgtgcatcgctggggcggggcatggttggatgcggatacgttgctgtttagagatccgagtgttgagttatttccgacagggctgagccataaattgcactggcatagcgagtgtattttcgcgtccctgccgggaaaccccatacttgcgcaagccttagctatagggcttgagagtgagaatcacgcttggggtaatcctgggagaatcaaaaatatcattgcccaggctgccgatgctgccatcccgattggcggggaggtcatcgatcctggataccgtcctctttacaactttgctggttgcgaggtgatgcgtcgcaccgatattgccgtcggggcatttttgattaacgacgtggccattctcaaactttacaacacctatttccggcgtaccgaagcccggagagaaaccgtggctgaattcctggtgggtggctcgctgctggcaaaactgtttttgcatattgaggcgaatgcggattactgggtggatgaaagtgacaaattgatagcttccgttgcctga

SEQ ID NO: 450320 - DNA, 1311 bp, Serratia marcescens
atgcacaccaacaccttcggtgtggatgaggtcatcgttacgaatccgcatccagggcttggtgaactacgcagattggtgaaccaactaagtaatgtcgatgtcgttgttcatctggttggacgactgcaacctgccgaaatcgtttttatacggttactccgcccggcgattctctattcccttgatgattcactgcgctgtgtgaatcgtaaaatgggttttgctgcaaacacgctcaatatcgtggagcagtacaaatatattctccaggatctgggcacgaaagtgatcgacacccagtacattgtgccgttgcctgccgagctcccgcctgcggcactttccccccaaatactttttaatccttatgccagccgacaagacaagggactatccccttcccgggcaaccgcagctctacaagctatcgccaacgaatttcccagccattccgtgggcattctttgcagcccttcaacgctgcacagcgcacagcatctggaaaacgcagttgcacgcgataatgtagcagtgttgtgcgatgggctaacacccgaaaaggttgcaggatatattcgccgcgcgcaggcagttgttagtgtggatactgccattgtgcatatggctgttggcctgaaagcgaagctggtggcgatctacccgttgattgcaggtcaacacaacccatggctgccgcttcgctcaccttttacacaggtgatctacagcgagcaacagccagacacgctccgccgtacgggcaaaaaaaatatggatgctttttcgctaacgtcattaataaacgcattgcagactctcttaacgctgccagcagaagcgaaaaacagcatgtcgcttaacgccagagtcatccccggactaggagtagcaacgggtacactggcgcgacaactgcccttaatctgtgaaaaatttcctgaagttgcaggctgttatgccggcacgatcaaccttgaattcagcgttcctatcgcagtcgtacgcccagatcaccgtaccgcgccgctggcctggactcccagtggacgcaccaccgagatattcgatctactgcgcattgaacttgaattcagccatttaactgaacgcatccccgcatggctgtatattgcccacagctcgccacaccgccggacgccgaccattcacgaagcaatcgcgccgcgcattaacctcaatggcgccacgcactgtcgactccacttacccgctgaggctatcgtactgggcgaaagtggtactcaggcaacggaagctatcaatttgtcactttcatccacccagtaa

SEQ ID NO: 450321 - DNA, 549 bp, Serratia marcescens
atgagaaatcgtctgactcctttttctttggatccaatttgggtcaggtacggaattactttcctgccctcttcatctcgctgccagcatccccggatagtgcttcgccacgatatcattcatcttttctgtcagttcacaacgcttaaaagtgatgtgcgcggttcctttctggaagtaacgtatactgaacaaatcatcttcgtagacatccttagaagggttgtcccgaatatgctccatcaaccgtatagtgacatcaccacagttgtcaggtatcggtttaccatccagcagaaacaacattctttccaggtctaccagttgatctcgccgccagccccagttcagactaaatccccagcggttatgcgtaacctgattgttgacgatgattttcttaccgaagttgcaggaactgttggttttgtaatcccacgacaggcctttgaagacgctgatgatgccacattcaaagacatccattttgttcagatggactgcccccgccccggcagcagttcctgtgacgtgataaacaccatgtaa

SEQ ID NO: 450322 - DNA, 2013 bp, Serratia marcescens
  misc_feature (1997)..(2006): n is a, c, g, or t
gtgagtcgatcagaatacatttatctaattaagtgtacttcttggctagctaaattcctctcccgcagaggattgaagcaaccagaccgccgcccattatatgaataccacgcaacgagtgatgagtatgatgagttgaagcggttgttgagagctatagggctacccgatggctacaggagtgataaaggatatgcagccagcttcgcgttattctgctcagagtggtatagaagagattatgaaagggagtgtggatgggcatgggagcctatttataagactatcggtatatcagcatcttcttcggaaatggggaaaataattcctaaaggtctggatggatattggggacgtccagtgcggttttacgatacagaaagacggaatttcttaggctccttatttagtgaaggcggtctacctttcaggttgctaaaggaatctaatagccgctttcagtcgatgttctctctcattctcaatcaatacgatcaggcccaatcttctaacatttcaacgtttgctttagttcatgcggcggtagaaaaatcatccctgccagtcgttttcaaagaggatacttcagttgagcttattagtcgaatggctgaacagttagtgtctcttgtgcaaatttatgacctgagtaaccacaccgaacccgtaaaagagcttgatcgtgttcatcctaagtggcgggacagcttccccgttccgcttgatgatgatacggggaccagtttccttaatggacttttacgagcagcttctactgaatccaaacctcgccttcaaaaaaatagaacaaccctatgtcagttcttatggtcagagaatcatcctgaagctttacagtcgcttatttctcttccagaagagctgagtttttcgattgataatgaaccttctacaacacgtttcgagcttgccatctatgaagatggtaacgaaattgcgagcctgggacctgcctatgcaacgttgagtaattcacaggcgaaaatgagagttcgtaagcgtgaaattaagttttttcgtaaaaagcccgctgccagcttgtttattgtggcgaaagcaggagggatgcttttcggaaccagactgttggagggaagtgaggttgccgttggcgatgtgccattagtttttgtttttgataaaagtgaatggttgctacaagggcaagcatcttgcagtgtacgtggcagtcatgtgctcattgtattgccaaaggatggttgtttggcctcagagctcgaggattgtgaaaccgatttttcggctttgggatgccgcgctctgattgtcaaaggacgcctggatatcctgattgaaggcggtgaaacatatcggataaagacaggaagagagcagattatccagacagggttctcttttcaggggaagcgattaaactggacaagctacccggatgagctcttccttggtgttcctggcatttcccaaaattctgagaatctattacctcatcattataaacgttttttcaacggcacatttatagataattgtgatgtgcaagagaaaatgggtgctcagtttatttcagtacgtaacgagaataatgaaacgttactgcgcaagaaaataggtattcttcccaatgattttggcctggaaacaaaaaatggagaacaagcaaacgaaggctctatcattattaccaccaaacatccttgtttgtttagtttgaaagaaaaatcattggagattgataggaagcgattaccaggcagtacagaaataatgatgaaaactgaggggattcctccagcatcgattttattacaaataacgccaaaccttgctgcaaatcctattattatttctctccctttccctgcccgaggttgccttgccttcgataaagacgacaaacctctaccaaaaaatttaacgattaacgatcttctgggagccagagcataccttttcggaaaaaatggtgagcctacgcgataccaacttgaacnnnnnnnnnntatatag

SEQ ID NO: 450323 - DNA, 1323 bp, Serratia marcescens
atgagtggggggaaattgcctaaggggtgggttgatactcaattaggtagtattatcgaactcaaatatggtaaatcactagccgcacaaatccgagatggatttggcttccctgtatatggttctaatggcgttgtaggaaaacactccattcctctgattaacaagagcggtttaattgttggtcgaaaagggtcctacggcgtggtaaataaatcgattgggccatttttcccaattgatacaacatactatattgatgatttctacaatcagccgttagagtttttgttttactacttatcttttttacctttaaccaagctaaatcgttcaactgcaatcccgggtcttaacagggatgatgcctataatttaaatattgcgttaccaccgcttgctgaacaaaaaatcatcgccggaaaactcgatacgctgctggcgcaggtagacagcaccaaagcacggcttgagcaaatcccgcaaatcctaaaacgttttcgtcaggcggtgctgtctgctgcagtgggcggaaaattcacaactgacactggttttatccaatcgccattgaccataggccatgaaacatcgttcagtcctaagggatggcaatggcataaacttacagagctggcacaattagagtcaggtcatacgccaaggaaaactatttctgagtattgggataatggggatattccatggatctcacttcaagatattagagctgtacatgggaaagtaatttacaaaacgaagttcatgcctacgcaaaaaggtattgataattcaagcgcaaggctattaccagaaggaacagtatgcttctctcgtgatatatctgtaggttacaccactatcatgggaacaagtatggcgacgacacagcattttgctaattggatatgtggtaaaaagttaaacaataaatatttaatgttttcttttatggctgcaaaacaacatttaaccaaatcaggccaaggaacaacagttaaaacaatttatatgccagcgctgaaggaattacagattttaatcccaccactcccagaacaacacgaaatcgtccgccgcgtcgaacaactcttcgcctacgccgacaccatcgaaaagcaggtcaacagcgccttaacccgcgtcaatagcctcacccagtcgatcctggcgaaggccttccgcggcgagcttaccgcccagtggcgggctgaaaacccggatctgatcagcggtgaaaacagcgctgccgccctgctggaaaaaattaaggctgaacgcgccgccagcggcggtaaaaaagcctcacgtaaaaaagcataa

SEQ ID NO: 450324 - DNA, 330 bp, Serratia marcescens
atgaaaactctacctgcaacaatttcgcgggcggtgaagccctgtctgtcgcccgtggctgtctggcaaatgttactgacacgcctgctggaacaacactatggcctgacgctaaacgacacgccgttcagtgatgaaaccaccatccaggaacatattaatgctggagtaccgctcagcgatgcggtgaattttcttgtcgaaaaatacgggcttgtccgtatcgaccgaaagggattttcatggcaagaacagagcccgtatctttccgtagtggatattttgcgagcaagacgctctaccggcttgctaaaaactgacgtgaaataa

SEQ ID NO: 450325 - DNA, 480 bp, Serratia marcescens
atggaacagtcacttatcccactgactccggcactaccactaaccgcacaacgcacggtaaaacgcgccttaacgctgcttgaccgacacctgcgcgaaacaggagtggcattcacctccactcaggctgcccgtgactggctgaaactgaaaatggcgggactggagcgcgaagagtttatggtgctgtatctgaaccagcagaaccagttgattgcccacgaaaccatgtttgccggttctattagcagtaccgaggtacatccccgtgaggtggtcaaacgcgccctgtacttcaatgcggcagcagtgatattggcgcataaccatccctccggcgacacctctcccagcaaggcagataagaccatcacgcagcgtctggtgcaggcgcttcagctcgttgatatccgtgtgcctgaccaccttatcgtaggtggtacgcagatattgttgttcgctgaacacggtctgctttga

SEQ ID NO: 450326 - DNA, 459 bp, Serratia marcescens
atgacgacacaaacgcaatgcgaattgatgtccgctaatgaacctcaatttgaccttactgcaacaccagtacctgacgagcagcgtctcgatttctggccgctgtactttggcgatatcccgcagtggatatcgctggaaccccgtattttcgcctggatggagcgcttttgtgatgagtacagcggtggtatctggtccttttacacgctcagtaatggcggcgcgtttatggcccttgatgctgacggggacgataaatggcatctgttcaacggcatgaacggcaatggtgcggaaatgagcgcagaagccgcaggtattgctgtctgcctgattgaatacagccaccacgcctgtcgcaccgaatgcgatgccatgactgaacactattaccgcctgcgggattacgccctgcagcaccctgaatccagcgccattctacgcattattgattaa

SEQ ID NO: 450327 - DNA, 411 bp, Serratia marcescens
atgctgaaaatgataacctctgctgtacccgccctcattctgtcacttgccgcattcagtgccagtgccgctcagcttccggcaagccttatggataaagacaatcccggccagcaatactggtgccagggaaacgatatcaacacctccatgtgctcactgacaggtgtcagcgacgaccataaatttgccctgattcacgacctgccgggcccggcctgtgaagacttaagcttcgggattatcgacctcgtacgccagaccggtgtcaacattccttacgatggtggtgactgtaagggcgatgtgcaggccggttttgtgcgtggcacgaaagataatgccctgtatgtgaaaattgtacggggcagcaaaaccctgcggctgtataaggtgcaaaccggttactga

SEQ ID NO: 450328 - DNA, 438 bp, Serratia marcescens
atgaaaacactgattaaagtactgggtattaccggcagccttctgctctgtgcgggcgctcaggctcagccttataaccggaccctaccagctgtcgtcaatgacaacaacgggaatattttctggtgtgatgcgcatcgtcaggttaccggaaaatgtgaagccatgtctgttgaccgcctgggtgggatggtaacagttcgttcagcaccctttaaggactgcgaaggtggcctgtggggctggataactatcatgcgcaacgatgtgtcgaagggattcaccattactccggacaagaaattcggtctcaccgtaaaagacctgtgccgtccgggcacggtagtgacctttaagcccaaccagaagaagcctgaatatgacgacctggtggcactttaccagggcaaagagctgtttcgctaccggcgtttctga

SEQ ID NO: 450329 - DNA, 537 bp, Serratia marcescens
atgacctggcattacgagaaaaatggcatacgtcacgacaatgtgaccgaagacgacatcaccagcctgattatgcgcggtgaactgactgcatccactctggtgtggcgacagggaatggcagagtggcagccggtctccgctactccgctggcttcggcgctgctccggagcaccacaccaccagcactgccggggaaccgcattccgggtggcgttgtgtggacgctggcatttgctcccttcattggctacgcgctggagttgtggactgcagggctgaacgggatgtcatttgacgaggcatatgatgccgtctcgggtgggcagtactggtttatcacgctgctgctcaatattgctctggggtatctcgatgaacgacgcctgcgtaaggccggagtggacaccaccacgttcggcaaactggcctggctggtgccgttctatctgtggcggcgggcgaaaactctcggtcagaaaccggcttacttctgggtatggcttttgatgctgggcctgaccgtctgggcctaa

SEQ ID NO: 450330 - DNA, 708 bp, Serratia marcescens
atgacacaggcagagcgccgtcacgaccggctggctgtcaggctgtcactgataatcagccgcctggttgccggtgaaacgctgaacatggcgcggcttgctgcagagtttggtgtgtcagtccgtaccctgcgacgggattttcgcgaacggctgatgtacctcgaccttgagtatcgacgggggcaatgccgcctgcgcagcaccggtggaggcgtacagggcgagctggatgcgctgacctttgctcaccgggcaggactggccgatatctttccggggctggaccggcgtctggcgggaatgctgctcactgcaggagggatgccctgtctggtatggcagccgccacagtctgtgtcaccggccatctcactggtattctaccgtctcgtcagtgccattaccgcctgccagcgggtactgctgctggccgagggagagcgctgtgacgggctggccccgtaccgcctgatatcactcgacggctgctggtacctcactggtgaacttaacgggtatatcaccgtgcatcctctggcgaccatccatgcagtgacagtcctcaacaccacgttcaccccactaaaacgtctcagccagttaaccacacaggcgggctttatccgggcccttccgcacttcagctgtatccgtgaagtcctgtctcctgggccctctgaggagccgggcaacacactgatttaa

SEQ ID NO: 450331 - DNA, 864 bp, Serratia marcescens
atgaaacaatttgaagggttagagccactacagcaatcgctgtctggtctgccacaatgggttacatcccgtattctccagcaaataaatcagcttagtcactatgagccggtgattggcatcatgggtaaaaccggtgcgggcaagagtagtctgtgcaatgccctgtttgcaggggacgtttcactggtcagcaacgtggccgcctgcacacgcgaacccatgcgctttcgccttcaggtggggaaacgcgtgatgagcctcgtggatttgccgggtgtgggggaaagcaatgctcgtgatgtggaatacgccgcactttatcgcaagcaacttccccaactcgacttagtactgtggctggttaaggccgatgatcgagcgctggcggtggatgaacatttttaccggcaggtgattggtgagtcttaccggcataaggttctgtttgttatcagtcagtcggataaggtcgaacccaccagcggtggtgaaaagctgtctacagagcagaaacaaaatatcagtcgcaaaatctgtctgctgcatgatctgttccagccaataaaccctgtctgtgcagtgtcagtccgtctgcagtggggactacgggtgatggctgaacggatgattcgttgtttgcctcgtgaggccagcagcccggttgtagctcagcttaataccccacttcgaaccgataccgttaataaaaaagcccgtgacgattttggtgaaacggtcggctcggtactggacacagtaagttccatgcccctgataccggctccggttcggacagtcatccagtctgtacgcgacatcgtggtatcggtcgcccgtgcagtctggaatttcttcttctga

SEQ ID NO: 450332 - DNA, 321 bp, Serratia marcescens
atgactgtgatagagaattatgacgacgccgacaatgtattgcttaacctcggcttggctaatcccggagaactctcagcaaaggtggcgcttgcacgcaagcttaacgaactgattgagcaaagtggcctgagccaaaccgagacggcagcgattactggcatgacgcaaccgaaggtgtctcaagtacgccgtttcaagctccaaaacatctcactcgaacggttaatgcaggcattggtatcactcgatcagcatgtcgaaatagtagtccgttctgctcagaaggcaaaaaaatatggcattacagttgtggtttga

SEQ ID NO: 450333 - DNA, 531 bp, Serratia marcescens
atgaaaaggaaaacgtgtgtggtgaaacatgatttctcaaatgccacacataagaagcggcgcagtgcctacaaaaagtttctccaggccgggggcgaatgcagccctgttgacgatttttccaatgatgagctctgcgatatttactgcactctgttcaaactgagatggggcgactacccccaatgctattctagagaggtcttgttggaggtgttcgaggcactgcgccatttggtatttggtcatatcttgctgatgaagggagaaccctgtgcgtatgatctcgtgtttaaagcagagtgtcagcaatggtatttcttcgactgcattaatggcggctataatccggcctatgcagatcagagcattggcagcattctcatgtatctgaatattcagcgcgccagagaaatgtgtcaagtgaaaaacgtgaaaatggccttctcactggggatggataatccccgatggcattataaacagcaatggtgcaatacatttaccttaggacgcacgttgaggttgtaa

SEQ ID NO: 450334 - DNA, 795 bp, Serratia marcescens
gtgacacaaaattatcatagcgtcgcggacgtcgagaagatcaaacgctggtcacctgtatggatcatacccatagtgaccgccctgatcggcacctggatcctgttctaccactttagtcatcgagggccggtgttaacgttgctcacgacaacagcagaagggctggaagcgggtaaaaccaaaattaagcgccgcagcgttgaggtcggtgttgtggaaaacatcatgctgagtaatagactcaacacggtggaggtcagggcacgcctcaatcctggcatggctaaattgttacatcaggactctgctttctgggtggtgaaaccgcaaattggcatagaaggcgtctctggtctggggacgctgctctccggagcgtatatcgaattacagcctggcagcaaaggccgggagggcaaagaggtgtatcgtctgctggacgccccaccgctgtcgtcgccggatattaaaggattgcgtatcgtgctaaacagtgagaaatcgggtcagcttaaccccggtgatcccgtgctgttccgcggttttcgtgtcggttcagtggagagcagtgacttcgatcctaaaaaccgcgtaatgcgttatcagttgtttatcacggcaccttacgatcaactggtcaccacgaacgtgcgcttctggaaagacagcggtgtcgcgttcgatacttcagctcagggcatgcgtatcgagataggctcaatgacgactctgtttcgtggcggagtgagcttcgacgtgccggaaagcggggagcgaggtgaaccggcgtga

SEQ ID NO: 450335 - DNA, 540 bp, Serratia marcescens
atgcgtgcttcgatgaagtctgccaatctgctgaccggctcattgtacgtcgatctcgacttttatccccaggagaaagccttgggagaaccgcgtgaattatttggttatccgttgatgccgaccaccagtggtggtctggcacaaatacaacagaagcttgtgaaaacgctggacaaaatcaacgcaatgccgattaatccgatgctcagcgaggcgacaaaaacgctggcagaaagccagaaaaccatgaggtcgacacaacaaaccatgacgtcattgaacagcatcatcgccagcaaagagatccaggcattgccgcaagacatgcagaaaacgctgcaggaactaaaccgcagtataaaaggattccagccaggttcgccggcatacaacaagatgctgggggacatgcagcgcctcgaccaggtcctgcgcgaactgcaacccgtgctgcataccctgaatgagaagagtaacgcactggtatttaaagctgccggcaacagcgatccacagccgaagaaagccactgaatga

SEQ ID NO: 450336 - DNA, 717 bp, Serratia marcescens
atgacactaacgactgagcagttgagagcgcgcgctgaatctctgggactggatttcttcatcgaacgacgcgccgggatttgggtgaaagagtggtttgacaatggatgcacctcggcaaccgctgaagaagtcatgatgtggtcaatgctggctaaccgggaggcgcagcctgtggcagaactggtttattcatccgcaatgccatgtttcatcggagatacgaacgaagtcgaaggctaccggtattggattcacggagagacgcgcctcgtacctacgatggagcaagcctatgctgatgccaaagcagtatgcaccgcagcgccagcgccagcagtgccggatgaagaaacaaagaccgcgctggaaaaagtaatttccgaaaactggcggatgcgtgacgtactcagaaaacttttgaataagcgccccggcggagtttatttcaacaaatgggagccggtacttcttgaggcgctaaacgcaccagttaccgacgactgccgcgccgcaatgctggctcaacctgtaagtagcggttacacgttgaactctccggaaattccggaaggttggaagctggttcctatagatgcgacacgggctatgattgacgcagctaagagggtggaagaagacggctacgacgccatgcacaaagcaatgctggcagcagcgccggagggtgggaatgatcacgatacccgacgataa

SEQ ID NO: 450337 - DNA, 303 bp, Serratia marcescens
gtgacaatagacgaacttgtcgagctgacgcctgaacagcgtaaagcctggagaaggattgaatctgccgtaaaggccttcaaaaaagccgggggagagttctacacagtgctggagtcggtgcgcggctacaacgggaaatacgtagacgagatcaccggtgacgaacgtgaatcgcattatccaactactgatgtccatatgcataccattttcgacgccggactttctgggtttgcagatgatacgcacttcattcacttgaccgacaaaggcgaagcgctgcttgagggggatgcatga

SEQ ID NO: 450338 - DNA, 306 bp, Serratia marcescens
atggctaatcgtaagagcaacagagcggcgcgttggctattcggaatgaaagccaaagcgagtaatagacgcaaggtgtgtaactactgccaattcaacatgtgggatgactcaggaagctggatgattgttggcactgaaccagttaaatcatcacgcagccagcggcgcgcaaaacgcatcgtcgaagaggtgcgaatcgagcggcacttctggatgaatgttaatgctggcatgagcgataacgaggcgtatgcagccgcggtgaaaacggttaagggcgaggcccaggagaaagcattatga

SEQ ID NO: 450339 - DNA, 249 bp, Serratia marcescens
atgcaaacaccacttagaaatatgcgtgtaaagaaagagctcaagatcactgacgtagcccatgcggtcaattgtgaccctggttacctgagccgtgtagaacgtggcgtgcatacagcctcgcctgagttggctgaaaagctatctcgattctactccggtgagatcaccgagctgcaaattctttacccaaaacgttatacgcgagccagcgaaagccagccgccaatcatcaaccaatcactgtaa

SEQ ID NO: 450340 - DNA, 147 bp, Serratia marcescens
atggcctgggacacgtttgtttacgacaacatcaaaaagcagctggcgcgccagtacgttcttgcgagctgcaccaaggaagagaagccggaatcagggaagaagaaaagccgaacagctgcaactgctcggccatcacttttctaa

SEQ ID NO: 450341 - DNA, 201 bp, Serratia marcescens
atgcttacagggttttcaaaacaggtagttagatttgccggcgtgctgtctgtttgcgcattggcgactggattcactacatactcagaatctccttacagatttgcagggtgcctgatcatgattgcactcagcctgcactcggagtgggaactgtaccgggataggctggtaagcaagaaaatttctgataaaagatag

SEQ ID NO: 450342 - DNA, 1893 bp, Serratia marcescens
atgaccacttacaacacaggaaaccctgtcgggcctaatggctcagctgatccgcgcgatttgtatgataacgcgcaagttatggatttattgataaattcaataatcgataaaacaactggacgtattggtaatgagttaatcacctgggctggattggtcaaaaatctatcacctcttggtaaagcatataccaaagaacaagctgatgcagccattgcctcgggagaaattccaaacgatgcgtttttctttatatggtcaaatgatgaaaaaacaatagctgaccaataccaaaatttaaatggagttgcgacgccgacaggaaaaagcattaagagtggcgattatatagattcacttgctaaagccattgacgatattaatgccattcttcctgcatgtcatcagatcccatctcttgtcgcgttatatgtagatgaagaagggaatgtcccaattcacctgcaagatgggaagttggccttcgctggaatagactcaagttcagcgcaagatgtaataaattcaagcgaatcatttccggagagagagatgaacccacagcttgttgcgttgaatgaggatgaagctggaaacgtgcctgtttggttagaggatgggaagttaggggcggctggttttgagccaaaaacagcagatagggcggtggattcatcatcatcttttcctccggttagaatgtcacccaatcttgtcgctttacatgtagatgagaatggaaatgttccgctatgccttgtcgatggtaaaatagagggtttcccatccgatctgttggcatacagaattggcgaaatcatagggacaggtaatagcgtagttgtccgaaatacatctggcagtacgcttcattcaatgcggattaaaaaagcaaaactgaaaaccggcgttagcggccgcctggtgggaatggctgtcggggattcgtggtcagagttttataacatttcacaggccatggcagggcgtatgtatgcagactggggtcctcgcacgggcgctggttggttccagctgattaccgatccatcgtcacgctgggaaaacatgatagttacgcgaagcgggtggactgaatacgacgcgagctattcaaatgctcagccgccctatggttgcggggttgacggtctcgcttattacacgtcggccaataacgcaacagcttccattactaatgtgcaggacactacgggaactgtattttattatgatggcaatggcacgtttgtaatcggcgttggcagcacgactaaaacagttaccggtacaggctctggcgagtacctcagcacatcaattcccgggctaacatcggggttggatacagtgacgattacaacaactgggaacactggagttgtgtgtctgcacggatttatgtttgaaacagatctaaatagtggatgcatgatgcacaaatgcgggaacggaggaacctgggctgctcagcatactaatttcattacaccacgcattaagtattttgctcagatacttaaccctgatttcatcatagttaatctgggtactaacgacttcttgcaaaacagaaccactgatacatatatcaccgcgttgaacgggattattgacgcctggcgcgcaatgctgccggaagtcggaattattctcgtttcaccgccagtgccaaacgccgccggcacaacgcccatggcggatttccgcaacgctatgcgtaacgttgcgcgtgataaaatcgtggaatggtatgacctgtatggtgatatgccaaaaatttgggcagtgggaaatgcaatggggtggtggaaagactcgtatcacccgaatgacgtaggcgctgcacaaatcgtaaacactctgttcgaacttctgttaaataaataa

SEQ ID NO: 450343 - DNA, 774 bp, Serratia marcescens
atgaataccaacgtacataagctacgtggcattgtgcttcccgcaggccctgcgtatcgtaatatctctgaatttgttgtcgaaaacccatattatgatctacctgtactggacgggcttattggcgcctattttttgtcaaatcaaatggtaaatccgttaaataatcatgcaaatctttctaagcctttggttcggattggtagccctacggttggcgcgaaatttacttccttcagtgacggcaaccaatacgatacgcagattcctgttggaacggcagctgcgggtaacgcatcaatgacaattattgctgttgcaaaaaacccttccacaacagtggatgcgtgggcaattggcaactatacgggcaataatggcagcagcaatgataacattttaatgaggaaagataccaaaatggaggtgtacacctccaatggcacaaatttagtatcaaccgtaacggatttgggggccgccggaacagcagggcaactactcgttgtggcgggtcagtatgggccgactagcattaccggctcatgttaccgaccggcaactgacaacctgctgcagggtacagccgcagtaaacagaaaaaccaatgtaatcactaactatcgaatcggcggacgcccaggaatgacaggtaatggcactcctgatgtatctgctgttctgatctacgaaggaagattgtcggattcagacctgctgacagtgtgtcgctattttcgcacaacatttggaactcggtacagactgtggtaa

SEQ ID NO: 450344 - DNA, 210 bp, Serratia marcescens
atgaaaaaaaacataatagaaaaccgtttcaacatatggctagatatgacatttaggattttaggagcttattgcctggttgacctcataattagctggcgaaacgatgttattcttttctacatcaacctatttatgatagctgcctggatagaagttgagtggcgaagatggggtaaagaactagccaataaacatatgcataattaa

SEQ ID NO: 450345 - DNA, 174 bp, Serratia marcescens
atgcgcctgtctctggtatttacgcattgcctggagaaagtatttcattgccaaaatatgccgcccgttgccgtagaaaatcggctgagcgggttaaataacgaggtgctttcctggcaggcggcgtatatcagcgtgcgccaggtgcaatcggtaccgagcggttttccctga

SEQ ID NO: 450346 - DNA, 564 bp, Serratia marcescens
atgaaagatttagcccatgctgtaaaaattgaatcacccgttgcaagtatcagtcacctgttaccattcgaacaaaagcagcatattcaaaagttgtacttcccacggattcaacaggccactgaccgaatgagtaaagctgaatttgaatatcaaaacgctctagaatctcgttcagtgttgattaatcagaaagctgctgagtatctggctaacccgtctgaaagacacggattcattgtgaagcaggtttacccgaccaaccaacagcaggtgattcaatcaatggctgatgctggctatatggtacaccgtgtaggaatgggcttaatctatttcatctcaactaaaaagaatgccctgaaagatgcaactgataaggcaaccgctgaagctgaattagccattgaaaaaatgattgaacgtctaaaggtaaaagcctctgaagctgtccaccaacgtaatgtaattgttattgaagcccgtaaagctctggatgctgtaaaagactttactgattacctgaacgtgattgtaactgactctgaagaggtaaccgaataa

SEQ ID NO: 450347 - DNA, 231 bp, Serratia marcescens
atgtatttactgcaggaagtgaacaggcgatctgacatttggtgttcagagattatctgcgcaagcatcatggtgttgctcagcaatatgcggcaatcaaacgtcaggcagcagaagacagccggcaaaacccggcaaaacccggcggcttatggccggttgaaaaacgaatttgttaagcggcatgagcagctggcgctgatatggttaaccgcaggagaaagcccatga

SEQ ID NO: 450348 - DNA, 270 bp, Serratia marcescens
atgcagagtcaatattacttaatccaaatttggtttcgcaaacaacacaagggttatcctttccataccaaaacaatacgtgtgaattaccttcaaacgagctttcctttaaaaaaacctttagattatcatatgttatatcaccatcatgactcaacatctcctgtatatctgcgctccgatgatttagtttttcatagtctatatgaccagcttcccaaggtagagaagataatttataaaataagtcatcagataacgagtcgttaa

SEQ ID NO: 450349 - DNA, 876 bp, Serratia marcescens
atggggatgacgcagcaaaagcatttttttgatgttaccgaaatatcgcaacgagttaaggtcgaaaaaccttattttgcttttcaacaactttggtcagatgaggattcactggttggcactttttcttctgagcagcctcttgtctatgaggccggtctcattacagctggtgaactgggaagacatatggctattctgggcagttgtactgctgccgcactacacaatgggcctgaagggtattatcttgcaacaaaagcgcattttatacgcaagcaaaataatcagactgcggcccatggaaggttttatgccagttcccgggttctgcatctcgataagcgctccctgaaagtctcagcgcaggcatggaacagtgagccagtggcagaactgatatgcgaatatacaattctttcacctgcattatttcagcgtaacttccgacactacgctaatgatagcctgtcgacgccctcaaactccccttataaacgtcctgtgcctatttacaacctgatgcttcaacatgaccgacttgatgcttgtgctggtcccttgtcccccctccagtgtgctggccatttttctggttacccatgctggccagtcgccattatttcacaaactgcgtttcaggttaccggtgagttgctcaaaaaaatatatggtaccggaacacgcttctgtgtatgggatactcagctgtcggcagaaaaactgatcggggctggcagtgttttgaaattccgtatagaaataatggcagcacccgaaaacgccaaccagctaaaaagcaccgtgagcgtttataaggatgatgaactggtcgcgtacctggagaaccaattggaattagtgttagctggatga

SEQ ID NO: 450350 - DNA, 309 bp, Serratia marcescens
atgactcaatctacagaccataaaaccgccagaaatcgttaccctgatgaattccgtgagcatgccctggctctggctctggctctggccctgcggatcggcgttgccaaagccgccagggagctgaatttgcatgagtctcagctctacgcctggcgtaaaaaaaagcagcaagtattgacatactctgagcgggaacaacagcaactcattgaaattgcaaaactcaaacgccagttggctgaacaggccgaggagttagccattctccaaaaggccgcaacgtactttgccaaacgcctgaaatga

SEQ ID NO: 450351 - DNA, 396 bp, Serratia marcescens
atgcaacagcatcaggctgattttcgtattacctgtatggcccgggtcctggctgtcagccgcagcggattctatgcctggcgtcagcgagccgggcaaaaagcaccttcacagttacggcgggaactctgtgccagccgcgtcgccagcgcttttgtcgagcataaaggccggtatggtgcccgccgcctataccatgaattgcgggcagaaggctggggttacaaccgtaaaacgatagccgccagcctgcggcgacaagggctgaaggcgaaggcagccaggaagttcaaggtcacaacagattcgaatcacaaacgtccagtggcccccaacctggggttctacgccggaaccctcgaaaattctgtaacgtttgtcacttttaaattatga

SEQ ID NO: 450352 - DNA, 291 bp, Serratia marcescens
atgaaaaaattaaaaccgcaatatcgagctcttagcgttgtatctttctacgagcggcatttgctgacgtacccacagctgagaaatgcgtactataagcatttcagcactcggcaagagaaaagctttttctatctgcatcgtattgagtacaaagcctatccgcttaaactgagagccgcacgaggaaagtcgctggccgatccctgggatgattatccttcaaatgtagatagtctcaccaaaagctggaagcacaacgcgaaaagacgtcatcagtactatcgatga

SEQ ID NO: 450353 - DNA, 465 bp, Serratia marcescens
atgtcatccgcaaaacatgacttcacagacccggccaagcaaatgggagctggagagcagtatcgagcagcgttcgagcgcctaaaaaacaacaaacccgaaagactgccgaaaggaacccctgtcagtcagaataatgtggctaaagaggccggcagagatccctccgcattgaagaaaacgcgctttcctttacttatcgccgagatccaaacctatgttgcatcgtatgcagaggatcgcccattatccgttcgccaggtcagtctattagcccgtcaaaaaaatcgtgggcttcgagagcggattggcgaaattgagcagcagcgggatcacctggccagtctgctaagtgaagccgacgcgaccattcttgaactgtatgaccgtattaccgagttagaaaggcaactaccgggctcgaacgttctgcccattgatccgcgaggccgtaaaaaactttga

SEQ ID NO: 450354 - DNA, 2040 bp, Serratia marcescens
atgacgaaaaatattctttccgaacttcgccttggtatcggctccccccttgcagagcctgatgcacctaattatcgcccacagtgctggccaccccagcctgattggccagtcattcttgatgccgctggtgaggtggtgagccgttggggggatgccgtttggcggctcgacccgtgggcgggaaaagcgattacgcttaatttcggcgatggcccggcaaagaaatatgccgccgcgatagatcctgttaacgccgatttactgcggttaattatcggttggtggctgtatggccccaatggtacccgtggatatcgaggtctgaaaacccgctttgatcaaatacgtaagatcttcgttttgtgtactcaagaaggcattcttgcctccgagttgagccagtttccacgtgtggttgagtgcctttcgaaaaagctgcaagtttcccgggcatgggagcttttgacactgttgcacgaactgtatgagcagcgagatacactgggttttaccttgttggatcgtgcagggctggcacgccttacggcggccataccccctcaccaaaaacgccaaaccccctatattccccctcgcatttggcattatcaggttatgcgcttacgcgaatgcctggatgattttttggcgcataaagagaagattgaggagtgcttccgtttctgcctggcggcctataggcataatgctgccaatctccaggggcaaatcagaccgtcatcgttctatccctttcagtggccttcggatggaacaaatggaaagttaaccagacgcaagtactacggcccttttatcgataccgcgcatcggtttggcatagtggggttgtttggccgctggctgggtgtgaacgacgacgaaattcgtattcaaacgttgagtcgctacctgagtcttgtgagtcatgcagggttaagttatctgctgaacttcagtctcatgcgagtcgaagaggcatggaatctgcgcgctgattgcttgcatattgaacgtgatccgcaatttggcgacatttatgtattgcgtgggcgaacaacgaaaacaatgcaagatgctgaagccctgtgggtaacgtctccctctgcctgcacggcggttgaagctatgcgcagggttgcagatcttcgcgcagaatgtaacacgccctctggcgtaggttctgaacaaggaaactcctccaatcattatttgtttgattacaggctggaaccctggggagcaaagctcactaaaatcaaccgcacgattcgtcccacgattctgagctatgccaacgtagttcagtcgttcgataagctgttcgatcccgagcaattgcgcattacggcagaagattttgaattggcgcgattggtgacgccaacgttgtccgaggagtattcggcgggtaaaatctggccgttggcctggcaccagctgcggcgaaccggcgcagtcaatatgcaggcatcaggtttggtcagcgacgcctccttgcagtttcaactgaagcatgtcgccagagcgatgagcctctattatgggcaaaaccattcacgggtgcgaatggaggaaaaggctcatagctactatgtccgaactatgtacgagatgttaggcaggcaattgcaacaactgacgagcagccggttcatcagcccccacggagaaaaacggaaagccgagatagtccgattgatttcggccgcagaggccaagaaaatcatcaatctggccaggaagggcgtcgtggctcatcgccccattttgctgggcgtctgtaccagccgaaccccttgtccttacggcggtatcgacaacatcgctcgttgtggagggggggattccccagcagaccccaaaccttgtgcggacgtactgtatgatcccgatcaacttgacgaagtcgaggcgtttgccgtagtactggacgagcggctggccatcgccgatgcagacagcccgctgagggctgcactggaagcccaaaaacgcagtgtggagaactaccgccatgtcatccgcaaaacatga

SEQ ID NO: 450355 - DNA, 1731 bp, Serratia marcescens
atggatagttacagtatcgatctcactttcccgatgcttgagtatgggggggctgaaacgccctgggatctccggccgttgctgtttcgcggaggcgcagcggcaaaggtaaagtctgtggcccgccagatcgcccaaggcgagtttggtgaccttttgacagaacgtattgaactggtgacaaggctacatgaacatgtcgccggcgatcttgctggcggcggcagccgcttctcggcaaaaaataagataggtgcgttgcggagtttctttgcctggtgcgatttggcaggcgataacctcagtcttgacacggtagccgacacttttattcgttggaccgaacatttgctacatcgttatcggattgagcacagcctcagtgaggggacgttatacgatctctccaggctcacggcgacgatgcttgatcgagtattggatcgccaggcaagtctgagcaagagcacgcgtattcgcaagccgctcggcaaaggcaaagtgcatacgagcaaagcggataagcaagatctgcaaaatacttttgcgttcgggcatgttctggcagatatatgcaatgctctgacctgggaggtaacgataggacctttgccggtctgcatccgattgcgtacaggccagatactgaagcaatggtctgggctgccctacccggagaaagtggcggcgcgccgtaccagacctcaaacaatgacgcagatagaaaagtcgcgagtagcacgtgctgcctgggaagaggatcgaaccgtgcgaactcgttccccccttgtcaacttacgcatcgaaagtgagttgctgatgttcatcgctcagaccggcatgaatctgcaacaagcccatactttgcgggtcgaacaatttcattacgccagccacctggatggctaccaggtacgtgcatacaaaagtcgacgtgaaggtgaagtgctgttcgagatctttgctggttatcgagagtggtttaagcgttatctcgaatggcgttcggcgtggtttcccgatgagatggaaagtctgctctttccactgatacgttgcgggggacgagttttggaggaagcgacgcagttcaccaacgttatgcgcatttgccgcgagcttgggatgccgatggtgagaccgcgaaaactgcgcggggtacgcatcaattggctgcttcgagagtcccagaacccagatcaggtggctgagttggcccagcacacggtggaaacgctaatacgcgtttacgccgccccccatccgcagatcgctatggtggagattacacgcttccatcaacagagcgatccgtccctttcaccacctgcaccaggccgatgtgtctcggtcgaacctgaatcaatggttgcgatgccgaagaacgctccgcgacctgactgtataaatgctgcaggttgcttgttctgtattcagcaccgggatatcgaaagtgaagatcatgtgtggtctctcgatagcttgcgttacctaaaatcgcttgagctggcgcgctaccgcccccctgttttgagtcagaatatggcggcagaacatccggccctgttggtcattgagcggttggcggctaagctgcgcttttttgaagaaagtagtgaagttcgtaggctgtgggtcgaagagtcgaaagcccgtatccgtgagggcaattatcacccggcctgggatggtttcatccgcttggcagagttgcggcagaaatcatcatga

SEQ ID NO: 450356 - DNA, 591 bp, Serratia marcescens
atgcataacatcgacattgaagatcgtttagcggcgctgagcgccgccatcgccgaccgcacccgggcgcgcatgctgtgcctgttgatggacgggcgcgcctacaccgccaccgagctcagcgcggcggtcgaggtcgccccgtccaccgccagcgcgcatctggcgaaactgctggagcagcggctgatcgcctgcgtcaaacaggggcgctaccgctatttccggctggccgggcaaccggtggccgacgcgctggaaggcctgatggcgctggcgggcgtaccgcgcccgtcggtgaaaagcagcacgcccaccacgctgcaatatgctcgcacctgctacgaccatatggcgggcgaggtagcggtgaagctgcacgatcggctgcatgcgctgaactggctggccggtgaagaagactaccgattaagcgacgccggtcaggccgcgctgacgcggctgggcgccgcgctgttggccgcctttatccaacgcggctggatccttcgccggctcgacagccgcgagctgcagctgacccccgccggtaaaaaagcgctggccgcacattttgacctcacggtgtaa

SEQ ID NO: 450357 - DNA, 1212 bp, Serratia marcescens
atgagcgtactgaacattcttgaagaaaagctggcggaaaccaaaaaacaggggcgttttcgcgagtttctcaaccttgaacgcggcgtgcaggacaaaccctgggccaccagccacggacaccacggtgagcgccgtctcaacgtctggtgctcgaacgactatctggcgatgagccaccaccccaaagtgctgctggccaccaccgacgcggttaaccgggtcgggctgggcacctgcggcgcccgcagtatttccggcacttcggtctaccacagcgagctggaaacgctgctggccagcgcctacggcaaagagtcggcgctgctgttcaccaccggtttcggcgccaacgacgccaccttatccaccctgtgcgacgtcattcccgatctgatcgtgttctccgacgaattgaatcacgcctcgatgatttacggaattcgctacagcaaagcggagaaaaaaatcttccgccacaatgatgtagcacacctcgccgagctgctgcaggccgccgatccggcgcggccaaagctgattgccttcgagtcgctgtattccatggacggtgactttgcccccctggcgcagatcgtggcgctggcggaacagtatcaggcgctgacctatctcgacgaaattcattcggccggcgtgtatggcgaacggggattgggctatgccgaacagctgggcctgttggataaaatcactattatccaaggcggattcggcaagtcttacggtgcggcgggtggctatatcgccgcgccccgctcggtggtggaagcggtgcgcagttgggccccagcattcgtcttcagcacctcgtcaccggcgccggtggtagccgccgcgttggccagttttagatacaacctcgagcatgacacccagcgcaagcacctgctggcgatcgtcgatcacctgaaaaccggcctgcgcgccgccggcatcccgctggtgtcggcagacagccatatcctgccgctgctggtcggcgatccgcaccgcaacaaacacatcagtaaagtgctgctcgatgagcatgatatttacgtgcaaccggtcaatgccccgacggtgcccgcaggcagcgagcgactacgggtaacgccgacctcggcacattcccatgccgacgtggagaccttcctggcggcactaggccgggtctgggcagcgaacgatctgcggagggcaggatga

SEQ ID NO: 450358 - DNA, 705 bp, Serratia marcescens
atgtcaaaaaaaagtgaattcctgactaatggtgtgacaaaattggcattttcatttgatgctcttgaacctataagggagttgtacttagatataattagagactctttagatcctgctgtggatattggtatcaaagcgcatgaggattatagtgaggagtttaactctgtcagtatgagatggtattttgcaaaatcacctgaggcattgaagatatttcgtgatgtcctagatggttgtgagcttgctcttagtagagatattattgggagcaatagagggactatgcgagttgtgcaagccaacatcattgagactataggtagctatccaacggggcggtggcattctgacttctaccatgaagggctgaaggggaatgagagtggtacgctacttacgcctctattccctttccaaccatactttggcggtctagaaacgacatcagcccatcgtgacgattatgataattatgatgagctttcaaccgtacataagtataaagagggtgaggcaattctttttgatgggacagatacgatacacagaacacagtcatataaggcgcacctaaatgataagcgaattcttgtttgttggcagtttggatgtacccgggatgacttacagcctattctaacaaaaataggagagaacaacggagatccaatgtttttccataagcatgagtatgtttga

SEQ ID NO: 450359 - DNA, 1230 bp, Serratia marcescens
atgactcaagcagatgctgatgtatcagaaaacaaatcaaattcagaactattgcatcatataaccctaatcatagggttggtatgcgtaggtatagggcaaacattgctttataccatcctcgggccggcgagtagggaaattggtttaactgaatttaatgttgggatgattgtaaccattgcagcactagttataacgttgtgctcaggtctgtgggggaagctgattcgaatatttggaagtcggaattcttacttagctggaatgatattctatacgataggtacgttgattttagctctagtgctaaagattagtcttagtcattacctttcaattacctcagcatttttggctttattgtttgttagatgtataacaggggcgttaacagcaggaatacatccttctgcgatgacctatatcgcagaaagtacagataggaaggagcgtggcgcggggatggcgttaatagcttctgcgtatggtattgggtctgtaattggtcctttgctggggtcatcattaggctcgttctctttgttattaccaatatatgtggcagctatagtttcatttgttggaactgtattaggctttattatcttatccaagaatacagtagagtctgtaagtgcatcaatggaagaaagaagaactataaaagtaaatgataaaagagtgcttcctgtgtttataggtattgctctaacttacatagcattttcatctttccaacaaactatatcattttatattcaggatttgttctcactggatccagagaaggctgtggcggaaacaggaataacagtttccataatggctgttgcgatggtctttacccagttggtttttattcagatgtttaaaccatcttctaaattgcttttggtttttggttctttaatgtgtattttgggttttttggggatgatttcaccatgtcattactctctggtaattaacatttcatcaggattattgggggtgggcttcggaatgatgattccagctattcagtcggctgcatcattggctgtgagtaatgaggaacaaagtggagttgctggatttctttttggtgcctcagcatttgggtacgttttaggtccagcaattggcacgtatctttacagtatgtctccaatttatattttctgcttcgcgatttcggcaattatgctttcaacatatttcactgctaaggttatttacaaggaataa

SEQ ID NO: 450360 - DNA, 1227 bp, Serratia marcescens
atgagttatccgattgaacgcgtgcgcggcgatttcccgctgctggcgcgtgaggtgaacggccaaccgctggcctatctcgacagcgccgccagcgcgcagaaaccgcaggtggtgatcgaccgcgagctggatttctatcgccacggctatgccgcggtgcatcgcggcattcacaccttgagcgccgaggcgactcagcagatggaagcggtgcgggaacaggcggcgcgctttatcaacgccgcctcggcggaagagatggtgtttgtcaaaggcaccaccgaaggcatcaacctggtggccaacagctttggccgccacctgctgcagccgggcgatgcgattctcatcaccgagatggaacaccacgccaacatcgtgccctggcagatgctggcgcaggagcgtgggttgcagctgcgggtttggccgctgcagcccgacggcacgctggatctggcgcggttgccggagctggtcgacgcgtcctgcaaactgctggcgctgaccgaggtctccaatgtgctgggcaccgtcaacccggtgcgcgacatcatcgccggtgccagagccctggcgccggatctgacggtgctggtggacggcgcgcaggcggtgatgcaccagcgcgtcgatgtccaggcgctagactgcgatttttacgtgttttccggccacaagctgtacggcccttccggtatcggcatgctgtatggccgccaggcgctgctgcagcagatgccaccgtgggaagggggcggctcgatgatccgccaggtcagcctgacggcgggcaccaccttcgccgatccgccgtggcgcttcgaggcgggttcgccgaacaccgccggcatcatggggctgggggcggcgttcgattacgtcgaagccctgggtctgaatgcgatccacgattatgaacagtcgctgatgcactacgcgctcgaggcgctcaagcaggtgccgacgctgaaaatctatggtccggcacatcgggccggggtgatcgcctttaatttgggagaacaccacgcctatgacgtcggcagcttcctcgatcagtatggcatcgccattcgcaccggccatcactgcgccatgccactgatggcgttttatcaggtgccgagcatgtgccgcgcttcgctggcgttatataatacccgcgaagaggtggaccggctggtggccgggctgcaacgcattcatcagctattaggttag

SEQ ID NO: 450361 - DNA, 537 bp, Serratia marcescens
gtggtggcgcaccgcggcggcgtgacattagggccgtatgtcggcgacaccttcgccctgatcgaggcgcccggcgccagcggcgcacgggtgatggacggccaaggggcgcgtgtcgatcgcttcggctacgccctggcgctgtcgctagtgccctatcactacaacaccgtcgcgctgaaccccgagggcatgaacgacaaagcggaactggaagacggccagcgccgcgtcgccccgtacgccggcgccacggtgcgcctgcgcttcaacaccgtgcgcggccaggcgctgctgatcaccgcgcagcggcccgataacgcaccgatcccgatgggcgccaacgtccttgacgcggcaggcaacagcgtgggcatggtcggccaggccaatcaggtgtatctgcgcagcgaccggaatgccggtgtgctgacgctgaactggggcgacgcgcccagccaacagtgcatgctgcattaccgcttgcccgccggggaagacggcccgattcagcggctcagcgccccatgtcgctag

SEQ ID NO: 450362 - DNA, 1752 bp, Serratia marcescens
atgtacttaggtaggctagcaatctcgcggtttcggtcttttgatgaggtgaccgttagtcttcgccctgatttaactgtgttagttggtgagaacaatggtggaaaatccaatgtcgtagacgcaatccgattacttactctgccgttgagtggacgccgtgaacgatatccagaggatgaggatgtacgacgttattcgactatcccaagttttcagatcgaagggacttttcgagatttaagtgacactcttaaaggcctattgatatctgcagttccagatcctaccaagagcgaagctatcttcggctatcgatatgaatcccgttccgagcacacacctcgtggtaagactacagtgtgggccgggcgattcgacactaatgggccggagcttggttcttctgagctgatccggcatgtttatcttcctcctttacgtgatgctcatcaggcgcttggtactggcagtggtactagagtgatggcattgttgcgtaatttcttgccaaaagagcaagaacaagattttctcgcgggtgtcaggcgtgcagatgagcggcctgacatcctgactacaatgaatacggaaatcagtaccgcacttggactgctgactaatggagtacgcccgcagatagctgcattggattttggtgctgaatcactattcgatgtagctcgtgatttgaggttccgtatggctgatacgggcttgataccagaagatattcggtcgtctggtctggggtactctaatctactctatatggccactgttgttgtcgaactgacgaaggccaaagaggcagacctcactatattccttgtcgaagagccggaagcgcatttgcatccgcaattacaggtacttgtgcttgaattcctgttagatcaagcgcgtcaatcagcgtcacgtatcattgagccaggaaagcctgaaggtcgcatccaaattgtagtgacaacccattcacccaacttgacagcgtgggtttctccaagtcatctcgtagttatgcgttcgcgacatcgtgatcaagatgggttaattgtctcagaatcggtcagtgtgcctattgccgaaatcggactaaaaccaaagacattggataaaatcagccgctatcttgatgtgacacgctccgctttgctgtttggtaatagagctatcttggtcgaagggattgcagaagcactcttgttgcccgtgcttgcacaaaagcttgtactggtcggtgactctgatgcgtggctccgattcaagggtactgtaattgttccgatcgaaggtgtggatttccgcccctacgtagaggtgctgctacggccatatggtgatgcgcgcattgctgataggctgattgtgatcactgatgcagatccaatggtgttgggaaatagaaaagttgatctggaaaatcttgcggcaacacatggcgctcctaatgctctggtcgtactaactaatcaaaacacactggagcacgaaattttttgtgcgggaaatgaagctttcctgaaaagagtgtttcttcgtttgcatcgtaattcgcgtagagattgggaagagcagatagaaaacatcccagagcaagaccgtcctaatgcatttctcaaattaattgaggcgaaaaagactcgcaaaggtgatttggcgcaagctatggcctcacgtattgaggcgggtgaaccatttgttgtaccgccttatctcattgatgcaatccgtggcgctttgctcatatga

SEQ ID NO: 450363 - DNA, 1101 bp, Serratia marcescens
atgatgatcggctcatatgctgagctatcactatcaaaagccagagagacagccaaagagctatcggcgcgtgttgcgctgggttatgacgtcgcgggagagaagcaggaacggaaagccgaagcgctggcgaagatggaagcagagagaaacgccatgcgcgtttcagaacttgccgctgaatactttgagcgtcagatcctgccgcgctggaagcaccccgatatactccgccgccgtatcgacaaagatataaacccctgcattggcagcatgaaggttgaggacgtgaagccgcgccatatcgacgacatgataaaagggattgttgaccgtggagcgccaaccatcgcaacggatgttctacgctggacgcgccgcatattcgactacggaatcaagcggcacgcgctggagattaacccctgctcagcctttgaggtggcagacgctggagggaaagaggttagccgcgaccgctggctaacacgcgatgagttaatccagctattcaaagccatgcgcacggctaagggtttcagtcgccagaatgaaatcacgttcaaattactgttagcgttatgcgtccgcaaaatggagttatgcgccgcccgctgggaggagttcgatcttgataaagccgtctggcgcttgccagaggaacgcagcaaaaacggcgacgctatagacatcccattagcaccgcccgccgttgaatggctgagagagctacacactttttcatgcaatagcgcatgggtactgccagccagaaagatgcaaaacaggatgatcccccacattcaggaaagcaccctgcccgttgcgctggcgaaggttcgcgctgaaatgccgaacgtgccgaatttcactattcacgacttccggcgcacagcccgcacccatttagccgcgctgggcgttgatcccgtagtggctgaaagatgcctcaaccacaaaattaaaggcgtggagggtatctataaccgtcaccagtattttgatgaacgccgggcagcgctggcgcagtggtgtgatttgctggtggcgctggagaagggtgaggattacaacgtgacgccgcttaggaaagcgaagtaa

SEQ ID NO: 450364 - DNA, 813 bp, Serratia marcescens
atgaagaagaatgtttggcaagaaaatggaatacctgtcttacctaaagcacctgttccgcgtgtttgtgatttaatcgggtgtgaattgcaggatctgctcacgttatgctcctatggcatgatttggattaaaaggaagatcatcgaggagccagcaagggcaaggattttatgtgataaggcatttgaagaaagggctatagaattattgagtgcgccacctttcagcagcctatctcttgggtatgaaggcattaacattcatatcctttcagagcctaaaaaagttgaagattatccccgcacccatcattcccttttggagtttgaggttaaagcttctggcgagtacatcctaaagcctctcggctatatgatttccaagctaactatcgaagcagatccatccgtcctgattaagttcactacccacccaaagcttagttatcttcaagtggaccttaagaatcgaagccaagttttagctgatgagctgtggatcgacagggaagatatcgagaatttatatgcttccaaaattagtggtgaaattatgcagtcgaagatatttcccgagcacaactcagatggcgcagtgatagatattaatcttgcccgggtgacagcaaagcaaaccaccgtgattgtctcgctgctgaaggctgtcggagtaacagatgaagaattgaaaggcagcaccccaagactattggcaaaactccagaatatagccgccaagaacgggatcgacttccctgatattgaccctaagacgtggagggggtggctttcaagggagggggcgaggtag

SEQ ID NO: 450365 - DNA, 204 bp, Serratia marcescens
atgaacgtagacactatccctcacacaggttacatccgccgctttcgcttggctgaattgctgggcgttagcgtatccactattgaccgtaaagtacgcaacggctcattgcctcgcccagtaaagttgggtgaaaagattaccgcatttgacgctgtggaaattaataactggctggcagagcgccggggaaaggtggcctga

SEQ ID NO: 450366 - DNA, 435 bp, Serratia marcescens
atgaaaaaagaacaccgccccgtacagcaggcggctaactcagatattcgcacgtctgatattacgccgaccaccagcccggtacaaccattcaaacgcacaccgaagaagcaccgcgcccgtgtctatatgctgcgcactggcttagagggatggacagaaaatgacatcctgcgctactgccatctttcatctggtcgcaactacgccagcgagctggagcgccagcttgatatccgactggagcgtatcgacgagaaaaacccggatggtatcggcgcacacctgcgctaccggtttgcctgccgtggtgacgttctccgggtaattcagctactcaaccataacgccgcctctggtggctataccggattatctcagcaggatattaccgatattctgaacctctatccggacgcgtttaacgccgcataa

SEQ ID NO: 450367 - DNA, 843 bp, Serratia marcescens
atgactatcgaaaaaagccgattcaattcggaggccgccccacaatccagcgttaaccagggcgaatatagcactaatgactttgccgctattgttcccgttatttccggtcaaattggcgggcgtgaggccagtattgttagtgctaaggcactgcataaagcgcttggagtaggtaacgacttttcaacctggataaaactacgcattgatgaatatggctttagcctgaatgctgattacgtggtttttgattcctcagatttcaggaatcaaagttcaaattttgaacagggtagccccggatgggtgacaaagcgtggcggcgaccgtcgcagtaaagattatggcctttctctgggaatggctaaagaactggcaatggttgagcgaaacgaacaaggtcgcgccgttcgccgttactttattcagtgtgaagaagccctacagcgcagcgtgccagagattgccgctcagtatcgccgccagctcaaagcccgtatcggtgccgccaacctgtttaaaccgatgtgcgtagcactggaaagcgcccgcgcagaacagggtaaacagacgcaggctcgccactacagcaacgagagcaacatgatcgcccgcattgttttgggtggcatgacggcgaagcagtgggcgcaggcgaatagcattactggcgaaccacgcgacagcatgaacgccgggcaactggaacacctcacctacctggagagtaccaacattacgctgattgatatgggtatgggatatgaccagcgtaaagccgagctaatccgcctctctcagcgctggttagctaaacatctgggggctaatcatgcttaa

SEQ ID NO: 450368 - DNA, 837 bp, Serratia marcescens
atgcttaatgccgccgtccagaataaagcctttcccctggctggcctgatgtgtaccttgcgcgggatcgcgcacacgcatgagggtaaagctggcataacagtgccagctaatgccagctcctcattttctcgtcgtggtgacgaggagagtttcgagaccagtacgcgcacgaagattaattgggggtcactacgcgaggaagatttttccatcatcactacacgaggcgggaagatttttctgacatcaccactagatgcagggaatttatgcaacagtacgcgcacgcgcgaaggtgagtttctggagtccataaaaaagggcttgccgactatcgccaacccggtttatggttatagcgcaccagcaaaatctggtgccgggattggtctcccggaattgattaaggcgatacatgacgcgcctagcgtctttttttgtgtcgttagctcagtacacctcttttccagcggtgcggatataatccgtgtcgcttacaaaattatggtgggctgcgcgggggcttcttcggaagcgccgggttccttgatcaccggtaagaccaactctgcgcagtccaccaccaacaagattggtctcttcggtggtggatatattccactgatcaaggaggctgccgctatgctggctactacccctacccaaaatccgcaatttatctggctaatcgcagccgttcgccgcgacatgccgacaattaccgccaaaatccatcacattgctgctgaaactgagcgcgaagctcgccgcacgctggcgcgggatcacgtctgtttctttgcaggccgtatccgtctggaggtggcagcatga

SEQ ID NO: 450369 - DNA, 264 bp, Serratia marcescens
atgaacattaacgctttataccgccatccgtccgagcttgaagccgaagcgatgttatcccgcgagcaggcttacccggatgattttacgctggcagaccgtacagcagaacggatgacccgcgcccgcgatggactggctcacgttatgaccgatttagtcactcaactcgacgatgaacaggccgctatcgtgtattgctggttgagtaaagtcctgacgattgtcgatatagccagaattgatgcggaggccagcgcatga

SEQ ID NO: 450370 - DNA, 222 bp, Serratia marcescens; identical to SEQ ID NO: 193263

SEQ ID NO: 450371 - DNA, 627 bp, Serratia marcescens
atgagcaacgtactgaccattaaaccgggaaatcccgacctgttccacgcagaagccacaccgcacggcgtaaacatcatgacccgcaatgatgccgggatgtatgagcatgttgctcttatcaactacgaaaaagtcgtagtacttctggatgcgggtgagtatgacaataagcctgatgaaggatttgccttgcattttgcagtggctgacggcggggcgcgtggctggttcgacttcaccgcgcagcataacgtcataatgtggcgctggctgattgcggcctgtttcgttgccgaaatgaagcgtgagaacggcaccaccacggttactgaggctgacggcacatcatcgcaggttgcgatttactccaatggcaatgcgggcatggtggtttacccgttcgcggaacgtctggcgatggctaacaacatggagggcgcgatgattgagcgctacggcattgagcagggaacggcgaacgccattgttttttatcaggccatgatcgacacggagcgcggcgagctgaccccgttcgggcgtcagacgctggcagagctacacgatggattcattgccgatctgaatgaaagcggcttgcctgaaatgccagcggcgcactga

SEQ ID NO: 450372 - DNA, 2766 bp, Serratia marcescens
atgcgtaatatcgaccttatccgcgaagtgaccagcgccgccgctggtaaatggcctaatgtgctggctggcctgtctatcgacgttcctgattcatcacgccgtcatgccccctgccctgcgtgcggtggaaaagaccgtttcagattcgacgacaacgggcgcggtagctttatctgcaatcagtgcggcgcgggcgatggcttagacctgattaagaaggtgaacaactgcgacaccacggaggcggcacagcttgccgctgatgtgctgggtattgattaccgggagacggaaacagacaggaaagcagccagccagagaagggggcaactggaagctgaccgccagcggcatgagcaggagcgccagaaacaggcagcagaggacgcagagcagcgaagggctacgtttgcccgtctgtatgccggaatgcgccagagcgtcacacggggcgaatctgagtacctgcaatcaaaagggctgaccgggtttaactatccggttatgccggatggttcgttattgctggagctggtggacgaatccggcgcagtggcagcagcgcagactattacaccgcatggagaaaagcgacttctgacgggttcggcaaagcgcggggcatatcacgccgtaaacgcgccagaatcgccgcagagcgttttaattgccgaggggctggctacggccctttcagttcacctgatgcgcccggacgcgctggcagtggcagcaattgacgcgggcaacctgctacccgttgccgaagtgatgcgccgtaaacacccgaaggcgcaaattattatcgccgcagacaacgaccaccaccaaaacggagaagccaatacaggcagggaggccgcagagaaagccgccttatccgtggctggctgggtatcgctgccaccgactgacagcaaagctgactggaacgactaccaccagcaacacgggctggaagccgctacagccgcatttagtgattcgctgtaccagattcaaggggaagccgtgaaaccacgattgcaggccattgagggcggtaaaactgaccatccagagaaagacccactaaaaccccacattgagaggcgcaaagatggcgttttctgggtaacgccgaaggtggacaaggaaagcggggagatcatcaacgctgaaagctggttatgttcaccgctggaggttatcggcacgggacgcgacgacaaagatcagtatcttattatctcatggctggcattcggtgcaggcataccgacaacagcggctatcccgctggctgatattggcgagcgtgaaggctggcgcaccctgaaagctggtggcgtcaacgtcacaacgaaaaacagcctacgggcgattcttgccgactggttacagcgaagcggctcgcgtgaattgtggcgcgttgctcatgctacaggctggcagtgcggggcatacatcatgccggacggggaaatcatcggcacacctgagcggcctgttttgttcagcgggcgcagttcagccgctgccgggtataccgtagcaggaacgtcggaaagctggcgtaacagtgttgcgcggctggcatacggtaattacgcgatgatgacaggcatcgccgcagcactggcagcgccattaatcggggtggcagatcgtgacggattcgggattcatttttatgagcaatcgagcgccgggaaaacaaccacgcagaacgtggcgagcagtctatacggcaaccctgatgccttgcgcctgacgtggtacggcacggcgctggggctgataaacgaggccgccgcccacaatgacgggctgatgccactggatgaagtcggacagggcgcagacccgataagcgtttctcagtctgcctatgccctgtttaacggcgtggggaaattgcagggagcaaaggaaggaggcaaccgggatctgaaacgctggcgcaccgtggcaatcagcaccggggaagtggacttagaaaccttcatcgccaccgccggacgcaagaccaaagccgggcaactggtgcgcttgctgaatatcccgttaagtaaggcggtgcgctttcatgaacaccagacagggaaagaacacgccgacgcgctgaaagatgcttatcagcaccatcatggcgctgccgggagggagtggatcagatggctttcagaccaccagcaacaggcgattgatgtcgttcgtgagtgtgaagcccgctggcgcagtctaatccctgccgactatggggaacaggttcaccgtgtaggggcaagatttgccattctggaggccgctttactgatgggtggcgtggttactgactgggatgctcaaacgtgccgggatgcgatacagcacgcctataacgcatggctaaaagagttcggcacggggaacaaagagcaccagcagatcatcgagcaggcggaggcatttttaaatgcctatggcctgagtcgattcgcgccgctgccttacgaccccgccagcctgccgattcataatctggctggatacaggcagcgcggaaatcatgacgattcaccgataacgttttacacgttccccgacactttcgataaggatattgctaaggggtttaacaggcagcaggtggcccgcgtcctgaaagaatcggggatgcttaccccttcggcagacggaaaaaaatttcagaggaaaagcccgcgcattcaggggaggcagattaacgtttacgttttgcaattcctgccggatggggaggaaagccagccagagcaataa

SEQ ID NO: 450373 - DNA, 462 bp, Serratia marcescens
atgacagcacagatatcagcctacgggcggctggtggcagatccccagaccagaacgacaaacagcggcggcagcatggcaatgggacggttagcggtggcactgccctgccatgcagcagagggcggagaggttactttctggctgggcgtggtggcattcggcaaacaggccgacgcactggcagggcacgttaaaggcgatttagtcagtgttgccggagcgatgcagatcaatcagtggacgggcaaggatggcggtacacagcaaggttatcaggtagtagccgacagtgtgatcagcgccagaacggtacgccccggcgggaagcgggccgaatcagtcaaagcaagcggagccagcagaggccacgcaacacaatccgcgccgggatgggagttatataacacccctgatgattttgaccagcgcccgccgtttgatgatgaagatccattctga

SEQ ID NO: 450374 - DNA, 312 bp, Serratia marcescens
atggtaaacgacagtaaagccgaggatctggaagcaaaagggctgtaccgacgcgccgccgcgcgatggatggaagtcatgctgttatgcaccgaggacgatgatcgggaatggataaagcgccgccgtgaaacgtgtctggagaacgtgaagcgcccgcccgtgaaggttgaggactttggcgatctgcataaagctgttaccgaaacgcaacaccgcatggggatagcgcaaccgaacggtaacgccttccggttaaatggcggcaagaagcaacgacaggccaccatcgggggcgactgttcgcagtaa

SEQ ID NO: 450375 - DNA, 612 bp, Serratia marcescens
gtgagagacagaacgcgcagctataccaccgacctgccccgtatagggttgccattccttgcgaacatgcgtagcaggctggcggatgctgaaccgggtacgcagctttatacccagaccgaaagcggaacgttgtataccttccggcaagccgacagctacgccatgacaatcaacggcgtgacgcgggctattcgcaccacaaccacgaaggccgggtatggcgtccgggaatggtacgtttgtccccactgtatgaaacgggctgtaaagctgtatatcggcaagaaagatattggctgccgggcgtgctggaaactccactataaaagccagagcggtgacagactggacaggatgcgcatgaagatacgccagcagcgacacgcgatatggggcaacaatgaccttaccaataatctgtttaatgacattcgcatgttcccgaagccaaaggggatgcgctgggctacgtttgacaggaagcggacagagttgtcagcaatggagatggcttactggcaggcattcagtccggtagtagatagaatcacgggcgtgattgagcgtaagacggggaaagcagccagaggcattggcctgactttgtaa

SEQ ID NO: 450376 - DNA, 543 bp, Serratia marcescens; identical to SEQ ID NO: 190564

SEQ ID NO: 450377 - DNA, 360 bp, Serratia marcescens
atgagaatgaccagccgcaaaaaagagatactcagttactttgagccggataacctcgagtgggtatcgggtgagatcggcgctccgccactcgatgtgtcgggcgtggcctacctgcttcacgacatgggatcgttcgataaacgacaccagctcgaatcaacccgccgcacgctcgaaagcatggttgccggtggactgcttgagcgaatgacagtgtatgaatcgcggcaggtacggcgcggcggtgaaaccaacgcaacggtcgtgcgttacggtttacccggtcagtgcgctgttatgcgcgatactggcggcgctgataacgcaatatcaggcgaatatatgcgggtcagttaa

SEQ ID NO: 450378 - DNA, 825 bp, Serratia marcescens
atgaacgagcaccaccagcctttcgaagagatcaagcaggttgatgacgaaggatcggaatattggtcagcacgagagctagcaaagttgctggattactcagagtatcgtcatttcactcctgttttagaacgagcaaaagaagcgtgccttaacagtgggcacaatgttgacgaccatttcgaggatgtcctcggtatggtcaaaattggttcaggtgcgcaaagggagctaaaggatataagactgtcccggtacgcttgctacttagtcgttcaaaacggagaccccaccaaacccgttatagcagcgggacaaacgtactttgcaatacagaccaggcggcaggaactagctgacgatgagacgttcaagcgactccgcgaagatgagaaacgcctttttctcaggaacgaactaaaagagcacaataaacaattggtcgaggcagcacagcaagctggtgttgaaacaacactggactttgcaatcttccagaatcacggatacaaggggctttatggcgggttagaccaaaaggctatccatcagcgaaaagggcttaaaaagagccaaaagatactcgatcacatgggttctaccgaattggctgccaacctgttccgagcgactcaggcagaagaaaagctccgcagagataatgttaaatcgaagcaaaaagctaatgaaactcacttcgaggtcggccggaaagttaggcaaacaatccaggagctaggcgggacaatgccagagaatctgcccgcaccggaaaaaagcatcaaacaattagaatctgccgccaagaagctggataaaaaatag

SEQ ID NO: 450379 - DNA, 1782 bp, Serratia marcescens
atgaatctcagcagtaccatcaaatctattcaggacatcatgcgtaaggatgacggcgtcgacggcgatgcccagcgcctaggccaacttacatggatgttgttcctcaaggtgttcgaccagcgtgaggaggaatgggcggatgataaccctgcgtataaatctcccttacctgaggagtgccgctggcgtaactgggctgcttatataaccgatgccgatggcaaaaagaaaccacggattgttggtagtgaattgatcagtttcgtcaacaacgagttattcccaacgctcaaagagattgatgctaacaagagtctccagcacaaagtcatccgtagtgtcttcgaagatgcgaataactacatgaaatccggcccgcagatgctggctgtgatcgagaagctggaagacgctatcaatttccacgattttaccatccgcgccaatattggcgatgtgtatgagcaattactcaacgatttgcgcggcgcaggcaatgcaggggaattctacaccccgcgcgccatcacagcttttatggttgatagagtcaacccgcgtctagataagcgtgagacagtaatggatcctgcctgtggaacaggcggtttcttgactgccgccatagagcatttccgcaaccaactcgcgacaatgaaatcactgcgtcctgaagacaagcacgccattgaagagctgatcctcggcatcgaaaagaagcagttgccgcacctactctgcaccactaacatgctactgcacggtattgacgtgcccagccagatcgagcacaaaaacacgctaggcattggctggaacgaatggagcgccagcggcaaagttgattgcatcatcaccaaccccccattcggagggtatgaagacgatggcgtgggcagcgactatccggctgacctgcgaacccgtgaaactgccgatatgttcatggcgctcatcatcaagaaactgttgaaggaaaagggtcgcgccgccgtggtgctacccgatggttttctgtttggcgatggcataaagggctctctgaaaaagctgttgttgcgcgactgcaaattgcacaccatcatccgcctgcccaagggggtgttcgcgccgtacactaccatcaagaccaacctgctgttcttcaccaagggcaacgcggtcaatgacggtaccgagcacttccataccgacaccatttggtactacgagcacccctacccgccaggttacaaaagctactccaaaactaagcccatccggctggaagaattcgagcctgagcgagagtggtggggctcggagaaaaacgactttgccgaccgggtggaaagcgaattcgcctggaaggtggatttcaaaaccaagcgcgaaaaggccgaagccgctgcactgccacattggcaacgtgctgaagcgctgaataaccaggctgccacgctcgaaagtgaagcgagcgatttgcgcaggagcctggtcggcaccatcgacgcagcctaccgcgaaaaggtcgatgctcagatcgcagcgttgcgcgttcaagccgaaccgctacgcttacaagcgcgtgacgcccaagctgctggcgaccgtatctactggccgatcttcaacctcgatatcaaaaaccccaacgcgccggaagaagaaacccacgacccagacgtactgctagagaaatacaaaaagctactgggcgaaattgaagaaaccgagaaccagctcaaaagtgagttggcagccgcgctggcacatcactttgttggcgaggatgcctga

SEQ ID NO: 450380 - DNA, 1995 bp, Serratia marcescens
atggacgcgaaacagtttttgtccgagtttgggcatattgccaatgcgccggggggagtggttaagttgcgcgagctagttcttcagcttgcaatttcagggcgacttactgaacgcgttgccgatgacactagcgcacttgagttgatagaagataaccagaattgtcagaaaaccttagttgaacaaaaagtcctcaagcgacagccagtcctgaggtctgtcacaacaagtgaccaaccatggattctgcctgagggttgggcttggacgcgtctgggttcagtgaccaattatggtgactcacccaaagtaaaacttaaggatgttaacgaagacacatgggttcttgagcttgaagatattgaaaaaagcacttcaaagcttctgactaaggtctttgcacgcgagcggcagttcaagagtattaaaaatgagttcccaacgggtgctgttctgtacggaaaacttcgcccttatctcgacaaagtcttgattgcagattcaccgggtgtatgtacgacagagatcaatccaatttcatactttgcaaatattgatgcgggttatttacgttggtatttaaagtcacccttcttcatcgcatatgcggatggctcaacccacggaatgaacctccctcggttaggaacggacgcggcgcgagacgcgctatttgcatttccccccctaaaagagcaagcctgcatcgttgccaaagtcgatgaattgatggccttgtgtgacaagctggaggcgcaacaacaagttcgtcgaaaactgcagaacaagctgcggcagtccaccctacaggctgtcgccagcgctaccagcacgcacgaactgcaaaccacttgggcacgcctggccgacaatttcgagcgactgtttcatgcgccggaggatatacttgcattcaaggggctggttcttgatttagctgtgtctggcaagttgctaaatatcgatgatcacccggtttccactggtgccgatctagtcatggcgatagccaaaaatcgcattgaatggtctacagttgcgattgagcaagagcaaaaagaagccttgtcaatgctaaagaagttgcgtactcagcaagtaaacatcctcgaagattcattgccaaaacattgggtgtgggcatccttgcttgaggtttcaaaagttattattgactgtgatcacaagactccaacatattctaatagcggcattcacttaattcgcaccaccgatattcgcaatggtgaaatgcgacttgatgcgaccaaaaaggtttccaaggaaagctatcttgctcgttcaaggcggttaattccacaggctggagatatatttttcacgcgtgaagcacccatgggcgaggctgcactagttcctagtgggcagaccgtttgtcttggccagcggcttatgctcatccgactttttggtgagttatttagcaatcgatttctgatttacgtcattcaaagcccgagctttcaaaaaagattgcacatgtcggccattggcatgacggtgaagcacattaatgttggtgatgtcgaaaatctaatgcttccggtaccacccaaggttgagcaagatcgaattgttgacatcattgatgcacttttccgcatgtgtgaccactacgtggatcagctttctcgaaagctgcgtattgcaacggatcttgccgcttgtgctgtgtccagcctcactggcatcgccttcgaacaagaagaggaacccatgaaagctccgcaaaccgaactaatcgccccactgcgcttgggcaccgcacccgacatcaaagctcaagcgccattagctaccattctggcccgtcacaatggcgaaatgcatgccaaggatttgtggcaacgctttggcggcgaaatcgatgcgttttatgcacagttgaaaaccgaggtggcgcatggctgggttctggagcccgccgtcgccgagatgcgtgaaaaaccagccgacacggtgagagcctga

SEQ ID NO: 450381 - DNA, 1749 bp, Serratia marcescens
atgcaactgttacgcatctgtatcccaatctttcgcaatctgcgcgatctcgacatcgcattcgcaacgcacttacagccaactgcaagtgcaacagatgtaccacccaaacccatccgtagccacgctctgattggtcagaacggcaccggcaagtccaatctgatcgaggcgctgatcactatctttcgcgatgtggatctggaccgcgaagcggcttttgattacacgctggaatatagcattcgtgatcatgtggtacgcattgaggcggatacctccaagcaaaagcgcccctatgtatgggtgaacggtaaagccgaatcacaaggctatttgctgaaaaaccgtgagctgctgcctgcgcatatttttgcctattactcgggccgcaacgagcgtatcgaaaccttgtttcaagagcaccagcgccgcttcaaccagcgccaggaaatccctacagacgaagtactgtctgagcaactactggggaactttaccggttccgaggcagatattcgtgccgtcgaagaagccaaacgccgccgcgagtcgcggttaaagcaagcaggtgatgatcgcctgcgccgcctattttactgtcgtggcggccatagccaactggtgctgctggcctgcctactgtctgacgacccagtgtttcagaaggtgctgaagaacctgcatatcgagtcgctggaatctgcactatttgtgctgaaagaaccgcaccgcctgcgtgaaaagcgtcgcagtggcaaattcgacgaacaggaactgaacgagggtgatccacgtttctggtatgcgcggggcaatgtggtgagcgaattcctcgacaagctgtggcaagtggcttgggctccgattgagcaagaggcgaccaaacagatcgacttccgtggccgtaccgaaaaacagaagcagctgtaccttttcgtatcaagtcaggagaagcttacactacttggcgaactggtcggcagtaccgacagttttttccgctacgccgagggtgcttatattagtgatctgatcgaagaagtgcgcatcacagtgaagaagcgcgatgaacatggtggaaaggtgagtttcgcgcaactgtcagagggggagttacaaatgttgactgtgctcggtctgatgcgaatcacccacgaagatcattgcctatttttactcgacgagccagatactcatttaaatcccatctggaaactgcgttatttcgacgacatcgaaaatgtgtttgctgccgacgagggtggtttgatacaaggtggttcacaaattctaatcactactcatgaccctattatgttgggtggtttgaaacgtgaacaagtgcatattctgcgccgtgacggtaaccagactatggtggaaataccggatgaacatccacagggtatggggataaccggtttacttaagagtgaactgttcggtctttcatccacattagatatagaaactgaacgtcgtttatttcgtcgtaatgagctgtttgctttagatgaacgcactgatgctcaggatgatgaactgaaacgcttgagcgcagagttggcagatttaggatttgccaattcggatttcaaggatccattttacgccaagtttgtacgtcggatggccaagcatactcgtttccataaaccggtattatctcctcaggaacaaagtgaacaggatgcgattgccgacgaaataattgacgagatcttgcgagaggaaggcaaaaagtga

SEQ ID NO: 450382 - DNA, 852 bp, Serratia marcescens
gtgatctttattgatcttgatagcaaactaccaactgatagggatttgcctgatgacattcgttggtcccagcagaattgggatgcttggcttgctgagtcagaaagattggttactcagctggcagcgctgaatacgcaagggttagtcaaggaacgtaatgatctgattgataaaaatagcaaacactggagtaagctcaagccttggttgctgtccctttctcataaaaagtgctggttcacggaagctcgagatattgcatcccatcttgatgttgagcactttcgacctaaaaagtcggcacgtggtatcaaaggtattgaacgtgatgggtactggtggctggcttttgactacgctaattttcgtatcgcaggtacggtaccaaatagaaagaaagggacttggtttccgctacgatttggatccagctgttctacctttaatcgccgttgtgagggggatgaaataccccattttcttgacccaacaaatcctcatgatgtcacgctattagctttcgatgaagaggggaaagcagttccagccccaggaattactcgttgggaacgtgtgcgagtgatgcggacggttgagcgactgaagttaacagaacaccaaacgttagcggaagaaaggcgcaaggtctggcagcatgtaactaggcatattagtgaatatcagcgtgcactctcggaggctcagtactcagctgctgctcgtgagcgagttaaggcttcggcgcgtgaaattgtaaaacttactaaggcagatgctgagttgtcatcagttgctaagtggtgtgtttggttacgtaatgacagcaaacttttgaggttggtagggtaa

SEQ ID NO: 450383 - DNA, 774 bp, Serratia marcescens
atggatattacagaattccctgcgggtgttattgagcatcttggatggtacgtataccgtcttattgatccgcgtgatggcagcacattctacgttgggaaaggtcggggtaatcgtatctttgctcacatgcgaggtgaggcatccgcaggagctgataatgaattaataagtgaaaaaataagacaaatcagagagataaaggctgctgggttggcggtgattcatgtaatccatcggcatggaatatctgatgagaaaactgcgtttgaggttgaagctgctctcatcgatgcatatcctggtcttaccaatatcatgaatggtaccggtagcaatgagtttggagcagcccatattaaagagttgattgctacttatgctcctcagacgatcgagtttcagcataaagtgctcatgatctccgtcaatcgaggtgtgaaggagtcgtgtatttatgacgctgtgcgtttttgttggcgaataaatgttcatcgagcgagaaaggcagaagtaattttggctacagtgcgtggcatcgtacgaggtgtgtttattgccgatgaatggctacctgcgacgcaggagaacttccctggagtcatgtacgggggggataacccagaactggagtcgaccaccattggtcgctttggctttcgaggcagggaagcgccatctgaaattagcaaactttacatgggtaagaaaatgccggatgacttacgtaagaaaggtgctatgtcgccagtaaaatactcgccaggcttttag

SEQ ID NO: 450384 - DNA, 1422 bp, Serratia marcescens
atgtctttttctactttagatgaaaaattcaatggaatttggcagcgttctcttaacttgggggcactgagcagcttgacacctgaacttatcgataaatgggcctgtgataagaaacttactaattcggttgtgatgcttgaagatgtcgggcttttctatccgacgccatgtattactttgtctgtcgaggggggcaaggcatgctttcccacaattccggtttctggtgatgagaactggtatataagacgtaaacagcatgatgagcaagcagcactttgggacaaggtcgagtggtttatgccgttgtggctaccgatgggggaagttgcgaagttacttgcttcggtccagaatgtgacgagggagcgagcactcgaacttttccaatatcatacgtcgactctctatacattagccttccaagcggtctgtattgaacagatattaccccttgctaatagccttaaagagattgtaccgttggtgcgggaagcttacttaggtgcttatagtggctattgggctactagtattggagctttgatacctgctatcgaggggagtctgacacgaattgtctcagatattgggagtaaagcctccgcctcggaaaaaattgatcacgcggtaaaacgtgcgattggtactgctgccgaactacatttcgagggtatgtgggtaccagaagaatataagtcttgtaattatctatttgggcaggatgaacgcgtttttgcttttgagacgtttcgacgatggctcaaaaatcattttttctgtaatactgaaaaatatagaggaatgacttggcttaataggcatatgtttgcacatggtactgcagcctcatggcaaaaaccggcaaacttcgctcgaatggtggttgcgcttgcaacacttgctaccatcgaatcttggtatgatgcatcccatcgagtctcactattttttcccagtatgaatgaagatagcactttactgtggcagcaggctctatttaggggcaatgtgcaaatgaagatgaagctcactgaacaggattattttcgcgaacatggacatctggttccaccattgcctgcagatgatggtatttctctccgtaagggattactttctcagcaatgtatgaatgatttggtccgacctcttcgtgatgctggttggagtgtgaaagttaatgaacctgactctcaggcgctttatatgattgtcgaggcttcttatggggaaatgtttttatctgtcgcactattatatagctgtggaactgaaaatagaatctaccgaatgcttgcggagaagtgtggtgctattctctattgtggacctccttataagcaggacgcgtttgcttacggcatttctgtgcatgtcggaccggtattgggatggcaaccaccaaaagtaaattaa

SEQ ID NO: 450385 - DNA, 234 bp, Serratia marcescens
atgagcaccaaagagattcttacacgtaaggtgatgaagaataagttacatgttttaggtaatacctattcatcggaagcattgaaaaatatcaatggcaaagttgttattgtgtctttcgatactggcatgtcagataaactgaccgttcagttcactgatgggacgtatgtctgcgaagctttcaagactgaaatgttcaacctatcaccgtgccgtccattttacggctga

SEQ ID NO: 450386 - DNA, 525 bp, Serratia marcescens
atggcttcaaaaccaaagcgtattaaatccgcagccgctgtttatgtccctcagtcaaaagaggatgtgatcggtgatatcaaaaagattggcgatctgcaacgtgagctggaacgcacgcagacggtcatgaacgatgctattggtgaaatcaccgagcgacatgctccggggatcgagtcgctaaaaaaagatatcgacttgctgagcaaaggtgttcaaggctggtgtgaagcgcatcgcgatgaactaacgcagaacggtaagaccaaaacggccagcttgatcaccggcaagattgaatggcgcaatcgtccaccgtctgtcgcagttcgcggaatggatgctgtgattgagacgctccgccgcctgggtcttgatcgctttatccgcaccaaggaggaaatcaacaaagatgccattctcagcgagcctaaagcagttgaaggggtagcgggcattactgtcagaagtggcgttgaggacttctccatcacgccattcgagcaaaataccggagcctga

SEQ ID NO: 450387 - DNA, 222 bp, Serratia marcescens
atgaatatggttgccgagcacagtgcccgaaataactatggcctgtatgcggtgggtgcgggccgtgccgaacgcgaacaggactggcagaaagcagcggaattgtggcgcaaggcgttatccagcgctcgcagtagccattgcagacactgggcagaattacgcatggccttctgcgctaatgctgctgcacgtcgatgggggaataggcatgaaagctaa

SEQ ID NO: 450388 - DNA, 717 bp, Serratia marcescens
atgaaaaacaaagagaagtacctaaacaaaattaaaaaactgttaaatctggcgcggaatagcaccaacgccagcgaagccgccaacgccatgagccaggctcaaaatctgatgcgcgcacataagctgacggagcaggatattgacctgatggagatcggcgaagccagcagcaaaggtgcaccatcaaatgcccatgcggttcctaaatatatggttttcttggcggaggtcatttgcctggcattcggggttcggtgtttccacacctataaatccggctatttccatacaccgaaacgcattgtgacgttttacggcccaaatgaacggccacaagtcgccgcatatgccttcgatgttttggcccgtcagatggtcaaggcccgcaaagaatataccgcgaccatgcgcaagagcatcaaggccagcaccaagattgctcgcgccgacaccttttgtgaacactgggttcaaggggcttaccaggtaattgacgagtttgtcgtatcagatgctgaagcgacattaatcaccgcatatcgccggaaacttcaggaagagacaggcatgactaccgcagaaatgcgtgaggccaaaaagtgccggggcagtgaaattgctgccgatgcagggttccaggcagggacaaatgcatcactgcaccatggcgttaacggcgcaggccagccccctatcgcaaagattgggaggtaa

SEQ ID NO: 450389 - DNA, 273 bp, Serratia marcescens
atgcgacagcgagtcgtcattgtcggcgacggaactggtggtattatactggccaatgcattggtcgaaaaattgcaccgagaaattattaataataaagttaagtcattaatggtatcgtattcaccactgcattattacaaaccgacttttatgtatttgatgttcgctagctttttcaagcaggagctcacatactcacagtggagtgtattgcggcctgaaataccgtttattattgataagtctgagtctttcaatttaaaacagtaa

SEQ ID NO: 450390 - DNA, 981 bp, Serratia marcescens
gtgatttcaattcaacttttgcgagcgatagccgcgttggcagtggtgctgtaccatgttggcagaaagtctgactttctcgctataacaaatgggaattattttgaagttggaaaatatggcgtagacttgttcttcattatttccggtttcattatggcctatatcactcatgggaaaaaagttaattttattacctttatgaaaaaaaggtttgttcggattatcccaatatactgggttctaacttcagtagcacttgccgtttttattataagcccatcatctgtaaatagcactatggctccccccggggttataaactcatatctgttgtttcctgttgaaggaaagtcaatgctgctcgaagtggcttggacattgcgatatgagttcattttctatatcattttttcgctatctattttgacgccaaatagatatgtgactgtttcagtattacttggggttatttgggtttgttctaaattttcttatgaaaattactatgttggatttttcttcacccattacatgggagagtttttgctcggggtattatcattcctgttctacacgaaaggaaaatcgttaacgctggttgtctcgtcatcggttgccgcgttggtcggttatttttatggcactcatgatggtgtcctcacttatggtctgtattctaccgtattgttcaatgtcttcgttatgcttgaagataaaataaaaaggaatgaaagtatggttaggccgctcacttatttgggggatgcgtcttactctatttatttggctcatctttttattattgccgccgcaggaatactctataaacaaaccgagtttatgagcgaccctatattgtttaatgtcagcacgttggttgcgagtgtgcttttctcagtgctgttctacgagtttgtcgagaagataattacgcgtaaattaaccgccagtaaacatgccgctccctcggtaggttaa

SEQ ID NO: 450391 - DNA, 417 bp, Serratia marcescens
atgcgccgttatgccatggctgaagatggcgacgagcgcggcgtcgctaaaagccgttttgactgcaagcacccgaacaaaggcggtgtggcgggctatatcgttaaatatattgcaaaaaacatcgacggctatgcgctggacggtgaacgcgatcatgaaaccggcgagctgttgactgatactgccgccgctgtcaccgcgtgggcgtcaacgtggcgtatccctcaatttcaatttatcggcctgccgtcgtgtggtgcgggtgtcgcaagatccgttctgtcagtctggctgatgagtttgacgaaaccgttgaggcggtgcgcgctgcagctgatgccggtgactttgccgcttacattctggcacagggtggccccaatgttgcccgcgacgatcagactgtgcgtgtag

SEQ ID NO: 450392 - DNA, 360 bp, Serratia marcescens
atgagaaagttaatgattggactagtggcactgggtttggctggatgtgcgatgaattattcagatattagaaaaaatccaacgcaaacctttacgaccaccaaatcgctggagaaaatggaaacatgtttaattccaaagttagacagtgaaacttataacgggcctgcaattaacacaacagtcaaacctttagaaaatggagtgactttagttccattggcagggttagagtttatcgatttaattaaaagtaatgctggaacgaaagttgtttattatggggaggggacaaagtctattcttttccctgaacgcagaataaaagtgaccttaaaagcgattgaatcttgcttgtag

SEQ ID NO: 450393 - DNA, 552 bp, Serratia marcescens
atgaaacagctacctctgcgagaagtgatgcgcaaccttggcgtaaccgtcaccgatgacggctatgagttaagcaacccagccggcactgcgcgttatgaccttcatggcgtgcgtactacggtaagtggtatcccggaatacttcccgatcacgctgtcggttaaaggttccgttgatcccgatattgaggaacttgaatccttcagtcggcccaaacgaaaagcatctgtcgagtctatcggagctatgactctcagtgtcagcgttgatagtgcgcccctgaccgcgctggagagccagcttacacgcattgccgatctgtgtgagcgtatccagaagactcagcaccttggcgagcctgccgagtatgtaggtcaatcagctttcacgcccagcgtgttccagatattcatcggtgatgctcagattaaagagggcactatcaacaattctgacctaatgaaagaagtaaccaagcaggtaaagaaaaccgttgagaccgtaatcgaaagggagctacaacccggcggtaagctctggcgggtctag

SEQ ID NO: 450394 - DNA, 1341 bp, Serratia marcescens
atggctaagttgaataaatataagccgtatgaatcatatactgatactagtgctgtttggtataagcaaaaaccagctcattgggaatgtgaacgattcaagtatcattttatagaaaagaagaaaaaaaactcaacttgccttcctgcaggagccatcagttttggtgaggtaatcttcaagaatgaggataacttatctcaagatacaaagagttcataccaagaggtgtgtgcaggagagtttcttatcaatccgctaaatttaaactttgatttgaagagtttaaggacagcgctttcaaccatcgatgttgtcgttagtactggttatatagtacttcaggactgcggattcctacatcctcgtttcgctcgttggttactacagcaatttgacgtttcgcatatgaaaacgcttggtgctggtgttcgtcaaacaatcaattatgcagatattggtaactcactattttgtcggcctacatttgaagagcaaaaaattatagctgcatttctcgattacgaaacccaaaaaatcgataagttaattgagaggcaacagcaactgattgaactgctgaaagaaaagcgtcaggcagtgattagccatgccgtcaccaaagggctaaaccctgatgtgccgatgaaagactctggtgttgagtggttgggggaagtgccggagcattggagtataaaacgtttaaaacatatatctcctaaggttggtgtagggcttgttataaatccatcttcttacacgagagatgagggggtttattttatattcggtggagatgtaaaggagtacggatttgaccttggcaaaacgaggaaaatatcccctaaggatagtaataacttactctcatctagactgaataatcaggatttagtatcggtacgtgttggctatccaggcattacggctgttgtgacaaaggatttagaaggttctaattgcgcctcagttattataataagaaatggtgaatttaattccggatggttgtgtgcagctatgaactcttgggttggaagacagcaagttgaattggtttcctatggagccgctcagaaacaatttaacgtggcagatgctgtggagtttatattcccagtacctccatatgatgagcaagttataatttctaactttgtcaaaaattctttagataaatttgatacagtatccttacaagctcaagtccaaattggcttacttcaagaacgccgcacagcccttatctccgccgccgtcaccggtaaaatcgacgtgcgcgactgggttgcacctgatatgcaagacgctgaggagccacaggagaccaccgtatga

SEQ ID NO: 450395 - DNA, 1755 bp, Serratia marcescens
atgaaatcatacctttacagcaggatcagtacactccaacaaacaaagggttttggtattgatcgccaggtacagacagtaaccgatttcctcaagtacgcaaccattgatagccgtcttggatatcaacttgatgtagaagattttgaagtacttgaatctgatcttggaaagagtgcctacaaaggaaacaactggaagcctaatagcagtcttggaaggttctataaagatgtagtttcagggcgtatcacaaatggtgttttgatttgtgagaacgtggatcgcctggtgcgtatgtctaactacgaagcgtcaaacaagctcagtacgttaattactaacggcattgatattatcgaagttgaatccggtatgtgtttcagtaacaagatacctgaatccgctacgatccttaacatgagtattagtcgtgcctacagtgaatctaaacgtaaaagtgatatggctactaagtcatgggctaatcgtactaacaagttgaaagactcaggcagggcagttagcaaggtgtgtccacgttggctaacggttaaagatggtcagtacgtgcttgatgaaaagcaagctgaaacccttttatacatccatcaaatgtatcttgaagggcatggtaatagtgcccttgtacgccgcctgaatgcggctaagagactcgataacggtaaaccgtggactaccatcaccttacatagagtgttgcgtgatgaacgtcttacggggcgtatggtgatgggtaaaacacgtaagccgattccagtacttgatgatcagggaaataagatcattgagaacgggaaggttaaaacctatgtacccgttgaaatcatagatgatgcttatccggttgttgtacctcgtgagttgttcaatcaggtacaggcaatgatttcagagaaagaaggttctaaggttaagaagactacgaaattcatgcgtaacatcttcaatggtgttagccgttgtagttcttgtggtgaagcactggtagccgataagaacgggcatggtaagttgttctatgtatgcctcggtaaacgccataagaaagcctgtaacagcgtgggtataccgtatgaaacatttgaacgtactatgttagaaaacctttcacagatggattggcagcgtatatacacgggtaatactgacatggaagctatgaatcaatgtcgtgttcgtctggtagctgttgagcgtgagatagcagaacttgaaggtgagttagaatcaagtgatgaagatatggtacttgcccttgtacgtgccattaagaagaagaaagcagtacgtgatgaagttcagggtgaactgaacagttatgtaaaagcgggtactgataacgttactttcaatccagatctgaaaagggtactgaatcaggaagaagtagagttacggcaggatgtgaatgtagaactacgtaaaatcataaagtatatgaaagtaggtcgtatggatagaactatcaccgtacaactacagtactatacagatgttgtttcacatctgatattcattgattcaaaaactggtgacttgcttagccgtagccatcttacaaatgatcttatatatgaatctgattctgtaaccatcgatctaactggtggtacgtgggatattaaaggggataagtttacagagtgggatcagtttgctcttgaagtttggaaagagataatagaacaggccgtagaccaagcacaagagatactaaagaatcgtatttga

SEQ ID NO: 450396 - DNA, 753 bp, Serratia marcescens
atgcaaacctatccgttcattgaagttcagcagaaagaacactccttcaagctcgtctcattgccagcggggctattgacccgtatctcctatgcatccgtgcggagaaaagaccaagaagaaggagctgtgcaacgtgtgctaaacaactcccgaattgcagggatcaaagattttgcgctgcaaatgggtgattttcccgcctccatagtcctaaactggattggaggaagcatgtccgtgaataacgggcaggttgaaattttagatctacccaaatcggcacaaatcattgacggccagcaccgagttgctggccttaaagcagcgattgaggaggatccgtcagtagcagactaccaaatccctgtggcaatttacgaaaatctagataccgcacacagcgctcgaatttttatttccataaacactgagcagcgccccgctccgaagagcttagtatttgacctctatggtgtgactgcatcagatcttatggatccagcagcaatccgagctaacgatatagtctttcatctctgtgctgaaggacaaccatataataaatggattaaactgccaaaccaagaacgacaacggggaggtatcgcactttctaccgctgtgaacgctatcaaacctctggtcgattcgaaaggacagcttgaacaaattggagccacagaactggaaatccaaaagataatatttttggtggtgcatccaattagtagaacatatgtttttcgataa

SEQ ID NO: 450397 - DNA, 204 bp, Serratia marcescens
atgactgtcgctgatacagtggaaatcaataaatctcgcaattactggctgtcaaaaggcttcaaaaagacagttgagggtacattaatacgacctgacatgctgatctctcgttcaggaaaaagctggaaggctactgacctaatcaaaaacaccacctatcgccacgccagccttctggtggttctacaaaagaatttttag

SEQ ID NO: 450398 - DNA, 315 bp, Serratia marcescens
atgcttaacgtaactatcatttttgatggccgggaaggggtgatccaatatgacggtgacagcatcgaaataccggcgccttttgacgttcttggagcattcaacaaagcagagctggtggatgaagtgaaatttgcccatctgaacccggtattggggtttgtgcgttcagctgaaggggcttcactttatgagctggtgaatacgttgagtgctatcggttttgaggtggaaatggatgaagagactaaaagctcatttgaaggtgagcatgagcgggagcagcagctagccaacgagcttgttgaatattaa

SEQ ID NO: 450399 - DNA, 2937 bp, Serratia marcescens
atgcaaaaagttatagaaaaaatccaaaacaccgccagcattaaagcgctggtggaggtaatacgtaaggctctggggaatggtcggaaatcttatgttgttaccgcaaaaggtgaagaggttaaaactcagtttgaggtagtcgatgcttcaatgcttctggtgtccaatcatcttgatggccgcataaacgaggcttacccacaagaactccagccgcgagatcgcacccgtttctccagtaaactccaagttaataatatttctcggtcattaaggccggctcaacttaccgattccgggttatcaagtcacggcgcgccgatcatcggtgaagataatgctgtggagtcggggaacggccgcagcatggggattattagggcatatgctgaggggcgtgcagacgattaccgttcgtttcttataaaacatgcacgtgactacggtgtccgacccagggatatcgaaaagatggaaaggccaatcttagtccgtcggcgtttaaccgacgtcgaccgggtgaagtttgcaaaagactcgaacttatctgacctacaggaaatgtctgccagcgaaaaggcctttgtagacgctgagagcattacacctgcgatgatgcagctctttgccccatcggatagcggtgatttgctatctcgatctaacgcgccctttgtgaaggcgtttatggaagagatcggtgcgacggcggcggccggcttgttaaccgaagatggccggccaacaagacagctgatcgataggatgcaaaacagcattttcgccaaggcctataaagatagccgattggtgaaaatggtgtccgaagagcctgatccagaaatgcgcaatgtgttgaccgctctcaattctgccgccagtgattttgcgcaaatggttatgctctctggtgatgtgcacaaagaaacggtcggctctctgttggaaggggccagtgaggtaacgtcccttgataagacggccctgggcgcgttgaaagatgcaatagacctagtgcggcgatctaaggagtccgggcaacatatccaggatgttatagcgcaagtgggtatgtttgaggaggcgacggatgaagctaaagctctggcccttttcattgtggacaacaaccggtcagctaaacgtatgggccaagcctttaagctgatggcggaacgtatcaacgatgagttgatccaccagcagcaggctatgggggatatgttcggcggcggcagcgtgtcgctccaggaggttttgcagatggtatctaaccagatgcagctcgaaagtggcaaggggttggcgggggcactttttgaatcgacaaaaaagcgcggtgacgccgtgctcccggtgttgcgtaatgcaagcagtgttcagggtatgaagcgcattattgaggcattgacgtttgatggtagtggctctttatcaacgctagccgcagctgtgaacgcggcgataaaaacactgacgatgaccaacctcaatgatgcagctgctttgaagcgataccaggtattaactgcaagtatccttgggaagaaaattgaaacgtttactgatcggtatggccgggcaagcctctatacccttcatccattaattcgtaatgcccacatgttcaagcaaccagattggtctgctctctttaactccggtcaaattttccagctccattatgcaatcaagcttgtgatggctgatgaagccgagcgaacagaagtgatagcagctgcgcgcgctgcttaccctgtgatccgcaaagttattgggcgatctcggattctgacacagggctatatgtccgctatggggattatgttgccagaataccgaccagcggcggtatataaggcgatcatcgctgcatcgagcgataaagggcagagcacattaagcgctaccggagccagtgtggccgtcatgtatgacgttgatcgtggtagggaactgatgaagtatggggatgtgactgctgaagccgaagacaccaagaagcgttacacggggtatttatcaagggttaaggcgaaaatcgattcactacaggatagtgataaggcggttgttgagaagctgccgtattcattgcgtgcggcatttcctgcgtttcatgctgtggacttgtccgggccaacactaaactttgggcaaacatatggtcgtcgaaaatctgtatcgaactggcttgagcgatatgaccccgaagaaattcgagatactgctgaaaaatacggccaaagtagtgtgttagtaagtgagatcatcaatgaaatggctgatgccgcagaaaaccaccaacaagcgatagtgaatctatgcgaccgcgcgcgcgcgttggcgcaggaaattatcagcgaatcggacgttactgaagcggatgctaatgagtggattaagggaataaagatccacaaaaaggccattgagacgatagatgaaaagcatggggaaggtgcatttttgaatgcgctcaacgacatttaccgtttatgtagaggcgggatatcaaccctaaaggaaattaagtatctcgaacgtaccagggcggccgcctgcgtgaacgatggatctctaatccttggcgccagttctgaccttggggtgttgtggcatgaagtggggcatcacttcgagtacagccatcccgatcgactggcaaaggcaaaagcatttatggcttctggtggagaagccggccttctggatcttggcaggagcgaaatcgctgccaatttaaacctgagtgacccttacatggggcgcctgtatggctccaaaaccatcgaagatacacgttcaaccgaaatattctctatggcctttcaatgcttctatgagccgcgttatgccggtaattcgatacttaatggcgatgcgattctggattttgtgatcggtttgattaaaggtgaacacaatgcttaa

SEQ ID NO: 450400 - DNA, 384 bp, Serratia marcescens
atgattttatcagcaatagagcgccttgacctggcggatcagttggatgaactgatgcgaaagtcagccgccgccaaggggctggagaagcttgattatgacgaccgtatcgatgaggtgatggtcaagctcgggtatggtggcgcgcaaccggagccagcaccagcacccgaaccaaccgctacagctaatgatgatgaccatgacgtccaaccccaagtggttgtcgacttcttgagcgggaaatttaatcagtcagacaaggatgagttcattagcgtgctggacgatctgaccatttatgtgggtgagcacttgagctttgaggatgtgcaaatcggcgcctcaaattgggtacgactgaatcaccctgaagcggcttaa

SEQ ID NO: 450401 - DNA, 2121 bp, Serratia marcescens
atgagtaatccatatcatccaatgaatggcgtactgatcgtcgatcgcggtgactatgatgtacggcaagtaaccgatgcggaatatgcttctctgaatgagggcggtggtgaagatttaatgcttgaaagcgtcactgtcgaagaagttgagtctgtgtttattggtgatcacctggctgaccctcacagaacggcgatgtttgaagccattagcaccacgaagaatcgtttatcgcaaaccatgcgtgcctttgttcgtgttctcaattctggtttaaacgggacggggataaaagccggcacagatgaggccggcactgatgatactggtgtcagtacagctggtggcgccgaaatagggaatgttcgaaaggtagccggcatccctgttatggccgctaagataccgctcactgacggtcagagcgtctctctcttgttccacagtccaaccgccgacgttaagctgaaagctcaagacgttctggtcgcctttaagtttcttctgaataaacgggatgttactcatgttgtggcgccgatcggcggtcgcgatatgtccctaaaccaaacagcgcagaccctctcaaatctgattgaaaaaaacagcgcgaaattttcaaaaagccgcgacaagcacaacaagctgaaactggatgctgaagctgcggaaatcgaagctgaaaggcttgaaagccttgcaattgatgaaatggccaaagctgatgagatggcgccacaaatggcggatatcgatgctcaaattgaagagtacagtgccagtattagccgacagacctcagaaaatgagcgcttaagtacggcaattgagtcactgaaggcaaaaaaagctcagaagcaaagcccaatgcctggtcaggacgtttccacgggcggaactgctgccacttctggcggctataccgtgccactggcaagcattcaaaccggtgcgatgaaccctactttaaaaaaagcagcggtatccggcgataacccaatctggtattcacaaagtaacggcgaccatatctcattttctggttcgatcactgtcaacggggttggcccttcccccgaagccgttgcctataaaaacagatacaaagctgccaaaacggcgggatatcaatatacctatttccggatctctggcctgcaaggtatttacgtatttgttaaggatgggcaagttcttaccaaagccggatttgaagctattacggtgggggaggaaaccgagctgccggcaacgacgaccgcagcagcatctgaggatgatatggataccacggcctcgcaccctggcacgctttattattatggcttgaaagctcgaccaaattggcggcctggcggagcagtgaatacgtatgatcccgaaggctttagtgcatcaggaattaaaaccgagcgtgtcatcggtgctaatgacattcgttatggtgttgccgtgtacaacgttccactcagtgcggataaggtcgctgattatgagctggttgatttgcaatacagccaagatgagaaggaagccttttcgaatatagaactgctgaagccgctaattggtcagttgaaaggtagagaaccgcatgcaaccagccaggattttttacgcaactatctgacgcgaagcggggccaatgctagtgagcttccagacggcctttcactgggaatgattgtaaagaacttgcgtactgccggccttgcccaacgtaagagtgctgagggggtgttagaaaaccttttcaatgaagtgccaccagcctcaccgctcgcaccacctgagacaaaatcccctggcgccccaatttctacaccggaactggatattcagccttctccggcaggagaacttccaccagttttaactccgcctgaaaatgaagttgatacaaacgcgaacaaagctgttgagtttttgcaggcaactctatcactgcaatcaagtgatatggatgagatccgagaagctcgaggaaacactcgtcaggcagttggtgctctggcaaatgccggtatttatgacgagcatgaaagcttggtaaacgacgtagcacagcatttgtcagatttgttagtcgccatccaacgtgagggagctgccgcatga

SEQ ID NO: 450402 - DNA, 636 bp, Serratia marcescens
atgcccgctaatctgttttcgaagaacgggcagacataccatgtcctagacttcaataatctcaatgagaaaggcctggaaccactaaaaaaggccgtgactaaagccggtgcagagatcgttaaggttgtccctgccggcactgctcgaaaaaaagacggagtgcgtatacgcacctttggcctgaaagctttggacgagcaagaggtgtccgttcaggttaatgattcgggtgatatctcctccatttcactgaataaaaagactgttccatttaccggcgccaaagacctcgatgcactcgcgaaaatcatcgccggcgccatttcctctaatgcccaagcttttgccaaatcacttgcccgaaagctggctaaagcaggtcgagtggaaacccctcgccaaaaaagcggccttaaatctaatgcgcagcgactcgctgaacaaaatggtcgtatcgatgccgccaagcaaaagattgcttctgcgcaggcagttacgcttaagcgaggtaatgatttacaggttaagcgtgccagggccgaggccttgaagaaccaacttcgcgctgagcaagctcaaggccgcaaactgaaaactgaatttgagactctaaaacgtgaggtagcggcatga

SEQ ID NO: 450403 - DNA, 441 bp, Serratia marcescens
atgatcagtgaaacgtgcctggcgctggttgttgcggccgcgctggcagaccgctttctgtttaagcgtagaaaggcaattgtgcaagataccggatcagaagaatacattgatgaggtgatccgttttccggtgagtttccttactacttgccgcaatgtgaagggggcacgagttgaatactgccttcgagataaaaaagaccctactacggtgattaccggcaaagcccggtcattgttcatttctgataagggtttaacccgagaattcctgttctttaatcgtcgttatctgaaatcaggcaattgggagctggttgtgcgaatgacccacggcgacagccggattaatccactctaccgtcttttcccagtccagtcagtggttacgaaagtgttcgatattcctgctgataaggtggcgccatatgcccgctaa

SEQ ID NO: 450404 - DNA, 423 bp, Serratia marcescens
atgaattacggatacagtgcgaaaaccaatattttctatgtgttggaagatcaagaagcctacgaaaccaataaaaactggcctgatgatgttaaaccagttcctgaagagtattgggaaaagtatcgcgagcaaccccctgtaggaaaaatccggggggcggataccgatggcctgccgtgctggattgacgccccgccgttgagtcaaaaggaacgagaggtcgaagctgttcgcaaaaaatacttgctgatcactcgcgctagcaatgcaattgctcctttgcaagatgcggttgaattagggatggcgactgagaaggaaaaggagaagttagtcgcatggaaaacataccgtgtcatgcttaatcgcattgatacttctcaagaaactgatatcacctggcctgaagatcctaagtaa

SEQ ID NO: 450405 - DNA, 4203 bp, Serratia marcescens
atgacggcaataacaacttctggcggcatcacgatcgttgccccgcaaaaagccggtggcctgttggctgacgttcagtatcttgagccttatgcgtcatcagcattaaatcgcaaggcctatggaatttttggcgccggcgtataccagggattttcggttgtacctggtaaaggcctgaatgtgatcgttaagccaaacggcactaagcctggtgtcgcatcggttgatatcaatggttaccagatcactgtgcagcttctaaccgagcaagctgtagctttggtagccggaaaattgaacatcgtcattttggaggcgaagtacgggcaaggtattgttactgaccaagttgatgcgaattccaaaattaaggctgccagcctgcgcgttgtgaatgatgagaaaagtatcctcgatggtatggtcgaagtttgccgtatcaacttggcttcaaatgccaccagcgttccggccgagagcattaatgtagataagcggttctcattaaaagtgtcatatgagccgacagatgatatcaacgatgcccgcacaacccgactgttgacagttaaggcaggaaaatcgttcgttccacttgccggaggggatatgacaggcccgctgggggttacccggttggtgttttcggacaaaatcacgacacaggctaatacagatattgaccgggctaacggctttactgttgagtcactctccgctacaagtcctgggtatcctgtgcaaggagggttaggaacgctgttaaccttcaaggttaacgaatatcggaatgttcagttcgctttaggctcaggaaataccgatttctatctccgctcgatgcgaaaagataacggtacatcaacggaaaaatgggatcgagtctacacgcaagcgttcaagccgactgctgcggatgttggggcgcttactgatgcgcaagctgcccaaaaatatgcattacgctcaatcaaaattaacggcaagccattaagtagcgatgtgaacttgctggccggtgatgtgaatgcttataacaagactgaagcggatgggcgatatcttgcgaagaccagtaatctcgcagaccttactgataaagctaaggcacgcggcaatcttgaattgggagatgccgccactcgaaacgtaggtgtttctggtggtcagctgatggctgttggtgcgtttggcctgggtgttggtggtcgccatttcgatgatgcatattgcaataccgcacagatttatcgtttaaattcctcttctgccaataagccgcctataacgggaaatattgcagccggggtaatcagccttccatgcgatgcagctccgtcctccggttaccttgcaatttcagggttgggaatcggctacataggtttttcgaataagcctgaaaatggtgttaaatgggggcaaatctatacctctttaaacaagccatcggcagcagatgttggagctttgacggatgcacaggctgcacaaaaatatgcactgcggtctataaaaataaacggcaagccgctttcatctgatgtgaatttattagcaagtgatgttaacgcatggaataaaactgagtcagatggtcgctatttaaaactggctggcgacactatgaagggcaggctaattatcgatggggcaactgtattgcctactcagccgctccgggctttaggcgattctccggctctttggatgcatggcctcagcgtttctacgcttgagtttgatgatccaaatatcaaaggttacccaacccaaccatactctacgttggtgaattttagcgcgacagagcatagaggtctgcaactgctatcagaaaaagggactaacaacttttggttacgttcagcagacgcagggaagtactcgcaatttgtaaacatctaccatacagggaataagccttcagccgcggatgttggcgccctcactgatgctcaagcggcacagaaatacgctttgaggtctatcaaggttaacggaaaacctttaacagcagacgtaaacttacaagccggcgatgttaatgcctataacaagacagaatcagattcacgatacttcgcgcgaggaatgacagggacgtccgctgatgttgcttggaatgctccctcgggtttttataacacgcaagcaacgggtatgacatctgttctccatttccatttaggcggcgttggaagcactcgatctgccgatttccgctttaactatggtaatggcggtatagcataccgttcttcgcgtgatgggtttgggtatgaaaaagggtggacaaagatctataccgagctggacaaacctaagccagcagatatcggcactctggacactgcagagataacagacaactatggggcaatcgcgaaattaaaaattgatactggagctagcgctacatgggttcttatcgggacgatatctaacctggttcaatatggtggaactttaaccatagatatcattggtggctctggttataacgcttcagagcgaaataatgcaacccagcgaattatggttagaacaaacaataactcggtggcaaaagttaatgatccttatcgtgcccttgttacgagtcaccattacgggaatccagctataaccgaagttagagcggttgaagtatctgcaaataaatatgagatatacgcactggtaggtgcttttactaaaaacattgtcacaactgttaccgcatcagtaaatctatcaaattgggcatattcctttgccatacaggaaaaggtgcctgttgcaagtattcgctttatagcaaacacgtactatcacactggtaataagcctgcggctgaagatgttggagcatggagtaaagaggagtctgacgctagattcttgttgctggcggggggcactgtaaagacgttggcaataaagcctggaggtacggcatcggaaagtgaagccctccgtgtggaaggagcagcacacacacctattgtgataagccgtcctacatcacagtccaacctatccattggttttcaggttgctgataaatcattaatgcgccttggtttagcgctggataatgagttgcattggggggcagaagctaaccaggcttcaaatccacgtatttataccacagccaagccgcctactgcgcaagaaacaggagcattaacggacgcacaagccgctcaaaaatatgctcttcgctctattaaagttaacggtaaacctttaagcggcgatgtcaatctcttggctggtgatgttaatgcatggagtaagaccgaggctgatgggcgctatttgatgaagagtggcgggcaacttactggcctgttaaaaactagcgctgaaattcagtctaccagcatggacagtttccgtatggttggcggcaagtttggaacattctggcgtaatgacggcgataacctatatttattgctcacaaaggctaatgaccaatttggcggatttaacgacctaaggccgctaactgtcaataatgaaacgggttccatatcgttaggcacccaattgaatttaaataatccagattatgttagaaaatcgggaataaatagttatcaaagcggtgatgtaaaatttaatcaaacaaacggctacattcttcaaggggctggtgaccaatatgcacaatcttatttccttgagactgtagggcaatatacggctttgcggtggcgggtgcgcggcggtaattcggatggctggcctgagtttcgcaatgatggttcattgtatttgtctggtaactttccttgtgtcaaaaatagtttcggaaccacttggcatccagacggaaacattgagagcaatctgtggggtggctacctaagtaactggctgaacaataatctcaatggccgtgtcgattggggatcatttaatagccgcagccatatttccgggaatagaaatgcctggtggtacaaggacgagctaaccgggtatattcatcagggtggtgttatcaatcgcggcgataactatctaaaccgcgttaattttcctcgcgggtttacacaggactgtttcggggttcaattaacattggcgggtcattggggggactcatccgcaaacatggaagcgctaaacgtggggccgggaggatttgactctggtatgaatggaaatgaacgcatcgcattttggtgggcggttggggtttaa

SEQ ID NO: 450406 - DNA, 1059 bp, Serratia marcescens
atgaaagataattggttcaaggagcaaatgacgtctgccaagcaaaactcaggtttgtgggcgggctttgcagatgtggtgcagtctatgttgaatagcattgtgatgccattaatagagcgcaccgccaacagaaagtctctttattcaatggataaagatgatttgcgaaaacgtatgggggagctggggaaattcttttatatcgatgggaagaatagcgcctcactgccagtattgctttcccagcgcctggatgagatccatttcaaggggacaaaccgtccgatcgaggcaacgctatggcgtgagttcaaaaaccttgctgccacctgggcaccgctttatgcaccggtagaccaggctaagttcccatatggttcgtatttcgtcaccagggacgagctggagacggcaaaggggaagtatggtgatttcttccttacctcacgcggacgcatcagcgtagcgctgaacgacgtttacgacgtatattcggatactgacccgtccaaagtgctagacgagttcatgcgtcagttcaaaatggtcattgagccattgataccgcttcacattgtgtttgacggcatgggatatcatttgcgctttgagctggtggaacgaaaaatcgtattcactctcgccggcgctagcgcaaagatccaaagcggtacctggtatatcgaatcactccaaacagagatctccgccgagtcggtatccactaatctgaaggtaactcaaacgctcagcaatattccccgacccctcgagactgtactcgtccagatggacgatatgcggctcgatgcctgggcgcttgatgtggtgcctgtaccaatgatacgcccgacgcagggagcagacgcacgacttgttgtcgcggacggcatagccagtattcagacgctcggcttccgaggttgcaatgtagaatttacatctggcgggatcatagggtacgagttccctgatggaattgaccgcgcgatactgccgattacagccgccgatgtaggaaagataaactctattatttatctagacaccttttaa

SEQ ID NO: 450407 - DNA, 1413 bp, Serratia marcescens
atgacctcgcaagatatattggataagttcacggctctcattcagcaaaatgtatggtggagtcgatttgtaaacagccagtttatgaaaatgctggcgattatggttagtcaaatcatgtatgcctgtcagactgctgccgagaaggcattaactgaaggttttattagtacagcgacaaaacgttcatcaattcttgctgctgctgaggatagaggctatgtgactcgacagataaccccatcatacgggacttccacggtaattaataaaactcagaaaccacaatcattagctatctatactgatttgatatccgacgagcaaaaacgttacatgcttgttgaaccggttatattgaagcctggcgaaacaaaacatggtgttcaaacaaaacagcttgagcgggaaaggctgatatttgatgttgaaaacgaaactgagtttttgtctttcacactaactaaggctatgacaaaaagatgcgtgaatattgatgtttccgttaccgataatggtgttgcccgccgatgggaagaaaaccctcagtttcgactttcaaataagaatagccttcattacgtgaagttctatcggccaacggaacagattggtgttcgctttggtgatggttctattggcaagatgccggccagcggtgaacaggtgattttagatgtttggctgagtgatggcgacataacactggtacaaggccaggcattgacaccgtatgcagattcgtcggaattatcaggccagatagagatcaagactgagacaccaatcacgaacggcgccgggtatgaaacgacagaggaaacgagaagcagagcgcaatattttaccgcttatgacggccaggtagtgtggggggcggactataaattttatcttcgcacacagatccctaatattagctggatcaatgcttggggcgagaaggaacaggagcgttcaaccggcgttaaatctctaaagaatatcaacactgtatttttttgcggccacaagaaggggttgacgcaggcacaaatggaaacgatggttttagacactttcaaagggattccaaacgaattaaataagaattttgtttacgttaaaactaatgaaagaccatttacaatttccgtttccggtacggttaagaaaagtgaaataatttcagaagctgagagaaaaattcgtgaagcgttagaggctaaagcaggaaaagactctagcaacttcgaacgtgatgaatcaggggagttcgcacgagtttctcacaatgaaatctgggcaataattgagtcaacagggctgctttcaaaatttaatcttgacatcaagaatatgagtgatgccgccgcgctaaacgattttattttcttggatgtaacaaagtcgatatttgaccttaaatactga

SEQ ID NO: 450408 - DNA, 348 bp, Serratia marcescens
atgaacgagatagatagcctcctgcgcgttaccggggaaggcgtgaccatcaaattgggtgatgtagaggcaatggaagcgcgtatagaggactggttacacacaccggagggcagtgtttatggccttccagagtacggaaatcccctggcacgctttaaacatgagcctctggacagcgtgcacacgctggtagccattgaaaatgagatcatcatcaaaatgatgagcgatatagctgatctgaagttggaggggatcaggatagaaccagctgagattgatgtgtttgtcctgactattgggatacctaaccaggaacttacctgggcaatgaaaaaggagtaa

SEQ ID NO: 450409 - DNA, 3759 bp, Serratia marcescens
atgccggcacaaactaagccaacagaaatactgtctatcatcgaggcgattgagaacgccagtgcgaaagaactcgatgtacttactgatatacaccgagcaatcgtaagccgctcaccaacaggccgctcgaacgacgttaagttacagaagtctaatgcttctatcattgcccagatcactcggcgtcaagagccagctaatgactcctatcccacccataggcgcaatcagttacatgatattcgcaatagtaacggccgcgttgagctatctgtatcaggcgaaagatttcaaattggtgataataaaaatcaaaaatcatcttttatcggtaattttccgccaaaaaacgtcgccattgataaaagtcatgctactggcagtaaattgcaatcaattgacatgttatcgcatgcgcatgacggtaatcggccttctgaactggctggcggccaaattaatgcaagcgaaaacatttattctgcaatcggtaatacagctagaaaattgcatttgctagatgatggcgactcatcaaaaacacaagcaatacaaagaagtgagcgaaaactcggtgcacggggagagaatggacgatttatatcaaaggacacggttgagtctgacgttgaggacgaaaaggacaaggatgaaaaaagcctactaaaacgcttggcgtcatttttctccagtaagaatggtgatggggaggctgcggaggttgctgggatggcagctggaggcgttctgtttagcgcaggtaaagaagcggctgatctgatcggtggcattaacgacaaggtggtaagtctcaaagagtggcgggataaacgcaaagaccttccaaatgctacaacccaggcgccgataaaattcccggatgtcagtgcaccgactaaatcgcaacaagcctacagtgcgagcaccaccggtaaagtgatctccgttatggaatcgcagcaggaacagttagcaaaatccgatgaagagattatccgcgttctgggtgaaatcagagacaaggactccaagggtagcaaaggtgggcgcggtatccttggcgggattttagcgggcctgggcgggaaggctatcggaaaggctttgggatctcgaattctgggggggctatcgttagcgttgggcggcggggtactcgtaaaactatttaaacgcttggctggtgcaggtgatatcaacgatatcatgccgcgccctgggcgtgggccggttactactggtggtatgcatgggaagcataatccatccgccggatcgccaaaggggaaaggaggcaggctgacgaaagtggccgctggtgcaggagctgtagctgttggtgcatatggagctattaagggggtatttggcagtagtagcgaagttactgaggctgttggcgccaatatcgaaaatccagcaggaaagaagggcgttgaggtaccaaaacaaccagaggacgtcaaagcacagcaaaaatcgcgtaaatctcgctccaagtctaagcgcggccggaaaatggctcgcaatagagtttcagctaaaccaccagcaacgaacgcagaaaccattacggcgtctactgggaagaacgcgagtaaaaagggggtagagaaagcttctgtcactacggcagaacatgcagcagaaaaagctgtaggtgaaaaggttgcggaaaaagccgctggcaagctggctgcaaaaggtgctctgaaggcgattccaattgtagggacgattataggcgccggcatcgatgcgatcgatggcttcagtgatagtgaagcacagagaggggcgtttaaattggctgaaggtcaggatgtttccggccgtcataaaagcgaatatgctgccgccaatataatcgacatgggtggattggtgtccggtggtgccggcttcatggctgacggcgctcgctggctcggtatggatggtgtggcggatggcctaacatttagtaccagtgatattgcacagtccttagacaatggcgtcagcagtgtaaaagagttttttgactcgggtagcgatagccaggtcgacgcaatacgcgcaggtgcgaaacaaactacagaagcaattaaagacctggatagttctcttcagtccgtaatgcctggcatggccgacccatcactcgcatctggcatatctgcaactgatggatcagctccggcgtttaataatgtttcgaatgaattaaatataggtggcgctaatgcgcataccagggcgtttaggaataacaactttggcaacctggagtatgcgggccaagccggtgctgagttagagaaagccaatgcaaaaggtgaacgtcgttttgctaaatttggctctcctgaagagggatttcgtgcgctagcgaatcagcttagcagttatgcagaaggaacatcaaaagcaattggatatcaaaaagtagacaccgtaagggggattatctccaaatatgccccaagtggagagaatgataccgagggctatattgctcagctgtcgaagtccttgggcgtgagggagagcgatcggcttgatctgcgcaatgcggacgtcatgacaaaagtaatgcggcagatagctactatcgaaggtggggcgccgcaggtttctgatcaatttataaaaacagcaattggcgaacgttccggtaaaaagtgggttggtcaatttaacccagaaacgctgtcaatcattaatcagcagcgccaggctgatggccttgaagccatttccagcagcgcgcaattctctcgtccggaaaagcaatctatgggcgcgcgcgtcaccgaggcagccaccgaagcatatgacactgccgcgacgtatttgggcgaacttggaggtaaaagcgacgctgcattgactggaatgtttgatgtagaaggcctgactgtacccgcgccagatcgtggcctaacagtgccgataaacgacaagttaccgggtgccttacaacaggcatcaaattcaccggatgctattgccgcactccagcggagggccaccagcaggatcgggagtggagtcgaacaaggtgctgaatctggcgcaattatgcctccccccgttaatggcgctcaagagcaaccgatgcagattgtacccgccagcgaagtaaaaaaagcccgcaaagttctacctggctcgagtccgtcacagcagggtaacgctgctaatggggataccagctggtgggatgagacaaaagatatggcttcaggtattggcagcgtagctatggagtcggggaaaggggtgatggaagatgctgcacgtagtgccctccagtcgattggggttgatattgataacccactatcctcattcgcagtgacggccggtgatactgttggcggaggtgtttcatcagtcatatctggcctgatggccgatacgccgttttcattcctgagcgatacagttgctaacgctatcggaggaaaatccaacagccttactcaacaggctgtttcggcatttcaaacgtcaccgccgccaccgatcacaaacctggcggccagcggcgtggcgccagtctatcaaagagataatgaatctcgcagcagcgatgatgaaactctgtcttggcttgaacgtattgccaaagccgttgagaaacaactcaatgtgaagcctgagccaaaagacgcaaatatcaacatgactactcacagcccgcaacctgcgccgcgaactgaggtgccaactgcgatatcagatcgcgccctcgaaaaactcttcggctaa

SEQ ID NO: 450410 - DNA, 831 bp, Serratia marcescens
atgtttatccctaccctctaccaaccctcaaatccaaagaacgaaatccagtttcgggcgccggcggttaatgatgctctggagttttgcgggacggcgccggaacaagaagaacaggctacgacgcgatacctcaatacaatgcagatcggagatgtgcaggatagtgctcgatggacggctcaagaccgccgcacggcgttgtggtggattcatacacattcgcaaccaaacggtgcagaacagaccgtaagttatcaatgtggccattgtggggagctgcatcactatgactttgacctgtgcgatttggctgaggatttagagctgctgacaatccccccctatgtcgaagtaaccattccggttaaaggtgtgccacatcaatggcacttgaaacctatcgatggtctgggtatggagcatttagaaatgatgtattcgaacctaccggctccaggtgcacctaattatgaaacggaattagcgaatttacggctggtggagatcaccttgcaggctcatttggccgaacagccccaggagttccaagaggcagcggaaatgcgatacgagctgattcgtagcatggaagtcaattcggagtttgtgccgctggcagccggcgtaaggaagatgcaagaaaccttacgccacgggctaccaattacgatccacaagggaaaagcccagctatatatcaagccgcataactgcccaactttggctaaggagggacaggcgatttctacacgccttttctttcagtttcggggtgtcaactaccttccaggccatgtcgttaaattcctgggtgaccctgattcatga

SEQ ID NO: 450411 - DNA, 780 bp, Serratia marcescens
atgggtatttttgatggattatccagcagatccagcctaaaaaatgctgtaaacggcatgtttaatgacgcgatggactctgctacaaaccgcttcctccaggggacaaatgatgtcgtaaaagaagcattgaattatgcactgggcggcggttcatctagtggttttgccggcggtgggatggttaacgggaaagccgggcactctggtgaagttgcctatgccaaaagcattttagaaatggcgatgcgaatccagtacgcacaggggtggcaatgggttgttgaagccgacgggatgaaagacctttttatgtttgttcgcgatgtttcgtacagcgaagggactattgaaacagatgccaaaattattggcggtatccagtttaataaaccaactcatataacacccggcaccgtaacaatcaccgttcgcgatgaccagaccgggcgtattgctaaatggttcgatgccaggaagcgccgcgtgataaaccgtgatggcactattaacctctccccctactacgtgatgaacatccgtgtttatcgcgtaggttttaacggcagtaaaacgttggatgctgaatatcccgtgatcccaacggagcgtggcgccacgacgcgttcatatgaccaggttggtgaattcctttcatacccgctgacatttgtatgccacacatcagctgatgccagtttaactgggcttgcgtcatcgatggcaaccggcatggccggtgatgcactaagcaaggccaccagcataatcaaattttaa

SEQ ID NO: 450412 - DNA, 552 bp, Serratia marcescens
atgacacctaacgagctgcttgagggcgttaaatctcggtttacgcccctgctggtggttgagtcaaaagtgcttgaaagcctattgattcaggctttggcggcttatcaggatcgggctggcttggtgcgtcgtatcaagatagaaaaagaggcagggatttccctgccttatcctgaagattatctggctctggtacatgtagtcgataagcgcgaagtattggtttatagcgacgattatggctcgtcggtagatctcgagctaactggaagagaactataccccctaaccctttcctacctagtcaacttgcgcgaccgcccattaagtgaatggacggttcccccaacgattgtcggccttattcaagattaccttgaagtattaatcgccattcctaataccgagcgtcaacggcgcgtatcaatcgcagggaaacttgatacatctgcccttcccgacgaaaacacgctgactcagcgcaagttagacctggaagcccagatgtcgtcaaaccgggcaatcattgccggcgcaacactattttaa

SEQ ID NO: 450413 - DNA, 492 bp, Serratia marcescens
atgagtggatttggtaatacgaaggcggacgttggtttcatgaagaagcgcttcaaccagaacctagcggccggcgaaaagctgattggctcggaatactggatggtaattaaggggtatgaaaacctctcgatcttgatccgaacagctcagcttccagaaatgacccgtgaggacatggaagacgtggcgcctggcggcatgaagttcaaccagcacggtgcactacgaaatagtggggaaacacaggtgcagtgcgtcgaaaccattacaggcgacgttctggcagctgtgaaagatatggtgttcggcaaaaaatacgtcgatatcaccattagtgcagcggccgagtcgaacggcggtgatcacaaagggctgacccgctcattgcttcactgcaaagtctactctgaagctgtggatctctcatctgaagacgtcactgtagccgtccgcccaagcctgcgcatcgtctacaactgggtggagtaa

SEQ ID NO: 450414 - DNA, 504 bp, Serratia marcescens
atggtcgttgggtacatcggggaaggcagcgttgcgatgctcgaaagcctgtggtcgtcgccttttgaaaacaactccgttggctctatggccggtgtgagtaccctctcaaatgcgactcaagcggcatcgaccacgacgtcaaaagcgaaaattaacagcatgttggtgtgggaaggtcaaaagccacctgagtttaatttgtcgctgcatttcatggcgaaagtggatgcccagatcgaggtcaactccgcaattatggcgttgcagcaaatggcgtcacctgatttgaaaaacttcctgcctggtggccgccggccgaagcctgttgtcctggatattgggcgccggcaaaaaattatgcatgccgtgattcagtcagttcaatacgagttggacgcaccgcgcacgataacgggtatgtatgcccacaacacagtgtccctacacatctcaggtatgacggcttacaacgagtcggaaataccacttatgtacatttga

SEQ ID NO: 450415 - DNA, 720 bp, Serratia marcescens
gtggatattttcaaacaaaaccaagttaaccctttgctagaagctgcgtttggcacagttgcggttgtatcggcctctgacgcgttgttggagtcgaataagggtaagggcgagcctaagaaagaaaaaggcaagaaggcactgtctgacgccattttcgaggcggtatctaaacgctctcgtcaggatgaacgttcggtagctgcatcgttcctgattgattgggcacgttcctctagtccgactagtgaagacattgacggtatcgctatggtcattgccggcattagcgatgatgaagaggacgacgaaatcaccgatgcccaaactgatgaatacaaccgtgtgctctccgttctggctgatgcagcggtttcattgggggcagatcaagactctgtcactcagatgatcgatgaagaagatgacgatgccgcaatcatcgtagcggatgccatttctgccgccaacgaagacgatgacgaagcaatcgcaatctatggcgtgtctggtgatagcgatgatgacgctatgttggaagcaaacaaaaaagttgttcgcaacggtgaagttaagctgatccgtaagcgccctcgccctaaacgcatcactgcattgcagcgtgcctccatcaaaaaagcacaacgcaaatctcacactgcgtcggcgaacatatctcgtcggaaatcgttgaaagtacgcaaaaaacgcggcctgtaa

SEQ ID NO: 450416 - DNA, 1581 bp, Serratia marcescens
atgaataaaatcccttttgctcttggtacggctgctggcacggcagttgcgccaatcgatgcatcagcaacaaccggatctacttctggcggtgcctcagtatttgcgggcctggtaattgctcggaaaggcaagccaaataaagtcctgaaaatcacacagaacaacgtcaaatctgtactgggtgaagctccaagaccacaagaaggccagttttttgagcctctacgtcatgtgaatcaggctttggctggcggtgacggttatgtagtacgcattcctttgcctggtatgttgatccccgcaatcaacctgacggtagagacggccggaacgccggcggttaccacggttaaggcaaccaccagcacaagcgcatttggtgccgatatcactttgcctgctaaggccgctctcactttctttgtcgaagatggcgataagtctaccaaccgaaagttgagttttgagcctgtcaaaaccaagcctggcctcttctctttgaaactggtggcaactgactcgttaggtgcagaaaccacgctggaaaattacgacgtatcgcttaattcagacgtgttggatgatatggggctgtccgcgtatatccctgatgtcctcgaacgtaacgattcacggttgcgtgtgctgatctccgatactctcgctctgccggcgtcatttacaggtatcaccggtcaagcatttgtcggtggctctgacggcgattttaagaaactaacgtcgaaagactatgcagcatcaatagcggtgttagatggttcgctggtggagtacaccgctatcctgtctttgggaatttatgacgcgacggcgatcggcaaacttgccgaactggcaaaggctgttcgtgttgatatgttcgcagatgttgatccccgtttagccgctgataaggcgctggagcaactaaccgggcttggcttgggtggtaatgaaaatgtcaccgcctattacttcccattctcctgtcgcgatccattgagccaatcgaatgttgtattcggtttatctggcgacgctttcacggctaaagcgaaaggtgtagccctggtacctgatgtcggcggatggcattactcccctgccggcgtgtcacgcggcgtggttaatcgtcaaaacattcagcctctgcctgctgctgccaacattgaccgtgaagtctttgcaaaagcccatctaaacgtagtgaccagtgtaaatggcgcgatcgttattgatgatgccctaactacgtgtgtcgaaaataactacaagcaatatcagcatgttatttcagtgatgaactctatcgcgcgcgattattactccttagctgctgccctcaaacatgaacctgatggtttaacccgtgaagggcttgaaaagggcattccccgccttctcgatcgctatgtagcagctgaggccttggtcaagccacgcgatgtcagccagggtgaggcgccttatatcgtgacagttaccaatacaagtttcgatagctgggaagtgcgctgggaagtgtgtgtgacgggagtatcccgccgcattgttggtgttcctgttctaatgcgttaa

SEQ ID NO: 450417 - DNA, 1596 bp, Serratia marcescens
atgcgccaagctattttcatggcaatgatcctaccttccgccctcggcgccgctacgagcgacatgtgtactttcatgcctgcaacacgtgatgagtcagacttctatgaggtttacaacatcgccggtgtgaaaatgggttcgttcgaacgtggtgaacaaatggatcacctcagcgctggcgtattctcgcaaatgggccgcattttcatgttgaaagacgatgtcgacggcaaaacgaaagaattcaccatttcgatcaaggatgatgaaggtcgcgacatgcctgttcgtcgttctcgcgtgcgtatcattgtgaaccgccgtcttggcaaacattacgatgatggcgaaagcaacatcaactacaacgaaaaagactccaaaggcaacagcttccaagtcactggcaacatcgattacaccaagggtattgtgaagctgaagttcgatgccgaaccaccagcaggtactcacatcgcaatgcaggcagagctggacgtagagaatgctccagacctgatccccgttattaaccaggcaatgcgtaaatggacgatgaagccatcgcaatacatcctggccgcagaacataccgtgcaatctatgatggatctgcaacgtgagttcggccttaacctggcatcaatgcagtttaccagcctcactcaatggtgctcgcatgagcaagatatgaaacgtctgcgtaagctcgcgttccatactgtgcacgaatacaaattcgacactgccttaccggaaggtcagcaatgggagccttggtgcgccttgttccgtggtgttgtaaaccgtatctccaccgagatgcgtgaccgtactaaaaaatacggaatccgtggtggttttgctggtggtgatgctgcgggctacatcaaatctctgccggaaagcatgttccagttggcgccgaactacgtgcaaacgtcttacgttcacttcattggtatcttgttcggctcaatccgcatttatgaagtgcctaaccctgtatgcgagcagtttaacaaagagggttacccgtactctcctagcgacattctcttctactcccgtggtgaaaacctgggtgaagcgggcatggtcgctggtgatgccgttcctgctatcccgtttgtccatccaactactacagccctggtgaaccgtcagactctgtggggttcggcaatcaatgagatccacccacgtaatggcgaagactatttctctcgcctgacgttggttaacgagaaagttggtgctatcgaccctggcactgggaagttcatcgaaaaaaagcctgaagccggcggcgaagatacagaagcaccagtcgtaggtgttgagagcgttactttgacgccgaaaactttgagcgtatccgtcggtgaaaaattcaagctgactcctgctgttctgcctgaaaactcaaccaacaagacgtttacgctgacttctagcgatgaatcgttggcagttgttgatcagaacggcgacggcgaagcgaaagctgtaggcgtcgtcaacatcacaatgaccagtgaagacggtgcaaaaaccgcagttgcgaaggtgactgtgaaggccgccggctaa

SEQ ID NO: 450418 - DNA, 894 bp, Serratia marcescens
atgaaaaacaacgtattaagtcttattgatgtactggcgtcgaaaggtgaaaaaaaacttacccccaactccaacagcactgttcagcccgttgcgttaatgcggctcggcctgttcgtgccaagtctgaaacgcaaggggaagaacgttgagagcgtcaccatagatgcgtctgaggagctgtctaagctcgaaatagcacaggctgagggctattcgaacattacgataagcggccctcggctgtctatggagacggatttcaaggtttgggtcgcagtcattttatctttttcaaagtacggccgagacaccaacacgatcgaattaccgttttctgagtttgcgagctttgccggttacccggacaaggaaaaaactcgtgtcctgcgcgaacgtatctccggctcactaacccggattcgtagcactacgctgagcctttcctctaaaaacaaggataagcttagtgttacaggccttctccaaaaagggaactgggatgtgaaggctgacgttatcaaactaacagctgacgaatcattatgggagctttaccaggtagataaccaggttcttctccaaatgttcgtgttgagaaagttggcaaataaagggactgcgcaagcgctttacactttcattgaaagccttccacgtaaacctatcccattgtcttttgaaagaattaagcagcgtctggtgctgacatcgccgcagaaccaacaaaaccggattatcaagaaggctgtcgaggagttgatcgagacaggctatctcgatgcaaccatacaaaagcgcgataaggattggcacgtgcttatccacggacgcaatccaaaatgtcacctaccggctggcgccagcttaattgaaggtttggacgacgattaa

SEQ ID NO: 450419 - DNA, 534 bp, Serratia marcescens
atgttccccctatccctgttattcgaggcctttagctttttgaaaatacccaatatccgccaggcggcgttaatcggtggtgcggggctacttatcattggaggggggtggcttgcttatacagtcatacaagagaaatttacgagccaggcatctgcgattgaaacggcgggtcaaaagctaaaggaagccaatggactaaacaaaaacctgagtctgtcattggctcaaacagcagaggagcgtgatgacgcagagcgccgtctggtcgaactcaacaataagcaccgtcaagaagccaaagagctagaggaattcaaacgtgagaacgccgaactacaacacaaactcgccaaagcaatggcagatgatccttgtgctatccagcctctgcctgatgctgctatccggttgcacagcgaaagcatcaattccttcaataccagatacagtgctggaggaaaaacacagcaaaccgatactgccggcggaaatgtgccttttaccagaggagatgatcgccaaatacggtga

SEQ ID NO: 450420 - DNA, 777 bp, Serratia marcescens
atgttggataacccgaaacaggtcaatgctttccgagagctaaataaatcaggtttcacaccggccgcctcagtaaccctggcaacagcagtaagcgatcagtcgaaggataaagccgattctctgctggctttactgctccctggtatcgcatatcccacgagtatctcagcaccgatcggccaaattaaagaagtagccagggcgctggagtctgccgaatcgagcggacggggttttgtagccgccttcgccacctaccaatcgccgtcggagctgatcaccgtaaatattggttgggattgttacctaaagggagaaagcaagccggccggctcggcacccgcgctggtaacagcacttgccgacacggtaatcgtcaaggcgatgtcaaacgcagtgacgaaagtaaatccgcaacccgtgatcaatgtaatgaacgacattaacaaaatcctgaacatcccgccgccggctggtggggcaaatgcaccaacggcgccaccagcaccaacgctaagcgatgaattggttaaaagattaatcaccgcatgcggtgacatgaaaaacgccaccagcgggcttacaggagcttatgaggcagtaagtaaattaacagctgatggcgttacttctgttgccctggcggctaaggcgttcaaaaacgccgtagggattgcagttctggactcaatgggcatgcgttcacctatgcatggagccataacggcgatcacgcccaccagcgttattaatgcgctatttggagaaaagtaa

SEQ ID NO: 450421 - DNA, 177 bp, Serratia marcescens
atgaatggcgaaaagccattgtgctatgaattagccaccagcgagcagtaccaggtaatgcaccactcaacgttgaaatcgtcattagtgaagtcacgcttcaatatcagctcactgcgcaagcctgaagaaacagaagaggattttcaggccagattggaaggggtgttccgttaa

SEQ ID NO: 450422 - DNA, 138 bp, Serratia marcescens
atgaagggagggctaaccgtatccgaactgagttttcattctttagcggaagatcgggtgaagtttgggctaatggccgtcctggcctttatgcctggcaaattagacacgtacaatggcttcgccggcggcacgtag

SEQ ID NO: 450423 - DNA, 381 bp, Serratia marcescens
atgtcattcaaatgcgatcagctgaatattctggtgtacaaacagaacgacgccaaaggacgcaaagtggtgacactgaacggtactaggcaagatgatgtaaagacgtcgctctcaactcgttcaggaaaaaaggttagtacggtttcgtttgtagaacgcgcccaagctggtggctcttatgggctgtataatctgtatatcattcgggctgaaggcgtgtacttaacaaatgattggctggatgctgatgataagcctaagcgggaagccaaggtgtatcagtgcgattacaaaggtgagattaacgcggcaacgccagcacaatttacagcctgggaagcgcgcagaaacgctgaagcgatggacgcccggagctaa

SEQ ID NO: 450424 - DNA, 1263 bp, Serratia marcescens
atgttcgcgctggcagacgtaaattcgatgtatgcctcctgtgagcaggtctttaggcccgatcttgataaccgcgctgttgccgtgacgtccaataatgatggaaatatcgttgccaggaatcgactcgcaaagctggccggtctgaaaatgggagatccattattcaaagtgaagcacatcattgaacggcatcaagtggctgtattttcttctaattatgccctctacgcggacatgtcggcacgatttgtcgctacagtggaatctctctcagctcaagtggaacaatacagtattgatgagctattcattgagtgtgcagggatggggcaggctatgacctacgaagagtttggccaccagctgcgcgacactgtttaccgggccacagggctaacaataggagttggatttggcccctcgaaaacccttgccaagatagccaatcacgcagcgaaaacatggcgtaaaaccggcggcgtggtcgtactggatgacgccgcacgtcgttataaattactgtctttgttgccggtcagtgaggtatggggggtgggccgtcagctaacgaagaaattaactgtgatgggttataaaacagcgctggatctggcccttgccgataccaaatatatacggaaaaactttggtgttgtcatggagcgaaccgtgcgcgaattacgcggtgaaccctgcttatcgctcgaggagcatccgccaacaaaacaacagatcatcagttccagatcattcggtcagagagtcactgagctggtggatatgcaacaagctatctgcggccacgcatcaatagcagccggcaagctgaggcaggaaaaacagtattgcaaagctatatcggtgtttatccgtaccagcccattctcaaatgacgtgcaatacagcaatcaacattgcgaaattctcatcacacctacgcaggatacgcgggatattgtggcggcggcccagcgggcgcttcttcgaatttggcgccctgggatcaggtatgctaaagcaggcattatgctggcggattttagtggccgtgaagcgcagctggtactctttgacgatgctccgccacggccgaacagtgaaaagttaatggctgttatggacaggttaaacaaagacgctcgaggcacgctatttttagcaggccaaggcatcgacacaggcttccagatgaagcggcaatggctttcacctgcctatacaacacggtggtcagatctgcctaagtttaaggtgcggtaa

SEQ ID NO: 450425 - DNA, 441 bp, Serratia marcescens
atgaaactaatcgaagcccctttcccattcctgcgccccaacaccagcgcgccacaaatgcaaacgcctcttttcgcggagcgcatacctgctgggttcccatcccccgcacaagggtacgaagatgcgaccctggatctaaacgagtattgcatcgccaagaagcactcaacgttttttggctgggctgaaggtgactccatgattgaggccggcattcatgatggtgatctgctaatcgtggatcgcgatctgcgagcaaagcatggttcaatcatcattgcgaaagtcgacagcgaatttacagtgaaaatgctccatacacgccctcgcctgtgcctcatgccaatgaatgctgcatacagtccaatttacccagatccagacactttcgaagtatggggggttgtcacgttctggttgcacaaggcgcagaagtga

SEQ ID NO: 450426 - DNA, 369 bp, Serratia marcescens
atgtccgtccaatttctgaaagatagcaacgacaacgttgcttacgccgtaataccgatcgatgactataagcgcctgatggcagcggccgaaaatgatgatgatgcgtttgaagatgtcccatactcagcagatagcagtgacgatgacgtagttcctcatgctgtcgttgggatcaaagtcagagaagacgtgagcctgctggctgcatggcgcatctatcgcaacttatcccaagcggatgttgccgcaaaactgggtgtaactcaggcttccgtgtctcaattggaaagctctaagcgcccacaggccgccacactagccaagctggcggaaatctacaactgcacccctgctatgctccgataa

SEQ ID NO: 450427 - DNA, 261 bp, Serratia marcescens
atggagatagtttggtcacgccgcgctgagaagcagttggatagcatcgatgtgcggtataggcgaaaaatctttgagaaggtcgaccagttgacagggtttcccaccgttaacctcgatatcaaaaagatgaaagatggcgataacgaatacaggatgcgggttggtgattaccgggtgttgtttgaagttatcgacggggtgccaacggtcatcaaaatactgatggtcaagcgccggacaacaaacacctatagctaa

SEQ ID NO: 450428 - DNA, 873 bp, Serratia marcescens
atggaagtaacctacccttctgccattacgttgcctgcacgcgccccactcagggaaaagcctgtacgctctgtttttaaatgggccgggggcaaatcctcggtgttaccaaccatcgcccaattccttccagccggcaagcgcctgattgaaccgtttgttggcgggggatcggtgttcatgaacttcgatttccctgaatatctctgcggcgatataaacaatgacctaatcacggcctaccatgttatccagtcttcccctgatgcgttaattacggagctggtggagctattcggcaccaagaacaccgcagagggatacgcctcagtacgccagcggttcaatattgaaaagctcagcatgacgctggtggcccgtgcagcgcactttatctttatcaaccgacactgctttaacggactgatgcgttacaacctcgccggcgccattaacacaagctacggtaagtataagtccccttatctgccggtagaggagataaaggcgtgtcattcagtttcaacgcgctgcaaattctcacatcaaaactttcaaagtacgatcgcccaagctggcgccggggatgtggtcttttgcgatccaccttacgagccattgcccggaaaggaagggtttaccacttactcatcgggtggatttggcttcgcagatcaagaagcattgatgaatcacctagcagccgcccaccagcgcggcgcagccgtcattatcacgaatagccgtgcgccgaacgtcattgagctgtacgtcaagcatggaatgaccatccaccagcttgatgccccgcgttcacttagctgcaaaggtgataccaggaagaatgccgccgatctgattgctaccttctaa

SEQ ID NO: 450429 - DNA, 930 bp, Serratia marcescens
ttgtttaccctgttcaaaaatgcggtggtgtatctgcatcgctccggggcaatagcgccggaaaatctcaatgagcagctgaaagcaatggcattcacgccgtgcggagcacacgacatgagccggagcgggtggaaggctctcgatggcaaagaacaattctcgcttcagatgaagaaccacatcctgatcactatgctgaccgagaaaaaggtcattccacccgacttcctaaaagccgaagttaacgaacgtgttaaccagttagagcaagagcaacaccgcaggctaaagcacgcagagcgcgcgacaattaaagatgaagtccttcaaaacctactccctcgagcattcacccgaaaggtagagacacagctctggattgaccaggataaggggagaatcatcgttgataccactaatgctaagcgcgctgaagatgtgctggcattgcttcgaaaaacgctgggttctttgccggtagtgccaatcaccaccaaagaacctatcgagctggtaatgaccgaatggatgaaggtaggggaagcgcctgcgccgctacacatgcagggggagtgcgatgcccgcatggtaagcattctctctgaaggtggaacaacatcattccgaaatgagccattgggtagcgacaccatcgagtccacagtatcgagcggcaaactggtcacaaacctcagcatgttccacgccactaaattccacgtcaatttcatgatgaccgatgactgctcgttcaagcggctgaagttctccgacttgttcttggaaatgaacgatgaaatgcaggaggaggacgagagcggctctgacgttcgtaaacgcgccgatttcctgttgatggcagaaacagtggcagaggtaatcaacgacacattagcggcgtttgggggggaatcggaatggaagtaa

SEQ ID NO: 450430 - DNA, 408 bp, Serratia marcescens
atggctgcggaacaaaacaactacatctcacagcaaaacgaaccaagaaactataccagcgaggagaagatgatgatcatccagctcgcagctgctttgtacacgccggagcaaattcaaactctttggaaagaaatttcagcaataaacgaggaaattgagcatttgaaaagcgtggaagacagagcaaaaagtgaatatgacgccgttgaaaaaccgagcgatacatatgatttcgaaaggaagcagatcaagggaacgatgcatgcagcaagtcgcaaacgagaaatacttcaaaaagaaaacgataatataactaaaaatcatcatcttgttgtaaaactaaaatcctttgaggaggaagttaaggcgccatacgaacctaacgatggaatggttgatttgtaa

SEQ ID NO: 450431 - DNA, 636 bp, Serratia marcescens
gtgcataacaaaatcattggaaaacgccgagctaaaatcgtcagtaccgtgcaccagggcgggatgatgaaagcacagatacgcctaatgcatgagtgggatgatatgcccgattcggcgctgccttgggctgaatacttactacccattgggggcggttttgtccctaccattgcaggtgatctagtgtgggtagagtttccgtatgaaggcgactcacgacggcccatgattataggtgcggcacaagactggcccggtggtgtgcctaacgttcctcccgaggcttcgggccagggcggccagtacacgcccccagacgttgaaggcgctccaccagctccaaagctcaactcaacaaaggacgcggtactgaaacgcaacggcctgcttgaggtgcgctctgttggtggtggttatgccattactcgtatcgatgatggctctaccattggaatgaatgaggctggtcaatcctatatgatcagcagtagcgatgcgtttatcagtgcgggtggcaaagtgacgttggtcgctgccagtgatgtggacgtgaaggcggctggcaatatggattttaccgctggtgggaagattagcttcaaaagtgctcagatagcctttgacaaagcttga

SEQ ID NO: 450432 - DNA, 984 bp, Serratia marcescens
atggccggacagcttaaccagtttttccttcagtccgttgtgatcgatggtgctgaagtacccagggaaatggtcaccacttcggcttacgttgaacacatgaatatgcagtcgccggcgttggaattgcatgttcgtgacgtcaacaaccagcttatgaatgagaaaaaaatgaaggagggatctctgctggtggccgtcatgggagacagcgatggtggtatgagctggagcgatgaaatgaccatcgtttcctgcccttacgcgaacgatacggtacgcattgttgcgattccaaaggctctgcatcagctccatcagaaaacggtatcacctcggttctttgtcgaccaaaaccctaaagatatgttgagcgcgctatctggtgaaaaactgaagttggtcgcagatccttttaaccggatgaccacctatcaccttgtgcctggcgccaaaccttcggcattaatcgataagatagcccgtgaccacggcgcccgtgcctggattgctcggggtaccctgagtgttagaacattgtcggcactgcaaaaactgaagccagtagccaagtacgaaaccaacaacccatctgcggagaaccttttcaccaaggcacgacatctaactcaggatgaggcctatctgagtaaggttcgttatcgattttctgcatacagtgagacagaggggtatatcgcgattggtaaaaaggagttcccaatcaagatgatctccgatgccaaccgtgaagttctgatgaacctatctctgacaattatcccgaagctcgatgtggaatgtgagggtaatgccagtttggctgtgggccaacagatcacggtgcttattcagcgctatgacactgatagctcactcgatgagtcagtagaaagcagcatggtgataatgggggtgacacactatgaagaccgccgctcttacgtttgtcggatgatattgggagtagtgaaaggtgcataa

SEQ ID NO: 450433 - DNA, 771 bp, Serratia marcescens
atgatggaacaacttatctcccgctttcgcgaactgagactggagccaacgggcgaatttgaaatttcaggcttccaatcagctgataacgctatcgctacctacattagccgcatgttcgacggcgcctcgattaacacagaaacccttgagaacgcggcctttgttcggttcatagaaagtccaccagctgatcgcgtcgttctcggtaagtttgacgatatagtcgaatttttgcgcgccctccgcaaagccgacagctggaaaaatgcgccaaataaaccggttatgaataagcaggccttaccggtgattaacgtttcacgctcttttgacactgcatttatgcctatagagcaaaagcgggatctcaagcattcatacggctttaacatcgttgaggataaggacggtcagccttacgccgcgatcgataccacaaacgcctctcttacatacacaattactctgctggcggcggaaaaggaaacgctatcccttctgatcaacacgataggcgtacagctgcgcttctctgaacaccgttcattgtcggcgccggttaaactggcgctcgtggagctggatctggatgtaactcttaccgatagccgcgatttatcctttaccgatatttcggcgccgatcggtgacgaccgtattttcgcagtgcagacgacactaacagcctctgtcgacgtgatacgggcacttgccgttgtcccccaccgtgcgctaactaacgtaattgccgccatgaaggagaactga

SEQ ID NO: 450434 - DNA, 813 bp, Serratia marcescens
ttgagccgctttagtgaatttttcgaaccagaaaatgaagaagaattgccagagaatctgccgatcgaggcaaatcctattcccgaggcgcccaccagcgtgccagaaccagaacagcaggccttcactgacatcagcgatgctattagcagtattgatgacaccaaccccacagcggcggctgagggcgcagatttgccatctactgccaccatccctaatagtatttctacacgcccagcccaggcattaaaaagtcgctactccggccacgctgcgtttaacgacatggtgcgacgagactggcaacgggccattgcggccgaccctttcgcttttgatgcattgttgttcgttccaagtgatgccgaagaggttgagtttgacgatgaaggtcaaccattagagccgagttttaccgagctaaataacaaccagaagacgctgacctatggcgatcccgtagccgtggctgtattggattgtcccgatgaacgtgcaggcctgaatgcaatggataacgacggcgagcaagacggcggtgttgatgacgttctactgctccgtatagcgccacaaatggaggtgatcgataccggcgaagatgaaaacggtaacccccaccctgcggcccgcgcctttgtgcctgtaggttctatcctcgaatggaacgagtcgctgtctgaaggaaccacagtacgctgctggtggtatgtccaccgaatattcacatacggaaccgcagctgtcggttcgttgtattactgtatccctgcccgcaactttgagggaacaccggaggtggcccaatga

SEQ ID NO: 450435 - DNA, 1218 bp, Serratia marcescens
gtggccgactttaagaaagacgacaacgggcgatacatcactgatggcttatcgccgaaacaatttacccgcctctttgaccagatccagaaagaacgtgcacaggcgcgccggcggagaaatgggagcaagcacctcacaccatccctactgaagaacaaacacttagaagacgtcatcgggcttggaaaaaagaaggatggcactttcttcaccctagatgatttgaaaggatttgaagcccgtcggggtgaggctaagaaaaagttcaccaatactcagcctggtatcacatataggcagctggtggcccactcccaggctatcgacgttaagagggctaataacaatgttgatgatggctcaggcatttcgtcagcctccttcattggcttgaaacataacattgcccaaattcgcgtgaccgcttccaatcgttctttggacgccagccacctggtgcaactcagatttgaagaatgggaggatgcactcgaaaacgtaaccaatgatcgggccaccttaatgcgcctggtgcgaaagctggtggccgggcgtacctccattaactgtgactgcggccgctacatgtattggtatcgctatattgccacggccggcaacttcactatcgcgccccctaaagaatacgtcttccccaaaattaagaacccgaacctgcgtggggtagcttgtaagcacatcattcacgcattcacccgtatgcaaggtgctggttggcaaacacgcattatcgaatcactgatcaaggcctcaaagggccaccacttcggtgacgatagcaaaaagacccacgaatactttagcgagagcgaaattaagcaactcaatcgcaataggaaaagtaaaaccaaccaagccgctgtccgcgctgaataccagcgttatcagaagcgcattgacgcactgcaaagcaagctcaccgacaaagacaaagccaccctcagcaatgcccggacaaagctggcacgtgcccgccaggtgactgcgcaggaacgcgctcgcagaaaggtagccgaagccaaggcgaagcagcgctcggacgaattggagcaatacaagcgccaggtgactgacctactaaagctgcaacgccagatttttatcgacgcccaggtaatggcaggcaaaacaccagaggcagccgccaaagccttcgagcaccacattaagaccacattggggaataagcattga

SEQ ID NO: 450436 - DNA, 339 bp, Serratia marcescens
atgagcacctacaaccgattggatgatcgctgcatcgaagaccctatcatcagggcttatcttcacaatgaagtgatccgcaaatccaccagccaggacatcgacctacagcgctacgatattaaacccgatgaagaataccgccccgaccttatcgcccaccgtatttggggtactcttgagctacggtggtgtgtaaggctgctggccggaactgaagctgagtacgaggcgctaccaatcggcgccacactggccgtaccgtcaattgcctggcttcgagatcggattcgccattacgtagattccggcgaattacccgtaacccaaacgttatag

SEQ ID NO: 450437 - DNA, 651 bp, Serratia marcescens
atggttttaccgatctgcgtcgccactctgtcaggcccaagtgcccaaatgcttagggctgtttataaagataacgtcctggttatgggaaacgtgacgaaatactcccctaacctagccgatatcaacggtcaacttgtcccttctctatcggcttacgtcaacaaaggtatggtttcgctcgtagacgaagtatccggtgacgtatcgaaagccaccggcgccaatcgcgttcgactcagcgataagcataacggcggtcaccccgtaatatctgtcgctctcgaccggtacaacgagctaaagcgcaccaatgccattatcacaccgaaagatggcgccagtcggttcgatatccctcattccatcgtcgacgtgtcctacaactctaatggggagccagtctacaacatcgcatgggcggagctgcggccagaacatatcctgacgatcctttgttgttacggcactttctatcaacccgtcggcagcgccggctacttcaagcgcatgatgagcgcgctccattctgacaagagtgatgcaaggcacggcccagattggatcacccaatcagtccaggcaaagcatacgacggttgcaaccttgacaggtcaaagaatggatgacaaggacacgattatcttatga

SEQ ID NO: 450438 - DNA, 786 bp, Serratia marcescens
atgaaataccgcttgaatgaacacctcacactgaccactaccgcacaagggttgaatcatcttgaagcctcaaacgcgctggcgctgatcgccggactgacacatgaccatgttgcaagccaagggccagctaatgtgttcgttgcaggtgatggttcacgtgcatggattcgcaagcaggttgctgatggcaccgagcctgactattcggcattcaaaaatatgcccgaactgaaccccttcactaatatggcattctgccagagtttaatccgctcaatgggcttggttgtatcacctattctctttgagaatggcaacctggtaggccaatggcgtgtagaactaaacaccaattatggcgccaatgacatggcgaatagtggactgaaagttggtgtgaatgagccagtttcagaaatgtcacactccattatgcaggctgtgtgctttgctgctctacgtgttgccggcatcggccgtaaagcgtatctgcttcgtcctgaagttgaaggggaactgccgtcgctacagtggatgggtgatcatacctatgcttggatgctggctaataccgacatgggcgacgacgttgttcctgtacctgaactcgatgaatatgcagtgaccggcatttccccagaagatgcagctaccaaaattgaagccgccctggcagcattgaccgaagactccgcaccaaaaccagaaaccccagcagtggctgaaagcgccgatgctaatggtgttgaaagcgccatcccgaacgctgcaaacgcagagtaa

SEQ ID NO: 450439 - DNA, 1035 bp, Serratia marcescens
atgaacggcattacagacctgaattctttggtggccgtaggtgcgcaggacgatatttctcagcggctacgcgagttcgtccgtgataaaggtgccttcgctacgaacacctgggcgcagttaattagtgtcatgcgtatagtcgcggcatgggcggcgaaagaaggtcggactttttttcctatgaaaagcgcggatcttcgagactatatttcacatttggaagatagcggccaatctgtcggcactattgaagttcatgtttcactgatctcgatgcttcacaaacaggcccaagtggtatctcccacagcttcacctacgatcgctcgggccatgcggttaacccgcagatctgcgttggtttctggtgaccggacagggcaagcagtccccttccgccgcgatgaccttcttagcatcgatgccgtttgggctgactcggatcgcgttgcgataatccgtaatttggcatttcttcatgttgcctatagcaccctattacgcatgagtgaaataggccgtctgcgcgttcgtgatattgagcgggcgcaggacgggcggatcatactgaacgtaacttatacgaagaccattcttaaagccggcggggtaacgaaatcactcagtgccctgtctaccgagcggcttacgtcctggataaatgcagctgggttatctgatcatcctgacgcatatctattttgtagaacacatcgaactaacaaggcgatcatcaacactgcaactccgctaagcgcgccggcaatagaaaagattttttccgacgcctgggcatcactcgggaaaaccgataaaaaagccaacaaagatcgttatacgtgttggactggtcacagtgcccgcgtaggtgccgcgcaagatatggctgctgccggctacagcgttccgcagatcatgcaggaaggtacctggacaaaaactgagacactaatgggatatatcaggcatatagaggcccaaagaggcgccatgcttgatctgatggaaaatggaactaaaacaaaggtgtaa

SEQ ID NO: 450440 - DNA, 270 bp, Serratia marcescens
atgcccattgattttctgaccactgagcaggaacagaattacggccgttacgtcgcagaacctaatgacgtgcagctggcgcgctatttccatcttgacgaacgggatcttgcctttatttatcagcggcggggaaagcataacagcttgggaatagcgcttcagcttaccagtgcccgttttctgggaacctttatggggggctacaagttgctagccaacgcaaatgaggttgggaacgatttcggatatagactttatcaagtctaa

SEQ ID NO: 450441 - DNA, 438 bp, Serratia marcescens
atgacacagacacaagagtttcaggttggcgatgaggtgctcagtcgaggcgagtggctgaaaatcattaggatcaataaaagcgccggtgaagtcagctctgtagaaacgccgtgctatagcttcctgggatatggcggaacgataaaaatcaccgtggaccgtattacggactataaagccccgacggaagaagaagcgaaaaccgcgcgggcggcggccaaacgtccgccaatcgttaactatcctgctgagggttacgtaacgatgacgaaggctgaatggtcagccaaacacggtgactataaggctgttagggctgttgcagccagtgagaaccacggtgcctatcgttttcgtcgggttatgaccaatgcttatagcctcactaatgtatatatcagtgacatgaaaaccgttgaaatccctaacaaataa

SEQ ID NO: 450442 - DNA, 576 bp, Serratia marcescens
atgcatactgcacttaaacagcgtattgaaatgatgcgcggaaaaattgatcggggcgttccagtggttgaggttccggccagctcacaactgtttgttacccctgctgatgaatgcgcccgattggttgagttggccgatatcagtgccgaggattccatattggagccgagtgcaggaaccggcgcaattttacgcgctatcagggcgacggtaccgggcgcgttctgtgatgctatcgagaacagcggggcgttatgcgaatttctgagacaggaatttgagggcgtaaatatgatttgccgggattttttgcaatacccggacgcaggaacagcgccgcgctacagtcgtattatcatgaacccgccgttcaatcagggagcggacattaaacatatcatgcatgcctattcgttactgaaacccggaggggtactgaccgccgtttgtctcgatggaccgagacagaacgaaaaactgaaaccgcttgctgaccactgggagcgcttgccgcgggggacatttgcttatacggatgttgcgacggtgataatgcgcatggcaatgggctaa

SEQ ID NO: 450443 - DNA, 1503 bp, Serratia marcescens
atgaaggataaacaaccagatcagctacgtcgattattagttaaaaccccttttttggccccgttattaaccacattaccggcgacagcaaaagagaaattgttatattcccttactgaaggcaaggcgaaaggttctatcccgtctcagagtcagacgctgctgctgaaaaatgcaaatatggtcgtgaccatggataaagacaagcgcgaaattaaaaaaggctgcgtctttatcaaaggtaatacgattgttgccgtgggttccgaaagcgaagtgccgcaaacggcagacagagttatcgatctaaaaggtcatatcgttattcccggtctgatcaacactcaccatcatatgtatcagagcctgacccgcgtagtccctgcggctcaggatggagaactctttacctggctgaccgcgctgtatcctatctggggaaagctgtccccggaaatgatgaaagtggctaccaaaaccgcaatggcagagctgatgctttcaggttgtaccacttccagcgatcaccagtacgtttacccgaacggcatcaagctcgatcacagcatagaagcggcgcaggaaatggggatgcgtttccatgcttgtcgcggcagcatgagcgtaggcaaaaaacagggtggtctgccaccggacgctatcgttgaagatgaaaaattcatcctcaacgatactcagcgcgtgattgagcagttccacgacgctgaacgcggtgcgatgatccgtatagtggttgcaccttgctcgccgttctcggtcagcgaagggctgatgcgcgattccgcaaaacttgcccgggcgcacggtgtttccctgcatacgcacctggcggaaaacgtcagcgatattgaatacagcaaaaagacgttcaataaaacacctgcgcagtatgtggaggatctggagtgggtcggtcacgacgtatggcatgcgcactgcgtgaagcttgatgattacggcatgaaactgtttgcccgcaccggtaccggtgttgcgcactgcccttgctcgaacatgcgtctgggttctggtatcgcgccagtgcgccatatgctggatgctggcatgcacgtgggtctgggtgtggacggttcggcttctaacgacagcgccgatatgattggcgaagtgcgtcaggctctgctgctgcaacgtgttggtttcggcccggaagcgctgaccgcacgtgaagcgctggaaatcgccaccctgggtggggcgaaaaacctcaatcgtgatgacattggtgcgctggcgccgggtatgatggcggatattgcggtgtttaacctggaaggcgttggccttgctggcgcacagcacgatccggtttccgccctggtgttctgtaacccaggcaaggttgcttacaacatcatcaatggtcgcgtggtggtggataacggtaaggtgactaccgtagatgtaccggtgataatcgagaaacacaatcgcttggctcatcaactattggaaggctaa

SEQ ID NO: 450444 - DNA, 450 bp, Serratia marcescens
atggcaactgcagcaaaaacaatgggcagtacctatcccatccccacctaccggtttgtggtctccgtgggcaaagaccagatgagtttcagcagcgtatcgggtctcgaccaatccgtgcagctggtgaaataccaggatggcacgggcaatctgtttcaaatgccgggccagattgaacccctgaccatcacgctcaagcgcggtgtggtccccaagcaaagtcaactttatgactggatcaacggcatctcgttcaaccgggtggagaagaaggatgtgttgatcagcctgaccaatgaaaccggctctgagctgctggtgacctggaatgtgatgaacgcctttcccaccaaatggaccggcccgagcctggatgcgaccagcaacgaagtcgctttcgaggaactcacgctggcagctgatcgcctgacgctgaaattcagttga

SEQ ID NO: 450445 - DNA, 1200 bp, Serratia marcescens
atgacggattataaggtaccaggtgtgtatgtggaggagccgttcgggctgtccctgtcggttcaaacggggcagacggcggtgccggtgtttgcgtttgcattgggtaatacgttggtcgctgcgatggccgcgcatggggtgactgacgccaaaggcagcgtgacggcattgacgtcgtggctggaggtgagtgacgtcagccggcaggtctgggaaagggcctatagggatgaaagcactcaagaaaataagaaaacaaccgctgacgaggccgtcaaattactcgaaaaagacctcctgtaccagtccctgaggctgtatttcatcaatggcggtggccattgctatatcgccccgttggagaaacttgatgcactggtcccggcgctggatgacgcgacgctgctggttcaggcagggacggggatcacggtatttgagccaaaagttgcaacactgtgcggcgtcggcaaaaccctgtttgcgctgtttgacgggcctaatgagccattgaacagcgcgaaggatgtgaaagaaaaggtacaggaaggagctacatatccctcaacacattatgccgcggtgtactacccgtggctgaaggtagacggcgtcaccgaggctgtcccgccaagcggggcggtggcgggagcctatgcccgggtagaccgccagcgtggcgtgtggaaggcgccggcgaacgtcgacattatcggtgcgacacccgtgcataaggtgtcggaggcggtggatgccgcctgcaacgtgccggcttcaggcggaaaggccatgaacgtcatccgtgccttccacggtaccgggccgctgatttggggcgcgcgtacgctgcaatcggatacgccggcctggcgctacgtgccggtgcgccgtttatttaatgccgcggagcgggacatcaaaacggcgatgagtatggccctgttcgagcccaacagcgcgcctacgtgggaacgggtgcggggcgcggtggagagttatgtccatgatttgtggctgaagggcgccctgctgggtgactccccggcgcaggcctattttgtgcacatcggcctcggcacgaccatgacccaggacgacatcaataacggcaggatgattgtgaacgtcgggctggcggccgtgcggccggcagagttcatcatcctgcaactgacccaggatgtggtaccggcctga

SEQ ID NO: 450446 - DNA, 1587 bp, Serratia marcescens
atgagcgaagtgtatgcagtgccgggcgtgtatgtgacggagccggatgggccgtcgatgagcattcagagcggtgagaccgccgtaccggtttttctggggttcttcacccccaaaaccccgccccaaacaaccgagccgctatcgtgcgtgcgtatcgagagttggctggattttagccagcactttggctcttcaaaccctatctcggtcaatgctaagtatgaggcgcatgcagtgaggtatatgggcgcccacagcgtccggttgtacttcgagaacggcggtgggccctgctacgtgctgaaccttccccgcggggtgggaaaacccatcgacgcgaatgtacttgagaaaatcgttccggctatcgaactgtgcccggacatcacgctgttgtgctggtgcgagtttgtcgacaagaagatggacaccgatatttatgctgaactggccaaactgctggccgccagcgaaacctcggggggcaatcccgggcgatttttgctgacggatgcctggccggaggctacaaatgcgacggctctcccctcgacctggacgtttaagactcctgatgtggcggaaaagacgcaggtagcaagctattttccggcgctgctgaccgggtatgcgtgggatttcgtcgactatatgaaccctaagtccgcccccgatgccggttatgaagattttatcacggttgaagaatttagtaagctcgaccaagaactacttaataagttaattaaaactgcctccaaacttgagaaaatcacgctcaagtctctccgaagccagattgccgcgctgacggtagaaaaagtaagtcaaacaacagtcgttgctggcagtaagccagcagataaggcgtcggctgccaaggcacttatccaaaaggctaatgtgcttgtcaatactatcgacaaggccgtgcgtgaagaaatagagaagcgacgctctactcccgtggtcttgcgggccagcgtcgcgatggccggggtctatgcccgggtagaccgcgagcgcggggtgtggaaagccccggccaacgtcgggttggtgggcgtgaccggactgattgcacaaggggctacgtcgaccggagtcaaatgggccagcgccatcccggttcgcatcgacgatgcgctgaatgagacgttggttaaagccggggtcaatgccatccgtgcgttcagtgggcaggggctgcgggtgtggggggcgcgcaccatgagtccgacgacacagacggcctggcgctatgtgtcggtacggcgcttgttcaacaccatcgagcgtgatgcccgttcggcattgcgcaccgccgtctttgagcccaacagtccgccaacctgggagcgggtgcgtggggcgctggagaactaccttaacgcgctgtggcgtcagggcgcgctgcagggggagaccccggagcaggcgtattttgtccacatcggcctcggcacgaccatgaccccgaaagacattgccgacggcaagatgatagtgaaagtgggcgtggccgcggtgcgcccggcagagtttatcatcctgcaactgactcaggacgttgtcgcccgttga

SEQ ID NO: 450447 - DNA, 1344 bp, Serratia marcescens
atggggcaggcgcgcgaacgaggagacagggtaatgggagagaacaacatgagtgaacgcccctggttgttgccgggtgtcaggctgacggaaacgacgctggcggcatcggagggggaggacgcgcttccgagtgcggtcccggtctttatcggctggcacgacggcgagcacaggcttgcaccgatgccggtgacgtacctggcctcatgggaccaggtacaagacaaggcagaaaaaaaggcatcccgtctgtggatgacggtacggcactatttcgataacggcggcggtccctgttttgtgtttgaaggggcgccaccggcgtcccttccttctcagggcgggctgacgcaatggtggtctactttcctcgatgaagcgtgtggctggttgctggcggagccgggtatcactctggtggcggtgccgcaattggctgaattggttgaattggctgaagggcctgcgttgacggaagcggctctgccgcaggacaccatcacggcgccggaagcggcgttgcagcccccccaaaccgataccttcatcgcactctggcaggcgctggtccaggcctgcagccgtcgtcctgacctgttttttgtgctggatgcaccgcgtgaccccaacatggccaccgcctgtcttcatcaacttcgccagtcgtccggactgggtgacggcggacaacgcgtggcgctctacgggccacacctggagaccgattatccccacgatggcaaagcctgggtgctgcccccgtgtggggcggtgctgggcgcctacggtcgaagtgacgcgtcggcggggccgtggaaggccccggccaacatccccctttggcatgtggtgacgccggaatacagggagacgctgttcgctgactggttcaatgtcaatgaggtcccaataaacctggtccgcagttttgccggccgtggcacccggatctggggctgccgaacgctggcccgcggtaccccctttcgttatgtgcaggtgcggcgtgccgtcacctggatagaagccaacctcaggcagatctgccgctttgcggtgtacgagccgaataatgacatcgtctggtttcagctgcgcggcctgtgcagcgcctggctgcgccgggtgtggctggaaggggggctggccggggcagacgaagcgtctgcgtattcggtgcgtgtcggggtcaatgagagcatgaccgccgccgacgtggcagcaggacgcctgatcattcaggtcggggtggcggtgttgcacgccgcggaattcatcgaggtaaaactggagctgaccgtgggcagtgaccagaaacgcgtggggagtgaatcaacatga

SEQ ID NO: 450448 - DNA, 465 bp, Serratia marcescens
atgaagtcaccgtggatgagtgcgccgagcctgtcacaccggtttttggcgaccttctttatcaaggggatcccaagcccgatggacgtgcgttttgcgcggatttccggcctggggcgtgagctgcaggttacgggattgcgcgaaggcggggataacctggggacactcaatctggcggagcgcgtgacgcacggtacgctggtgtttgaacgcggcgtggcggcggtgacgccgctcacgttgttgttcgagcgggctctgggccagttcgctccgatgtacctgaaggtggtggtggtcctgcttgatggccatggacggccgcaatgctgctggacgatcacggatgcgctgcccgtcaaatggcacaccggcgaccttgatgcaacgggaagcacggtgctgattgatacgctggagttggcgtaccacgagttgcactggatggggggcgcaggatga

SEQ ID NO: 450449 - DNA, 174 bp, Serratia marcescens
atgacgctggagataagggagttggttatcgaagcacgggtcgtgaatgataccccgcagaaggggggccctgtggcactggccgggagcaacgaagatgaactggcgcgctgggtggcgctggtgacacggcgggtgctggacacgctggatgaacaacgggagcgacggtaa

SEQ ID NO: 450450 - DNA, 669 bp, Serratia marcescens
atgggactgttagaacgcggtttggcgaagctgacgctggatgcctaccaggatgacgcccaggtgacgctgatcaagtcagtggcggcgatgtacaaccccgagtcggtcagcctggattacacggcggcctattcgacggtggcagggataaaccagaaggaagaggtgagctggtatagccatgtctcgccgcccaccttgagtctggcattgattttggatgcccggggcccccagggagggcaaccggtggatcagcagttgaaagacttgcgcgccctgtgcttcacggtggggccaaagggggaacccccttacctgcgggtgaactggggcagcatgagctggcatgggcacgggtattttttgggccgactcaaacagttggccattgtctataccctgtttgaccgaaatgccaagccgctgcgggcaacggccaccctgacgctacaggggcagtcgagtgatgtgatggcggccgccaggaatacgcataagcaggcaaggcaggtactgctgatgcaggataaaacctcgttgccgcaggtgttggcacaaacaacgggggcggcaggaagcgcgagctatctgacggtggcctatgccaatgaggcggacaacctgagtgggtggacgccaggccagatgctgatagcccattaa

SEQ ID NO: 450451 - DNA, 2223 bp, Serratia marcescens
atgagcgaaggatcatttaaagaccgaatcagccgggcgttggacaacgccgggttacccagcgtcccagaggcaggacaggggatgtcagggcggctcgccgcagcatccgtcctggagaaaccgatgacgcaggggatgcaagacgtcccgacgcccccggggaatgcgtgggcagacaaggtcagcgcggcggcagccttgacagacaaggcgtcgggtaaatcgccggggggaaacgcggcatcgtccacccccgctgcggtggacgtgcatctgggtggcaaggcggtggatccgaagacggtatttgtcgagcagcttcacacccggcatgcggtcaatgagatcccgttggcgacgctggtattgagcctgccgcactcggcaccggatgaccacacggcgttggatcatctgctggggaactgtcaggtcggccagttgaccacgctcaaggtgagccagatgacggtgtttgccggcgtggtgggggacgtgaaggtcagcaccgatgcgtctggctgtcgcgtgaaagtccggctgaaacatgccttgcagggactgaaatccacgtcgaagagccgtatctggaagtcacaaccggacgccacactggtccgggacgtgttacgcgaacatcaggtcaaaaacaccgtgacactggcggtgagtggggctgtgcagcggtatcagtggaactgttcggactgggccttcttgcgggcggtgttggggttgcagggggcctggttgtggccccacacggacggccgtgtgaccgtacaggccccccgactggggggaaagtcgcacaagatctcggccaaacccggccccgatggcgtgaaagtgctggatgccgaatggggttattcaggggtcaatcaaccccgccaggtgaccacacaaagctgggatttgagcacgcagaccgtcatgaaaaagacggccaaaaaacccgttctgggcagtggcggattatcgccggcgaaggtgaaagccctcggccgggacgggatggcgctgctgacagggcaatgggacagtgcccatcagcaggcggcggtggatgcctggctcgtcgcccagcaggcgcaggccgtcaaagtccggttaacggtgtcaggctgccaggcatatcaagtgggtgacacactgacgctggacggtttcggcacccacctgaacgggcaggggatcgtgacgcaggtggaataccagagcggtatcgacggccgacacgggaagacggtgattggtatcggtctggacgaagaggtggccgccgcacccgccttgtcggtgccgacgggcctggtgatggggcaggtggccccgtatcaggccgatccccacagcaaatggaaccgtgtgccagtgacggttccgcagctgggccgggaaagtctctgggcccgcatgggacatgtgtatgccagcaaggacagcggcgtcacgttttatccggaagtgggggacgaagtggtgctggggtttgtgggcagtgacccggtgatcctcgcatccctgcataacccgaaacggacggcggccattgaaccgagtgcgaagaatgcgaaaaaaggcctggtgttacgccatcacggtcagcgtatggaactgagtttcgaccgcgacatgcacaggctcatctgggcgctggggacggataaaaaaccggaacagcagatggggatggacaaggaaaaaggcgtgacgcttaccagcctgaagggcaacgtgtcggtcgaggtcaaggcaggcggcgcgtccgtgacgacgaagcaaaaaatcgcgttgcacgccgatgagcaggtgtcggtcatcggcaagtccggcgtcacggcgagcagcgacaaggatgtgactttggacgcgaaggcgcggctggttggtcacgggaagacccgcgtggaaatggcgagtgcggccggaaagctggaactctcgccggagaaggcaaatttgtcggccaatcaaacccgtgtggcgggctcgctgaccgtggacatccaggggaacgagagcgtgacgctcaagggcgcgaaagttgccgtcaccggcgatgtcgaagtggcgatcgcgggcgcgaaggtggcggtcaagggcacggcacaagcgagcgtagaagccgccgcggtgaaagtggccggccagatgacggacgttggcggcgccggtgtcaccaatgtgaaaggggccctgatcaacctggggtaa

SEQ ID NO: 450452 - DNA, 279 bp, Serratia marcescens
atgcggccggcgtacggctgtgacatgcagtcagcggtcttcgcgaacctgtcagaagggacgctggccgccttgcacaaccagatagccgagagtgtggcacgtcatgagccccgagcagaagaggtggtgattaccgtggaggaagaccgggcccagcccggcgtactgcgcatcacggtacggtaccggctggcggggcagaagcaacaggtgaccggtcaactgaaccggatggacggcggggagggaggggccggcacatgggcgatttcgtag

SEQ ID NO: 450453 - DNA, 429 bp, Serratia marcescens
atgggcgatttcgtagtggccaccggggatacggtgctgtttgaacccgcgtttggcaaccggatgttactggcacccgcccaggccgtactggcaggaaccggacgtttcatggtgaacggcaaacccgggtgtgtggtcagcgacctggccaaggtggtggtaccgggcgtgccctatacggccggcaattttacggtgccgggcgtgggcatggtccaactggtgatggcggggccggatcagaccacccacaccacgttgagcggcctgccggtgttgctcaagggaagccagtgccaggcgatgtttattcccaccgcgcccgcgatggatccgtccaccggtgtcccggatccgaccctgggcgtccccacgccaggcaaggggcggttcatggtgacacaggtcaaggtgaaggcgaactga

SEQ ID NO: 450454 - DNA, 3672 bp, Serratia marcescens
atgaccgactacacgaagaaggcaacaggcatgaccgcgataaacaagaatacggcaacattcgtgctggatgaccggacgatcggcagacagctggatgctttccggcaatacagtaagcgcttgccgtttgttcagcagcccataagccctccgccgtctccggcgttgaattgggcgcaggtgctgctgggatacgacaccgacagtgacatgacctgggccgccgtccgcgatcgtctggtgcaattatacgagacgccgacacaggctgatggctcgctgtctgcggaacacacctttctgctggcgatactggggatgctggagacgcctcgcgccttgctgaaccagttcccggcacagcatcggtcactgtactaccaacagatgctggcgctgacaccccagcccgcgcaggccgatcaggtgacggtacactttacgctggtcgagggggagcgggagcacgtgttgccggcaggactgttgctggatgcgggccaggacagcgacggacatgcgctgcggtatgccctggcgcaaccgctggcggtgaacggggcgcgtatcacggatctccgctgggtggtgcgtgaccgctgcatgccgggcggtcgtcgggctcgggtggtcatggacgaggccgcggggctgccctggccgcaaggcggtgtgcgcttgttcggcgcatcaccggcaaaggccggtgcagcgcccgggccggataccgatcatgctgtcgacagcggacggattgtcgagtcaccggtgttggccgtggccggcggtacgcgcacctggacggtcacgctggaggctcccctgtcggagacattgcaggcgtcggtaagcatgggggacaggtggattacgctcgactgcgcccagggcaaggacggcaagggcaagacctggacagtgacgctgcctgcagagggcggtgtgccgacggcggtcaccgccctggaggggctggtgtccacggcgccgttgctgcgtctgaccagtaaaaccggcgtgccggtgccgccggtcacgtcgctggcggtcaaagtggaaggggcggtgggcgtgcactgcgtcagtgacgacggcacggtattgacggaaggcggattaccttttggtgagacggcggacgtcgggcagggcgtgaacctgatggcgccggactggtggcaactgggggccagactgcaagccgtgacggtgaccccaacctgggtgggattgcctgacacggcctttcctcactggtatggccccgatccccgccaggcgaagccggactggctttacgtggatgaaaacctcaatgtcagcaacgcaacgcacgggttccgacccgccgatctcgggaatggcggtgggcaaacgttggcagatcgcgtcaagcatggtaaggccatccacgtccccgccgatacgggttatgcgcataaaccgatgaatgatcaggatttcaccgtgcaggcgtcgcaggtcctgaaaggagaagagagcctgccgttaggcaatgacactccgctgttcgccgctaacgcaaacaaagacagcgcgcctcaagggtgttcgctgtcgatcccactggaatcgctatacgcattgcccctgggtaccgccgtcccggacgatgaagacgatccgagccgctggccgtggtacctgcgtctgcagctgcagacaccgttcctgcaaaacgagtacgtggcacatcaaaacgccccgctgaccacggtgatgtttttgaccgaaaaaaagagcacgcagctggtgcctgtcacagaggttaagagcggcaatacggtttacaagatggtcgagagcgacgcagcaatccaggggaaacctatcttaatgccggcgatgaaagaggagacgaccacgctggtcacgccggtgccggtattgctgccaaaggcccagtggaacccgccttatgtgccgcaatggtcgggcgtgcgggtcgattatacggcgctcgacacgcaggtaagccagcgggtcatcctgccgttcggttacgccccggaagatccggcgttgtcgcagccgcctgcggaggctgaactgtacctggggattgacgggattgatgcggcccagttgctgacgctgcactggcagttaaaaagcccgggtgccttgcctgcgcccttggaatggcagtacctgacaccgggggatcgctgggcgcggttgccggtgcatgatggcaccaacggctggcagacgagcggcgtcatgtcggtcgactggccgggcgatgccagccggcgctcgagtagtttaccgcctggcaggctgtggttgcgagggcgggcccgcacgctgaccgcgcgtgatgcgatgcaggtgacgttaccgacaaccccctggttgaccgggctggtgaccaatgcggcgtcggcgaccctggtggcaccggagcaggtgcaggcgacgcattttgaggccggcctgccggccgggcaaataacccaggcgctggatgcaccgccgtcgctgcaggcggtcacgcagccgtggccgtcggaaggcggccgggcggcgcagacgcgcgcgctgtttgaggcgcaggtcgcacgtcgcttgcggcaccgtgaacgcggtttgaacaacatcgacctgatgacgctgttgcaggagcgtcatgcgggtattcgtgcaatgacggtgctggcggcccctgacaaggacggcgtgcagaaacagacgatggtggtgatgcccggacgcgagatgagcgacagtcaagaccgtcggcgcccgggactgagcaaggcgcaccaggacgacatggtggcggaactgaaaacgcgcagctcgccgtggctggagctggcgtgcgtgaatcccgaatacgtgccggtcagcgtcagttgggaactgacttatacgccaggcctgagccacgccgtcggcaatgcgcgggttcaggcggcactggaggcgacctttatgccctgggcaaaggcggaggatgaccatggacagccggtgattgggcgagccgtgacccacagtgcggtgcatgaagccctgcgccgggtaccggaggtggctaaggtccatgcggtctacctcaatggcgatgcgcaacaggccccccggatcaccccgtcacaggtggtggtgttgacctgcatcccacgggaatataccgggctgacgctgacctgggttgatgtacaccttaatgacagcgcgaaaaattcagcgtatggcgagtgcacgttgaacgccaccggcacacaaaaggcgctcgtgcacgtgacggtgccgacacaggttgaggggctgggttccgcgtccattgctacgacatcagccgaggtgtacctggttgatttggcgacgggacagcgcctgccgaggaaaaaggcggcgggcgtcaacctgtgggcggaaaaggcgatcctccccgcccctaccgtggtctcgtcgtttaccgcgagctatgcagacccgcgtcacgccgtggagaacccaagtaacccgcggtcggtcactgaccattactttgcggtgagcgccgatgcctgtggtgtccatcacctgggcgtggccgtcgcactgatggtgaataatgtgccggatatcaccctgcagtcggcggcagtcggggaacagctggtgctgaatgtgcaattgccggagcaaaaatga

SEQ ID NO: 450455 - DNA, 132 bp, Serratia marcescens
atgatgaacaggctgactgcgataccgacctgtccgcgtatcaacaaccgcgttccgccgccgtgcggcgggacagacgtcgacccggcacccatgccgggtaaaaacaacaaggatacccaccatggctga

SEQ ID NO: 450456 - DNA, 3072 bp, Serratia marcescens
atggctgatacccgtaacgccgttacccctcctctgatgccggtgagtgaggccgtgcaggaacagatccatttcgatacgttatgggcaacgacacaaacggccctggaggtgtatgcgggacacgtgtggagcgcccgtaatgacgatgatccgggggtcacgctgctgcaggcgtttgcctatggtgtctctgacgtcagttaccgtcacaccctgcccctgattgacgtgttgacggcgggatcgtcaccggcccgctcgtccacggcggagccgcttatccatctggatcacgctgccggggtcttcgcgcctgagttcggcccggaaagggcattgaccagcagtccggtcacgctcgacgattaccgacgggccatcctggatttgacggttcaggtagaggggcatgacgtgttttgttttcgggatgtgcagattgcccgggtgcccgcagagaagagctaccgctatttctataacccagccaattacgcgttccagtttcagcctcctacatccgatgataaggacgacttacactcggtatcaggccagtattggctcgcggtcactccgacgccgggaattgataaaaatcgtgcgctaacaacattggtcaactacctgaaaaaccatcgtaacctgtgcgagcaggagattattccgcagccgttcgtgacggtggcactccagaccccggcggttcagctgttcctggatgacgacctgccggagggtgaggcgatgagccaggcggtggcacaggcattgtgggccatcaatctggctttgctgccggcagcaatacgcgaacctgccgcggcccggctcgcccggggcgaaacggcggagcaggtgtatgccggccctcagctggagcatggctggatctcgcacttgccgccccctcgaccgatgggcgacgcccaattgaggttgtcttctgtaaaccctcaggaactgtcggccgccgccgtcggtgttgtaccgggtatcaacgcggttaactgggttaagccggatgatatcacggtgccgaagaaccagcaggtacagctgtgggttaaccaaaacggggaactgacatcccccgagtctattcagctgtacaagcggggccagttgatcgccagtacggtttggaaagacgaggtgacaacggcctataaccggttgaaccagactgcgcggcgagcaacgaaagaccctttgcgtgctgtgccctacgggcgcaaccgccacccgggcttttatcgcacggtcggggccagtttaccgcccctctacggattacaacaagccgcggaggcggttgccaccgatgtcgatgccaaaaacctgctgcagtttctgcgcccctttgaacagctgctggccaacagtgcggatcagttaaaaaaactgccgcagttgctggcgttcgatggtcgggatcctgaggctgccttgtggggcgccgcgcgatggccccagaaaagtgatgatccgctggccttcgagcaaacccctcaggtggtgacaaaagacgtgatggccgcgttaacgcaagaaattacccaccaatctcaggacaacgaaaaagagctggcgatcctggatcacctgctggggtacttcggtgaacggcgcgccccccgagcgttgaacgcgagcgccaataatgaagcggaatttcgacatgtgcagcaggggtttctgcgccaggtgacccgtctggcctatgagcgagcgtccatcagtatcagcagggtctcggccctgcaacgcaaggtcgccgcccgactcggcgtgggcgagatgctgtttgacgaacgcctgcaaaagcccgatgccccatttccggagcagcctttaccgttctatatgattgaacatcaggaattgctgccccaaaacccgggcccggtgcagggcggatggcaaacggtgagtaacccgacagtttcacccgataatacactgctgaaactgacactggcaggcaacgaggtgcaaaacttgaaaccaggacagctgattgaattactggctgatggtagcgccaaaaacttgccaaccctcgagccattgacggccctcgtgatccatcacgttgacaagactacgagccaggtcaacattgaactgaggcagcagacccgattgggtcgcacagtgcctttgtttaagaacgcggattataagtggttctggcggttgtcccagatctggctcaagcgcgtggtctatgacctggttttcgtcatccaacccgcggccaacgcgggaacagccaccctgaaagtcacgccgtctttcccggtcgaactgacggaaggacagcggtttgccttgcgtccgaggggacgttggctcagctggccaacggccgcggatattcagggaaccggccttgaggcgctgccggatgtggtggttgaggtggtccgtgcggatcctctcggggggacggtggaggtcaagtggattgcgcaatccaccccggaaataaacgtcaacaagccatccgggcaaactcagcgcaaggtggtgagtgtgcctcccgtcacgctggacaagccggtgccaacatcacccaattgggcctttttaactaacgtcaatacgccctacgcctggtcaatgccttacggccacgacagtttcggcttcacgctgagtctcgtgctgaaccgggcctggttgaaaggcagccaaaacccgggggcattaagccagtggatacagaacatggtgcgtgaagaaatgccgagtcacctgaaattgcacctgcactggctcgatgagaatgactttaacagcttcgcgcatcaatacgggatgtggcagcgcgactctcggccggtgggtgaccagtcgtatgaactgttacgcctgttgggcatcggcgatcgcccggtggacgaacgtgcggggataggctttgtcaggatagtgaacacgcaagaaagtgatgcgattgaggcgagaaaccagaacaaggtcggtcaggcgaaagaaaaagagcttaaacacgaatctgtcgtctacgtccgcggctcacaacagacatcgacaccccattaa

SEQ ID NO: 450457 - DNA, 1833 bp, Serratia marcescens
atggcagaacaaaagaaagaccaagcacccagcgtaagcgtggacgcgttgaagagtgcttttaaagaaggggctacccctaacgagaaggattacggggcactcatagacctggcggcggtcgggagcaaggcgctgggggccaaagacgcgacccccaccaccctggaaccgggcgccggactgaaaatggataaggataaactcaccgtcagcgccggaaacggcgtcacggttaacgaccagggcgtcgcggtgaaaggggacgggaagtctgtcacggtcactgataaaggcgtcggtgtacaggtgaagcccgatggcggcctgaccaccgacggcgacaagggattacacgtcaagttgggtgcgggggtgacctctaccgctgacgggctggcgatccacctggccgtcaatagcgggctcaaggcggagaaaacgggtctggcggttaacgttgcgaccgggctggatattgacgggaaaggagccctggaagtcaagttgaaaaaagggccggacaattatatcacgtctgacaaggacggattggcgataaccaaggacggtgtaaaggcaatcgaggccgcgttaaaaagtgtctcccttggggcgctaaaaaaggccgatgaggtgacaagccatggattcaaggtagatgccaccccaaatgagccgaatgagggcgtacaaaaacagattgcggaaaaactgaatggggcgtttaccgaggggtggcacctgacgctgcccagggctgcgttatttacggcattgaaggcgtttcgtacgaccaataaagctaaaatttataaggaaggcctgatagcgccctccgcggttacagggaaagcgggactgtacaaccaggagggcgtggagtacgtagcgggaacggtcattgcatacaaggtcagcccgtcgggtgaggcgcgggaggtcaagacaggcgcgtataccgatgaggacgggatttacgccctggtcggcaagctgggcccggatggcgtaccaaaagccggtgacacattcgagaaggtgaccccgcacgcgctgatggtgctggttgcgcagaaggtcgtcacggtcgtggggcattgggatttgagcaccgccgaagacgccaggtggtcaggaaatacagccgacgggaaatggacgacggggccgttgaaggacggggtgttggtaaaaggaaccgaaaaggaggtaagagcgaaggagaaagaaacttacgaaggaaagataaaggaaataaacaaaacacatgagacggagaccacgaagttaaaagaagaacaccgcattgagatgaattacgcaagaggcaacgcgttcacgtcacccaagatttcattcctgggtgtcgagagggctatgaccgcagtccctgtttcgggcggaaaagtcgaattcacggtagcaattccgtcgatgcgtggagtaagcgtcacagatgctcggatcgaacggggggcggtcacacggaaattggatagggtaacagtcgcaatcaaggtcgtcacgaggattgaggtatacgggtatcgtggctgggatatagcaggtgacgggagggtgaggggtggcggagaggtcatgcttggatttaatcacagcgtcgggaattcatcgggccgtgcgacgtattacgaagtggaattctgtcaaccgaattacatagtattctacattgatataaatgttgatgaggtgggaaacgacggaggaaacgtgggcagtttctcgttatacaaggacgcaatagtggcagtccctatcgtcgttggggggcatcacactagggtgatcttgtcggtgactagttga

SEQ ID NO: 450458 - DNA, 1029 bp, Serratia marcescens
gtggtgacaaccgcctcccttgaccctgccgccattgatgccgcctaccgctgggtttgcacacaacgccggcattttcctgcgaacgccgatatctggcacctgcggtttcactgggcgcgcgaacgtgaacggctgctgctcgccctcaacggcggtacctatcgcttcgcgccgcttgctgtggtgaaaaaggcctcgggtgagcgcgtcgcgctctggtcggccaccgatgccctggtcatacgctgcctcacgcagtggctgcacacccgtctgccggttcatcgcgcctgcgagcatgtgcgcgggcacgggggcggccgggcctcggtgacgcgggtgcatcggctgttgcgcaccggcaggttccactacgtctgccggaccgatattcgccagtattacgccaacatcgataaaacacggctgcttgcccaactgcaggcgcacgtgtccgatgggcatctgttcacgctgatgaagcagattattcattacagcgtcgaggagggcggggagtttcatacgccggccaaagggattgcccgcggcagtgcacttagcccgttgttgggcgcatttcatttgtatgcacttgatggtgcgatggccgccaatccgcacatctactacgtgcggtacatggatgattttcttatttttgcgcgcacacgctggcacctgcgcaaagccgtgaaacaccttaatcacgcgctggcctcctttggcttcgaacagcatcccgacaaaaccttcatcggccctgtcgacaaagggtttgactggatgggattttggtttacccgcgagggctgcactgccgttgcgccacgcgccctggccaaccacgcccgacaataccgccggctttatgagcaaacccgacgttatcgctctgctgcagagacgatacgccgggtggcgagatatcgggccaggtggttgagttgggtaaatgaggggggggtatctcaccgggcgggcttttgtatccatgagcgtgttcttctgcctacactcaactag

SEQ ID NO: 450459 - DNA, 1677 bp, Serratia marcescens
atgacgacagtgaccctggggcaattgcggctacggttacacacacaggaagcgcaggccgagacgttacaaaaccgttgcagtacctggtttcaggtccgcctgcaaccggagttggcccggctattaaccgactatgcgcgtgccgacgatgttccgcgcaccctcacccgacttaccctcaatgtcggtgatatcccgctgtcccggtttgagtcggagatgagcgaacgtattatccggcagctgcaacagcagttactggcgttgccggtcagtcaatggcaccggggggaggcggtcgccacagcgcaagcgccgcggtcagcgggtatcaccctgccggcagaccccgccacgccggcaacgacagcaggggaaacattccggacaccgacgcgggcatttgagtatctgctgcattacctcgataccggcgtgatggcggatgtgcgaggctggtcccgacgggacgtgcgtgatgccgtattgagtgaagcccttgacagtgcatcatccgtgccggcaccggtggggggcgtgccaccgcgtattgcactggcgtggcgactcctgcacctgcgggcccggcaacgtttgctgatgacctggccgggtgcgcccctgactcgcatggtcacgtggctgatagcgccgatgcggttgccttccctgacaccgcgcgaggcctcgcgagtgttgcccctcgcggccctgatggccttgcagcagtacccggcggcggccgaatgggggttgcctgcggcatcggcggcagacacgcagcgtcttgtccccctgtttgacaagcacagcgcccgcccgccctccgccggggagatacctgcgggggggcgggagaatacggcaccggcattcccgccggataccctgctcgacaggtggttaaacgcgctgctgtccgtgccgttgccggcggcgtggcgtgggcccttgcagacctgtctgggcgacgaggcgaacagggcacacctgcctgagttgtcaccgcccgtacgcgcgcgcctgcgccgcgcgctcggcatgacgcaggcctccctccccggggcacctgcgcctgccgagccccggccccccagctctccaggggaggccgcgccccaggtcgtcccggcatgtcctgtcgtgtcggcatcgccctccgcgcaggcgatggccgcgccctggtgggtggccagtgcaggtctggtgctgttgtggcccttgctgccccggttgttcagtgcgttcgactggcttgagggcgaccgcttcattgacgatgcagcccgttggcaggccgtcggctgtctggactggctggcctggggggacacggcactgcctgaatggcgtacgccctgcgcacgattgctgtgtggcattgccggggaggtgccgtttgaggccctgccgccggcgcccgcgcggcaggctgaactggacacctggctgggacaggcctttgccggggttgcgcacctggaacgttgcagtgtgagcgacctgcgtacctttttcctgcaacgcgacggcatactgacaccggacgaaccggcagccttgtcgatagcgcccgaggcgaccgatgtgttgctgcatcacctgccctggccgctgacgcatgtcgtgctgccgtggcggacaactttcattaacgtggactggaacgcatga

SEQ ID NO: 450460 - DNA, 2190 bp, Serratia marcescens
atgaaaaacgatttgaccgacactgacgcgggcgggccaacctcggcgtctcccacgccgtcactcgcggtaccggcggcgctggtttccctggggccctggctggaatacgtggatctggtgctgcaggggaggttgttgtggcaacaacaacatgaagaggatcgccacaacatggagggcctgctgttgacaccggacggcctggaggaaaaccgggcacagtccaccggcatgccgtactggctccgccagcccgacacggtgccctggctcgaggggatacagccccccccggtggaggggcggcttgccgaactggtcgaccgttttggcttaaccccgttcgagacccaggtgctggttctcagcatcctgcccctgctggatacgcgttacgggatgttgatggcgtatttgcagggagaggacaagacggtatggcccggtatcgacctggccgtgacgctgttcagtgcgggtacggtggagcggatggcgcaccggctgacgttgtgctcgcgccacggtgcgctgctgcgtgaaggggtggtctcgacccttgagcgtaacggtcgctcgtccgtcagcagcgaggccgtgtatctgcgcctggatccggcggtgtttcattttttgagcggtgagccggccaacaccatgcagaccggcctgggcgaggcggcccgttgggatatgccgctgaacgggacggcgctgtgtgaagggagctggtctgcgtgtgcggcacagctccggcacctgtgctttggtacgtgcagggcgggtgagccaacaccgctggtcctgctgttgggggggcaggggcgcacggggctgatgggccaactggcccgggaggcgggccggccgatgctggtgctgacgctggagcaattaccgacagagaccgcggcggcatgggcagtgctccggacggtgctgcgtacggtacgtttatacgccggggtgttgctggtacgcgactggggtgacagacaggaggagcatcacctgttgttgggccggctggagccctatctggtcaatcatggtcaaccgatcgtctgtcttgcgtcaccggacaacgccggcagcgtgtggccggggatggcgaggctgagcctcacgttgccgccccgggccgctgaggacgagagggcactgctgcaggggggactgcccccgaaggacgctgcgcacgactgggactgggcggcgttattgcgccgcacccgggttgatccggatggcctggcgcagacctggcaggaggcacaggggtatcggctgttgcgtgacccggcggcgcccctgacgcagcgggacctgcagcaggcgttgcaaatccgcgggcagcaacactttggccagctggcgcaacgtgtacgcccgcaacggacgtttgacgacctgattgtgggggctgaactcacaacccatttacgggagatactggcggccattcgccagcgcgagggcgtactggaacggggctttgaccgtaaggtgggctacggcacggggatcagcgcactgttttacggcgaatcggggaccggcaaaaccatggcggcagaggtgctggcgggggaactgggactggacatgatccgcgtggatttgtcgacggtggtgaacaagtacatcggcgaaacggaaaaaaacctgtcgaagattttcgatttggcggtggcggacacgggcgtactgctgtttgacgaggcggatgcgctgtttggcaagcgcagtgaggtcaaggatgcgcaggacaggcacgccaatattgaggtgtcctacctgttgcaacggcttgaacagtacccggggttggtggtgttgacgaccaataaccgggcccatctggacgcggcgtttacacggcggctgacgttcattacgcgctttgactccccggatgcggctctgcgcgagcggatgtggcgcgcgatttggccggccgacatcggcgtggacgacgatgtcgattgggggcactgggcggccacaaccgaactcaccggcgcaggcatccggaacgtggcactgtcggcgagctggcaggcgtcagagcaccatcgccgggtgagccacgcggacattgagcgtgcggtacgccgtgagctgggcaagacagggcggatcatgctgtccgtgtctggcagcaaaacgccggacaggccacggtaa

SEQ ID NO: 450461 - DNA, 2178 bp, Serratia marcescens
atggatgttaacgacgattatgtaaggccagccggtgaatggcaacgggatacggatgactcattgctcgcgttgaacgcggcaatccggcaggcacttgcactgtacctccctgccgagtttttcggcccggggaggatccggtttgacatgattggcaaggacaaattaccgagtgagcccacggtcagtgtgtttctctatgatatccaggaagatttggagctgcgtcatggacagtcccgccattataacccaacgagccatgtgctatcccccgggcaagtgcatgtgcgctgttgctatctgctgacgtattgggagcctgcggacagtgcgacagagggttttgatactcccagtcagcagatgcaaatcatcaacgcggcgctcaatgccatactgaacatgcagctgcccgagttaccttcggcctttgtgcgcgtgattgcgccgtcggagcatttgtcgagtctgggaagtttttggcaatccatgggcgacagaccgcggctgagtctgaacttcacggtgacgatcccgatcgcgcttggggggaaagtgacagaccctgacaccattaagccggtgttgagtgtagacacgacacttaccgctcaggacgcatcctgggagcaggaggactgggcgttgcagtttaaacgggcattgttagcgcaggtgttgagtgcgtaccaaccccccccccccaaacaactgactgggtcgccgtgcgtgcgcaactggcgcgcctgcaggtctcgtacagctatgggagcatcaagcctcagatgcaggttgccggggacgtggactccgaggtgtacgcgcgcattactgcggccattgaagcccttaaaccaaacaagaaaatcaacccgaacgcaggcaacgttgatatgtctgaactgcggattgtctatgtatcctgatgcgataccaagacatagcagcccccataacgctacacaggtcggagagcagaacatggctaaaaaagcacagttatctttaacaacggtaaaagaacaattcggtgcctggcaagtccccagtcaggcgcattttgaggcgttaatcaatatcgcagcgctgtccttaaagccgggctccggtttaaccggcggggacccgtcaacggaggccgacaggattgataccggacaggtcacaccgttaagggtgaagccgtaccacgggatggcggtaaagaaagagggtcttatggtcaagcctgacccggtcggcggcttgatgacagataacgacaagagcctgacggtcaaggcgtcagacaccgttagatttgatgaccatggggtttttctcaaggtaaatgagagtaaggccctgaaggttaagggcggaggcattgctgtagaaataaacacgacggcaggacttaacgcggcaacgggcgtaagcgtgagtgtcgacaacaagacggtggaaatggataaaaatggcgcgctgcgggtgagatgcgaccacacgggcgggctgacagtagaccaggagggctacctgcgggttgatctcgacattatccttcggcgcccgtgtctgcgggcgtatcagggatgggcctacgcttacattcccacaagcatgatagaggagggtgacaaggtgtttctttacatccacgacctgtatgtcggtgagttttatcatactggggtagtaccgagtgacagtagaataaaaataatagcaggaagtgaggctacagagtattggattgtagagctaaatcagtgggtaacagaaaaagatgtattacgggcaaggttgataaaaaacggtcaggatgaaaatacggggaccgatatcgccagtcataccgtgacgtcggcgggcgctgccccggccgttatcccacgtatcacgggggtcgagatcgttaacgcgttgggcctgcagctggaacaggtgaaagcgggggatatcattcacgccaaaagcgataccgatgcaaatatattaacccatcggtggaagataatgaatgacacagcaaaagcatggaataacattgaaaagaatgaccaggctgaatttacggtgcccgccgacgcccccgtcggcgcgcaattttgcgtcttgctcgaacgcaagggcaaggacagtaacttaccgtacgcgtttagccggccggtgactgttagtaaaacatga

SEQ ID NO: 450462 - DNA, 954 bp, Serratia marcescens
atgcccaatgcctttaagtttacagcgctcagcaataaatacagcgaagtggtaccccaaaaagagcggcaccaatttggcgagccggtggtcgctcagtgggccagagagttttcgccccacagcttcgccaccgagtcggaagaaggggagtccaatgacaaacttaaagtgagacaggttttttggttgttggatgaggccggtgaccaaatggagtttctgcatttgacgttgaaggccatgttaaataataaaattggcagtaattttctgagaatagccgcgaaagattatatgcacaaagggacaacctatgcctctggcgcgttgggcggcattatgggcgggcttgtgggtggccccgcaggggggactgccggggggataatggcaggcaagtcgggctccctggcctataagaacctggaacgcgggtttgcctcaaaaaatccaaagtggaaaataaaaacgctctacccctcgacaagcaatatcgacaagtcaatatccaatgcgtatatgcaaagaaataacacgtcacttcgtaataatgatgtgcccaaggccggactttccctggcaataaagctgggtggagggctcctgaaaaaattaacgcctgtgttctcaaccctcgaaaatatttatgcgtcctatcaggcctcgaaagggatgagtggcgataagataaataaattaaatacgttattggttgaggtgacgagcgtctccatggaagagtgtggatccgcccttgcggcgtttgaacgtttaaacattgaagcactcaatcagaacggcgtgcaaaaattcaacgcagtgaaaaaatttaaaaaggcagaagattacgtaattagccgagagaaactcgagaaaaaacgcgacaacgttaatacctgggtggaaaggaacagacagctgctgattgagctggaagaaaaagcccgctga

SEQ ID NO: 450463 - DNA, 270 bp, Serratia marcescens; identical to SEQ ID NO: 450440

SEQ ID NO: 450464 - DNA, 453 bp, Serratia marcescens
atgtatctgatggcttataccactcctgaaatgcaagcagatccgcaaaagaagagggccggtgtcccgatttttggtgacggggtatcgtgcggcttcccgtcgccggcgcaggactatgtcgaaaaacgcctgtcgctggatgacttctgtatccgctacccggagagcacatacctggttcgtgccgagggtaactcgatgcagaacgccggcattcgtgacggagatcttctggttgtcgagtgcattcgccaggcgcgccacggtgacattgtcattgcggctgttgacggtgagttcacctgtaaacgactccagttgctgccgatgccggcattgctgccgggcaacccggaatattcaccgatccccctgacggaggatgtcgacaccgtagtgtttggcgttgtacgccatctcgtccacagttttaaatcgcgggattcctga

SEQ ID NO: 450465 - DNA, 237 bp, Serratia marcescens
atgacccagtcacataacctggccaacttgtccaaagaagatatggacaaggtgaacgtcgacctggctgccggcggtgttgccttcaaagagcgctacaatatgccggtgatcgccgagctggttgaagccgagcaacccgagcatctgagagattacttcaaagaacgcctggcgcatcacagaacgcaaaaagtcaaacttggccgcctgccacctgaggagcctggcaaatag

SEQ ID NO: 450466 - DNA, 390 bp, Serratia marcescens
atgagtaaagatacactgagcttttatgaagatgatgaaggaatggtggcacaggtcgttctggaagggtttggttctaacgaggttgacatcatatatctcgaatctgatgaggtagatcagcagttagaggactccgttgattttttacgtgagcatcaaaatgagatgagtaagtccgttacaacggcaattaaagcgtatatcaaggatgtctatcattcagactctacaggtttggaattgatgaaagtttatgtattccccggggagcatgaagaatttggattgctgttcaggtgggagggagatgttgagcatggcgtgggcgctcgcttgactggtcttaacgtcgttaaggttggttccgcagaggttgcttttgtttag

SEQ ID NO: 450467 - DNA, 432 bp, Serratia marcescens
atgcctgatttctcccgttgtgccttttccgaaggcagcgttgccttgccggaaggctatgccgaccgcaccgtcaacgtgctattggccggcgatgacgtttccccctcgatcaatatttcccgcgatgcgttgcaaccggcggaagccctcgacggctacgtcagccgtcaactggcagcgctgggccaaagcctgaagggctgggcgttcaagagccgcgaaccggcgatgctgggcggcgacctgctggccggagaatgggtgcgcgccagctacctgcgcgacggcaaacgcatctggcaaagccaggcggtatttgcgcaggcggatggccgggtgctggtgtttaccctggcgatggcgcgcaagctgacgccgcaggacgacgcgctgctgctgcacgtgctgaacagctatcgggcggcctga

SEQ ID NO: 450468 - DNA, 330 bp, Serratia marcescens
atgaaaaaaatgttgctcgccattctcctcaccaccggcacatcggcggcctatgccgatgtctctattttgccaactgacgaaattaaagagaaagccgggtttgcgcttggattgaccgccgaccaggtgaatatcagcaatgtgcgtcgtagcgaagcgctcacagtgaaatttaatgccgaagcaaagggccgcgttttccaatgctactaccagggagaagggtcaaccacaagtgatgcgctttgctcccctacggatggaaagcccatgccagcgagcacggcctgtaacgatctgacgcgtgctgctggatattgccaataa

SEQ ID NO: 450469 - DNA, 276 bp, Serratia marcescens
atgtatcctgctgaggatgttgtttatctcatgctcagagatttttacacctcggaagagtgtttagagcttttcactattgttcatggttttgaattgaccgatattgccgaatataaaagtgttgattggtggttcttatcttctttggcattcgatgtagatattgataaagttagaggcatcatcgaaaaaaagatggctgaagaagaaaagattaaaataaactcgattgttgttagtgaagaagatgtaagcatcagaaaaaggatctga

SEQ ID NO: 450470 - DNA, 1179 bp, Serratia marcescens
atgcgcatcggaattgcgagcaatggataccctgaaaagcggtgcattactgaaaacaaaagtcatgacttcatcaagtttgataaaagcaatatttttaaatacattaactttcttaacagcaaactactaaagaaagcaccatcatttattttcaggccgcttatagttaacccctcagataacattgatgcatttcatttcttcaaccacaccggattattaaaaaacaaatgggtttcaacctttgagactattattccgagaataccggaagtaatggatattcatagaaatccggatgggaagaataattatgagaaaaatgaaaagattgaagccttgctgtcagccatcgtcgaaagcaactgcctcggtattttagcattatcacaatccgcttataatattcaaatggccatgcttgaagcataccctgcccttgccgattcaattaaaagcaagatacgcatcgttcatccgcctcagcaactgcgggtatcatcgatagccgacaagccggccgactcaggcaaggtcaagctcatctttgtcggccgggacttttaccgtaaaggcggcgctgaaatcgtccttgccgtcagcgagctgattgagagcggagatattttggctgacgacattgatgtgaccttgatcggcgatctgagtaaaagagacaattatgttcatggagaattcaaggatgacctgccattctatgagcgcattgagtcactcgtaaaaaatttatcctgcatttcccattttgcatcagttcctaatgagcaagtgatgcaaaaattcattaccagtcagattgggttgttgccaacatggggtgacacttatggttattctgtattggaaatgcaggcctgcggatgcccggtgatgacaaccagcgttcgtgcgctgacagaaataaaccccgcggaatcgggctggatgatcgacgtgccatgcaataaattcaaagagattgtcatcagtagttatgatgacaaagaagaaattcgcaataccattatagctggcatcaagaaaaatatagccaatgccgttgcagacaaaaaaacaataagtgataaagcacaagcatccatcgaaagaataaaaaatgcgcatgcccccgatgcctatttcaaactaattaatgccatttacgaaagtaaatag

SEQ ID NO: 450471 - DNA, 489 bp, Serratia marcescens
atgcttacagacatccagtgccgtactgcgaaaccgaaggaaaagctttatcgcctcaatgatgctgatggcctctatctggaaattaaacccaacggcaagaaagcctggtgctatcgcttcaaactcaatggcaaatccagcatatttgctctgggtgagtatccgcccgttaaactggttgaagcacgtgagaaatgtaagcaggctcgcaagcttgtcagcgaaggcatcaacccagctcaagcacgccagctcgataagatccgtaaaactaatgaagctgctaatacttttgaagtgatcgcaagagagtggctacagatgaaagattgggctgaaataaccgaagtacgtcgtctcgatatgctggagcgcgttgtcttccctgctatcggaaagcttccagtcaaagaaataacaccacaccatattttgagtattctgcaaaacacagctaagcgtggagcgcctaccgttgccgcttaa

SEQ ID NO: 450472 - DNA, 1041 bp, Serratia marcescens
atgacaccggatgtaattttatcccagcagatcgctggtagcaactatgcacgcccaaaaaacactcaggaacatgcaaaaaagccagtggtggcgcggaatcccttcgtgcgtggcgaaaatgtaaccggaatggcgttggagttttttattcgccaccttaataacactctactcccacgcgccgcctgcgactttttatcaaaaatttgcaatgtcgccgcagcttcggacgcatatcgtctcttctacagcaaaagtactatggccgagaaatcgggcgtatctactcgcacagtccaacgatacatgcgtgtcatcgaggccagtgggatcatgacacgtacagcagtcagcgacagtatcaaaggccaccagccaaatctttacacctttacccaggaatttatctcagccgtccgtgttttctttaccgttcacttgggtgaaaagcgcattaaaaacatcaggaaaatcgcccacagtgatttgcaaaaattcgttgagctagctcttttccctctacgaggaataattcataagatatcgaaaattaaagacatttgttccacaacagttaagccccccataggacaagatgccccctcacccaaaggacaaagtgacctacaaaaagaagtacaacccttgggaaaagcagaagataaaaaccttgttcgagcctgcggcccaaacacgggaatttctttgcaggagcaaaacataaccggaatggcccgtcgcgctatcactaacgctgagcttgtagcaactcgtctcaaacgtgaggctgaagccgccaccataaccaaggcagcacatgcacgccgtgaacgcgctacgttcttacagaaccggaacagaagtcacaccctgaactctcaaacccagtacaaccactcgaggatcatcgctgaaggaaaacgcttcgatgaggctttagcacgttcaaaagcgggggcgctcaaagacaaaaccaaaataagcactcacttgaactcgctgaaagcgatgcttggcagaaaacctgctttggtatag

SEQ ID NO: 450473 - DNA, 1023 bp, Serratia marcescens
atgcccacacaagctctgcgaactgttactgaccgattttcccttgtcgataacattcgcaaacataccgcgcacaatggccgcaactacctaatgagtgcgatccgcgcaaccattagctcacctgaagtgcaagaacgcatcaacttaggcgaaatgtatgggtattacagtcatactaatcgggccttatatcacaaggaaactggcaatctcgacctaccggaagtttgttatgtcaccatcgacggcaaaccggtcatgttgaagaacgtgccgtcaaacagaaccttagcaatcagtattgatgacgatggtatcgtagaacatacccaggaaattttagacactgagccaggtcatattgttaacggcatggaacggtcaatggcaggcggctggagctgggctactggtggcagcgacacagtgatttcacgcgtaactagtttccacggttttgactatgtaactacgccgaattacatcagcctcaatcgaaaagcagcaatgcttgagggcgtgtccgatatgcatgcctggcgcctggaagagttaatcaagtctggttacacacaacaaggtgcctccgatatcctgaagcattttgaccagatgcagtcccacgaaatgatgttcgaatcagcacaaagaaacattcatctacaaagcgaccttcttatcatgcaaggtcagatgatggagttagaggataaaattcgacaaggtgatacggcattggatgaagcaaatcgcgaacggagccgtcgcgacgctatgttagaaacggcaatcagaacgttgccgattttcctaagcgaagaacagaaaatggctctattgcgactagattccgatgacgaccttaaaacagtaaacgctatgttcgagtccatagcagccggaaaccttaattctctacctattggtagcaatgctcccagagaagcggcgccggcctccaagtctaaaattggtgaagttccaccaattctgcccaatggttttaaatccttcctgtaa

SEQ ID NO: 450474 - DNA, 507 bp, Serratia marcescens
atgaccaaaactataaaaatgcctgtctatcatttggaaaagtttattgagttcccgcacggcgaattcctctgtcataggtatgatttttcagttaaagatcacgaatttttaataattttcgcacctgtagatatcacagatgcggaataccatgcatatcggtgtgaggaagtcggtttccacgtgccagttgatagctatgatgtaaagtttgatcgcattgaaaactttgaaagtggtgatttttatgctccgccggcaaaaggtgattgtggcggggggcgggcgtatgtgaacgaattggcagacgctttggaaacgatcatcactcttcattgcagtgtgtatcgcgctaaggcctactttgctattgctgaaaacgataagttaaaacgattttacgaccgaattttacaaaagacttttgatgaagtattatctgacgtaaccaccgatctaggtgaagaaggaaaaggttatgcattcaaaacgcgatattactaa

SEQ ID NO: 450475 - DNA, 1641 bp, Serratia marcescens
atgaaccccgtaaacctactgcgccgtatgatggggggttatgatgccggggatagcatctccaatgtaatcgccagcggcggcggccgaaatatcgtttctcgaacacttctgccgactgttatcgatgatcgagaaacgggcctttctacggcaggggatactgtcgtcgctggttcagttctccccagcgatcgcttatcccgctataccatttttgaccaaatggctcgctctccaaccctatctgcggcacttaacattcatgtgtcccatgcgctggcgcaggataaaaaaagtgggatgtgtttcaacctggcacccattgaagcgaccgataaggaaacagccgggcgttgtaacgagatcatgaatgacctgggagatatgctgaactcaggccttccatcatgggcgctgaatatggctatttatggcgtaagctacattagaccttacgctaaagagcgcaaagggatcaccagcttggaatccagctattacacgctgcctcactttacaacagagtacgagcgcggtggtgagttagccggcttctccggggattactttgtcgacccactgacgaaccaacgggtattagcaaagccgtgggaattggtggcaatgaaagtgccatactggacgccggacattaacaaccgacctatgaataccggtacggtaggatattcattgctgagtgacccttcgcaacggccgctgattgagactcaaaactatggcacctctttccttgaatatagctatgagtctttcgtcaacttatgtgacgcattgcgagcgctaaaagccacaaggaacaacgccgcaaaaatagacaggctgatagccttatcgacaaaccagcttgatccagtcaatgcagcagcacatgcacgtaacgttgggcaatcactgaagcgaagctctgaagagattatgcgtgcatctcgcaacagcaatgtaatgccgacagtctataaccatatcgttcctgttatgggcgaagggaaaggcggcataacaatcgacacacagttcataccagccgatattactggaatagaagacgtcatgttccacctacgacagttgtgctctactgtcggagtcgacgccactatgcttggatgggccgatcaaatggctggtggactcggtgatggtggctggcagcagacagcaatacagtccgcgcaaaggagttactggatcaggcaagccgcagcctctttcctttaccgaacgttcgacattcattgcgcctacaaatatggcaaggtttaccagcacaataatcgccccttccgtgttgaattcaactctgtgaacacagcgcttcaggcagaagccaaccgcgagcaagaaagcagagcgaactacgtgtcggttgtcgtcagtattctggacgcagttcaaaacaacgcgcgcctggctagttcgccggcgttgatgaacctgctgttctctgaaatgctccagatgaacaatgacaccatctcgaaaatctaccaggaactatctagcaccaagcaagatgactcaatgatggagagtgccggctggggcaacgttggtctggatgagctttctcgcgaagatctgttaagcatttttaaaggcgccatggcgccatag

SEQ ID NO: 450476 - DNA, 6612 bp, Serratia marcescens
atgctgttaaacagccttcaagacggggacaaattaacggacgaacagcgaaaaacgttggccgggtacaccggcgagggtgggatcggtggtagcgagtacgaatattacactccgcagccggtagccgagggtatttgggatctgttggctgcatatggcgtggctggtggaattgggcttgaaccggcggccggcactggtgtatttcaagaaacgaagcccaccggtgtgattatgcagtctgccgaaattagcgacacgtcaggtcggataaaccgcttacttcaccctgaagataacgtgaatattggggcttttgagtccttggcaagtagtacgccagataacaccttcgatcactgcgttggcaatgtgccgtttggtcagagccgtggcaaattcgccgaacttgatacggtttacaaagatgaatccctagccggctactttgtgttacggccgatcgataaggtgcgatatggtgggcttatctgcctcatcgttccgaacggccttacacataacacttctgaagcaaaactcagagagaaagtatctcggaaagccgaattcttaggggcacaccgcctaccttcaggcacgtttgaaaacagtggaacggcgacggttgtcgatgtgtgggtgctacgaaagcattcgcaggaaatgaccgaacgcattatgcaagaaaaagagaacgtgctgcgtgaagctaacgttctttgggatacgttcattaaagggaaatggtttgatctcgatggccgacgttacattcacggcgaaatgtccaaggtcggcaaggataagttctctcgcctggttgttaaggctaatgggatggttgacggcgcggccataaaaatcgcgctggcgaagaaattcgacagtcgcattaattgggagctgctttcactggatgagccacaatcggctactgcaaacgaaggcgaaaaacgactcttttccggtgtttggtatgagtttgtaggtggccggtggctggtggatgattcggccaactacgacactatcgacatgagcaagtacggcggaaagagctacagcgacttggtgacgcgcctcaataacgctgaagggttgttatcacttacgccgtcgcagctggagtctgtttggcaagacttcccagacgcgatcccaaaggagtttcacttcgccatttccttttccatgcggcaaaaaccagccttgcgggaacgggtgttgcggggatcactgattggcgcccggattaagacgttgcaagaaaaaatggctactggctggcagtcggaggcgcttgatcgtgagctggccgatgtgcaacgcctggtaggcgaagaggtcactgcccacggaaatccgcaccagggacgttctgcaaaagttgccggcgacggtgccgcaggctggcttaccttcaaggccagcgtcacgaaagagggagaactatccgcgctgctgcgtggtgatctggataagggcaatctgaaaacctacgacgccacggatcatgagcaggtgttgcgccacttgtttaaccagattgatcttgatccggtcgagctaaactccttccgagaagcattcactggcgaccttccggcgagtgacacggcgctattaaacctgttggcaactaaagacgggatcgccgtccaacctgacggcacgcttatgccgatggatagggccaccagcggtgatattggtctgttgaatagccagttgctaggtgccctggatggcacgccagatggtgcgatcaaggacaactatcatcgccaactggccgagataaaggcgcgtcggaaatggacgaatgctgatgatatagatttctcgctcaacagccgctggtttgaccgaagcgtgatccaggagtttttacaggaacgcgggtacagcgatgttaaatacgtcaaaaatgtgcagatagaaaatggcgacctggtatctgaggatggctaccacggcggcgacggtatatttaccggttaccggtataaatccgtgcgcaccaaaaacaaggaaacgggtaaggaagaatgggtttataagcgagtacgcaacagcgatggttttcttgaccagtttgagaactaccttaacggtgtgaaaccacgtggcgttaatgcagatctatatctggagcagatccgagggttggaagacgactttaatcagtggatacgccgccacgattcactgtcagcactggtgcagcaatacaatgattcattcaatgcctttatcccgtacagccatagcgaggaatcgctaaacctgagtggtatatcaggtgctcgtatcccgttccgatatcaaaactcggaagtgcgccggttatccgaggatggtcgagggatcactgcgtttggtacgggcctgggtaaatccaccgtgggattagccctggaagcgtacaactttgagaacggccgcagtaagcgaaccgcttttgttgtgccaaaagctgtacttgaaaactggtatcacgaagcgcaggagttctacagtaaatctgcactcgataacatgttgttcgttggcctggatgagatacgcggggaagatggttttatcaagcaggtaccggtgcttgatgacaacggcgaaccggtcattaatagccaaaccggcctacaggtttaccgcaacgcagtaaaactcgcctcgccagaaacaataaaagagcggatgaacatgatccccatgtccaattatcgctcggtacttttgaccaaagagcagtttgctgccattccactccgccaggataccgtagacgagcacgctcgagatgtcctgtttgccgaagcgcagatggggcgtgttgaccttatcggtggaaagcaccgcgacgccgcgaagcgcaataaaatactggctcgtgccagcgataccggtacggacaaaaaagaggactttccgtactttgaagatatgcactttgacagcatcatcgttgatgaagggcataactaccgcaacagctatgcagctggccgtgaggctgcacagttggcctacctacccaccggtgccgtggcgaaaaccgcacgagatatggcgttgaaaacggcttttaccaccagcaagaatagtggtcgaggcccggtatttctgacggcaactccgctggttaactcaccgatcgacgccttcaatatgctatcccatgtcgtgagcagtgaagaatggcagcgtatgggtattctcacgccggatgacttcgtgaaaacgtttggtttaaccgaagaggtcactgttcagaagatttccggcgaaattgaacgtaagcaggggctggtgggctttaaaaacctggacggcctgcgtggtattttccaccgttggacaacgcttaaaacggccaaagatgtatcagatacggtaaaaatccccgagctggacgaacggaatgttccggtgccgatgaccgctaagcaagccgagatttacgaagagttacgccagcgggccgatgcgctttctaaaggtgaaaagccagatgaaggagaagaaggtgattctattttctccatcatccgcgatatggatcgcgtgtgtgtagacccagacctttactaccgtcaaatgacgttccgctttcctgtagagaaagctagtgccgtggctgcgctcgtggatctgctaccggaatatgtcggtcgtaagctcgatgaggacgacgatagcggtaagtctgtgcggatcaaggttgccccggaagttacaaccaccagcgattacgttcagcttgttgtgtcggaggccgcagaaagcgaggtgttgaaacgtttgggcaaagcgggcttgcaggtatccgatgtatcgcatccggtaccgccgaaatacagtgcgctgatcgagaatctgaaagaaggggttaaaaccggcaagcagatcatatttaccgatgaaaaaacgcagcatggcaaattggcgcgcattattgctgatgctctcggaattgacctgtcgatgatcggcattctcaacgcgacaaccgtcgctgagacggggaaaacagggcgggcacccaaagccgtagcagaaccaaaagaaccgaaagaagacgcaagtcaggaagaattagcgaactactatcaggctaaagaggaatatgacgaatatatcgccaaaaaaacggaagtatcccttggcgggttggagcaaatcgcagcgaactacaacgaaggccgcacgccgttcctgatctgtaataaaaaggccgaagtagggatcaaccttcaccgtggcaccagtgatgttcaccatcttactctgccgtggacgcctgccagcatcgaccagcgcaacggccgaggtgcgcgtgtgggttcaaaagccagttccgttcgagtccattactactgtggtaagggttcgtttgacgaattccggctcaatacgctgaaacgtaaaaaggactggattaccgaaattctcacctcggataaggcgcgaatggcaaacgcggacgccaataaccaggaagaaatgcgactgttgcttgctgctaacccggaagatcacgctcgcatggtcgctgaggcccgctcgaaggccgaagccgttgcaagagagaaagcccgtcagcgagctgaggctaatctggcggaatacctcaagatgagtcatgccgagaaagagagcgcaactacgattgcctcgcaactagccggtgctcgttcgcgtcaggaagaggctgagcgtaaacttgcggcagcgcgtgatgatgttcaaaaggggatgagttcgcagtattccggcgtggaacggcatgcgcgagattgggtaagtgccatacaaaaatcattacagaaggaaacgcgcgaagttacacgacttgaacgaattactttacgaatgcagaaagcggccgaccgaattaagcaactctcacctgaaattgaacgcgcaatcaaggcagggttactgaacattgataccgatattctgacacatggtgatcgctacgttcagacagcatcagggcggatgatcaagcgtggcggtatctatcgattgaaacctggtagcgggagctatgtgcgacttcggtcgatcgatatagacattggctcaggcctcgccgatgttattttctttgaggataacaaaggaggttcgttggagagcggtaagactgttgtcctagccgacttgggagaagacagcgatgtgccggaatccgaggccactcttcgagcttgggccgcaccagggcgctatacgcattctgtagaagaacagatgactaagggcgagtttgagcgatacctggcgaatggctggctgattctgagcgatacgagggtggtatatcgcaatgatgcaggtgaactggatacttatgatttgcggataacacgctcctattcccctaatccgctcatcactagtgaaggcatggaatggctaacccaaaatgcggcgaacgtggtgtacccggatactcaggacgatacgcttaaaactgcgatggcaaagtggtgccgctctgatcggaatgtgagagggattgaaccattccttattggtctatttggccgagagtggcgtagcgaggttaataaatacggggagatcgcaagtccagcggctattgatgagattgttgctgcgtatgttgcacgttcgattgagaaaaccgacctcaaaaatcggaaatttgacggtagccaagtgtcgcagtacagcgaatacctgcttaccgggaaatacgatgccacgcagtacataagcaatgtaatccctccgttcaaagcaagttatattcctagcgagtaccgcaacaccgaggactttcagccggtgctttctgctgccaccaagcagaaagccgccgagcatcatgaaaacgttgtccagcaagcgaagcgtatcgcgcacgcagcctggttgcgatatggcgataatctggcgctacctgtgagtgtggtttacgagaaggccaaagaatttagagctacggctctattgttatcgcccatgtataaatcatcgtctttcggggtcattaactacgatgcgtataatctggatgagttctatgcgcacgcggtcatcatggggttgatcgacaaggagagcatcaccgaatccgttttttatgacagctcgatgatcggtgaaacgaccaaaaggattgactcagccttcagcgcagctaacagcgacaatactgcgttcctggcgggactaaaattgcgtgcaggcctgataaccgaagaagaggctaaggctgaggtcgaccgcgtagaagctgagaagacacaacgtgtgaaagccgatgaagcagtatccgaagcgaccaccagcatggatagcattactgtccgaaaaaatacccagccattaaccggcgggaaaggtactaaccgttatgatttccccgctgatggtgcgtatggtttgcaggatagcgatgggataggtggcgctatgtaccaggctaaggataaactcaagtctgaatttggagctaagtacctgaatgggaaacgctctgggatggagtttatggggagctggtggattatccctgccacgcatgatttgaaagacgttatggcagtgatcgctgaatatagctaa

SEQ ID NO: 450477 - DNA, 348 bp, Serratia marcescens
atgaacaaattcaatatgaccgagttggctaagttggcggccaaggttccgagcgtcaagatggctgtgatcagtaccgctcacgttccagaaagtgattctgaggtactcccgactttgagttgggataagcaggaagaagaggggctgaattggctggtttgcaccggttcaggctggatcgttctcccgcgagaagaggaagattgggctgaggtgcttactcactgtggggttagcgagccgaccatagccacaatcactgtgctcatggaagcagggttcgatgcgatcaattttgatgttggtgcagcagcggtcgatggcctgccactctttgattggtaa

SEQ ID NO: 450478 - DNA, 201 bp, Serratia marcescens
atggaatacggagaatttcgtaagctggcaacgaaaattgctaggaaactgaccagagcacagcagtttgcgcaatatcagaagatcgttaagaagcacccagagttctgcgatgaacagcggttccggctggcgaccttggctggcgaaataatcgaggccgaaggggttattgatcctgcggaacacagtcccctgtaa

SEQ ID NO: 450479 - DNA, 465 bp, Serratia marcescens
atgaaggctctatcaattcgccagccttgggcatggctcatcgtgaacggtcacaagggcatcgaaaaccgcagctggaacacgaaatatcgcgggccggtattgatccacgcgtcagcgcgaaagcctacaaaggcagaggttgaggtcgcccgcgaaattctccgtcatgcgggcggttgggaagcagctctgagcatgccaaagcctgagtatttcgagctgggcggcattgttggtgttgctaccattaccgactgtgtaactgagagcggatctccgtggttctacggccctgtgggcttcacgctggccgatgcgcgcccgctgccattccgcccaacgaaaggccgacttagcttcttcgaaacgcaccagcgcccgcacaaggtgttttcgctgctggtgccggaaagctatcaagatgccacagaggaagaactgagatgccagaaaatgaactga

SEQ ID NO: 450480 - DNA, 237 bp, Serratia marcescens
atggctaagcgtaatcgccccgaagtaccggcagtcatcagcattactcgccctggtggcggtgacgaaccgcgcattgaaataaccatcaaaacgggcctcggaaagtccataacggcagaaatgacgccggaacaattcgcaatggcagttaccggaaagtcggaagtgccagtgacgttgcgccttcgcaacttggaactatcaccggctgaagcccaggagaaagcacaatga

SEQ ID NO: 450481 - DNA, 291 bp, Serratia marcescens
atgagcatcgttgatgattctcatctgaccgatgagttgattaataaagcatttgaagggactaacttcgggcgcactgacttccgaaccattcttgccgaaacggtcatgaagcgcgctgctggctatcactcaggctggacagcaacaacaatttgcgctcgccttgggttgcttggtgggcaggaaaggccaacaaagcttggcctaacattctcgttccatcactactacaagccaagtgttcgccaagcattaatgccacaacaggagctgactgatggacaataa

SEQ ID NO: 450482 - DNA, 348 bp, Serratia marcescens
atggacaataatctgagcaagccggtgacgtggccaaatggctgcaatgacacctctgtaaaagcgctgcgctatctggcagagcataagcggccgatcggtggctcggacatgtacaacaccgaacatctttacatgatcgcccgtgaagttgagatcatgtccagacagcttctttactcgcaagagtatgtatccgcacttctggcacgcatcgaagagcttgagcaaaaagagcgtcaaggagaaaggcaaagcgttatcgatggattggccggtgcgggtgaggcatggtctgacattgaagaatacatggttaagtgggatgaggagcgccgcaatggataa

SEQ ID NO: 450483 - DNA, 519 bp, Serratia marcescens
atggataaattcagtgaactgaaatcagcggcggagaaatattctctgacactcaatgcgcatcgggaaaacccaagagatatcgatgcgattagggcttgggacgaggcagatgccgaattatccagggtcataagccacaatgaaacagacatcatcatcgccctgctggcagagcacgaggcttctcaagaagcactgaaaaacgttactgaactgtggaacgagcaacgccagcgaatcgtcgatctggaagccggggaaaagattttggagtcggcaacgctgaagcatctggcacgcgccgaggaggccgagaaacgactggctacgctagcaataattagcgctgatagtgaccctcagcgtgagcattttggttgcaacgtgcgtaccacagagagcggaacgttttacgttacaaagttgggtagtgtgcctggccgagaatttgcgctgtatcgtaatgaggctgaatcgttattcatcggtctacgagaagcattaggttccgattaa

SEQ ID NO: 450484 - DNA, 636 bp, Serratia marcescens
atgatcactgtcgttggcgcaaacaagggtggatgttcgaaaactaccacagccgtaaacatagcggtggggcttgcattgcgtggtgaagaggctgtgctggtggatgctgatatacagctgtcggcgtctcgttggaatgctgagcgtgaatcatcaggccttcagccgtttatcaccctaatccagaaaacaggcaacattgcagctacgctacgaagcctggacgagaaatacaaacacgtcatcgtggatgtggccgggcgtaacagccgagaactgatcaccgcctgcacagtggcccaccaactcattgcaccgcaccagtgctcgcaactggatctcgacacaatgctggaactgcaagagcaattaattcaagttcgagatttaaaccccgatctgaaagcgtattgctatcaaagtattgcctcaacaaatcctattttggctgggactgagcgcaaagaatttctggattatgtggcagagtttgaccaactcaagcccttgaactctaaaagttgcttccgcaaggtttatcgcgatgtgatggctgaaggcaagtcggtgcttgaaacagacaacgaaaaagcgaaagttgaaatttggtctttgattgacgaggtattctaa

SEQ ID NO: 450485 - DNA, 585 bp, Serratia marcescens
atgattaggttcaccgaggaatggttagcagatcatcaaaaaaaaatgggggggcgctcaaatcgtacaacctcgcgagttagcggaaaggccaacgtcctgggagaagtgattaagagcgcagtgaagaaatcggcgcatgctatcgcgttggctttgcttgataagaatcccgacctgattaagggccaacaagagcactatgaacaggtcagagtgttccattatttcgagcgacaccatcagggaatttatcacctgctgcactctacgcctaatggaggccaaagaaccaaggcgaccggaggaaagctaaaggcggagggccaaaagaaggggtacccggatatgtcgctcgatgcagcacgcggtaagtatcatggtatgcggatagagctgaaatatgggaagaacggcgcatccgaagagcaaaaagattggttgaagcgcctaacggcagaaggttattactgtgcgctgtgtgttgggcatagtgaagccatcgaggtgatcatgtcatactggcatcttgaggctggtgcctcaatgccccagcgggagcgtgatgaagtatggcggatttga

SEQ ID NO: 450486 - DNA, 312 bp, Serratia marcescens
atggcggatttgataagtgtttatctgtcgactcctcatgatgtcgacgcccgtataatgagaaccaagctttgcaacgtgaaggcgacttttgaagagcagggttatgctctcatcgagccgcctgaaacgatgattagccagccccttgaaacggtatccatgatgcgtctggcaatgctggtggcttgcgcggtagtttggtttcctcgtgacttccaaaaatctccggtttctgtagcggaatacaactacgcatatgcgatgaataaaaaaattatggtcgacacgacccggaggcttcttgattaa

SEQ ID NO: 450487 - DNA, 1323 bp, Serratia marcescens
atgactgacgcattattagtggccgaaccggaatcggccttcgtaccagatgcggatatcctggttgcacaaatcaacatgttgtcgtctgaagcgaccttctgtagccgcgtggcaggtaactcagtgttccgggcaagcatggagcgcatggaggccgatttagccgacctggctcgcaacattgcgatttttgctactgctgaggcagacggttacaacgagctggtggatgctgtagaggcccgagacaatagcattacaaacttgcgccttcagctgtcgatcaaagctgatgagttgcatttgcttcgtgctgagttgggtcagtccacaggtataaccgccgaagaaaaacgaagcttagagcgagaggtagagcgattaactcaacgacatgatgacttgaaggctgaccatgccgaagctctgcgccgccttaccgtaaagctgaaaaccacagaaacagaactgagcgaagcgcgcggtaaagtcacacagttgcgtaagcgtttgggtcaagaaatgacggcgcatgacaaaacctcgctgtcgtacaacaaaatgcagttggatcatattgctctgcttcactaccgcgattattcccgccgcgagcaggatattattaacggtttttgtggtgaccgcttctggcagagtagtgcgaatccgggcctaaagttctacatgcacttcttcatgtatccgctgcaatacccgaatgcgccacgtgatgtggatcagccagcattcgttaataacctgaatttccatatcaacctacgcagtacctacggcgaagaccttgttgctcgcattagcgagtggggcattgtccagtaccagaacctcgctattttcaagaacgagatcccccaagaactctataacgagctgacgcgcgcgcatcacgcacttgtagcggtaacaaatcctcatctcgcgtccttcttcgaatatgccgaccgcgtgaagcttgtcgacgttcccgagttaaaaccagctgacgtagtgaagatggctgagttggaaatcaccacattggcgcacttgggcaatgcattcacctctgacctggaaaaattgaaaggcataggtgaagtaacagcccggaagatccgctcggttgcatacgtttataaggacgcatgggaagcagagcttggccccattgaaattgagaagccaatgcttcctgaatcatctcgcaccattgaagaaactattagtcgcctggttgggctatctgggcaaaccaaaggaagagcagacgcgccgatcgttggtcgtagtaagaaacatcgcaaaggcaagaagtaa

SEQ ID NO: 450488 - DNA, 462 bp, Serratia marcescens
atgaaaacagtattggaacaggtttcattttcgcaaatccgctctttggctgaatggctaggcatgaaagtgacgattccggtcggcgtcgacactcggaagcccctgagcatggctggtagctcgttcacgacactgcttaagctgaccacaaaagcggaagcgacaggccgccagcaggccgctgaggagcataaagcgaccattgacgcattgactgatgatcgacgttctctaatggctcgaaatagtgaattggttcgtgagctggacagcgttaaatcgcgggcagttgtcggtgatttaaccccgaccgaatgtcagcgtttacagaggcgtcttaagttcctcgagctggtggattacctggcgtcctttgtgttccgtcaccggtgcacctcgatcaaggctctacgtatggctgttatcaatgctgggcatgctgccggggtcgataagtag

SEQ ID NO: 450489 - DNA, 564 bp, Serratia marcescens
atgcagaacgtaatggttgatattgaaaccctcggtaatggcccacaggcaccaatgttgacgatcgccgcagtatttttcgacctcaagactggagaggttgggccgagtttctatacggtcatagacctggtgagtgagctggaactgggggcaaaaccagatgctgatacgatctattggtggctggcacagagtgatgcggcccgagcagcggttacagcgaaaccacgcgaaaggaacgtcgatgcgctgaagcgtttaggtggcttcattaagtcccattgtagtgacttagaccgtgttcaggtgtgggggaatggctcaaccttcgataacacaattctacgctccggttatcaacgttgtggtgtgaaaccgttctgggtcttctggaatgactgtgatgtgcgaactatcgtgaaagctggccttgatattggcttcaaccccaaaaaagaactgccttttgtaggcgaaaaacacaacgccctcgatgacgcgatccaccaggtcaaatatgtatcggctatttggcaaaaaattaccttcccgaggatctga

SEQ ID NO: 450490 - DNA, 129 bp, Serratia marcescens
atgctgacttgggaagtcctatataaagccctcccattcatcttattaggtgttggcgtgttggtttgggtggggttcgcatcagaccacgaatataaaaaccgtccagaaacaaagaactacgattaa

SEQ ID NO: 450491 - DNA, 552 bp, Serratia marcescens
atggaactcctcatttcggctcgtcagattaaagatctggcagagtttacgggcctactcgtctctgaatcgacatcagacatattagacgcccaatacacaattacgtcgggccacatcccggcagccccagaagagggggcagaggcatttaacgggctggtggcatacagcaccgactacccggatgaaggcctatttcctttggttgatgcgttccaaattgagaatgaagaagataaggatttcgggttaaaaacctgcacgttgatcgctgaaatgctcggtgtggaagataagggcatttaccaagcggtatttgatctgaaaaacaaaatggacgcacttctgttggaaacctcagcgcattcagtagcggccggtgaggtctatgctgccggctatcgtcacggccacttgaacacagccgacggcattgctttccagaatgaggttgaacaatccttccaggagcgcggcgccgaggcattttccgaaagcgttgaagcgattctggagcggccttcccagccactgggagagggcgcttaa

SEQ ID NO: 450492 - DNA, 144 bp, Serratia marcescens
atgacattcgcggttccgaagaaggcgcgcgagcagattttaggggaaggggagctggtcaaaaaaatgctgctgactaaagctgacgatggctggtggtacggaaattatggcgtagtttcagggggtagtcatggtgcgtaa

SEQ ID NO: 450493 - DNA, 903 bp, Serratia marcescens
atggtgcgtaaccctataacggtcaattcctacttctgtggcgccggcttaatggatattggccttatggatgccggcattcaaattaaccaggcgtttgaacttgatgcagacgcttgcaaaacctaccgcgccaaccttggggatcacattaagcaatgcgacatctcaaaggagttggtattcgagcaggacagctgtcacgggatggtattcacgtatccgtgtacgaaatactcaacgattggtgatatccacggcaccagaattggcgatgatctgtttctacacgcgttaagacactttgccctggcgcgcccggagttctatgtcgtcgagaacgttccaggtatgcgcgcgttccctgttgtcatggaagcaatgacgcgcatgccggactattacatccaggtattttgcccggtgaagtcagaactgtggctcccgcagcgccgtaatcgtctcattatcgtcggtacccgtagaccgttcgatatgcgaccgccagaaaacacgaagcctgtaccactttccgccatcttggaagaagaacctcgcgtaacgctgccgtctgcgattaaagcgcgcatgagcggcgcgtatcgtgaccttccgatcatcagcgatccggctctgggtgatattgcaccgacgtgtgtagcccattatgccaaagacaaatctacgcggctggtggtcgacaaccgctatccaatgggtgtccggccctattcattacgtgaatatgcgcgtctccagggcgttcctgattggttcacattccccgtttcagataccgccggctatcgacaagtagggaacggtgtcagtaagcacgttggcgagtgggtggggatggaaatgatccgttatatgggccaggtaagggataaggcagcgtaa

SEQ ID NO: 450494 - DNA, 249 bp, Serratia marcescens
atgcgcagcgacgatgcgcaattcctggtgatgcggggtaactacaccgctgagcaaatcatcaaggcggccacagaccagggcgaaattgaccaggacgacagcgaatcttggctgatggccaactactaccagacgcactacaagatatcacccattggtggcgctgagggttactcaaactggcaccatccgcgcgatacgccatgtcgtggctcgtacttcgcatctgttctgcaatgggattaa

SEQ ID NO: 450495 - DNA, 438 bp, Serratia marcescens
atgactctcgcaaaaccaaatggtggtgtgaaattcaaaccggggcaggtcttctatggctgctggccctatacagatgacgatggtcgtgtatcgatcactgtcgacgagtgggaggttcgcacggtgcgccgcaagcgcaacagccaatcacgctggggggtaccgaaggcattcccggacgacagtctgtacgtcaacctgacacagcggcatgtgggactaactcaagataagaaaggcgcatggctgaagaaccctccggcctgttgtcgccgccagtttgcagttgggcgtgggttgccgagcgacctgtttaccacgccattgcaagcgttgaagttcgccctaacggtggcagatagcgacgcggagacacgggcaattaagacccgcataaccaagctgcgcaacgccaagaagagaaaaaacccatga

SEQ ID NO: 450496 - DNA, 666 bp, Serratia marcescens
atgacactaacgactgatcgccagcagtttgctgcgcaaaacgaaatgagcatggagttcgtaaactggttcttcgatgagaagaaggaaggatgcggcagcatgtggttcatcatggccgctgcgatgtgggagggctggaaaggacaggcggctaacagggaggcgcagccggtggtttggggggcgccaaaaacggtcggccaaatgattgggcaacttcagacgctcgaccctgctttggaaactactgcgttactgcgcatgccggctgatattcttgatggtaacgcggtgagacaggttccaatcagcatttcgttcgagaagcttaacggacaatggcttgccccttacaagggtgaaggccgtaaagtcctggcattttgggcgaaggcagatgatcgagaagaaactgaaagaggagaattgttcacgtccccgcaatcgccttcatacccagaaagactgccgtgccccgtgcatttgctgcctggcttgaaattaggtaaaggtattccgaccagtacactcctcgctgcgctggcgcgcagagccgagtacaacgctgaaatggaggctatgactccagaggaaagggcggagcatgatgccagggctaagctctttaaggcgatgctcccacagccggcgccagaaatctga

SEQ ID NO: 450497 - DNA, 252 bp, Serratia marcescens
atgacgactgcaactagtgttcgtctcgatggaggctttgttgatgatgtgaaagtgtatgccgacgctactagccggagtgtaccgaagcagattgagtattgggcaaaaataggccgtatggctgaagaaaacccggatctgccattctcattcatcagcgaagctattttagcaaaaagcgaagttgataatgggagaataaagaaatatgtgcgcagaactgcaagaaggaacacagaaccagcctga

SEQ ID NO: 450498 - DNA, 351 bp, Serratia marcescens
atgtgcgcagaactgcaagaaggaacacagaaccagcctgatgtttatgaaaccaaccgttttgagaaggtgttaggaaaacttcacaaggatgtgttggagttggtggaagacgagattgataaggtacaagctgatcctacgattggtgtgcaaaagaaaggtgacttgaagcacttatgggtgcacaagtttatcgcaaaaggccagcaatacctcttaggttacagttgggtagaggataaactagtgctttatctcatggcactggggtcacatgagaacttttatgatgaacaaaaaaagcatcgtgaaaaagatcttaaagacattgaaaagcttctcaaatag

SEQ ID NO: 450499 - DNA, 726 bp, Serratia marcescens
atgtcaaatacttctcttttactgccgttaacgaacaaagagtgccctaaatggcggtgtcctagttgtggcaaagaaactatgagtattaagccggggacattcaacgcaccctcaacaagggagtcaagagaggctagttctcatgaagcctgggagcctgaatgggatcgctctgtttactcgtgcatactcgagtgttcaaatagtcattgtggcgaggttgttgcaagcagtggaattggcgtggttgtacctgtatttgaagaggacatgcaatgggataattatgagacaatttactatgctaaaaacttcactcctattttaagggcatttgaatatcccgaagattgtccgaatgctgtatgcatgcctttagaaaacgccttcggtttgtttcttagcaatcctagcgctgctgctaactctgtgcgaatctccgtcgaagaacttttaaccgacctgggtgttgaaaaaaagaaagggcttgtgcttcacgacagattgaaaaagctgcccaataatcatgctgagcattccgacactcttcttgctatcaaatggctaggaaatgccgggagtcatgcttttgataaggttgaatctaaagacatcgaggacgcttttgtaatcatggaatacgttttgaccaaaatatacgataaaacagctagtaaagttggagcgttggcgaaaaaaatgatcgaacgatttgagagttga

SEQ ID NO: 450500 - DNA, 885 bp, Serratia marcescens
atgaataagaacaagctatacatcatcggtaacggttttgacctatggcacaacattgcatccagttatgctgcgttccgaagattcgtagaacagcggaattacttcgtttttcgtgatgttgaaaagtacctgccgatagatgaggactggggtgtgctcgaaagcgcgctaggcaatattgacgtcgaatttctaattgacgataactcccatgagatgagttcatatggtgatcccgaatggggagatgaatgccaccatgctttccagtttgcggtaactggtgtcgtagagaacctttcatccgagttaaagaagttattcattgaatggattcgcctgttgaatacgccaatggcagtcgacttgcttcgtgacattgatccatccgctcgcttcttgtcatttaactataccaaaaccttaaacacactctacggagtacctgatgcaaatgtcctccatatccacggagagatcagccgccccgaaagcatggttctaggacatgcctgggttccttctcgttcgcttaacgacaggtctgacattgctgagattgacaccagacttatggaagtaaactcaataatcgactcctacttccctgcaacttttaagccatcctctaaattaatcagcgacaacaacatttttttcaattctctcggtgacgtcaccgacgtgtttattctcgggcattctatatcaaacgtcgatgagtcgtatttcggggcgattatcacaacgatagaccggtgtaacactcaatggcatgtggcttgtagaagtgattttgatgcgacagaaaagattgccaggctagctgcgatgggtatagcagagaagaacattcacatttgcagttggtcagatatgtaa

SEQ ID NO: 450501 - DNA, 408 bp, Serratia marcescens
atgcaggaaaatcgcccacgtatcaacagtgcagaagtcgcagattttatgttgagactaaataggcctgtctcagcccccgagctaactattcttctccagaaagcgtatccaggcctcctcatagaaaaaaatgacatctacatacggttgaaaggtttctaccgttccaaccaggcggattgcgtgctttatgacgaaatccggccgcgaactttccacttgaaagctatcagcagccattacttcaagttccgaaatggtcgacgcactgatctgtccacgaccatcatcaaggaaacactcaggggggatgcaaaagaaaaagccatgcttagtgcgatggcttttggaagggagttatttcacagcctattagctaaacgttcgggctttatcacgttttaa

SEQ ID NO: 450502 - DNA, 480 bp, Serratia marcescens
atggctgaaaacaaacgccggctacttcagcttaatctggataaggttgctgctcacagctattttggaaagcgctttgtcgataagcaccaaaagactgatgctctggtgtcccggcaggcactgctgttcaactcgatcagcatcggcaatatgattatcgaaagcggtttggatagcgcctttaaagccctggataatgctacgtttgcgaacgccagtaaggcggatcgagccgaaatgattcttcgagcgttggagctatttagcggagttaaaaccaacagcgccaaagcccctcaacaagctcatgagccggtagtgcaaagggttgttgagtcagggccaccagcagtgaaagctgaagagaagcccgtggatcagacacctgaagcgccggctgaagaatacagtgacagcgccgaaaccacaaaaatgtcattgccgttaaaacgtgataaagcccgaacgtttagctaa

SEQ ID NO: 450503 - DNA, 1104 bp, Serratia marcescens
atgagcaaaaacaaaccagtttatgtagctttagactgtggctctggcaatgttgctaccgtaatggagaataagggggaggttcagattcgtgtaactccatcgtttgtagctcgagtgctgggacaggcgaaagaaagcgactcgaagactaactgggttacaacgggtgccagcggcgaactggaaacctatgctgtgatgaataaggctatcggcgccattgatacccggacacccgattatcaactgagcgcggcttgtcgtgtgcttgtagttaatgctttggcacagctcaaacttggcggccgcaaagtagtgatcgctgacaccttgccggcagaccaatattacgatgataacaacgccataaaccgccagcagatcgagcttaagagaaattccttgatgacagcggtaaccaacgccaccagcgaaattgcttcacctgacatcgtgtgtgttgaaattatgccggaagccgtgaccgcatataatgcagccctatacacccaggatgggcaagataacccgttcctgattggtgccaaggatgtagccattatcgatattggtcgctatacctgcgatatcgcacacttggattgtgacaaccataccctgttctcacgtggcacaacccctcgcggtgttcatatcatgttggaagcggtcaaaatgcagatgattgaccaggcagaaacgatcggtatccctgtggagaaagttcgcgtgatgacgctcgatgacatcgactccattgtccgcaagggttactacggttcgagcattgaagccttgaaggataagcgcgtgtatcttgaccacattatctcggctgcggcagcaagctttgcaagtgaaatcaactatgctctcaaaacaattgttaagtcacttggcagcatcgatgcactgattattgtcggtggcggcgcctactatattggcggtctgctacgagaaatgcctaactttgttgcggattggcatgataacgttgtgataccccaccagccagaaactgcggttgcacgtggtgcataccttgccctattggcccggcatgatgtggaagaacaaacaactgaaattgaggcttaa

SEQ ID NO: 450504 - DNA, 1248 bp, Serratia marcescens
atgacctgggatgagcacagagaaagatttaccgcgctccaaaatgagcgagggatcacagtcaaggaatatgcagaagcccacggcttgaacgcaaatacggcccgtagagagctgaaaaagaagtcggcagaccagtcgcagccggccccaaagaataaacaaaagaaagcgccagcaggaaaggcctctaaaggtgatcacaaacgtgatcgttcaagtgatcatcctatcgggaacgaaagtgatcacgtgatcactgcccccaaaaatacgcgacgaacccgcgccagctctggtgatgcacgatttagcgctgaggcggcagaccataagcgatcacgaaaagcacgtgatcacgcaagcgacaaaaagatcactttcccggcggcgaacggggtggacgatgcggccctgcttcatgtgcctaaagcgcggggcggccgtcgctttggacacatgaacgaggagtgcattattcatggccgttatgcaacgcctcgtccccaggatgtggaagacacccttgaggaaatgcgagatccaaacttcattaacaccctagaagctcgctcaattgcaatggtctattcccacctaaaactcatggagcgcgctcgcaatcgtagtctcgacctgttagacgaggaggctgatgggttcaaaccagatgaaggaggcacgcacccggtacacaaaacgctacagatgctactcaatgtcagtgtagggatcggtgaaacagccaaatcgatgagcgcactacgttcagtgatgttgaaatcacgcagagaggaagaggcccacagcatcaaaatggagactcttaatctgattgctgtggcctatgaacaacaaaaggaacacgactggagctatcaggagacggcagagttcatcgaagcaaacggaggcatagttccccctcatttgatgcagcaagcccgtatagaggccaccaagccgcctgagcctgatgacaatacaagtaccgttgatgacgaacaaatcgatgcagaagccagaaagcataaggctatgagggagggtaaagaggtcttcattgcagaacggcgagcaatggtcgcgcagatcgttgatgaaggtagctatggagatattgacgccgatggagatggacgcgagggcgagtttataagtagtgaatttgagtctgacgaggagtttgatgacgatctaaccgacgaagagttgtatgggccaggaggggcaaaagatggcgcgtaa

SEQ ID NO: 450505 - DNA, 1518 bp, Serratia marcescens
atggcgcgtaaaacgatacgttcggtcatcaccgacccccgctggcgggatatggtaatccgctatcgctatgactggagcctggcagccgtggagctgttcggtaagatccccagctggcagcaggaagagattatcaacgccgcccaagatactggtagccgcacaactgttgcatctgggcatggtactggtaaatcggacatgacctctatcatgatcctgtgctacctcatgttttacccaggtgcgcgcgtcattatcgttgcgaacaaaatccagcaggttatgaccggtatcttcaaatatataaaacagaactggaacgaatgcgttcgccggcaaccgtggctccagaattactttgtaatcaccgatacgtctttctatgagatcgccaataaaggcagctggacagtcattccaaagggcttccgccgtggtaatgaagaggcacttgccggcgaacacgctaaacacctgttttacatcatcgatgaagcgtcaggtgttaatgacaaagctttcggtatcatcactggcgccctgacagaggacgataaccgactattactgatatctcagccaactcgcccaagtggctatttctacgactctcatcacaagcttgcccgctccaaggaaaacccaaggggcgactttacagctattacgcttaactctgaggagtccccttgggtaaatgagaagtttatacgcagcaaactgctggagtatggtggccgcgataaccctgagtatcaaatcaaggtgcttgggctgttccccaaaaatgctcatggcttcctgctggggcgtgatgaatgcgaacgggcagccaggcggaaagtacgcctccataaaggctggggttgggttgcgtgttgtgacgttggtaacggccgtgacaaatcagtgttgagtattttcagggtgtccggtcggcgccacaccaggcgagtagttccgttcttggtaatggagatggccggcgactgtcaccccgtgaagtttgcgcactatatcttccaggaatgcactcaagagaagttccccaacataacaatagccgtggatgccgacggcattggcgacgcaacagtgagggaattagagtcccttggtgtgcctgttgttcgtataaattggggtaaaccaatgcactcccgcgacgataaacagcgatttgccaaccaacgcgcttttgcaaacattatggcaagggatgcgattaagtccggtcgtatgcgtcttgatgcgaaccctaaaacagctgagaaagccagtaagatccccgtcgacataaatgagatgggccagaacgtgatcatgaaaaaaaccgtaatgcgtcagaaacttaatatcaagtcacctgacctatgggatacgtattgcttctcgatgctggtggactttgtggccgcaaatgatgacgttggtttcgacagggagaatgtacgagtggatgcgctgaaatacctggatgactttgatgatgcagaggaaggggcggcgtag

SEQ ID NO: 450506 - DNA, 951 bp, Serratia marcescens
atgaatactgccctgttcgataccgcgtttaaagcctttaaggaagtacggagggagtggattcagattttacagcgctacgcggtgtacattaacgataccggagacggcgtgcaacggccagtggcggtgatcgatgatcccgaggttatgaagcgcctgagtcacctacagcttgaatgggagcgattttacctcctggctgaatctcgccggcttaaaaagttgtcgccgctgccggtttcgttgtattcaccggtaccggtcatcgcaagtagtggtgacttagctgctgtcattgttacccaggcggccaataccatgaaatggcacagagacaaggtgatcatgtccctggaaaagaaactggctcagcatgtcaaaatgcgccggctggtggagtctggtgcattgccacagagtgagttgcctttaatcaatgcgaccattgccgtatacgaagccgaccttgagcgcttcaacgctatgcctgaaggaacaatgctcgttcgccggcaaagtggatatacggatgttatcgtaaaaattaagaatgaggcctcacaagatgaggtgtcgaccttgagttctatcttcgacggattcgttgaaatcgaggttattcgtgttggcgcctatggttgcgtggtggatggttccaaactgaaatatgagccagttatcgacgacaagaccacggcggaaactcgtagaaatgtatacgccaatgtcacgccagtgccttgtgcactaatgagttctaacgcctccttatatctgcttgatgacgtgaaccgtgccaaagcagaagcgaagcaagctgccctggatgagcgtcgtaagacgagccgccaggtaatgcgagcctctcgtggtcacattgatgaaggcgtagaagaaaagaagccgcttcgcactcggatctcaagcaaagccgtcccaaaaaattga

SEQ ID NO: 450507 - DNA, 573 bp, Serratia marcescens
atgttggaggagttcgttcaggagcggggacataaaatagccagttactaccgggagaacgtcagcgggacaaaacttgaccgcccggaactgggacgcttactgatggacagtcaccgcaatgatattttgctggtcgagcagatagaccgcctgacccgtctgagcaacagcgactggatgacgctgaaaaaacagatagaacaacacgagctgcggattgtcagcctggatgtacccacctcatggcaggcactgtcagataaagacccttcgcaggctgacccaatcacccgcgccgtgataagcgccatcaataatatgcttatcgatctgatggctgcgatgtcgcataaggactggctgagccgccgccagcgacaaaaacaggggattgagcgagcacattcactgggtaaataccgtggtaaacaagccgatagtgagcgtcaccagaaagtattgtactaccgtcagattaagaaactgagtattcgagaaacagctgatgctacaggatatagctgttcgcaagtatgtcgaatacaggctatatataaacaaaataaataa

SEQ ID NO: 450508 - DNA, 1827 bp, Serratia marcescens
atgcgactcaaaaagattaaactcactaacttcaggggttacagaaatacaatagaaatccctgtcgatgaagccatgacgggaattgtaggccgtaatgattttggtaaatcaaccatccttgaagcattagctatattttttgaaattgatggaattaaagcagataaaaatgacatgaactgctttagcatggttaatggaaaaactcactttgaaatttcttgtgagtttgatgatttgccacccgttatacttattgatgagcgagtgagtacaactctggcttctgaacatctattaaacagccatgggtatttcgaaattgtaaaaacattcaaagcaacaacaactggaaaaccagataaaacatacatccgttgccagcaccctgtaaatgaaccgttgaacaatttgctgggaatgaaaatatcagaattgaaagtcacaggaaaagacgttgagaaaaatgtggaggataagcgaactgcatctttatggcgacaggctatcagagatgctgctatgccatatgaatgtgctgaaattttacttgatgtagataaggggttagggacagaaactaagtcaatatgggggcggattcttgaacagctaccaacctttgctcttttcaaggccgacagagagagtagcgatggtgactctgaagcaaaaaacccattacaacaagctgttaaagatgctcaagcggctttgcaagagaaaatttcagctcttgaacaagaaatccaggacagtgtattagatgttgctgagaggactctggataaactgcgagaaatggcaccagaacttgcgaatgagctcactccgcggtttaaagaaaaacctaaatggacatttaactttacactcgatggtgagaatggaattccaataaataaaaggggaagtggtgtaaggcgacttattttgcttaatttttttagagccgaagctgagaaaacagtatcagggacccagcgcaacgttatttatgctatagaagaaccagaaacatcacagcatcctaattatcaaattatgttgatgaacgctttattagcactgtcacgtcaacctaacaggcaaattattgtaactacacatgtaccagctttggcaggattaattccagtcgagggcattcgatatgtaacaaaagatactgatggacagcctgttgtaaaaatgcctgataatgcggttctcagggaggcggcagaaagtcttggcgttctgcctgaaactggtatggaaagagctaagggcatagttttagttgagggaaaatcagatgtaacattccttagacacgcgggaaaatgtttaaaacaatccggagatattccagcaagcctagaagatgtaaatattgtacccatactgattggaggatgtgggagtgttaaacattgggtaacgttaaatctggcaaatgaccttggactaccatggtgcgtttttcttgattcggatattggaggggatccagcacaagttctttcgatagagaaacgaaaaaaagaagttgaagaggccggaaaaatgttttttgccacacgtaaacgtgaaattgaaaactatctttgcccagatctaataagagatgagacaggggttcaggttgttttcacagatacatgcgacgcaaaaaaaatcataggaagagcaaccagcacgaaacctaacgacgtactggacaggttctggcccctaatgactgccgaaaaaatcataacatgctctacttatagagatggtaatgatgacaaaattgagcttatagagcttcttgaagggattgtttcattagtcgattga

SEQ ID NO: 450509 - DNA, 1980 bp, Serratia marcescens
atgaagtaccgcagcgatattgatggattaagggcgctagccgttattatagttattctttttcatgccgggatcggtggttttaattccggattcattggtgttgatatattttttgtaatatccggatatttaatctgcaatataatgctatccggtagcaaggagccatcgttctctcttgcaaatttttacagacgtaggttgtggcgattacagccatcactgttgatgatgatggcattttcgtcagttatcgcaactgttttttatctacctgacgattacaatacatttcttcacagcgccagaaatacgctttactttatgtcaaacagttatttctcaggcgcgacaaccgcatatgcatcacctgacgccaaatcactccttttgcttcacacatggtcgttatccatcgagtggcaatggtacctggcattccctgtcgtattttattttttataccgtgtattaacaccgcgaaaactggcaatagtgaaccacatggtcaccttgatcttactggtaaccacactctacctttcactccacagcgatccgaaaaattactatcgttttatcgccagagcctttgaacttcagctaggcagctgcatcgctttttatcatatcccccgcataaaccgcctgttggcgacgagcgtgggtattggctcactgatagttttagtgatgttatcactaacaccagatatcctatcaggatatccgaatatctacaccgtattggttgtgatattaaccgggttgctgattattacggggacggatgctaaaaacatctccgctcgaatactttcgagtcgcgctgtcgtttatatcggtaaacggtcatactcactttacttatggcattggccaatccttgcagttatcagctatgcgggattgtctgatgacaaaaccgtcatcagtttcggtttgcttgctacacttgcagccgcattgctgagttatcgctacatcgaatctccattacgcaagtgtaaaatgtcactggttaaatcggtcatgatattgctcctggcacctttaagcctttttgccagtctgtacagcgtgtcaggtaagttcaatgatttccctggcagattcgggcaacaatatcaaaacgaaaacagactgattaatcaatatgcaaaggaagccggtcaccgctcagattgccttactgatggcgttgatagcgataataaagatgatctgtgcacttttggtaaaaggccatcacagaagaaagcctttttcattggcgactccaactcaaaccactattggttatttctggacgttcttgccaaaaacgccgacatggccattacagcacaaagtacagcgtcctgtttaacattgcccggcatatatcaatttgattggtggcattttcacaatgacgtttacaacgtctgtcatgataatacagccatgtattacaataaaatcaaaatgggtcactatgattatgtgatcgttggtgaactgtggcctatgtataacagtgacaaaattatcaatcagcctggtgatacacggtctattgagttggcgcagcagcgcctgcgaactgcaatgaagaatgcactgaatattatagaacagtctggcgcaatacccgttatcatgaaagagatatatacaaggccacaggggtatgaggcttgcatgaaaaacaaactcataaagcgagagcattacagcaatggtgaatgcaacacaaccgactgggatgctgaacaaaaagggtggtttgatacggcatttgaagatttgaaaaaagagtaccctaaccttattgttattgatataaaggatgttcagtgttcaggaaatcgttgcagaaccgaggtcaacggcgtatctattttccgtgacgttggccacctgaatgactacgctgcgcattattttggtgaagagtatctgaaagtaaaagggaatcctttcattcaaaattaa

SEQ ID NO: 450510 - DNA, 360 bp, Serratia marcescens
atgggacgttcaacacctgtgacgattggtcagaaggaatttaaatccaaaacagttgctgttagctatttcatggatcagcgtgaagccgtcaaagcagttggcccgctgaaagagggcgagttgtttgaagaattgcgcgacctgtatctgcgttactgcaaaatcacagactatcccctgggcaaccgggaggtttacgcattcagcgtaaattatgaaactcgtcataccaaccagaactacggtacgtatctgtgctactgggtacatttttcaccgaaggatacggatggattgtccttttcggttaaacaagcagtggatgcgatcgccagcgctgcggctgaacagccttga

SEQ ID NO: 450511 - DNA, 309 bp, Serratia marcescens
atgtgtgatttatgcaatacggacgcgaactacttccatacggcagaatgcgtgtatgaccacctggttcaggactaccccgttatgtggctgcgggattccacccggatcggggcttactacctctgtcgcgaattgctttcgccggaagggatggtgctggccatgcaaaacgcttcccccatgaaggggtggcggctgcgtatgcgatataccgaaaccgtcgatgaggcgctcgatccactgcgggcggacgttgttgaactgccctcccggccggatgccctgcaggccttccggtcgttttga

SEQ ID NO: 450512 - DNA, 159 bp, Serratia marcescens
atgtcagcaaatatcatgtctaccgtcatcgacggggtggcttcatttttgacgtcgccagttgtttggctaggttgtgccgggctgctgttaattatgttggtcgtgctaccggccagtccattgcggacagtaaaaaaagaaaataataatgaataa

SEQ ID NO: 450513 - DNA, 429 bp, Serratia marcescens
atgattaagaaaatgtcgaccaaaatgcttaattttgcagtagcgcggccgtacatgtgtttgactattagcctcgtatttcttttactgtgctctgctaaagcaacggagtatatgttttatggaagacacttaacaccattgctaatatcctttctggcatttgcaattggcgcagtattttttggatacttttatatgcgtaacaatttgttgttaaacagggcacttatctttctgttaaataacaagaatgatattgctgaaggtgtggtagtggactacctaaaggtggtggcaaagtataatgacgttgagaaagagtttgatgattatttttcggcgcagatgtaccctcagaatgttgaaatctgcatggataaaataagggaacttaccttaaaaaaacgtaacgacctttcacattaa

SEQ ID NO: 450514 - DNA, 315 bp, Serratia marcescens
atggcagcgaagatccgtcgtgatgacgaagttatcgtgattaccgggaaagacaaaggtaagcgcggtaaagtaaaaaatgtcctgtctgctggcaaggtcattgttgaaggcatcaacctggttaagaaacaccagaagccggttccggctctgaaccaaccaggcggcattgttgaaaaagaagctgcaattcaggtttctaacattgctatcttcaacgcggctaccggcaaggctgaccgtgtaggctttagattcgaagacggcaaaaaagtccgtttcttcaagtctaacagcgaaactatcaagtaa

SEQ ID NO: 450515 - DNA, 180 bp, Serratia marcescens
atggcgaagacagtagtggtgtttcattccggctacggccataccgagcgtttggcgaaagtcgtggcggaaggtgcgggggcggaactgatcgccatcgatcagaacggtgacatcagcgacgaagcctggcagacgttggatgaggcggacgccatcatctttggctcgccgacctaa

SEQ ID NO: 450516 - DNA, 630 bp, Serratia marcescens
atggcatttgcggctattatgggtttagtttttgctaaaaggtggaagcgtgatgctactaaagataaagttattgatagatgcgtaaaaatcctttccgtacatctattagatatcagaaaggattttgtaccagctttacatgttagcgtctttaatgtttggttttcttcatttgtagaaaaagaagttactacctataaagatgtgcgttctatgaaaaaaatggcttcaaactatgttggtttgattaaaaaagaaagtgaaatatatactgagtttgtatctgaacttgagtacttaaaactactttcatgggatgttaagaaagaacatagtgaagaaatagataaaattagaacgcacatgaaaaacatagtaaccaaggatcaagagctattaacactaatcaatatagtctttggtatgtggaatcttaacgtttatgaaaatgatgaaagtaaagctcacactgaacttacattcaatatttcaaaagatccaagggtagaaatggcacttaagctcatacccgaaatcaccagagaaagggaaaacttacaaacactcattgaagggatgctaagcaagcaactgaatgttttttctttcatcgaacaatctgaatag

SEQ ID NO: 450517 - DNA, 786 bp, Serratia marcescens
atgtcacaacacaacgtccagggcgcgacaacgaagcctacagaagcatcttgtgaaagcaacggccagcaatatcgggcgacctattcccccgacgataacaaattgcggttatatgccgccgatcgtctcgatggggaaacttattcgaaaatcagctcggtgggctttaagtgggcgccgaaacaagcgcttttcgttgcccctgcctggtcaccgaaccgcgaagaccttttgatcgcgctggccggggaaattgaagatgaagacaatacgttgtttgaccggcaggaagaacgagcggaacgttttggccattacagtgtaaagcgagcaagtgaatcagatagggtgctgtcccacgttgacgcgctcgcgtcttccattccgttgagtcagccgatccttgttggccatcacagcgagcgcaaagctcgcagcaatgctaaaaaaattgaaaatggcatgcaaaaggccgtgatgctgttcgaacgggcggagtactgggaggagagggcggcggcatcactgcgtcacgcgaagtacaaagagcgctcggatgtacgctaccgccgtattaaaagaatacaggcagatttacgcaaggcggaaaaggtcatcgagaacgccgagaaatttatgaaaatgtggcgctgctcaacattggatctcaatatggccagagcaatcagtaaccgtgattacatatcactctgcttttcgctggaaaaatacccacgcccacaagataaaagccagtacgaagggatcatggggctgtattag

SEQ ID NO: 450518 - DNA, 258 bp, Serratia marcescens
atggtaaagcgcagagaacccaccgttatcgctggttcggttgaaaaacgtatagaggaatttgccgccgccgcggatcatgtcgtcacacagcccatgcaaaccaacagtgaagcgcctcgggattacaaagccatccgggtaccgttcaatcaatacgagtatgaattgctcgaaaaactgtgcaaaaaaactaaccggtccaagctcaacatgatcaggcatgccctaaagtattatgacgagaacaacgaatag

SEQ ID NO: 450519 - DNA, 621 bp, Serratia marcescens
atgacactagatttaatcagtaaacacattggagtgaaagacttccctcagcacctgatcgaaggggtattcagttgcagattcaacgacatcatatactgccgcttcaaaatcccgctgcaggggggaaagtttgcctatatggagcaagcgctctcggactccagtgagagtcatattgtcattgccgaccggcgcagactcttgtcagcctggcgcaataatccgaactctatcgtgccggaactcagccgcggagatgaatccgcgtggcgccgcgaccgtaaatttcatgaagcggaaaaagggttttcccacggcgcaggcaacccggtaccgttagctgatccacattgccgatttattctggaccaggggttgccggttccctccctcggctttaccaatgggatcacccggaccatttggctactggccaatggcgccgaacggttcccggtccatgccgataatcatcgtagtgcccagctgctgcagcgaggtattggggatcgttctgcatgcccattggctgttcaagcactatttttccagtatgccggcagcgtattaccctggcacttacggtataaagcggaaccagagcaacacctaaaatga

SEQ ID NO: 450520 - DNA, 777 bp, Serratia marcescens
ttgctggccaccgatgaccgttatgtccgtgccctcaccctgcgcaatcgcgcggcggtgcacggtgacctgccctactacctgctgccaccggaaatcacggtcttgctgtcctgttgccatgacctggaaaaacgcaccttgttcgagtttttgtggaatacaggtgcgcgtatcaacgaggcactggccatgcggccagctgacgtggagtttgatgcatcgccagcattcgtgacgttgcgaaccctcaagcaacggctacaccccaaattgggacggccgaaggtggtgaaaccgaaagaccccggtaaaaaagaacagccggagcagaagccggtacgcgtggtgtcaccggtgaagcgcacggtggcattagatgatgcgccctttgctgcacggctgcatgaccacattcacaccttcaccgaacacaagaccaaacccatctggctggtgcccgatgacaccgcccgcaactggctgaagaaggtgctgcttgaggacgatcgtcagggcgtgcggttcagccttgagcgtgtcaccccacacaccttccggcacagttttgcgatgcatttattgtttcacggagtggcgccacaaaccctgcaggcggtgatgggccacaaggacttcaaatcggcgcaggtttacctgaaggtgttcagtctggactatgcggcaagccagggcagcgtaccgttctcgatggatgcgggtgtggcggcggagatgctgcagctggccgggaatagtttgaaagtggtgccttaa

SEQ ID NO: 450521 - DNA, 648 bp, Serratia marcescens
atgcctcgtattgtgcctatttcccttcacgtcttttgcaacctggtttgtgttgcgccttatgctggggccatgagcgaaattatgttggttgttactgaaacctggttgaactttatggctgaagcggcaaaccgtgcacgaatcatgactgcttatactgtcagcttgtccacaggttttgctcttggtccactcattttagtgtccgttggcagtagcgggaatacggcattttatctgggggccgccatcgcattattggcggcagtcgtcgtcactcgctctgctgtaaagccattcccagcagacgaacaacaccaatccaaaccgacgctggtgtaccttagtctggcacccattgctatagcggcaacggttctgaatgcgggtctggagtctgcaggtctcaacttactttcggtatatgcaatgaatttgggttgggacgaaaaatcagcaacttcattgattactgttttattgattggggcaatattattacaactgcctattggttggatagcggataaatacaatcgtcagtggctaattatcatcatggcgggtttatcggcctgtggggcattgttatggccaatatcgcttaattatccctggatggcgtacacattactttttgggtaa

SEQ ID NO: 450522 - DNA, 189 bp, Serratia marcescens
atgagcctgtcgcttcgattggtttttttattggaaatcaaacgattgcttttttatttatcagttttttctgaagtgtttacgccagtgggattattcgtagaacatctgctacatttcatgaacatagacaaaagccatttatcctcgtcgttgagggatgtgggcgcggatgagtatggagtttag

SEQ ID NO: 450523 - DNA, 240 bp, Serratia marcescens
atgaaaaaaagaaaacttaaattagttggccaattgctccttgcgctttctttttcaataattcggggctgtaccaacaccaacgaacctcaggttatttccgcacttgacgacaaaccatttaatgactggttcaataaattgttaagccaaataaaatccgatcataattataaacgtattccgattaataccactaaaaaaccagatgattttcttattttactgcatgatacttaa

SEQ ID NO: 450524 - DNA, 633 bp, Serratia marcescens
atgcctttaaatttcgcatggtcgtgctggcttctcagcccggagatagcgttgctcaggttgcccgcgaatacggcatcaatgacaatgtcatcttcaaatggctacgcctcaggcagaacgaaggccgcatatcacgtcgccctcccgcaacgcggtggcactcgcttctccaccggtgctactcctgttgaagtgatatctgctcctcaacaatccgatgctcaaagcaccgcaacctgtcagccctctacgctgaaagccacctcctaccacgtggcgttcagtcagggcaaaatgacgctggagaacccctcacccgtatctggctggctgccggtgttacaaatgcgaaaatcgttcagcggcctgggcgaactgatacagcacgttctcgaggaaaatcccttctccggccatctgtttatcttccgtgaccgtcgtggcgatatggttaaaatcctttgggcggatgcagatggcttgtgcctgtttaccaaacgtctcgaagaagatcaattcatctggcctaccgtgcgcgatggcaaaatcgccgttacccgatcacagcttgccatgcttctggataaacttgactggcggcagccgaaaacatcccgccttaacacgtga

SEQ ID NO: 450525 - DNA, 366 bp, Serratia marcescens
gtggtcataaatcgcgactatcccaaacgcattgcagcacttgaagaagagctacggcagacaaacaatcaactcagcctcgtggaagaaactgactccttcctgcgctcggcactggctcgtgctgaagaaaagatagaaaacgaagagcaggaaatagaatatctgcgtgcgcaactggaaaagctgcgccggatgttgttcggcacccgctcggaaaaacttcgccgccacgccatcagcggggaatgccaatatgtcatcgggctgcaggtgttgtttaacaggttgagaagagagttcaggtacattactaaccgccaccaggcggcgagggaaactgagtgcagcgacatccttaattga

SEQ ID NO: 450526 - DNA, 159 bp, Serratia marcescens
atgtacaggcatatgccgctgaactggatatacggagaacggtttaccgaccgtgaaacactgaagtcggaggtgtttaactacattgaagtggattacaatgagaaaagtcgacatagcacactggactatgtcagcccgatggaattcgaacgataa

SEQ ID NO: 450527 - DNA, 537 bp, Serratia marcescens
atgaatatattaattcggtttcagttaattactgtggtgatttttttattaacatcgtgccagtctttttacccaccatggaactctccgagagattaccctattaattacacgcgaatatcagatgaaaaagtaagcatcatgtcgatgaccgatgaaattcgcgccgtaataattgttccgaatgctctaaatggtgttaactctgatgtaagggtttgccctgagccgccagctgatgcggctgataggatttcaagtaattttaacgctgaagtggccgcatcccagacagcccctgaagataaattagatgagaatgttaagatggcaaacatagaatccactgatgttgcatctatacttaaccgctctcagggattggagttattccgcgatggtgcgaatgtgctttgtcttgcttggttaaacgatgtttacaattctggtgacattaattattggcgtgatgattttagacacttacttgagttatcacaccaactaataatggcggaacttgaattaaaaaaatag

SEQ ID NO: 450528 - DNA, 318 bp, Serratia marcescens
atggcaaaagcgttcggctatatgctgaagcagtggaacgcgctgaatgtgttctgcagcgatggtcgggtggagatcgacaacaacatctgcgaaaacgccttgcggtgtgtggccctgggccagcgtaactatctgttcttcgggtcagacaggggcggcgaggcagcggcgatcatctacagtctgctgggtacctgcaaattgaacggcgtagagccagagggctggctgcgcgatgcgctaggcaaaatcagcgactgcccatcaacccgggagcacgaactgctgccctggaacctctcaaccgtaaaataa

SEQ ID NO: 450529 - DNA, 408 bp, Serratia marcescens
atgaaatttccgatctatctccataaggcagagagcggcagtttctccggtttcgtaccggatatcacgggctgctattttgccggtgacaacattgacgacacgatcgccgatgcatacggcgctattgatgcgcatttagagtaccagacggagaaaggccgtgcgcttccgactgcccaggacattaccgcacatgccgaggacgaggattgccaggggggaatctgggcatatgttgatattgatttaagtaaatatgacggtaaagccgtcaagctgaacattacgcttccgcagcacctgttatcaagaattgatgagtatgtagaggtgcaccgtgaatacccatcgcgcagtggcttcttggctgaactggcgcgtagagagttacagagaaccgcataa

SEQ ID NO: 450530 - DNA, 1173 bp, Serratia marcescens
atgcgacacacatcaacgccttttatcctgctgggcacgctgttcaccgccgccggctacggggccacctttttgatttccgcctggtttcgcgcacagggcggcagcgacatcgatgccggtaacaccctcagtatggcgcttgtcggaaccctgatgggcgtccccctggtcgggtggtgtgccgggaaagttgacgccgcccgcctggctaccctcgcggccttaacgctgtccggcggctacatactgctggccagcctgcgcggtattgaccccgtcagtcttccccgcctggccacgctgctgattggcctcggctggggcatgttctatctcggggcgccgctggcgttgtccgagcgcctcaccgatgccgaacggggacccggtttcacccgcttcagcgccttccagatgaccggcatctgtggcagcccggtgctgcttgccgtcatgatgacgccaggtggggtgcctgtccggaccgcctttctatgggtcgccgccatgggaatactcgcctcgattctgctgggagtgttcagcctgagggagccccgggcccgacgggaaacgtcactgcggccctggttcagaaaaatcaccacgctggtcaggcgcagcgttatccgtcccgtcatcatggtcgggctcggcggggcggtattttccggcatgatggcgttccagggttcactcaccgaaggcacaggagccagtgccagcaccttctttgccgtacatgccgccaccgccgtggtatcccggctatttctggcgcggcgtctgtcggcctggccccgcgcgccgctggtcaccgggctgctggggtgccttatcgccggactggtatgcctgctgggcatgccggtgcatcctgcatttcaggtggccgccgccgttctcacgggcgccggctacggcctgctctatccggtgattcagacctgggcggtcaatgactcgccgctggaagatcgtcacgcggcgctgacctggtttgtcgtggcctattttgtcgggatatttggttttccggccttcggcggctggctgctggttaacaccggcaaaaccgggtttatctgggcgctggttgccttggccacccttgagcttctcgtggctctggtcaggcgggggcctgcggtcgttgccaccacagagtga

SEQ ID NO: 450531 - DNA, 1206 bp, Serratia marcescens
atggaaaaccagcacaaaccgatatacctggataacaatgccacgaccgcattagatccagacgtcctgcaggcgatgatgccctacctgactcaggtttacggtaacgccgccagcaacagccatagctttggctgggaagcgagccgcgccgttgagcaggccagggtaaagattgccactgctgtcaatgcggccagcccggccgacattattttcacctccggtgcaacagaagcggtcaatctggctcttgcaggcctgcagtctccggatggacaaggacgggggcatatcattacctcgatgatagagcacaaagtcgtcctggactcctgcgcccgactcgccgacggggggacctcggtcacatatctgccgccacagcatgacggtattatttccccggaggcggtgtcccgtgccatcaggccagagacatacctggtctccatcatggcggccaacaatgagacgggcacgctgcaaaaaatcgaggaaattggcgcaatttgccaggagaggggaatactgtttcataccgatgccactcaggcgttcgggaaagtcacttttgacgtacaacgtatgaacatcagtctcgcggccttttctgcccataaaatctacggcccgatgggcgttggcgcactatatatcaacacggccgacccgcgcctgaccctgtccccgctgattgttggcgggggacacgagcgggggctccgctccgggacccttaacgttcccgggattgtcggttttgggcacgccgctgaactggcgacaaaggctctgcctgcagaatcagccagactccgggggatgaaaaacaggctgtaccacgcactgctcagtgctgtgccggacatgcgtgtcaatggtcacctcaccgaatgcctgcccggtgtgcttaacgtttcctttgccggggtggatgccagctcactgctgctcgaactgcccgatattgcattgtctaccggttcagcctgtacatccgcccgtcattcgccgtcacacgtgctccgggctatcgggggcagcgatgagcaaatccagtccagtgtgcgtatcgggctgggcaggtttaacaacgagaatgaagttagctacgttagccaacggctggcagaggccgtaaaaatactgcgggcgatggcacctggcgcgttcagtgtggcagaaaacaaaacgggagtctga

SEQ ID NO: 450532 - DNA, 690 bp, Serratia marcescens
atggaccagcctcactctgacatcagcatactggcaggaaattcccgtgttgacataaatgacaacggcgacattattgtccaggcacagctgcacgcatttgatgccgcactccgtttcacccggcaccgcctggataacggaatgccccggccggcactttctgtcgcattcgaccaccgcgggatatttcgtctccagttcctggatgaaaacctctcaaatgcgcaaaaacgtcgcccgcgcctgagtcagctgcatccctcaatccggcgcatctttcagccggtcgcggaaaaataccggattgccctcagcgatatacaggccattcatgaagattccgcacgacaacatcttgcccacacccttgcccacgaagacatccccgaaaggcttacccgcaggatgctgaccgaaccacccgccacaaacgccggcgaacatcaggaggcatctggacgaaaactcacctgtgcggccatcaccaaagaatattttgagcgggccgccggcgataacaccctgctggaagtgttctttgaagacagcgactggtccgacagcctggcctatgtccgcggactccagctcagccatctgctgggcatgccggcggccatcaggttgaatctggtcaatgacgccggcgaggtccgtcagggagagctgatagtcccccggcgttaa

SEQ ID NO: 450533 - DNA, 792 bp, Serratia marcescens
gtgaggaaaaagaattttactctggccataatgatggtcgtcgaggttatgcaatgccacctagcaagtgccgtagaaaaatcggtagtaacctttactccgacgcaagaggctcggattggagaagtcgctaaggattatctgctggcccatccagaggtaatgagcgaaatcagccagaaacagcaggccctggaggaggagaaacaacaacaaacgatgactactgcagttattcagcatcagacggcactactaaatgataaaggtacgccatcatatggccctgccgatgcaaaagttacggttgtcgagttttttgattaccaatgcatctattgtgctcacttggcgcctgaactggagaaggtgataaaggcaaacccgaacgtacgcttcgtgtttaaagaactcccgatatttggccaacactggccagtatcaatgagcgcagcgaaaaccggtttgcagatttggcagcagaaaggtgcaaaagcttacctcaaatatcacaatattatttacgccaccgggcacaacgagggagcgcttaccgaccaagatatccgcacggccgcaaacgcagtgaagttcaacgactctaaagctaaggatgttcaggaaactctggacggtattactacattggcacagcagctgggtatcaatggtactccggccctgatagttattccttcgtcaggagcaagtattgaaaatgttaaagtaatcctaggattccctcaatcaaatgctttgcaggtagctattgataacgctgcaggaaagtaa

SEQ ID NO: 450534 - DNA, 948 bp, Serratia marcescens
atgaaaaaacacgtgatagcgttgattgttttgggtttggctgcacctgttgccggcctggctgaaaacgtaaaaaacccttattccgtgagttttgaacctgatagcgtcaccgtcagcacctcactgggttggctgggtggtgagtcaaaggaatatgtctatgattctgataccggcaaaaagatgagtgagctcgactggaaaatcaacaatgccgtgattataaaaggtgagatatcttgggctcccctttattggttaaccctgaatgcccgtggctggaccaccctgacttcggctagtgggggcatggatgattatgactgggcgaatgcgggacagacgcactggacggactggtccaacagccctaacagccgtcttaatcacgccaatgaatacgacgttaatgccagggtctggttgataaaacggccggagtataaattgggggccgtcgtcggttaccagcagacgcgctttagctggaccgccttgggcggccactacgaatacgataatggtaacgatgtcaataattttccgcacggtgaacgtctcattggttaccagcaaacctttagcatgccttacatgggactaacaggaggataccgttaccggaacattgaagtgaacgcgttgttgaagttcagcccttgggttgaagctagggataatgacgaacactatgcacgaaacttgaccttcaatgagaaaacccaaggttctcgctattatgccatctcggtggatattggctattacgtaacaccaaacgccaaagtgtttactgagtttacctggagcaaatacgcccaaggaaagggggggacgcagattatcgtccgtaccaatggcaatacccagtatatcggcggtgatgccgcaggtatggaaaaccaaacctctagtctgaccgcgggtcttcagtaccgtttctaa

SEQ ID NO: 450535 - DNA, 834 bp, Serratia marcescens
atgcagactgaacccgaggttttaactgaccatacagaggtgatttgttccaccagcatcgaacgcgtcgtgtctgggcgtaacaccgcactgacgcagattgaaacccttattcaccagcttgaagatatctcggccatcactaacagcatcggtggaggaatagcaagagattgggctatgcgacaagatttccgctgcggttgctggctgatggaaaaagcagaaacggccatgccagtgatcacccgcaatcttgatcgcgatatatggcgggatctgatgaagcgctccggcatgctcagtttgatggatgcccaggcgcgtgaccaatggtacagaaaccttgagggagacaatattcctgccatcagcgaagccaacatactcagtacctttgagcaactgcatcagagcaaagatgaggtattcgagcgaggggtgatcaacgtgttcaagtcgctctcatggaattacaaaaccaacagcccgtgccatttcggcaaaaaggtgatcatcagcaatctggtgagttacaaccaatggggatttaccctgaaccacggttaccggcgtgaccaacttgccgatttggaaagaatgctgcatttactggatggcaagcccattcctgacaaccgtagcgatatctgtacccggttgatggagcatattcgggacaacccggcgaaagaagtttatgaagatgcgttcttcagtattcgttacttccagaagggaaccgcgcatctgatgttcaaacggctggatctggtggagaagatgaacgacatcatcgctaagcattatccaggcatgttgccgacaaaataa

SEQ ID NO: 450536 - DNA, 1044 bp, Serratia marcescens
atgacagacaagcacttaacccaatcaccggcaggtgagtttgtcatgtttgccagcgatgacggcgaagtgcgcgttgaatgtcgttttgagcaagaaacgctgtggctgccccaggcgaccatcgcgaatctttatcaagtgactccccaggcgattacgcagcacatcaaagcgatctacgaagaagcggaacttgaacaaaacgcaacctgtaagtcttacttacaggttcagcaggaagggggccgtcaggtaagtcgcaatatcctgcactatagtctgcccgttattcttgccgtcggttatcgtgttcgttccgctcgcggcacccaatttcgccagtgggcgacccaaacgctccaggaatacctaatcaaaggcttcgtgatggatgacgagcggcttaaaaatccgcccgtaggttcatccgctgtgcctgattactttgatgagatgctagagcgcatccgtgatatccgtgccagtgagcgtcgggtttatttgcgggttagggagatcttcgcattagctgccgactatcagccgtcacttaaagagacaacgttgtttttccaaacaatccaaaacaagctgcattttgcctgcaccggccacaccgctgccgaacttatccatcagcgggctgacgccagccagccccatatgggcttgagcagctataagggtgaagaggtgcgcaaaagcgacgtgacggtggcgaaaaattacctcaatcaagacgaagtcagcgaactcaatcgcgtggtcaacatgtggttagatttcgctgaagatcaggcgcggcgtcgtcaacaggtgttcctgcgtgattggcaggataagctggatcagtttctgcaatttaacgaccgtgacgttctacaaggggctggcacagtcagtaagaaagcggcagatgaaaaagcgcaggctgaatacgtcctgtatgccgagcagcagcgccgcttaaaagaagcggcgggggaacaggatattgccggtttactgcagtggaaaacagacaccaaaaagcgtccataa

SEQ ID NO: 450537 - DNA, 123 bp, Serratia marcescens
atgatgtcgctgcgcagccggttgatccatgacgtgaaattcgggccggcaaacactggcgaagtcaactacgcgaagcagttatcgccgcaggcgaagagcctgacattgtttgaccagtga

SEQ ID NO: 450538 - DNA, 330 bp, Serratia marcescens
ttggttgaactgacacacagtcgggcggacggaagctacaaaaaacagctgacagacttgtcgaaaacccaactgcggatcctggacgactggggtctggcccccctgacggcggttcaccgtaatgatctgctggagataatggacgacagatacggcaaaaatgccacggtaatgataagccaactgccgacggacgaatggtatggcagcgtaggcgaaaatacgctggcagacgcgatcctggacgggttgatgcataacgcccatcgcctggaaacgcaaggtgagtcaatgcgaaaacgactggctcaggttgacacaaaatga

SEQ ID NO: 450539 - DNA, 1029 bp, Serratia marcescens
atgaaaatgaaagcaatagttatgaccggcgccaatcgaccgtgggaggttcaggaaatccccattcctgaggcagagccgggccaggttctggtaaaagttcacgcttcaggaatgtgctacacagatgtatgggccactcagggatatggaggggatatatatccgcaaacaccgggtcacgaagtggtaggcgaaattgttgaagttggcgctggggtgcgtactcgccgggtgggagacagagtgggtacaacctgggtgcaatctgcgtgcggtcgttgttcctattgtcgggaaaaccgcccgctgactggacagactgcgatgaactgtaatgaggcccggaccacaggatttgcgacccagggaggccatgctgagtacatcgctatttcggctgaagggacagtgttgttacctgatgggttagcctatgtagacgccgcgccgatgatgtgcgcgggatataccacctggagcggtctgcgtgatgccgtacctcagccacgagagaaaatagcggttgtggggattggcgggctaggccacatggcattgcagctatccaaagcgtgcggcttcgagaccatcgcggtcacacattcatcagacaagcgggaattagccacccagttcggcgctgatcaggttgttagcaacggcaaagaactgcgggatattggcggtgctgacatcttgctggtcaccaccagccatttcagttcggctgaggaagcgatgagtggattgagagtgaacggtcgggtggtgctctgtgggctcgacttctcgaggccattctcgatctcatccgaaggcgtgccgttccacatgatgcggcagcaagtggtgggttctacacatggtgggcaacactaccttagcgaagtgcttgatcttgcggcggaaggcaaagttaagcccatggtcgagactttctcgctggatcaggcaactaaagcttatgaacgtctggtttccggcaagatgcgcctgcgtggtgtgtttatcccttcacaaaagtga

SEQ ID NO: 450540 - DNA, 339 bp, Serratia marcescens
gtgtccaatcagtattcaatcgttgtggcgccaatggcgcaacagtgcctggaagatattgaatcctataaaagtgggactatcggcaagcaacaggccgccagtttcattgataatctcctgctggattctgtcgatgctatcctccaagatccggaaagataccgctttaacgtatatttatcagatcgtggattgttgttacgtgaaaggcttgatgttgaaggtgaatatcggttgctttacgattttgacggcaccaatatcgagatactactttttgttagtatgaagcaagattttggaaagttgctttaccgttataacatactgaaatga

SEQ ID NO: 450541 - DNA, 270 bp, Serratia marcescens
atgactcagaccatgtcgcagaagctagccagagacagtcttggaaacgcacaaacttttgaaggaggtatgtacgtaacaaaaaacggggtcgcagaacttttcattcagactgcagcagaacgccaggcagagctgagagaaattgagcaggatagaaatataaacgccctttttaagctggccatgctagctaaaaaggaaatcgcagatggcaaaggtatgacccccgaagcggccttagggaggctacgtgccgcaagaaaataa

SEQ ID NO: 450542 - DNA, 351 bp, Serratia marcescens
atgggaagctattcaccagaacgtaaagcggcggtgatcgccagaatgttaccagcacataaccagtcgatttatcagctctcacggcaggaagatatccccgtcaacacccataatatcgctttttacatgaccgacgcctggccggtataccaggcgttactggcctcaaccagccatgttatcagtaaaaagtacacccagtggatatgtaagcatacccgttttagttccacgcactttttgagacttccgtgttttcagctatcagccggtactcttccggcgtcaggttgttcagcgattcgtgaggacgttcgctgttatattccgtcagccagcgctctgtga

SEQ ID NO: 450543 - DNA, 831 bp, Serratia marcescens
atgaggaacaagtttgagcacgattttaatgatttcgagcgatctacggacaagattcattttcaagatctggatgcagcattagcgggggattcgaacaatcgggtagaatttttgaagaaatattggggccgggaaacctatgataaactgatcggtttagtcaaaaaacaaacgaagaagttggagtatgatagcacgaaagtcagcgcattggtggacgattatttgaaaagagagattaagaagattcgccatactgataatcacttgaaaaagctaagaaatagaaagttcaaggatattccaaaggtcgatgctggctacgatgaacaggttaaagatgcggctgattggattattggtgcatcaaatagcaaaaccaaatcccccggttgggatgctgaaatagaaagcttactctacagttatgcaaagtcttcggaacccattaatttgacagagctggagaaaatcaaaaccaaactgaaattggacgctcccgagagggttttgttagctcataacgatgcatcttatggggcatcagccacgggtaagatcctcttggaaaaacatctgggggatgttgagagacttttgctgattaaatcagcgaatggcggggttgaccctaattggcacgctcggcagatgcttggcggtatcatcggcgcacatgcgtttggtgatgcaaacggtcggctgggacgtattgcttatgcggttatattactgagagctaagaacttttcgaagttaccgaaatccgaggaagacgctctccatgggataacgactcgctacaggagggaatcctcgtggaaatga

SEQ ID NO: 450544 - DNA, 1071 bp, Serratia marcescens
atgatgaaacggttcgtcgagaaattcgaggacgatatggactggtctacctacagtcataaggagcagaactggaataccgctgctatgttcatggagctgggattggggttggtttcgctgcctatcggagctgtcgcaggccccttggtcggcgctgggatggcattactctccacggtgccatatctcatccggatggcagtggcagataaccgggaggagtcaaaagaagcgcttgattccctgcttttagggttgttgttcgaggtcattggctcgtcgatcactcccgccttgaataaggtatttgggaagcttgctaagcgaaagtcgcaaaaattgctccaagacatcagtactaaccctcacgcgccagtgatcaagctggaagatctggagaactgggccattgaagttcgaggaaaagtcaaggggagactagatatttccgacgctgacgtggacaaactggtggacagttctggctctggcgcgagaggagtcggtgcgggtagcgtcaacggggaatcgtggttacagaagttgggatatacaagcagtggactttatcaaagaccgaaaaaggttgtttcaaaaggatcagtcggtacggtttacgaaattgatgataattttttgagaaaagactacagcgggatactggatgaatcgcatcacggcagactaacgaaggcgcaaaatactgtcgcggcgatggatagattatatgggccagggtccgccgaggtgcaaatctggaataccaaaaatccactcgaaaaaattgttacggtcaaaatgaagcggattcctggtgaatcgctggattcgctgctgaaaaaaggcgacatacgagttctgaatgaagtgctcatgtggtaccacgaaagtgatcctgtgaatgaactggttacccgtttgagtacaaacggaatcaactataacgacatcaatctggccaacacacttttcgataaaaaactggaaagtttcacgtggtcgacttcgacgatgtttatgtgcagccaaacggggaaatgctgcatcaaggaaagagccaagcgatga

SEQ ID NO: 450545 - DNA, 171 bp, Serratia marcescens
atgaaatcacaatccgcgaaacgctatccccctgaactgcgtgagtgcgctgtcagaatgttgttggaacaccgtgatgagtatatctctgagccggatgccattcgtgccatctcgtcaaaaatcggatgtccttacgacaccctacgagcctggttgcgtcagcactga

SEQ ID NO: 450546 - DNA, 276 bp, Serratia marcescens
atgaaaaacatccaattgttcggtggcatcgtattgatatttacagcagcgctggtgctgattttttctttaacttccgttggccatagcgcacgtatcaccgagccggtatttgtgatgaaagaggggacagtattgttttccctaaatgccagtatgcagcaaaaccgccaacttgacgttcaataccagcatgccagagggttattgcagcaggtcgatggtaagttgcgaaagggcataaaaaacactaacgttggaagttatttttcatga

SEQ ID NO: 450547 - DNA, 285 bp, Serratia marcescens
atgcagttcaacccgatagagtttcatgaaatcaaaaaagacgttaagtcatgggtggaaagtattcggccaccagagaacttaagagcactattggatgttgcttacagaatcgaggggcggagcatcgagatttttatggttcagcaacaatggagggggagggtagtgaaaaaaaaagagttccccagagtcaagataagccatatccacgacaaaaaggaatggtggatttattgcatgcgagtaacgcaaaaatgggcggtaatgcctctaattagttga

SEQ ID NO: 450548 - DNA, 285 bp, Serratia marcescens
atgaaatcacaattcgccaaacgctatccccctgaactgcgtgagcgcgctgtcagaatgttgttggaacaccgtgatgagtatgactctgagccggatgccattcgtgccatctcgtcaaaaatcggatgtcattacgacaccttacgagcctggttgcgtcagcataaaaatgatgtccgtggtggtgtaagccccgtcagcactgaagatggcggactgagcaccaatgaacgccagcgtttaaaagaactggaacgtgagaatcgggagctacgccgttag

SEQ ID NO: 450549 - DNA, 951 bp, Serratia marcescens
atgaaaatgcccctaaaaatcttaaataacgataaagcgacggtgacagatgttcgtgaatttgaccctgatctcaccctacaggcccaatacaagagcgagcgttcagaagaactacaatggatagccaatctccgcaaacaacagctcacctctgccctccgtactcaagggtttccccctaatatccacaaccatgagcaattgcgcagcgccatcagtcggttacatggcgcacaaattctgggcctactcgatgaaaaacttacctttttcatgcaaacaaaggggatgctgacaccgcgtcatattaagattatcaggaggctactcaactccagtgaagtcgctcattttcaaaaagccattaccatggtaactctcaaccccagcagcccggtcaacagccaggctcaacgggccgttgccatagaattggccaagttaccgataaatctactcaatcgagctcatatcgcagggttaaccgttcgggttacccacgataacgtgacaacctataataacgatctggcagggactggggtcagaggatatgacgatggtaattggagcaagctgcaaggcgtgggtgccttcggtaagagtaaagaaactattatcgctatggagcaggacagatcaggtaagtggcgagtgggaactaaacacggctcagccaatctggtgatacatgagttcggtcattccattgatcgcttactaggggccaatagtacgggcatcaatctgagcaagaataatgccttctataccgcctggtacaatgatttccacaagctggatccctattttcaacaggcaggggcaaaaggagattatgaaccggggctggaggaaagctttgctgaagggttggcccgactctatggcaataacaagaccttcactcattggacaaatattgaaaacgagttattggatctctaa

SEQ ID NO: 450550 - DNA, 546 bp, Serratia marcescens
atgtattccatagagtctttgagtaagataaccaaaagccttccagcttatagccagttagatgaagagcatgatgattatatggatgatgagcatgaagacggtcctttacctgcagaactggaaaatgaatacaaaactcttgagtacgattttctctgtaagcaaatcgctaagaggcttaacccagatgaagaatatattttgtataggggaacaagtagtcgtggggttataaatatgcttaataacaattctgcaggcgataaaattgacgttgaaactcctcctccatcgatagcagaggtaaaaaaacaagtaggtaaaggggcgtttttaccagagtttaccacaaacagtagtgtttttgatggcttttcaagaggccactatggtgttgttgttaaaataaaacaacgctatctcactgcaggaagcaggaatgaatcaggatttgtggttaacaagagcgcaccggtaaaaattctgcaagtttatgatagaacctttggacaacccgaagtcttcggacctaacgcttcataa

SEQ ID NO: 450551 - DNA, 234 bp, Serratia marcescens
atgaccgaactggaaacgcagttgctgaacgcgttagagcagttgcagcaggactacgggcagcggctgaaggaatgggagagcgccttcgaggcattgcagcgcatgtacgcacgtacctcagcggagaatcagcagctgaccgggcgtgtggaacggctgagcgagctggtgaacggcttgagcacgcaggtgcagcaatttgcggccctgtacaggcagaacggacgatag

SEQ ID NO: 450552 - DNA, 204 bp, Serratia marcescens
atgacaaaacaggaaagtgcagccctcaacatggcaaaatttatccgcactcagtcgctgttgctgctcgaaaaactcgacatcctcgacctcgacgaagaagcgaccacctgcgaaaaactccatgaggccgccgaagccctctatcgccagcttgagacccgcttcgatgacgaggaatatcagagcgacaagtccgggtaa

SEQ ID NO: 450553 - DNA, 420 bp, Serratia marcescens
gtgacaacacgcccaaactggaaggccgccgtactcatcacatccctgttcaccttggccggatgcaacaccccctcgaccagcgccgaacgccacgccaagcatttcacctatgcttctgatgacgggttcgatccgaatttcaacatgcgcaaacatgagaccgtaaaattatctatcccattctttaaacaattctggctggaagggaaaaatgacagggaaaaaggaatttcaaaagaggatgccaataagcgtgtaatatatttttccagtgatgagttttttaattcatttaaaaactacagtgttttcgccggcaaggaatataacgccgaaaaaacctccccaaaatggcgtaaagccatgtctgacgcggcttcaggggcatacagggatggctatgaaggccgagattga

SEQ ID NO: 450554 - DNA, 1386 bp, Serratia marcescens
atgggtggttttaattatggtggcggcaaaggtgatggtactagctggagtaaagagcgtggtgatggaacgacgcccggcggcggttcgcatggtacaggaggtcgagattctccatctggtggttctaagggaaagagtggcggatgggctgggggcggcccgcttaacgcagctttgattaacgctgcgattgatgaagcgatcaaaaacgggttaccacgtaatactgtcgcggcgacatccacgcctgcttataaggtcatgcgggcagcctttgataatctacctttggataaacagcccgcagcaaaagagcagattaatcaggcttggcagaacgcgcacgatgctatgccggataaggtgacgacgagaagggagactggtggcagcaaaaataaccgcacgataattagcactcatgataatgagtctaaaaagacgcaggcacaggctgtttcccaggttactgctgatatgcaaaatgcattaaatcaacatcaggaagctgaacgccagcgtcaggccgatgcggcgcgaaaggcagaagaggccaggaaggctgaggaagcacgcaaggcagaagaggcccggaaagctgaggaagcacgcaaggcagaagaggcccggaaagctgaggaagcgcgcagggcggaagaggcccggaaagctgaggatgcccgcagggcggaagaggcccggaaagccgaggaagcacgcaaagcgaaagaagctaaggcaaaagcggatgcagaggctaaggcgaaagccgaagaaaaagcaaaagatgagaaagaggcgttaacaaaagccagtgaaatcatcgctgatatgggggataaagtcggtgagcatcttggcgacaaatataaggcggttgcaaaagagattgcggacgacattaaaaactttcagggtaaaacgctccgtagtcatgagcaagccatggcgtcgctgaaaaaaatcctggacaacccgggaatgaaaattaacaaaggcgataaggatgcaattattaatgcctggaagagtttcaacgctgatgatacggcaaaaaaactcgcaaacctcagtaaagcctttgccgttgctggggtggcactgaaaatcgagaaggtacgggaaaagagcatagaggggtatgagaccggaaactgggcgccgttgatgttagaggtggaatcttgggttttgggtgggatagctgccagtgtggcgctggggattttttcagcgacactaggtgccgctttgttagctgctggagttccagcagtgactgtggggattatgggtattattgttgcaggtatcgtggctgcgctgattgacgataaggtagtggacatcattaataatgaggttattaaacctgcccattaa

SEQ ID NO: 450555 - DNA, 528 bp, Serratia marcescens
atgacaggtgtcaaaaatagtaatgtcgaggcaaataaattgctttatcttttcatgtttattggcattatcccgctagtgattatttttggactttatttacataattgtgaatcccaaatactaaataacatagcatccagaacaatcagttttccggcaattatatcggcccgcaatccattaatgacaaaagttatggatgtttattgcaagagcgcgccgatacttgctttacttttgtttgcattatcgataaaaaaacggcaagtagttaaaaccaccaacaaaagcattctaataagatcatgtttacttagtccatttgtttacttattttttatttatatgtttttgtttagaaactttgaattaacaacagctggaagacctgtccggctcatgtccagtaatgatctcacattgctgttattttatacttttctatatcttgccatttttttcttaacttatggaattctttacatcccagtaatcgcttacaagctatttaaagaaaggcggtaa

SEQ ID NO: 450556 - DNA, 171 bp, Serratia marcescens
atggttcagtcaacgaagaaaaagcgcagcaaaaccaaggtgaagcgttatcacccgaaagtgatggagaacctgatgaagcaggcttatgccgaagaccaccggcgggagctgatggccgagctggagcgctcagcattcagtcacctttccgatttcggggaggcctga

SEQ ID NO: 450557 - DNA, 342 bp, Serratia marcescens
gtggcggagaaacgcaccaagatgttgacgctatgggtgacggaagacgagcacagccggctactggcgcggtgtgacggcaaggcgttagcgcggtggatgcgtgaagtgtgtctcgatgagcggccttcccggcgaagcaaactgccgacgctggcgcccgaactgctgcggcaactggcggggatggggaacaacctgaaccagatagcgcggcgggtgaacggcgggcagtggtctccccaggacaaggtgtcagtgatggcggcattgatggccattgacgccgggcttgaacgggtgcgccatgcggcgcgggagaacactgacgatgctggttaa

SEQ ID NO: 450558 - DNA, 528 bp, Serratia marcescens
atgagcagtcttttagacatggcgaaggacaccgagcagagattgaaggcgcaggcgagcgctaccgacgcgatgctgacgcgcgagttcagcgagcacgagcggcgtgtgagcgaggcattgcgctcaagcgagcagacaatcagcgccgccatagccggacatacggaggggatgaacgcagcgttacaggcccacaggaagaacgtgttgcgcctggtcgcgcagcggtggctggcgttcatcgcgttctcggtgctgctgctggcgacgtcgagcggggtgttgtggctgcagggccagatgatagcgtcgcggtgggacgacatcagccggctgaaccgggacatcgcgcagcagcgcgtgacgctgagcacgctgaacgccaagacatggggtgtgacgacgcacgaggacgggaacgggcggtttctggtgctgccgaccggtacgacagcagacaggaaggactggacgctgggcgaagggaagaaagcccggcatgcggtgagactggtgaaggagtaa

SEQ ID NO: 450559 - DNA, 405 bp, Serratia marcescens
atgaaatcacaatccgtcaaacgctatccccctgaactgcgtgagcgcgcagtcagaatgttgttggaacaccgtgatgagtatgtctctgagcaggatgccattcgtgccatctcgtcaaaaatcgggtgccattacgacaccctacgagcctggttgcgccagtataaaaatgatgtccgtggtggtgtcagccccgtcagcactgaagatggcggactgagcaccaatgagcgccagcgtttaaaagaactggaacgtgagaatcgggagctacgccgcagcagtgataggggttctacgccggaaccgccgaaatttccgttaccccagtttcagcccggcaaccagcgcatccaggtcaataatctcattgctgctctggaaggtataatgcccgggtaa

SEQ ID NO: 450560 - DNA, 501 bp, Serratia marcescens
atgaaccgtaatgccgtattttggcgggtggtcagcggtgaactgccgctgcccccggcagcaaaaacgctcgggtggcagtttgttcgttatgatgagagttcaggagagattcatgtggcatatacagctgaagcagcactgacgaacccacttgggaatgttcagggagggattctttcagccatgttggatgattgtatgggcccggcgatttatgccactcttccgccgaataaaatagcggtaaccgtggaaacaaaaacacttttcattcggcctgcgtctcccggaaaaatcttaggcacaggaaaaattgaacatataaaggggaatctctgcttcacgtcgggacagctcagtgatactagcggtcgagttctggcgacagcgaccgctattttccgtataggtaaacttcgctggaatggtcttaccatcccgtcaaccgtggctaatggcatgatgaagtggaaactgcggcaatacaaaaaagagtaa

SEQ ID NO: 450561 - DNA, 972 bp, Serratia marcescens
atgctaaccgaagtcatgcattactacggcctgcagtgtgaaccgattgaagccgggtatttcgagaccgaccaccatgagcaaattcaccgggatctcaaagcagccatccaaaatggccggcggatagcccttacagcggtgatcggctcgggaaaaaacctgctcatgcgacggctgcgtgaaacgctggaaaaggagagcaaggtcatggttgcccgttctctcagtctggacaagacaaaactcaccgcatcgctgtttgatgcagcattgttctacgatctctctaccgagaaaacggtcaagatccctggtgattcagaggaacgggcgcgtgagctacaggtattatttcgtaaggcaaggaaaccggtgaccttgtttattgatggtgcccacgatttgcacccaaagaccctgacctcacttaaacgcctgtttgagttggctaccgattggaagggcaagatttctatcgtcctggttggccatcccaagctcaaaaacgatttacgtcgtcccagtatggaagaagtcggcgatcgcaccactgtgttcgagtttgggggcctccgggacaaacagcgagattatatcgactgggtactacgagaattgcttggcgaagggagcgacatcagtgatgtcattaccgatgaaaccacgacagtattggcggtccggctaaaaaaacctcttcagataggacgccatctcgttcgggctttcgagactggctttgatatgggtgtaaagtccattgatgccagtattgttgaagcagtcctgtcacgacggattgatgatcttgagccgaagctaacacgtcatggatacgatatccgtgcactttgcacgcaatttgatgctaaaccttcggaaatccgtcagttgatgcgtggcacattaaccccacagcgcgctcacgaattggtcgaggagatgcgtgcggccgggcttccattgtga

SEQ ID NO: 450562 - DNA, 231 bp, Serratia marcescens
atggcctcccggccttttgtgggccccgatccgttttgtgaactggcgtatccgagcaaattcgccgcacgtcaggccattgccgatgagctgcgtctgtcactgataaaactcaagacagaagatcagacattcattgggcagctgctggatgaaaccctgtccagacccgcgattattgcggcaattcgcgcccgctttcctgcggggcgaaaaggagggattggctaa

SEQ ID NO: 450563 - DNA, 864 bp, Serratia marcescens
gtgctgctaatcggttacgccagggtatcaaaatccgacggggtccaaacggtcgttccacagcgcgatgcattactcgctgccggcattgctccggaacgtatttatgaagatatcgcttccgggcgcaatgtgagctaccaggagtatcgctgtgtctatggtgaagacgcagagtcggcactgcggttcctgtttaatgccatgagtgaaaaaacagaactgggtattatcttgcaaggcataccggaagcccttcagctcgacaatggtccggtggagaaatcggcggaattcaaacgtgtcatggatttccttggcgtgatggtgatttttcataaaccccggaggacggatggcagacgcacaacggccagaagccaaggcaaggttgagcgaccgtttcgtaccgtaaaggaagcccacgaaacactttaccatttccacaagccagcaactgaagccgaggccaatcgttggctggcaaattatattgcgacctataacgccagggagcatcgtcacgaacctcacggccgtctcgaggactggcaatccaggcaaccaagcagtggcctgcacttgatgtgttcctgggagcgtttttgttcattcgcgcgggaacctgaatgtcgcactgtaggcattgactgtcaactgaccgtggctggcgtcacctacgagcttgatgccagcgggctggtgaaaccatggtggtctggtggggacttttcgaccaggagttatttgccgagcgggatggggagcagtttggccccttcctgccggtcggcggccctattctcctccatcgatatcgtaaacaccgcaaaagttgtcgggaataccgggttgaccaggtga

SEQ ID NO: 450564 - DNA, 462 bp, Serratia marcescens
atgctggacaagaaagataaggagctactcaggttgttacagggcgactgtaccctgtgtctgcaagatctggcagcggctgtcgatttaacgcctaatccttgctggaagcgcataaaacgtcttgaagatgaggggatcatcattggtcgggttgccctgttgagtaaggacaagcttaacttgtcgcttacagcctttgtgatgataaaaacacaaaaccacagccatgactggtataaacattttgtttcgcagatcaatagcatgccagaagtgatgactttttttcgcaccacaggagaatatgattatcttcttcaggtagtggtttcagatatgaagggttacgatagtttttacaaaaagctggtaagttcagtcaatgggttgagtgatgtaacatccagtttttccatggaggaaataaaatacacaactcaacttccattaccaggttaa

SEQ ID NO: 450565 - DNA, 948 bp, Serratia marcescens
atgcacagagtgacgatattggtattattcctgctggttgcactgacctgggggactacatggctggctatgcggatagccgctgaaactatcccccctgtgtttgcaactgggatgagatttatgtttgcggcaccattcttaatcagcattgcatggttaagaaaaataccgattttatttccacccggccaacgtttatttcaatttttaatttgtattttttattttgccattcctttctcattaatgatttatggtgaaacctatgttagctccggacttgcatccattatatttgcgaatatgcctgtggctgttttgatagcttcagtttggtttttgaatgaaaaaacgaactcaatgcagattgtgggtttaactatcgcaatagttgcactggcgggcattcttttcgaggaaacgaaaacaagtacagagagccactggcagggagtcattgcgcttgtttctgctgtaatcatccatgcaataatatatactcaatgcaagaaaagaagctgtactgtctctgttataacgtttaatgcgctcccgtgctttctggcgggattgatactttctgcggcaggatggttcttcgaaagaccacaggtgtcagccttttcagcacactcaatattagccaccttgtatctcggtgcttttgccggagtttttggaatattgtgctactttgcacttcagcaaaaatccagtgcctttcaggcttcacttgttttcctgattttccccctgattgcggtaagcttggaaaactatatatatggatatgcgatttcaactcaatcaatgctgtttattataccgttagtttccgggatatttcttactcttttctcacgacaagtgcctgcaaccaacatacatcgggatagttcaccacaaaaaaataattgtatttctgagtatactgagacttcctga

SEQ ID NO: 450566 - DNA, 690 bp, Serratia marcescens
atggaatatgagccacaggatttttttgaaggccgtcaactggacatcgcacagctgatttatgatggcgatgaagtgaaactgaaagagaaacttccctctgtcagcaaggaagaactgaaccgacaggttaaggcggacatgaccctgctgttttggtcggtgttgaactcaatctacgataaaaacacgccggaaaggctgaaaataataaccgacctggtaaaagctggcgcagacccgctgcaacccagaccagaagggggaagcagcccagcggagttcgtcatgaaagccgacaaggggatttgggtcaaagccatgctcgacggcggtttaccgccaaacgcaaaagataaggtattcaatgaacccattgtattccaaacaatcaaatccaaaaacactgaaacgttaaaggtgatgctggattacggagcggacattaatatcagagattccttgcaacaaaccttattaatggatgctttttttagctcagcctttgaacacatggccctactgctcaatcggggtgcgaatcctaatccggtaaatataaataatctttcgctgttaacagcagtaaaccggcaaataaaagacagccaagatggctcagaatacaatgaacagtgtaagaaaatactcgagctcatgcttttgaaaggggcaaaggaagcgcagtaa

SEQ ID NO: 450567 - DNA, 318 bp, Serratia marcescens
atggccggggtgctgcgggcaagccccccagacggcgggatgggtgaccatgtagcggtaaaccacgttatcatgaccggccaggtggtagcggttgttcatctcctgcagccatccttgcgccagcaggattttcagggcgtcagccatatccgcgggattcatgcggcggtgggcaacggggcttatctccagctgatgcaggttatccagcagggcggattttgccaaatcgtcatgcagggcgagctggcagaggatggcggtgagatggacgggcagatgcgcaatcccggcctccgcgttgtcagcgcatga

SEQ ID NO: 450568 - DNA, 3468 bp, Serratia marcescens
gtggctttcaaaggcacggatgcgcatattacgcataatggtagtgctgaaagtaatggaaataaccaaacaaaaattgataaacgctcagctaatcatgctacggcaggaggaagtggttcgactgagtctgaggcatcttctcctaacagggtgttaaaacgaccgaaaaggcacccacttgctctttctaaatccagggcccgctatgaacaggggcatgccttcagttttgacccacagtttatggggaaaacgatagaatttacggttccccgcaaaggggggaagactgatatatatacctatacgatgggtaaaggcgaccccaagcaggtagtgcacgacatgggcgtttggatcaacaataccattgatgggttaaagtttggaaagcttattggcccctgggggccaataagcccggaggccagtcacagcagtaattatttctggcaaataatagaatccgacataatagattatcattataaatatgttgtcgaaaaggaaggtgaaaatagtaaagggacaagcaagggcgagaatacattggcaatgattaacaagcctatttcaaagggaaatgaagtgaggaatgttcaacgaaacaataattatttgtcttctaatgccccccttccatctatttatgatgcgtcagataaaaaaacttcagatgaatcatacataaatctttcagagggggaaaagaaaatcacttatctgcatgccataaatgacaccctagataaaatcggaagagatagttcaatccccctccatgctcgtcaaaatgcgcatagagcaaaaattggaatgccaattgttaccccggttgatatagatggatttaaaatggctaatactttctttatacctgacaccactggttcgaagaggggggttcttgttaatttgaatgctaaaaaaaaatcttatatatatattcgtgggccaagtgatttccctatggatctggcttctaattttagcaataataatatagaagtggatggtggcctcggtgtgggctttgaacgtaatgatctagatgagagtggggtcttatggggcgtaacaagaagtacagataaagatttcgaggatgggttcaacaaagaaaacaataaaccaatgagtatttacgacctttcagagaatcttgctgatagtgtcaaagcaaaatacgttaatcaacccaacattaatcacaataagtatgttgtggaaaaagcaatctccggtactaaaataccaaccccaggtatcagtgtttctccagcaacttactcattgaggtataaatgggcgtcgctgagggtttcccaatacctgagatctgttgtaaatccgttttcaacattgggaggacaagtgcagctagtggtgagcagcataaataatgactccatacaagacactgatgagacaataaagaaggcggaatatatcgggtcatgggttgatgctactacgggaacggttatttccttcagccccgccggtattgtcctcaatgtagtgcaatccgcagctgggatcacagccgatttggcagaaagcaaaactccagacccattagatacggcaggtttggttatgagttgcattcccggtggcaaaatttcagctcgtattggaaaatttagcaaggttggggaaaaaggagtgaaatacttcttgctaattgcagaaaaaacacttgatctagctgaattgagcagaagcattaagacagccgtagacacgggtgaaccacttgctatttaccaagcatttttggccagtggtatgagcgttaaaaatgcatatgatatggcaaagaacatgtcatccgagctaaaactcggtgaaatggcatcgttggagaagcttgaggctatccacaataataccccagagtcttctctaacttcaacaatgcaagcgcgcacattcagaatgggctcgacagaaatgctcggcagaataaataatgcagaaattgaaatttcaatggataaaggagctacctgggtgaaggggagtaaacttcatttgttaacgtacaggctacaaaatgccggtggggggctgaaatttcccagttggggtactggagaaatcgttattggcgagcatacgtttaaacgtgtcacgtatagtaaagataagatgcatgaaatgaggaagatctctacttcgtatgacacgacaataaatgtaagagtcgaacaggattacaggaaaggaaaggaaatgagccatgctactcagtatgatcattataatagcttatctcttgatgaaaaacttgatttgtttaataaccagagtacgaatgcgctaactaggggggttttagccggaaaaataaatgaatccattttaaaaataaatgcatatgaagtagcgaagggcgctgactcctggagaacgtctgcaaataaagcaacgaaagttgtccttgcaccacaaaatattttcttaaaaggaaggcaaggggaatgtctaccagtatgcgtactaatggggtgggccttacagagtgggcaagatgcaaaattagtgaagaaattaatgaatattccttcttcagccagtatttctgataatcctttgtataagtccctcgtcgaattacatgcaaatggtaattcatctaaatttgctgcaagagcaatctctgatgttaagatgagtgcgctaagtgatgcagagtcaaggctgttcccaacagaaaattcttcggtcagggttgatatacctgcacatactatgttgatatcgaaagtgaccaaaggaggtaaagtaaagtatgtcttctatgatcctaactatggcttagcttacttcgataaatataaagatatgtgtgcattctttaagaagaagcttgaagatgattaccaggcagaaaactatactacattttctcatttagattattcacgtcttcctgatgttaaaatactaggaaaggaccttaatgaaattataagcgataccgaacagcctgattctggctcaaaacagctaaatgctccggcttccgggcatgtacaacccccctcagcgccagcgagtagcatagctcgcacaggagttgccgatcaacctcataccgattcaatacaggcaggtggttcgggtaaggtgaaccagatcttccagcgtccttcggacactaaaaggactgaacctgttaaggaggaacagcaacaatctaacccaaaaccagtacagccccgtaatgatgtacagtattcctacagtactaaacggggacagtcttattatgatgtattggattattatacgaaacaaagccgttacgcagataagcagaaattctactcgctaaataaacataacattcctaaaaacatgccagatcctgataatcaggcccttccagaggggaccatattccaaatccctcccttgttgccccagccgaaaatagccaaagatgacgatgaatga

SEQ ID NO: 450569 - DNA, 270 bp, Serratia marcescens
atggtggcctacacgctgctgtgtaaccacatccccatcaacggttatctgattggcacgaacgactatgaagcccaccatgtctttgatatctggtaccgcaatacctcagaggtgaaacccacggccatcaccggcgacatgcacagcatcaacaaagccaactttgcaatcctgcactggtttggccagcgctttgaacctcattttacagacctgaaccggcagttgcaggaagctgtactgcatcagagatccgtcggcctataa

SEQ ID NO: 450570 - DNA, 1047 bp, Serratia marcescens
atgccgcgggaggcgctgaaaaccaccgcacagcgcatgagtgtaaagcccgtcagtaaactggcgctgcagtggcaggacgtggacggtatgacggcattaatccgacgtcacctgcgaccattatttttgacactcgacctcaccagcgtggtccacgacagcccgtgggctgacgggctgagctggctcagaatggtgttcagcaaaaagcagacgctttcacagcggtctctggcggaatgcccgccaggtacattaccggagcggctgcgcccggacctgctggagttcggcgaggatggcgagcccacaggcctgaacaccgggcgctatgagttctggctgtaccgccagataagaaagcgttttcaggcgggtgaattccacctcaatgacagtctccgtcaccgccatctttctgatgaactggtaccggaaggggaacaggccgctgtgctggctgaaatgaatatcccgtttttgcaaacgccggttaaatcacagctaaaggcgctggagtccgaactgcaccggcagtggaaagctttcaaccgcgagcttaaacaggggaagctgaaacatctggaatacgataaagaaacgcagaaactgacctggcataaatccgtggtcagccgccataaagcacaggagaagcgattttatgagcagttgccattctgcgatgtgaccgacgtcttccggtttgttaacaggcagtgccggtttcttcatgccatgaagccgctgcaaccccgctatgccaaaaagaatgccgatgcagacagcctgatggcggtcatcgttgcccaggcgatgaatcacggtaatcatgtgatggcacgaaccagcgatagtccgttccatgtgctggaaaccacatacgaacagtacctccgcctggcgtcactggtcacggccaatgactgcatcaccgacgccatagaggcactgccgattttcccgcactattcgtttgatccggaaacgctttatggtgccgttgacgggcagaagtttggcattgagcggccgacagtatag

SEQ ID NO: 450571 - DNA, 282 bp, Serratia marcescens
atgcgtataccagaaaacattattttctcggctctgcaaaaaggtgggtgtattaaaagtttttaccggcgatcggcgcgaagccctcgacaggaaaaatcagtgctggccgatggctacatactggaatcattaggtgatggggacgaagtcattctgagccatgccgattttttgtcagtgaaaacgaaactggcagaaacagagacctgggagcaggcggtggggagcatacttttcggtggcagcacctggatattacgttccgatgtggatgattaa

SEQ ID NO: 450572 - DNA, 2562 bp, Serratia marcescens
atgaaagagtctgtagacaaggacttttccacccatactccgatgatgcagcagtacctgcgcctcaaggcccagcatcctgaaatcctgctgttctaccgcatgggcgacttctacgagctgttttacgatgacgccaagcgcgcttcccaactgctggatatctcgctgaccaaacgcggcgcctcggcgggtgaaccgatcccgatggccggcgtgccgcaccacgcggtggagaactacctggccaagctggtgcagcttggcgagtccgtcgccatctgtgagcagatcggcgatccggccaccagcaaagggccggtcgagcgcaaagtggtgcgtatcgtcacccccggcaccatcaccgacgaagcgctgctgcaagaacgccaggacaacctgctggcggcgatctggcaggatgcgcgcggcttcggttatgccacgctggacgtcagctccggccgcttccgcgtcgccgagccgcaggatttggaaaccatggctgccgagctgcagcgcaccaatccagccgagctgctctacccggaaaccttcgaacacatggcgctgatcgaacagcgccacggcctgcgccgccgcccgctgtgggaattcgaactggagaccgcacgccagcagctcaacctgcagttcggcacccgcgacttgaccggtttcggcgtcgagcaggcgcatcaggcgctgcgcgccgccggctgcctgctgcaatacgtcaaagatacccagcgtacttcgctgccgcatattcgcggcatcactatggagcgccagcaggacggcatcatcatggacgccgcgacccgccgcaacctggagctgacgcagagcctgtccggcggcagcgacaacacgctggcggcgatcctcgatcgcacagtcacgccgatgggcagccgcatgctgaaacgctggctgcacatgccgacccgagacatcaaggtgctgaccgcccgccagcaggcgatcggcgcattgcaggaactgttcgccgatctgcagccttcgctgcgtcaggtgggcgatcaggagcgaattttggcgcgcctggcgctgcgtaccgcgcgtccgcgcgatctggcgcgcatgcgtcatgctttccagcaattgccggacatccgcgcgctgctgcaagacgtggacaccccgcacgtgcagcagctgctggcgcaggtgggccagtttgacgagctgcgcgagctgctggagcgcgcggtgattgaatcgccgccggtattggtgcgcgacggcggcgtgatcgcccccggttacaacagcgagctggacgagtggcgcgcactggccgatggcgccagcgactacctcgaccggctggagatccgcgagcgtgaaaagctggggctggatacgctcaaggtcggttttaacggcgtacatggctactacattcaggtgagccgcggccaaagccatctggtgccgatccactatgtgcgccgccagacgttgaaaaacgccgagcgctacatcatcccggaattgaaagagtacgaagacaaagtgctcacctccaagggcaaggcgttggcgatcgagaaaagcctgtacgacgaactgttcgatctgctgctgccgcacctggcggagctgcagcagagcgccgccgcactggccgagctggacgtgctggccaacctggccgagcgcgccgataccctgaactacgcttgcccgaccatgagtgagcagccggggatccgcattaccgaaggccgccacccggtggtggagcaggtgctgagcgaaccgtttatctccaacccgctcaccctgtcgccgcagcgccgcatgctgatcattaccggcccgaacatgggcggtaaaagcacctatatgcgacaaacggcgctgatcgtgctgatggcacacatcggcagttacgtgccggccaccaaggccaccatcggcccggtggatcgcatcttcacccgcgtcggcgcggcggacgatctggcttccggccgctccaccttcatggtggagatgaccgaaaccgccaacatcctgcacaacgccaccgagcacagcctggtattgatggatgaaatcggccgcggcacctccacctacgacggcctgtcgctggcctgggcctgcgccgagaacctggctaaccgcatcaaggcgatgacgctgttcgccacacactacttcgaactgacgacgctgccggagaaaatggaaggcgtggtcaacgtgcatctggacgcgctcgaacatggcgacaccatcgcttttatgcacagcgtacaggacggggctgccagcaaaagctatggcctggcggtcgccgcgcttgccggcgtgccgcgcgacgtcatcaagcgcgcccgtcagaagctgcgcgagctggagtctatctccagccacaccgcgtcgggcagcgtcgatgccacccagatgacgctgttgcaggaagagacctcgccggcggttgaagccctggaagcgctggatccggattccctgtcgccgcgccaggcgctggaatggatctaccggctgaaaaatatggtgtag

SEQ ID NO: 450573 - DNA, 351 bp, Serratia marcescens
atggccaagggtaacgtcgcttttatttattcatcaaccgcaaaaatgacgatgcaaaccatcgcccattttctgcgatctcgccaggtggatcccaaaccggtgatcgtgaatgtgctggatgaatttgaagaaaaaacgggcctcttccccgaaggaagccccgtctgtcaggaactcctggaattggggtgcgccaaatactgggaatgcaacacagccaacggttatcgtgtcctgtacagtacgcgacagaatgaaaaagacggcgtgatttatgtgcatgccgtcttatcccaaaaccaacatattgccagcctgttgttcaatcgaattttggaatggcagtaa

SEQ ID NO: 450574 - DNA, 1008 bp, Serratia marcescens
atgtgtaagctggttataaaaatgaccaacacctgtaacttacgctgcactcattgttttcagtggcgtgaaaatggcggttttcatcatgaacaagatcccactgctattccgttcgaaaaatgccagcatttgtttgatttcgtagctcgtaacaaaccagatattatcttgacaggtggtgaagcaaccctgcaccgtgattttgataagtttgtggaaacctttgccgagatgggatgctttatccatatttgtaccaatggtctcaacatccggaagtattataatttattcaaacgatggcataaacaattggcttttcttatatcacttgatggaacaggtgatatacatgacagtgtccgcgggaaaggaacctggcgtaaaaccatggctgccatcgagttgctggctgaaggaaaactccatggaatgcagtggattatcggcgttgaaaataccctaatgccctccaatctggacaatgcaattgagttaaaagcagtttgcgaggcagctggcgtagactggattatctacaatcacttgtggattgtagacctgatggctcgccaggaatatattaagttttgtcagcagtgggccactacaccgtcctcttttaccgggtttgatactggtccgttttctgatagttatattgagaaagttaactgtacgattgatgaattaaagcgcagcgataagcagattcccgtcttatttggccctgactattcgccggaagaagtgtttcagtggtatcgcactgaaacaccggcactgccttcttatctcaaaatgggttgcaagcttgatattgatattggtggtgagttggtgatgacgaaacaatttcctgatttaggctttggtagtgtattggagcgaccaattgaggagatattagcatcggagaaataccaggcagtggcaagtaaattaaggagtacttcgttacgcattcttaatgcttgtccagatacccataatttacgagtgtag

SEQ ID NO: 450575 - DNA, 249 bp, Serratia marcescens
atgactcaatctacagaccataaaatcgccagaaattgttaccctgataaattccgtgagcatgccctggcactggccctgcggatcggcgttgccaaagccgccagggagctgagtttgcatgagtatcagctctacgcctggcttacaaaacagcagcaagcattgacaaactccgagcgggaacaacagcaactcattgaaattgcaaactcaaacgccagttggctgaacaggtcgaggtgttag

SEQ ID NO: 450576 - DNA, 273 bp, Serratia marcescens
atgttcatcagagcttatttgagggcatcgacggaagatcagttcgccgatcgggcaaaagagatgctggagcagttcgtccaggaacgggggcataaaatcgccagctactaccgggaaaatatcagtggtacaaaacttgatcgcccggagctgggacgcttactgatggacagtcaccacaatgatatcttactggtcgagcagatagaccgcctgacacgtctcagcaacagcgactggatgacgctgaaagcagatagaacaacatga

SEQ ID NO: 450577 - DNA, 642 bp, Serratia marcescens
atgttcatcagagcttatttgagagcatcgacggaagatcagttcgccgatcgggcaaaagagatgctggagcagttcattcaggagcgggggcataaaatcgccagttactaccgggagaacatcagcggtacaaaacttgaccgcccggaactggggcgcttactgatggacagtcatcgcaatgatattttactggtcgaacagatagaccgtctgacccgtctgagcaacagcgactggatgacgctgaaaaagcagatcgagcaccacgagctgcggattgtcagcctggacgtccccacatcgtggcaggcgctgtcagataaagactcatcgcaggccgatccgattacccgcgccgtgataaccgccatcaataatatgcttatcgacctgatggccgcaatgtcgcataaggactggctgagtcgtcgccagcggcaaaaacagggaattgaacgggcgcatacgctgggaaaatacaggggtaagcaggccgatcaggaacgacatctgaaagttctgtactaccgccagattaagaaactcagtatccgggaaacagcagatgccacggggtacagctcctcacagatatgtcgaattcaggcattgtacaggcaatcagaagtggagtga

SEQ ID NO: 450578 - DNA, 1143 bp, Serratia marcescens
atgaataaaaaagctctcccgtcgttcattaaaaaaagaataaaagaaaaatatcaggatcgatttattaatgagtggggtggtgttcatatattgagtcctaaaccatctgcggatgatgatattctactatgtagcaatgactatctttgtttgcgtagagatagtaatttattttttaaaaacgataggatttttgatgatatgctcatgtcgtcagtttttctggggaatgatagtattcaatccagacttgaaaaacaattcgcttgcttttttaacttcgaaaatagtattatatgccagtctggctggatggccaacgcagggctgattcagtcaatagcaaatgaacaaacaccagtatatattgatttttttgctcacatgtcatttcatgatggcatccgtttggcaaatgcaaagccttatgtttttgagcataacaatgcaaatagtgcaaaacgaaaaatactcagatatggacctgggattataattgttgactcagtatacagtacaaatgggagtttatgtcctctctctgattttgcgattttagctaaggagtatggctgtgtccttgttgtggatgagtctcactcagctggcacacacggccatgaggggtgcggtctcgttagtgcgttggatttaacagaaaatgtagattttattactgtaagtcttgcaaaagcgtttgctggaagagcagggttgatagtatgtaatactgagtttaaagattattttttgacggaatcacacccagctatatttagctctgctgtaatgaataaagatcttcaatggttctctgatgtaataccttttattatatcttctaatgaaagaaggaagcgactccatttgaatgcaaaatatgtcagggaagaactaaaaaatgccgggtataatgtttcaggaggaaccgaacaaataatttctgtggaaattggttttgagaaagatgtgcaaatcttacagagtaaactctacgataaaggcattgtaggctccgtattctgttacccagccactgcaaaaaacagagctttgatcaggttaacgattaactcagttttatctaatattgatttatcaagaatagttaatgggtttaaagatattacacatcagtaa

SEQ ID NO: 450579 - DNA, 2649 bp, Serratia marcescens
atgccaactgtcaaaggtaaatatgcaaagttcattgataatttcgaccgtactaaattgcaggaagacctggaaaaggaaactgatgattatttcactgaagaggtcaaagaagagcgttctggtttgttaagtaacacagtagcagcaagagttattcgttatttggacagaagtggtgagggcggtgaattctatcagtgtgtaagtgatttttacgagaacaagacgccggctaaagaactttatattagcggggcgaaagttccagggttcttttgctttaccgttggggagggggaaaatgccaaaacgctggtgttaaatatttacaatgataaatcatttgtattcagaactgaagtaatgggtagggaaattccatttgtatggaatattgaaagaaaattaatggtggcgcaaaccatgaggttttcatatgactggcctgcgttcaacgaaaccgttatgtatgctttgccgctctttgaaaggttcaggtatgcaaaaaaagacaatccgttcaaatacgatgaaaaaaaaggctataatccaatctcatttcaggatggcccttatcgtaataaattagcttcaacgataacagatgatatacaggagagaacaaaaaataattatgatacttacatctacaccaacaaagaaagaatagtcgatgtgtcctttgatctgttcaggaaatatgctgatcttatgtcaataacggccagtgcgggcgttcttacagttcctggggcaaccatgaaagcgctattaatcttagttacattggggatagatgttgcgagcgtcggggctatttctacacaggcatatatggctgatagacccgataaacaggatgcaatgatgaaggaagctattttggaaactgtatttatcgggtcgggtattgtcggtgatactgcaaaagctgcagtggccagctataaactattaaaacctatagtattacgtggcataaaatcgctggataaggtggataacctcaagtctgcaaaacaactttcgcttggcgatgcgggaagtgccacaaactcgaaagccagcacaacgggctcttcatctcttgacgaagcaggagatgcctcagcttttaataagggggatgcgtcgacaggaacagaccgttctactggtgaaattgtagtacctcaaagacaggaaaagcctgcttcttcgcatgggcgttcaacttcaagtgaggatattgatgtattcgccagacctgggccctctacgagttctgctgtgtcctctccctctttcccgtcaacactagaacaaactgaacggattagtaacagtttagatgtgactgtaagacgttatgaaaaagttgctcttattgcccctgctgaatcaaacgcaacgactcttatggttaatgcacatggcggatattatggcaaaaatcgcaacccactaaactttatttacgacattgcgaatggatttaagagatcaccggctatccgtattcctgataataaaaccgttagttttatggcgccacatggtaaaaccacagtcagtccaagaggcaatgaattagcaatagctatggaggcaaaaccttatgcgagcataaataacaaaggcgtaaaaatacacaataatatgagtgaccaaacagtaaatcccgctggatcacaaagttcatctaaagcggcgacggggctgtccgctgatgaaaatataactggcacaatggtcagaaacactgaacacacggagtttataaataagtataacagagcacgtacaccggaagcggcaagagctctggatatgaaaaggaataaactaagtgtagctcaggtctttataaacgcacaaaaaaaaggggatgtaacacgtgctgcagacatgttaacgattaatcccggtgcgaaggttgatcttgaaactatattaaggatgttaaatgaagatccttatcttaataaatataatgaggtggttatgctcacctgtaggaataaaatcaacacgttttccacacctaaaacacaccattataaaggaacggaaccatctaacgctaagcaagctatgaaaaatacccctacctatgagaataaaatggtcgtggtgcgtatggtgtttattagaaatgccacaactggcgctttagaacttaaagaaattaaagaacttgatgaggtaactacgttagatacagagtttgatgagaaactatcgttagaaagtcaatcagattcgagccctgatgaagcttcaaatatgttgaaagaatttacagatagtagtgctgcagaatattttgatgacatcaaaattgaaatgaaatctcgtgttgcttctggagtaaaaagtttgcaagcgatgaagaacgttatgattaaaaatgggtatactaatttaaggtcacgtttgatacaaatttcatacacatccaaaaaaataacgagttattatgcggttgttggtacaaaaaacggacaggatttcgtcatagatgggctggcagaaagaagtggtttatatggaatagaagatatgaatactcctttgtttttatctgaaaataagtggaagaatgaatatgacgctaagttaaacggtaaagctagttataagtttactgatacaaaattggtgtga

SEQ ID NO: 450580 - DNA, 237 bp, Serratia marcescens
atgttaaatatcgtatcattctcatttagagacataaacacacgcggtggtgaagacgaagatacattagtatgtgatgtgtattttcaagatgaaatactatggcatcgcgtagtaataggtactaagttctggaaggacttacgagcactttgtaaagaatataacttaggtcacatgtttggaaaaatggacttagcaacattgaaaatactattgagtagtaacgcagattaa

SEQ ID NO: 450581 - DNA, 153 bp, Serratia marcescens
atgaaagagaaaaaagaaaaaactgtatgcctccgcgtcactgagacacaagaaggaattctaaacgcagtgatagccgcaggacttgctaagaacacaagccaggcgattcaatacctaatcaacctatacggcataaaaggaagtatgtaa

SEQ ID NO: 450582 - DNA, 612 bp, Serratia marcescens
atgatggaagcaaggtcaggcataaaagctccaaagaaaatcatccaggaagcaattgaggcgctgctcagtttctatggcaccatcaccattgacgaatttgtctatgaactcggtaagctaaacattacagccaaagcgaacattgcttccacgggtaaaatgaatggtttctcatttgattatgcaggaatcgccttcaaagcatctcagttgggtaaagcctattcttggtcgattctgagccagaaggttactctcaccgctactgtcgagcctcatgtgattgatgatgcagggttgccagatgaggaattagaagtaatggaaagcttggtgaacatccactaccagcttacaacccatccccctgctatcccatatacggaggagatggatacagaacaaaacgacaaggttcgttggctactttgggttccctatctgaagcaaattatccaagccttaaaagcaactggtttgaaccttcttaaaccatcaatcaaaatgaagcccttccacttcgtttctcacaaccaaaacagtggcaaaacaaatccgcttactgaccatactaaaatcgacattggcaacaaaaaaccctctatttaa

SEQ ID NO: 450583 - DNA, 798 bp, Serratia marcescens
atgtggcatgataacgaaacaacagtcgattatttgaattttggtgttgttgctgatgcatgtgcaagtttgctgaagcaggctaatggggaacctatttctataggagtgtcaggtggctggggagcaggtaaatcttctctggtgaaaatgattgcatcacgcttggagagcccttcatcagaagagttgcgggggcaagaaaacaatcaagaaaagcattcatttgtcgtacttacttttaatccatggctataccaagattttgagtccgccaggagtgcattgttacaaatagtgggtgacgagattgttcggcttacagatgaaaataaaactatccccgacaaagtatctgaactatggcgaaggataaatcttctccgagtcgctcaattaagtggcgaagccgcattgactttaactactggcattcctattggttctcttggaaaaacggtctgtaaattggctggttggtttacgtcggatgacaaattgagcaatgaatcatcagatacagatagtctagagctaagtaccagcggccttctaaaaccgagtgagcctttctcgatgccagcccatattcaggcattcagggatactttagagagtattctcgaagagctgaaaattacgttagtaatatttgtggatgatttagacagatgtttgccacaaacagcaatttcaacacttgaatcaattcgtttgttgctatttattcgccgtagcgctttcgttattgccgcagataatgacttcataaaagctgcgggtaatgcatccaattag

SEQ ID NO: 450584 - DNA, 1215 bp, Serratia marcescens
atgcttcctgctcaaacattgcggttgattggagatgaagaaattggaggggctcttgctcgggcactggcggcacgttttcaagaagttatggtcgatgaagggcaggattgtaatccgctcgatctacaaatactcacatggctcagagctcatggcgttaatgtcacgttcgtttgtgatcctgaccaagcgatatacgagtttcgtaatggccacccccagggaatactaacattcaaggatacataccctgttgaatcgcataaaaggttaacgggaaactttcgttgcagccctgcaatatgccagctagcagctactctaaggctcgggggccagatcgatcggtcgctcggtgatagcgcgaatgttgaaaatccaattttgcttcttacctacagtggtcgggctccaacggggatgattggtcagatgttcctaggacggattacggagcttgggctagattcgacggaagcgattattttggctcattcaggcaaagtagcattgcgagccgctggaattacttcgagcaattcaatcggaaactcacgaatcgagtcactggctcgtaaagtggccgagttctggtcacctgccgcgacagctcgctcgagggaggctgtagttcagtcagtggaaacgttattgctggatctcatgagactacgtcaaccaaatgagcatctgattaaagtcatcgaacgtcttggtatggatcggcgtgcccatcgtagatacgccctaagttttctcattaaccttccaaaaacgtgtcgagacaccgacgaagaacggcttgcctggatagcccgtgttcatgcggaaatggaaaggctgcatcttccacttccggctggcgtaagtgtacgcagtttcttccgacagccttctaatacgcaatggtcaaagcatcttcaagtgtccgcagatctcggtttcgcatgtggcaacattcatgaagtgaaaggtcgtgagtacgacgcagtatgcgttgttatcccacctaatcgagccccagaaaatagagttgaagcacttttcgattcatgggaagcacgggtagatactgaggcgaagcgcgtactttacgttggcctaacacgtgctcgtaattttgtagctcttgcgataccaaacgcctttgcagggcgctgtattgatttgctggccgcaggccaagtgccctacacaagagtggatttgtga

SEQ ID NO: 450585 - DNA, 567 bp, Serratia marcescens
atggataaggaaatctcggacgaaattataaaactcgaaaatgcgtccgttcacgagtcaatattgcccccgtattttgaccgtgcgctcgaggatctgttcaagcgcctagagattcacgctacccgtcctaaccatgcaccgtcaatcacctcgctcgaggatgcattagtaatccacgaaagtcttaaaggcaaactggcatggtatcttgttgattatctggccaagaacggattaccacagaagccagaagtcctgtcattgctgaaaagcgtttgggaggcgttaaaaaacagtctttccagtcagccgcccacaactctgcagccgtccacggcagctccgtcaatggatgataaattggcctcctggttcaaccctcataaacatacgcccgctcagtttattgaccaatgggtcgatcttaaggcgcagcaggctgggctgacgggtgattatcgcaacgtcagcgttggtatttcctataagataatagatcaccataccgggggcaactttgtgccctcatttactcagaacataacagaacataacagaacataa

SEQ ID NO: 450586 - DNA, 1341 bp, Serratia marcescens
atgcaatcacgcggacatgctattgtgataggcgctggcatcgcgggtttaacatcagcgtttgtacttgcacggcactttgagcgagtaacgttaattgaacgcgatagcttaggaaaaggtgccgtttttcgtaaaggcgttccgcaagcacggcatgcacatgggcttaccagccagggcgctttagcactggagacattattccccgggattggacatgaacttgaacaggccggggcacctgtatttgatcatggagaatccatcagtacatggatctcggcagggcacatccctttttcaagggttgggttgcagatacagatatgtactcggcccttactggagacatgcattcgtcaacgagtgatggatattgtggggattgaatgcattgatgaacatgaggtggttcagctacacatgaccggcccatacactagcggcgtatacattcgggcttgccccgcgccgcacaacactgcggaccggttattgccagccgattgggtcgtggacgcgagtggccgattttcgcacatgccgcagtggttggagaaactgggttatgaacccccaaaaaacaatgttgtggacgcccacgtggtgtacgcaagctgcacgtttaaggcaccctcgccagcatggcgggtgctgtaccatctgagctccgtgcccgatcaaccgcgcggggtgtatgctctgtgcaccgaacgggatgaatggctggtaacgctctatggtgcggcaggtgataagcccggcctcgatgaatctgcgtttcgtgcctttgcggctagcctggataaccccgatctcaatgccttgcttctgaacgccaggcgtgtgtcttccattacccggtacgcccggaccgagaaccgtcgtcgtgcttacggtcgaatgtgtcgttggcccgagcatttggtggtcattggtgatgctgcctgtgcttttaatccaatctatggtcaaggtatgaccctggctgtgaaacagtctatcctgatgggggaggttattgaacggtcattaacatctaaggatgctgcccgacaatttcaggttaaacaagaaaaaatgacagcttggccatggcgtttggcaatcagtgatgatctgttatggcaggctaaaatgcgacaacgaaaagggcctttgctggcgaggatttttcatgcttataaggcaatcctgtatcgagcggtattgagtgagccattcctctataaactgtttctcggcatttcacatcaagttcatcacccactgtgcatgtttcacccacaagtattgatacgtgttgtcaaacaattgctacggcatggtaatcggtga

SEQ ID NO: 450587 - DNA, 696 bp, Serratia marcescens
atgccgctgctcccaaaagcgtttaaacgtctgcattacccagtcaatatcatcgcccagtgtgttcgctggtatctggcgtactcgctcagtctgcgcaacctggaagagatgatggccgaacgcggggttatcgtggaccattccacgctgcatcgctgggttattcgtctggtgcccttgctggataaggcgtttcgccgacataagtgccctgcgggacgtcggtggcgaatggacgaaacctacatcaaaatcaaaggacagtggaaatatcagtaccgggcggtcgatacggctggccagaccatcgacttcctgctgaccgctaagcgggattctgctgccgcgttgcgtttttttcgcaaggccatccgccaccacggtgaacctgacgtggtgaccattgataaaagcggcgccaacaccgcggcgctgaccacgctcaacgccggtaaacctgaagaagaacccatcaccatcaggcagagtaaatacctgaacaacctgattgagcaggaccatcggaatatcaaacggcgaatacggccgatgctggggttcaaatcattccggcgagcgcagacgatactcgcgggcattgagttagtgcatatgatacgtaaagggcaaaatcagcatcccgccggagagcatttatcaccggcggaacaattttatctgttggttgcctaa

SEQ ID NO: 450588 - DNA, 948 bp, Serratia marcescens
atgtgcggaccccatccactgcggtggtttctggaatataaataccctttactcacggtcttttcgcctcttattggaaagccgcccaaggttactcttgacgacgcaaaaaaacacgcgcctttgggtaccctcaattcatgcgacagcgccgttctaatccacattgaggagagcacaccgatgaaagcgacacaatgcaaacgcagaagagccgatgacgatatcgcctatcgtgccttgaggtcggatgagtggggcttttaccgcaggggactgactgctcctgatgaagagagcaacagcgttgacgccttcacgcatgtctcactggggtcgaggtgcagaaaggtaagggagcagtcgccttatctgtctgcgacccgttcactgggtgtggcggcagcctgggctgcggcgagtcgggcgcaaggggcgagtcaagggcgcgtggctaaattttacttcaaaaaagcggcgaaggactatgatttaacgaatgcggacgacatagcaaaattcatgaacgggcgtaataacccccgggtattgaattcagccaaacgttcacaagaagtattaaaacataaaaaagtcccccctcatcatattctggatgcgtatatggcaacctatttaaagaaaagagagtacgaggcgtatatgcgcgcaggtttttctgcggatttccaggttgtgaccgcggcagcccgggcaaaggatacgcctcgtcccattaaagttatgtcggaatcactttattatctcaataaagccaagaagtactgggaaacgataccggatgaggtagcgcgtgaagtaggggaacacattgactcaccgtttgatctggattacatcacctccgctggggaatataataaatacattgctgaggtggaaaaaatcaggcaggccgttttgcagcgaatgccacgcggtaaataa

SEQ ID NO: 450589 - DNA, 333 bp, Serratia marcescens
atgacttcaaaatcagctaatcgttattcccccgagctccgtgagcgggcggtcagaatggtacttgaacaacgtgatgaatataaatccgaatgggaagccattcgctctatcgcccccaaaattggctgtagcccggattcccttcgggcatggctgcgtcagcatgagcgggatgttggcggtagcggtggggtccttaccaccgatgaacggcaactcctgaaagaactagagcgggaagttcgtgagctacggcgcagcaacgatatcctgcgccaagcttctgcgtattttgcgaaggcggagttcgaccgcctgtggaaaaaataa

SEQ ID NO: 450590 - DNA, 405 bp, Serratia marcescens
atgaataaattgaatagatacctaccagatcaaagattcttgatattattaaatagattcattctcagatatgatgagtctgactgcaacaaagaaaaaatcgttaaagatgcctacctcttctgtgttggttactttctaaagtatcagcatgattatgagaatgttcatttgcctggttcaagcaacattcttgctgtgctaacctctgcacttttgagttctaatttttatacaatacctgccactgtaagtctggaacgtgttctttacttctataaattcattgtggaatacatcgtttggaatgagtatgaagttgagaaaacatttaagagccaaaaacaaagttttacacatgtgccgccaactaaacaaaaatttgaagtgagaagacgagtttga

SEQ ID NO: 450591 - DNA, 1245 bp, Serratia marcescens
atggctaaaaaaactcgcttacctgacactccgcagcaggcaatgctgcgtcaggtcactgccgaactggcgaaagatatcaaaacggaagctgacctcaataatgtactcaaccagttcgttaaaatgactgttgaagccgcgttgggcgcagagatggaacatcaccttggttatgctaaaagtgccactgaaggccgtggaagcggcaacagtcgcaacggtttctcacccaaaaccctcacatcccagtacggtgagttggccatcgagactcctcgcgatcgcaacagtgaatttgagcctgtgattgttcagaaagggcagactcgattaaccgggtttgatgagcagattttagcactttacgcacaaggcatgacgacccgcgaaattaccgatacgttcaaaaaactttatgatgcggacgtgtctccgacgctgatatccaaagtgaccgatgctgttattgagcaagtcacggcctggcgtagccgcccgttagagagcctctatcctattgtttatatggactgtatcgttatcaaagtgcatcaggataagcgggttatcaataagtctgtctacatcgctttaggagttaatctacaaggacataaggaatgtctgggtctgtggatcgccgatactgaaggagcaaggtcatggttatcaatcctgacggagcttaaaaaccgggggctaaacgatatcctcatagcctgcgtcgatggcctgaagggcttccctgaggcgataaatgctgtttatccccagacgtcgatccagttatgtattgtccacatggttcgcaactcggtgaaatacgtaagctggaaagaccaaaaagcgttatgcgcggatctgaagctaatttattgctcagtgacggaagaggaagcgcaacaggaattggatgagttcgagtcacgctggggagataaatatcctacagtggcccagatatggcgcagaaactgggctgacttatccacatttttcggctatcctgatgaaatacggaaagtaatttataccaccaatgcaatagagtcactgaatagtgttatccgcaaggccatcaagaagcgaaaaatattcccgcatgatcagtcagcgctgaaggttatttatcttgctatcgagtcagcctcagcgaaatggacgatgccaatccataactggcgtcaggcattaaaccactttatgatcaaatacccagagcgactggctgagtatttataa

SEQ ID NO: 450592 - DNA, 864 bp, Serratia marcescens
atgctttataaaatactgcctgcagtgattagatacaaagatgcaggaaagaatcaagtacccgagtcctttcaatatgcggatgcagtaattggttgtagtttctattgttgttggtttgcacgttattggcagaaaattagtggcacgcaacactcaatatttggcgttcttggagattacactgtttcacccgggtggcagttgcaacttgacagattatttatcccgtttgattttcaaagccctgtcttcgactatattcgtcgatgcggtggaaatattacggtgactggtattccggttaagccttatcaaatgaatggtaggagagtaaagggtagcgtgcttttatgtggtggtggctgggggctacaaattaccgaggaaactatcaccaccttactagcgcggaagtcgctaacaaagttgattgtactatgtgggcagaataaccttctctatgacaatctgtgttcacaatttcaggattatatcagcagagatgagatggaggtacatggatttatcgacgatatgtattccatttatgcccgaacggatatagtcgtcaccaaagctggagggttgacgctgactgaagcggcaatctataggaaacctctcattatttcgggctatttacccggtcatgaaaaggagaatatgaaggtattcgtacaacgtgacgcagctcttttagctgaagatgcagaaactctgggtcaggctatagacaagattttaatggacgacatcagtgctgatttattgaaaaaaaatgcgacgttactggttaatcatcaggccggcaatctattgtgtgatgaaatattagaggatatgcattatgtggacgcgtaa

SEQ ID NO: 450593 - DNA, 147 bp, Serratia marcescens
atgaacaagacaaaagcagtccgaattaaaaagacagataaccagcttgtgaagctgacagccgtcaccgctgaaacaacaatcagaaagactcttgaaagtatgattctgaaatcctatgtgaaacacattgaggtgactaaatga

SEQ ID NO: 450594 - DNA, 180 bp, Serratia marcescens
atgcttatcggatacgcgcgggtctccactgacgatcaacatctcgacctgcagcgtgatgctctgaagcaggtcggatgcgagcgtatttatgaagacacggtcagtggcgcccaggctgaacgtgaagggttggccagcctgattaattcgcttcgcccgggtgatgtaatggtctaa

SEQ ID NO: 450595 - DNA, 591 bp, Serratia marcescens
atggcttggagaaacagcaatagccctaatgatatgaagcgattcataaacaggaatagcccaaagatagggaaagaatttaaaaaagaattaagtagccgtatgcgtatagttacacagcacattcaaagaaaaattgataatgatgtagcaggtggtggtgtggcttttactggaaagagtatgtactttaactttagaaagattagtgactacaagaccgtaaaccaaatcatagtactacctaaccaaacttcatacttgaagtacattcttgatccagcgtataagaatgttaatgtaggtaagatcataccgtatcagaatgctaagttaactaagcaaggcaacattacacaactacgttcaagaacgaaaagtgataaatataaaaaggtgaagagtaggaacggtaacgcgtacttaatcgacactaccaagaaatcctctaaacgtaatcctaaactggcacgtgaacaaagggtgattggttattatggttccgttggtagaaaaccattgtttgatttctatgatgaaaccgagaagcaagtaatagaacaattaagactgtctcttatacacatctga

SEQ ID NO: 450596 - DNA, 453 bp, Serratia marcescens
atgaagatggatttaaaatcacgattaatagaatatgagggttcacgagcatatcaaacacgtatgggatactttcgcaatgacaagtactacccgtataaagatacagaaggattcttaactgtaggattcgggcataaagtactaccatatgaaaacttcactaacggtattactgagattgaagcacttcgcttacttgataaagatatagccatagcagaaagccagctaagtaaactaaacctaaccattcctaaagattggcaagactttatgatcatcatgatttttcaacttggcctatctggaacgatgaagtttaaaaagatgattcaagcactacgtgatgccaactacacggaagcaatcaaacaagcaaaagatagtttatggtatcgtcagactccaaatagagttaatgcgatgatcgcacaactaacgaataagtaa

SEQ ID NO: 450597 - DNA, 360 bp, Serratia marcescens
atggctgcccttggtgaactgcccgatgtggaaatatctgacaggggcgtaaaagtctctccgctggataactgcgttccgctgcaggtttcaccgctggcagaactggtttacagcatgttaccgcgccctaaaatcacggaaattctcgacgaggtaaacagctggacgacgtttacccgacatttttcgcatataaaaaatgacattacccgtcccgatacccgccagcttctcaccaccattcttgcggatagcatcaatcttggcttgaccaaaatggcagaagcctgccccgggagcaccaaatcatcactcgaagatattcaggcatggtacatccgtgacgaaacctattaa

SEQ ID NO: 450598 - DNA, 396 bp, Serratia marcescens
gtggcgcttatctgcgaacttgatgagcaatggagcttcgttggcagtaaagcccgacagcactggctctggtacgcgtacaacaccaaaacaggcggtgtactggcctacacttttggtccccgaaccgatgaaacctgccgggagctactggcactgctcacacccttcagcatcggcatgatcaccagcgacgactggggcagctatggccgggaggtgccgaaggataagcatctgaccggcaaaatattcacccaacgcattgaacgtaataacctgacgctccgcacccgcattaagcggttggctcgtaaaactatctgcttctcacgctcagttgagctccacgaaaaagtgatcggagcgtttatcgaaaaacatatgttctactaa

SEQ ID NO: 450599 - DNA, 273 bp, Serratia marcescens
atggccagcgttaacgttcattgtccccgttgtcagtctgctcaggtttaccgccatggtcagaaccctaaaggccatgacagatttcgctgccttgactgccaccgtgtgtttcagctcacttatgcttatgaagcacgtaagccgggcattaaagagcagatcactgaaatggccttcaatggtgccggggttcgcgatacggccagaacactgaaaattggcattaacaccgtcatccggactttaaaaaactcgcgccaaagcgaataa

SEQ ID NO: 450600 - DNA, 639 bp, Serratia marcescens
gtgggctcggagatgtgtataagagacagaaacaatatcgggaatagcctcatgtttaaccgtgatatagaactgtttattcgagattacgttaatgatatcaaagccggcagcgctgcgctgtttgccggcgccgggctgtccatccccgccggtttcgttagctggaaagagcttatcggcgatatcgcttatgaactggagctggatatcgaaaaagagagcgatcttatttctctggcgcaatatcacctcaatgaaaaaggcaacagacataagataaatcagaaaataattacagaattcgctgaacaggcggaagaaacagaaaaccaccggattatcgccagattaccgatagcgtcactttggaccactaactacgacgacctgattgaaaaaacctatgcccgttataatcgcgtctgcgacgtcaaaaccacgccggaaagcctgaccaataacattcataaacgtgatgttgttttatataaaatgcatggtgactatagaaatcccaaccaggcgattatcactcgcgaacaatacgaaacttactcccgtacacaccttccttttatcaacatgctgatggcggagctgactgccaaaaccttcctgggtaatgcatccaattag

SEQ ID NO: 450601 - DNA, 216 bp, Serratia marcescens
atgataaccagtgacaactggggtagctatgccagagaagtgccgaaggagaagcacctgacgggcaagatttttacgcaacgcattgagcgtaacaacctgacgctacgaacccgcattaagcgcctggcccgcaaaacgatttgcttctcacgctccatcgaaatccacgaaaaagttatcggctcattcatcgaaaagcacatgttctactaa

SEQ ID NO: 450602 - DNA, 219 bp, Serratia marcescens
atgagcatccactatggaagctggatcttttgtcagctccttagttactgtagttactgtagctacacggtttgctcccagttcttctgtgattttctgaatgcctgtaaccgctttgttgtgagcctgagagtcggtgaggatacggtttttattatggacggcttcactaccatcaagagaaacggagaaggtgatattccgttctttcacccatga

SEQ ID NO: 450603 - DNA, 951 bp, Serratia marcescens
gtgttttatcagttggccaagttgtttgtctttgcttcgttgcacgaaggctttggattaccgattctggaggccatgacgtgcggtgcggcgacaatcggttctaacgtcaccagtatcccggaagtgatcggttatgccgatgcgctgtttgatccctattctgttgagtcaataagcgacaagcttcaacaggctttaagcgatgacgttttcctcgctaaattaaagaaacacgctttggagcaatccgccaagttttcgtgggataaggcgggaactatcgccttgtctcgctttgagcggttagttgctgaggccggagatgtggagtttgaatcggtaacgtcatcgcaattgatctccgccgtttcctcgatcaaatgtcgtgaagagccttcggataacgatctgcggtcaaccgctgaggcgatggatagaaatgccaaaagactcgagttgcaaggcattgcgctagagtctctctcttggcgcgttgaaggaccttttgacagctcctatagcctggctttggtaaatcgagaattcgcgcgagcactcagtcgcgacaatgttgacgttctgctgcattcaacggaagggcctggcgactttgctccaaatgaaaccttcctgagtgatgaaagtaatgcggatttgaaggcattccattcgcgtttgcagcagcggagtgagcagcaggttaatgtattgagccgcaatatctatccgccacgtgtcagcaacatggctgcagatgtgaagcttttgcattgctatgcatgggaagaaagtggctttccacaaagttggatcaataatttcaaccgtgaattggatgcgatcctttgcacttcagaacatgtgcgcaaagtattgattgataatggtactaaagttcccgtttttaatgtcgggagcggattcagtcagccaatcctccgcaactga

SEQ ID NO: 450604 - DNA, 270 bp, Serratia marcescens
atgaacgattatgcttttacatccgcgtccatcatggatgttgtgattaagctggcagggcttggtctgcttgagatgagctatgccgatgggcaaactttcatcacagcagcaagtggtaacgcatatacgattattgagactgataagccctatctgctgttacgcagcaacacgccgctgactaaccaacagtatgaggtgatggaggcttacagggtatcagggggaaatattcctgtgtttcagggaggggacatcgtcccttga

SEQ ID NO: 450605 - DNA, 2070 bp, Serratia marcescens
atgtttcatttagacaacaccagtggcgttcctgagatgccggaacccaaggaacccatgagcaacacaccgcgctggttcggtgaaagcgtccagcagggcggtatcagttggcccggtgcggattggtttaatattattcaggccgagttgcttgatatattaagcctgactgatgctacgccgaataaagataagtttaatcaactgtcaaacgtcattaaatcgtatggccgttgtgctgatatccagtcactacgaacaatagtgcccaaggacgttggtcaactgatgaacgtggtttcgtattacacggttatcaattcaatccgtccgccgcaaggagggggttactttgtcgcgattaacgacacgacgtcacccgaggatttcggctcagtgattagggttaatgctgagtggatttggcgacgcttatcaacgacagaatccgtcacgccgtttatgtttggtgctgtcggtgacaacattaacgatgatagtgatgccattcaaaatgctgtgaattatgccagttcattggcgtcgcgtgatggtaacagggtgttgaaatcagggattttacggtgtgccagtggtcgctataacatcaccaaaacgctcaacctcccgacgaaaaccgttgattacgactttaccgggtcgttgcttgatttccggggcatacagcaaagcgctggcggcgctcgcacgatagctgtccgctggtataaccagggcgggtataccgccggaaaccgttcagtgcataacctgtgcgccatcggccctggtatggataccttggtggatttcatgtcgttcaatgataatacgagctatccctacgcccgtaactctctcgacttctacggtggcagtattgagagcttttcgcgtgggatcaccgtgggcaataacacctactatgtgaaattcttcaacatccagtttaatcacctggacgttgcctactttttcccgcgcgcgcaaaagaacgccggtgagcaaatcaactttgtgtcagcggtgttcgcccagtgcaatacatttttgcacctgcaaggtggccacaccattttcactaactgttcattcgactatgcctataaagagtatttcattgtcgatgaaggtggatggggccgcgcagattttatcgatgcgtggttcgaggggtatggcccggactattacatcatgcgcattgagaacgcctgccagttccatatcaacttttatcgtgggaagtttagctacaaggcaggcaacaccaagtcgtcaacgaatcccttttttattggctctatggcgcgcgtgtcgtttgatcgggtcaactttgaaaacctgggtaccaacgcggataccaatatcaccgcctggttcgatggctcgggccatcggtcactcgttaactcccagttgccatctaattggcctgtcctggtaacaaaaatcagtgctgatattgatgataattttattgttggcgccaactatgaggccggaaccgctgcaccctgggcagtagaggcatgggtgcttgcgccgggtggcaacagcacaggcacgcgaaaaaatcggtgggggtacggcaccgcatctgctactaactttagtctgactcgtgcagcggggcacgtatccttagccacggcatcaggggaatctgggggaacgtatcaggccatattgggcgttattgagctgcgtggtgaaggtgctgtagcgcaccgaacgacgttcagaacgtacatcggtgatgggatgattgtccgattccagctctactgggcacaactggagcctcatgggtcaactaacgcagcagaaccgacaatcatacgctcgcggctttcaaccgactatccttacgcgctcagtggggtgtctgatagcaatctgaagctccacacagcgccgtacaattggcagggttctaatggccaatacccctatgttgatcgcaaaccggattgggccacccatgcctatctgctggttgatattacaaaaattccgcgtggtagtgatatcaggattgaaaacgtctacatgaggcaaatttaa

SEQ ID NO: 450606 - DNA, 876 bp, Serratia marcescens
atgtcatttacttattcttcatcgccgcaggcactgtggctgtatcaatatgacgccgacggcgtttttattggctctgtgtttatgactattccggccaatctggggttgcctgccaacactactgccattccctgcgagtgcaacctaggcgaaaccggtatatttactggcgagtattggcattacgttgaggatagtcgcgggacgcaatactggaacgaacgcggtcagggttttgttatttccaacctacaggaatcactacctgattgggctgtcaatattgcgccgcctgtagccgcgcccggttgcgttttattgttcaacgagggtcagtggcagcagattgaagataaaaccggtcaagcgttctatgaaggtaacggcaataaacacgtcgtgccggatgcttactacaccttgccggaaggctgcacttttgttgtcccaccagaggccaaaccgacgtttgtgatgcaatggaacggcactgaatgggtttacgtgaaagacctgcgcggccagcttgcctacaacaccgaaaccaaagacccgctctccatcaccgaggttggcccattacctgacggttacacgctgctgtcccctggccgtttcgaacaatgggatggtaagcgctgggtgaaggatgagtttgccgaatgtgtgttccacgccgagcaggccgaacggcaaaaagccaagctattggccgctgccactgagcagatcgccgtgcttaattatgccatcgagacaggcactgccaccgctcgcgaaacagccaaacgggctcagtgggaagaataccgcctggagctgaaccgcgtggatatcacggccactgaaatcacctggccagagaagccataa

SEQ ID NO: 450607 - DNA, 438 bp, Serratia marcescens
atgtctgaaactatcagcaaagcccagtgggataaaatcgccgatgatttgcagagggtattttgtcacgtccagtttaattaccagggcgcggtgatttcgattgttcgcgagcacatcagtgaaagccgatcccacctggttgtgtactttgacaataaactttgccctggttggggatggaaagatagcgagcagttcaacccactgaccggcttattctggtgccagagaaagcgcaagctctaccccgctaaacggattgcagaggttgaaaagaatatgggcaagcggaaagcgaaggaatacttcccgcaacttcatgattcattttgttattcggtaccttacttctccagttcacttagcctggtacggcagtttaaaaaggtgatgggattgaccctggtgtgtcaggaggatgcagatcatggttga

SEQ ID NO: 450608 - DNA, 285 bp, Serratia marcescens
atggctaagagcaaaccttataccgccgccgcccgaacattattgtgcgaactggcgacgttttatgtcgcgtccgaaatcgaacgtgacgtcatcaaacccttgtatgagaaagaaaccggcaagccctatagcgaagcggcaggtggcggttatctcgatatcttgctgagggataatcctgaagtgggtcgagcctggaaagccttgcagcgcgccatcatcaagaggcgcaaagcggcgggtgacgcgtttgagcgcgaaaggagccagcatggccgatga

SEQ ID NO: 450609 - DNA, 510 bp, Serratia marcescens
atgagggggcgtcttttaatcgcagcattaatttcaatggtaatgatttcacccgtcaagtcggaggaaccgatacctgagaatacgatactccctaaaagagatgtgcttttagaacgattcgaaaaatttaatgttgtgaagaaaagcgaatggaaaaagggaaccattgttgatggtaacccagtattgactgctcgatttggaggggatgtttataccgttaattccagaacggtctatgcagtatcattcactgatagcggggacgcgaaaaaggatgcatggcactcaatggaagtatgtgcaaaccttgtttctgtagttacggggaaaaacacaaaagcagcggcgaagaaagttgctgatattctagtcgaagcggcgaacgataaaagcctatcgtctgctgatctaatagagggctactggttttctacggatattagaacatatgataaggtgaatgctctattttgtgaggtgaagggatttacccgttgggactaa

SEQ ID NO: 450610 - DNA, 423 bp, Serratia marcescens
atgagttacggttatagcgcaacaaccaatacgttttatgttttcgaagacaagacagcgtttgaagaatatgacaactggccggaggacgtgaagccgataaccgatgagtgctgggaaaaatactgcgtgcaggggccggaaggcaagatgcgtggcgctgacaaaaaaggcctgccgtgctgggtagatatccccccaccgacgcacgagcagcaaatcgaatcagcacaacgcaagctggtatttctgatggctgaggcaactaaagcaattgcccctctgcaagatgccgatgatttggcgattgcgaccgaagaggaggcggcgcagctcaggctctggaaaacttaccgggtgcagctcaaccgcatcaatccgcaggatgcgccagagatagattggcccctgccgcctgcataa

SEQ ID NO: 450611 - DNA, 1890 bp, Serratia marcescens
atgagcaaatataaggcgatagtgactaccgccggggccgcaaagattgccgcggcatccgctggcggcaagcaactgaacattacgcatatggcagtgggtgacggcaatggtacgttgccgatacctaacccggcgcagacgaagctggtcaatgaaaagtatcgcgctctgcttaacacgctgacgatcgacaaatcctttgataaccatatcattgctgaatttattattccggcaaaccgtggcgggttctggttgagagaaatggggctctatgacgatgccggcacgctcatcgccgtgagtaacatggcagaaagttacaagccgaaactggaggaaggcagcggccgcacacagacgctgcgcatggtgattgtcgtcagcagcactgaagccatccagcttattgccggcggcgatactgtgctggcgacgcgcgattttgtcgaagatgccatcaaagaacatgagaagacccgcaaccacccggactccaccacgatagcgaaggggctggtacagctgagtaacgagacaaccagcaccaatgaaactaaggcggcaacacccaaagcggttaaaaccgtcaacgacgccagtgtcaagaaatcagacaatttatccgatctgagcgataagaccgctgctcgcgaaaatttgggactgggtaatgctgcgacaaaagatgttggtaccgatgtggcaggacaggtactgaccgtgggtaattatgggctgtccaatactttgaaagcccttaccgacgttgacttgaacacgattcagacctttggattttatgttatccaaaatccagtaaatgggcctgctggaagcagtggaggcaccttattcctgaacgtggcaacgtggcagtcaggaacgggaatggcgggttatcgagttgctcaagaagttattggctacgggcaatctggtagtacaggtaacagagtttggcggcgcacctggacggggagtgtttggagtgggtgggttgagttttattccgagactcataaaccatccgccgatgatgtcgacgcttacaataaatctgaatccaacggtcgatttgcatacaaatcaatcacaataaacggcaagcctttatcatcaaatgtgaatttaaccgcaggtgatgttaatgcctggaataaaacagaatctgacggtcgttttatttataaatcgggagacacgattaattggctaaatgtgaaccaaggattagttgctggcaccgacatcactgtaggtagaacactcttcgttaaaggcatggagtttattgtgaaacaggggttgcaagacccggtgaataatgaacgacaaactaacggtatgcgaatacagggggctggaaacttatttgttgacttatatcagcatgagcgcatggggcagcatcatttctttggtattcatgttgctaatggcggtgctgatggctggtatgaatttaggaacgatggtgctttcagtgcaggttccacagtgggtgcgggaggccctcaaggttcaaaattttaccatgacgggaatattgaaggctcaatatggggcggttatctcagtaatcatatcaatagtcgctctgccatttcaggcggccgtaatgcctggtggtacaaggacgaagtgactggattgatattccagggcggcgtcgtcaatcgtgctgatcatgcaacctgggttggttttccacgcggttatgcacgtgagtgctttggcgtgcagatgactttagcctggacaaatggaagttggtttggcgatagccgtgtcaatattcaggcgcgtgacgtgggtaatggtgggttcaatgcgatgatggatcaacaggagcaatccgcgttctggtgggcggtgggggtttga

SEQ ID NO: 450612 - DNA, 747 bp, Serratia marcescens
atgaatgataaagctaaaattgttaatggtctgtatcgcacagcagggtttattgatgcattagttagtgaaggttatgaagaaggatatattgattatttgcgtgctgctgctgattttattaataaccagccctcacacgaggaatacaaagccgcctggttgaacgttataaacactctccatgccaacgatccactttggcatgaaaactatgcaggcgacagcgaatggcaaaaggttgtcgcactcgttaatgacctataccggcaactccgcatagctgaaagcaccatcgctaaccagcagcaagatattgccacgcttgaatgcgcatccaggaatgatagcgaaataatccgcgagctctatgaacggcaggcctcgcttgccaagatgtatgagccagcacctctgcgtacctggatccccacacctgatgccgtcgtgcaggaggttgtcgctcaaatcctcgaagaactaggcgatacaggattcgtcctcgtgccgccaaccagcatcgccaccttgagtgtcattcttgaggacaacgccgctcgcctacgccgtaaggtgaacgactgccactgccaaaaccacgcgcttgaagaagtacgacacaaggccactaggatttgcgcaatagctatccagttgctgagcagcctgccttatgtcaagcctgccgaacatgacgttaatgcggggtgggcaatgccaatacacccaaaccgaaaccagaaataa

SEQ ID NO: 450613 - DNA, 309 bp, Serratia marcescens
atgagtacgatgtcaagtgactacggtgaaaagctcaagcagataagaacagcagaaggactaacacagccagcctttgctaaagaattggggttggggcttagtacagtgaagaattacgagtctggtcaaaagaatgcggggctatcaatcgttgataaggtcaccaatcaccccaggttcgagaaatacacaatgtggctaatgaatgggaaaacgtctgaagcggcggggcaaatctccccggctctctcccctgatgggcaaagcgacatatccaaccgccaaaaaggtcagaaggctggttaa

SEQ ID NO: 450614 - DNA, 981 bp, Serratia marcescens
atgacgatcaccaaacaggataacgggcaatacctggtagacgttcggccgcagggccgcagcggcaagcgcatccgcaaacgcttttcgacaaagggagaggcgcagcagtttgaacgctggacgatcgccactcaaaacaataaagaatggctggataaacctgccgatcgccggactctgaccgaatttatcgatctctggtggaagtacaaaggtcagtctctgaaaaccggcgcgcaagcaaaactccatctgcttaaccttgctgatgcagtaggcaacccgctggcctctcaagtgaccaaaggcatgttttcagattaccgcgcggaacagattaaacgtgggctcaaaccgtcaacgattaataagtatcaaaagttgcttagcggagttttcacgaccttgattaaagcaggtcagtataaagacgctaacccaataaaggggattgatttattaagtaaaaatcagtctgaaatgacatttctgtctcaagaacagattcacacttttttgagtgcgttaaccggggatgatctcaaagcgtctcggctctgccttgctaccggtgcacgctggaatgaggcggccaccctgacccgttccgcagttataaagcataaagtgacattcctaaatacaaaaaacggtctaaaccgatccgtgccaatatcccaatcactttatgatgaaatcacggccggtgacggcaagcgcctgtttcctgatgcccattatctaaatgtgcggcgtgttcttaaaacggtgattcccgacctgccagacggccaggcaacgcatgttatgcggcataccttcgctagtcatttcatgatgaacggcggcaacatcctgacgctgcaaaaaatactggggcacgcatccattgtgcaaacgatggtatacgctcacttagcccctgattacttgaatgatgcagtacggttgaaccccttggagaacagtcaaaaatga

SEQ ID NO: 450615 - DNA, 642 bp, Serratia marcescens
atgacactaacgacagaaagactgcgtgaaatcgcagaggatggattcttagagcacggcgacgccaaggcaatggcgcgcgaactcctggctaaccgggaggcgcagccggtagccttggttgatcgtcgccaagctgcaagcggcagcatctgttggcaaaacggcggcaaagacctagcgcatggcaccgaacttttcaccgccccgccagcgccggcagtgccggatgatttagtggcggctgtcaatcgcctgcttgattgcgacggaacacgtggacactttagcgccatacggtgcggcgatgctcgcgaagaagtcgagaggctgctggctcaacctgtaagccagcgttacacattgccggatggctggatagcgtgcagtgagcggctgcctgaaattggagagcgtgactggagaacagcgcttcctgtattggttaaatgcgaaattggcgtaataccagcgtattacggatttacatatcatgaaggcgagcagcactttggcttcatggaatctgtcaagtttggtgacgcatccggctctagccctgagcagtatgaaaatagactgatgatgcacgttacccactggatgccattacctgcagcgccggagggtgggaatggctaa

SEQ ID NO: 450616 - DNA, 213 bp, Serratia marcescens
atgactgaacattcagatattagtgcgacggacaaccgagagtggatttcgttttctgacaaactccccactgttgaaaatgggaagccagaaaaaatttatgtgaaatacaaaattctgatcgcatatgaagaaaccccaacagctacggtggagtgggcgctcagcgatgaaggcagagagcagttatctcactgggcgtatatgcaatag

SEQ ID NO: 450617 - DNA, 1989 bp, Serratia marcescens
atggctacgataccgacacagctcccggtggcaagtgaatcgccgcgtgatttaaaattcaatgctgggaaaattgatgagtttgtaacatcgctaaaacttatctatgaagaccgttttggagccaagcattatactattgaaggccttcgatgggttgcccagcaggctattgcagcatttggttatattactattgattcatttcaagatggcgcaacattaacactgccaaatcatgttttgcgatggaagttgccagatggcaatggtgagtattatcgatgggatggctcttttccgaaggtggtgcctgcagactccactcctgagaatgctggtggaattggactaggtgcctggattggggtaggcgatgcttcattgagaagtgacatcgctggccctaatggtgcaactataaccggcatgggagaaagcaatgttagggatgttattggtcacgtaacacctgaaatgtttggtattcctgctgatggtgattggacgccgcaaatcactgcagctgttgctactaatcgcgaagttcatttgactgctggcaaagaatatctctgcaatggcacgatctacatgccatcagataatatgcatggcctgaagttcgttttcaacggcgcaactattttcgcaaaccacatgcagccagtatttcgttctccggctccgcttgagtcgccagcaatttcttattaccacatcgttgggccaggaaaaattcgcagcattggcagcgtggatactatctatgagcagggaaaaaactttgttgggttccctgctggtgatcacagcagcatctacaacatagatatgacagacctttcatgcgatggcgttcagttctggggttatgcaggacatggcggcgatctattctttgataacgtccgtgataaccctattgtgacatacggtacatttaaccagattggccgcgtaaatatcggtcactgcgctggcgattcgttgctgttgaaggggtactacaacagtatcgagtggggatatgtaaaaaaggcgggtgttccaggcgcaaacccagagccagggttcatctgtggcgggtgtgtcatttttggtgcgccggtggatggtgatccactcggaggacataaccgggttgggtactacaaagcagaacaatggtcatcgctgggtgttgggttctctggtgataactgcagtgtcggcgaaatcgaactgggcgagagtatttttgaaggcgatagcccgctggttcagggaagcaagccgtatgtcgccatttacaatggtaatggcaaccatattggcagaataaagtcacagaaatccgcatacggtgtcctgtttattcgtggcgagcgccacacgctaggcgttgcggagataaacaactgtaaaaaagagcagctcagcataaatgttaataccaaaggtgcaaaaattggtgatttcattgtcaataactcattgcatgccggtatctatctagcgcctggccctggatgctcaattgataatattgtgttaaataatgctgatattccgcaagggagcactgcatgtcagattagaaactccaatatttctattggcgagatactaataaacggatctggcagcagctccggtagcggggtttatgttgaacagcaggctagggcgcctatcggcaggctgacatgtgacaatataaacggcatggccatgtgggttaggccagccggacgcgtgccacttcatgcacacctggcaaacctcgccacggctactcgcccacttattcaggtttcggcaaatcagtctgcttgctcgggctggtatataaataaccggtcatcgtccggcgggcagcctactgtatacgcagagccaagttcaggcggtgcagtttcaacgtgggtgggttgtgaaggtacgatcccgctggcgcagggcggcgcaacgctaaatgctgctactacatctaatcgtttttattaa

SEQ ID NO: 450618 - DNA, 2457 bp, Serratia marcescens
atgccgattatcgagattcaacatgtaccagggcaggctaaagaaaaagtgctgttgccggccggcgcgagttttttcgagtggttgatcaaacgtgatttttttaacgatatcgtcatcgttgtaaacggagcggaactcgctgatgatgcagaactggatttccagcttacagaattgcactgcatccaaatattttcccagcctaaaaacgtgattggaaaagttctcagcccagtctttaaactggttcaaaaagtgtttggttttctaatgcctaagtcgggttttacgtcagcagacaccaacgtaaaggagtcaccgaacaataagctgacaggtcaaacaaacgttgcacgaacctaccaagctcgcccagatatatacggccaggtgagggcttatcctgacctgatccaagagtcgatgttcgaatacaaagacaacctcaaatatgtcaccgaatggatgaacttcggcctgggattttacacggtagaaagtgtgcgctactcagagactacgctcggatctctggccggtgcgagctatgagatatttcagccaggccagaatattcctgtgatctacgaaggattcagctttgatgacgttgacggccaggagctcccaggcccaaatgaaagcgaagaaatcccagttgagacagcaacagcaacaacagttatctccggtgagtattccggcggccagatcagcgtaaaaatcaataaacaggcagagttcgattatttctacgggctaatcaggccacaccctgtaagttttttgatcaacgtaacttacgacacagcaagtgggccggttacccgagatgcaactatttttgctgatttgttccatgccgaaataactgatgatggttctatcatcgcgccgcaggaatactacacattctattttaccaacttgtcaggacgtgacgcctcagagataccagagacggcaacattcaacatgacaacatttatcttgaatgacaaccaagggattactgttggccctgtgtttgcgccactgccgggagaacaactatgggttcatttgaatgctcagctgggcgatggggactatgcacataccaagatagacatttggaaggttgatgataataacgacatgatccccggcacgcgagaaacattcaatacggggttcgatgctgcaccgcggacagattactattatctgacgtacaaaattactccagcagctggatacgggcgatatgcgctgcagtttacccgtactgaaaacagcaatgatcacagcattctaaagctcgaaaacgttcactctgtccgcgtgcgcgtcaatgagactcacccagacgatacgctagtccgtgtaactgtaagggccactgagcaggctaccagcgtgcgccagcgcaaatacaacgcattggtgacacggcacactattagctatgatatgacgtcccgcacagttgattacacgctccgtagatcgcgcagcttcgctgatgcagtcgcgcacacatggctggtaatgggtagtcaaccagagagcaatattgacctctatgaactgtaccggatcgccagcactatcacaccagatgagtgtttgttcttcgactacacattcgatgatgaggatgtttctctcggcgcacgcattgagagcatatgcaatgctgcgcgcgttattgcctactgggaagatggtatgctgaccttcagccgtgatgaaaagaaagctgcaccagccgcagtttttaatcgggcaaacatggttagtgaggagttcaggcttacatatgatatgcgtatgcctgggcaatacgatggggttgaagttgagtacgttagcccaattaccaacaaaaaggcttatctcagatatagaatagattcctatgggattgtcgaagaggcagctcaaaccccactgaagattaccctacagggatgtagaaacattatccaaggcagggatcgtgcattacttgaagttcgtcgcttattgcattctcgccttaaaatggcctgcaaagttctttctgatggggagtatgtttctcctggcgatctgattcaggttgcagacacctatgacataaaccagcaagccggttacatagttcttcgcacttgtaataattttgatactaatgaacgtatcacgtggtcgggtgaaatgtgggtgacggttactgatagcattggtatcccaacggctcgcgtgagggcttatcaacgtgcagatacagattttggttttaccgctgcagttcctgatattcagttaaatatatatgacggatatgatgtgcagtctccgtcacgctatattatcgccacgcaagaggaacttaactccacgctatggactatttcagagaagaaaccaaatgcagacggctcaacatcattaatccttaatgagtatagcgatcttatctatccataa

SEQ ID NO: 450619 - DNA, 687 bp, Serratia marcescens
atgcggagtgttattgcacttagtcttttgatggcctctagtgcggcagtggctagcgaaaagttagtatgtgagtatgcgattggtgatttgtctacacctccaaagcttctcattaaaggtaaagctaatgtgattttcgatgggaaatcttttacagcatataggtcggatggttcttatgtcgtaaccccgccgctgactgaaaagaaagatacgatgatttttgttgatgataaaacaaaggtctttgctgccagccaagacagctctaactttgcggtatctgacagaataaagaaaaccacggaacagtgggcaaagtgcagcatagataaatcatcggctattcaaagaaaatcagaaaatgaaatggagatcgttgaaagtctatcgggggcaaaagccaaatcttactttatgaaagagaagcatgccttcactaccaactgtctagtttgggaagacgtaacgatgatcacaggaagttaccctgctatgatcatcgcaggtagcgtgatgatgggtaagaacccacgctgggacggaaatgagtactcattcacattcaataatgggtcaatgatagccagatttaaaccaagcgagcctcgacataagtttgtcattcaggctggagataaattctatggatgtgggccttcaacgatagatcataactactaa

SEQ ID NO: 450620 - DNA, 171 bp, Serratia marcescens
atggatatgctgtacacccaaaacaaaagtgaaaagttcatgttgcgaatgccagaacgcatgaaggaagagattcgccgtatggcagagatggatggcatttccattaactctgcgattgtacagcgtttagcgcggtgcttgcgtgaggagcgggcgaatggtcagtaa

SEQ ID NO: 450621 - DNA, 303 bp, Serratia marcescens
atgaaagagaaacaggtaaaagactacgacaagtttatgctccgcttcccggacgggatgcgagatgccattgctgagcgagcaaagagaaacggtcgctcaatgaatgccgaaattgttcaaatcattgaagatgccattgctgcagaaaagaccgggttcccatcaggtgacactgcggaactaatgaaagtcataagaattcaatcagagttacttcagcaatataaagaagccatcgacaaaggcactgatatgattgaagaaattcgagcgacaatgtcaaacaaaaagcccacctaa

SEQ ID NO: 450622 - DNA, 300 bp, Serratia marcescens
atgtttggctttcaagctaacaatcacgccatggtaatggaacgacttcagcgcgggtgttctgcatcaggcgcacctgatttcatgtgggactttctcaaagcgttatcagtaaagaccgggttcaacatcaggactggcacaccagcaatgattcagccttttatttccgggaaactttcatgggatgatgtgctgagcatctccaatgctactggctacattctcaacatgaaaggcgtgtcaacgcttgatcagtacaaagatgctatcagccttctgtatgaaaggttgaagtaa

SEQ ID NO: 450623 - DNA, 366 bp, Serratia marcescens
atgtctgatatctaccatgctctggttgttcatgacttcagcaaggaacgtgatgcgacgcttcaggacacccgagatgcttacggcgatgcctgcatgtccatcaacaatgcgatgcagttaattggctatctattacagattgttgatgacgagggatattcaggagacgacgctaagcgttatctatttttaattggaaatgtccttagtcagttgcctcggatttcggaagcattatcccaaaacgaacgctctgccgattacgagttaaaaaagcgcaagggggggctaaacaatgagcactctcacgcgtcaagcaataaaggctgttccaggattgacgatagcactaccccttactga

SEQ ID NO: 450624 - DNA, 303 bp, Serratia marcescens
atgaataatttagtaaagaataaagaagcggctccggcactgacgccaatcgaacaccggagccagatcaaagttaatgcctgtggtggtattaattcgatcgccgaggatgctatcacattcgtgcatcggtttgcatgcattttaaaagcgaagccagagcggccaccggtgattgtgctctctaccgcccgcactgagagcgaagccagacagaacctgactgaagcatttgatgggaaaatgcgcctgatctgggctggtcgtctacctcgtaaggctcgtgaggtgcgctatgtctga

SEQ ID NO: 450625 - DNA, 207 bp, Serratia marcescens
atgcagcagccaacgatgaagtttttagtcacagactgcattaatttatctcttcgcactgtggcttcattgcgctcagtagataatgctgacaacgaaaaggatgcggaagttttgcaagctatggggctttcgtttgcagttgaattgcacgccaagctttgtgaaatcgaaaaattggtttatccgggagtgaaacatgaataa

SEQ ID NO: 450626 - DNA, 201 bp, Serratia marcescens
atggtcagtaaacaattcgaaaacgtctcattaaaccctgaagatgctatgacatgggtcgaggcgatagtaaacaccagtatctttcttcaatccataaatgaaagtggcgaggtgatggatttactaactattgcttcagactatttggcagcagtaagagaaaatgaaaaggagttcaaatgcagcagccaacgatga

SEQ ID NO: 450627 - DNA, 195 bp, Serratia marcescens
atgttcagagcagagtttaaagatatgacattggaccctatcgaggccattaacaatattgagtcattaattaatgttggaacgcttcttaacttaactgagcatcatcatgagctgggtgtacaaatattaggcctcgcgcacgactatgttttagccatcaaggaaaatagagaggcaagcaatggtcagtaa

SEQ ID NO: 450628 - DNA, 690 bp, Serratia marcescens
atgagtgttggaaagagagttagagagctgcgtcaagcaaaaaaattgaccattagcgagctagctactctaacagattgggatgttggtaatatttctcgcctggagagagggaagcaaggctatagtgaacagagcctaaaacgaatcgcggccgcactccaggtgccggtttctgagttgttctccacctccagcgaggtaaacaccgtggacaattacagcgtgaaatcacttcagacggatggtggggaaggcgtctatcgggttgacgtccttgacgtatcagccagcgcaggatctggcaatttatctaacgactttgtcgaagtgataagctctattgagtatgtcaacgaagaggcccgtagattgttcggacataggcctgcagagcaggtaaaactcattaatgtccgtggtgacagcatgcagggcactatcgaccctggcgaccttatttttgttgatatagccataaatcactttgatggtgatgggatatacgtttttgattttagcggcgatctgttcgtgaagaggcttcagaaaatcaaaagtcaactcatagttttatctgacaacccgcaatacagggagtggcaaataaaccatgatgaaatgcatgctttgcatgtatgcggtaaagttttactgagccaatcccagcagttgcgacggcacgcctaa

SEQ ID NO: 450629 - DNA, 303 bp, Serratia marcescens
atggtcatcaatgctgccgtttttcatcccaacggcttttccctcagcgcgccgacccaagaggatttttgggtcttgctgagcgatgtcgttgggtgggggcgattcaccatgatccgccccgataatgagttcagtgctactggagggctttttcaattagtggaagtgctgccggtaggttcacaacccccttcgtcagtagttgaagggtcaaatgttttatggcgtctgccggaagctctcgaagttttgaaatcagcccggattttttctcctcaggaagatttgcaacccgaatga

SEQ ID NO: 450630 - DNA, 1230 bp, Serratia marcescens
atgcttgctgaaaaaagtgcggcctccgcgcagccgggcgtcgccgtgaccgccaatctgcgctgggcctttatcctggtcaccagcctgttcttcatgtgggggctgtcctatggcctgctggacgtattaaacaaacattttcaggagacgttgcacgtcaccaaggcccagtcggggctgctgcaggcggcctatttcggcgcctatttcctggtggcgctgcccgccgggtactttatggaccgcaagggctataaggcgggcattctggtcgggctgtgcctgtatgcgctgggggcgctgctgttcgtgccggcggcatcggccaacagcttcggcgtgttcctgtttgcgctgttcgttatcgccagcggtttgggctgcctggaaacggccgccaacccgtacgccacggtgctgggcgacgcgcagggcgccgaacggaggctcaacctggcccagtcgttcaacggcctcgggcagtttatcggcccattgatcggcggcacgctgttcttctccgccagccagtccgccggcggcggcgatcagagcgcggtgaagatgacctatgtggcgatcgccgtgctggtgctgctgatcgcgctgttgttcagccgcacccggctgccggcgatccgtgaagaggagaaaccggtgcacggcgtgatagcgcagggcttatggcaacatccgcattttgtcggcggggtgatcacgcagttcttctacgtggcggcgcaggtgggcgtgggggcgttcttcatcaactacgccaccgaacactggcgcgatgtgtctaaccaaagcgcctcttacctgctgtcgatcgccatgatctgctttatggtcgggcgcttcttcagcacctggctgatggggcgagtcaaaccggcgacgctgctggcggcctatgcgctgatcaacatcgcgctgtgcggcgtggtgatgctgagcgtcgacggggtgtcggtggtggcgctgatcgcggtgttcttctttatgtcgatcatgttcccgaccattttcgccctgggggtgaaaaacctgggtaaacacaccaagcgtgccagctcctttatgatcatggcgatcgtcggcggcgccatcatgccgtactttatgggggcgctggccgaccgttacagcaccgcgctctcttatctgttgccgctgctgtgcttcgcggtggtgctggtttacggcctgcggcagcgccgcgcctga

SEQ ID NO: 450631 - DNA, 195 bp, Serratia marcescens
atggcacgtaaagcgcgcgcagaaatgattgaagaaacccgacaaaaactggtggcggccgcccgtcagcagttcggcagcgtggggtatgccgagacggtgatggatgaactcaccgcgcaagccggcatgacgcgcggtgcgctctatcaccattttggcgataaaaaggggttgttcctggcggttgtatag

SEQ ID NO: 450632 - DNA, 612 bp, Serratia marcescens
ttgtggatctccctcgaccagacagggcatcccgttaaatttgagcgtgatattgcgttcttcggcccaggcttcgaaaaactcgaagactttcatgacttccgctctgaggtcaaacatgaccctgtcaggtatcagctgattattatctgcctgtgccaggaacagcatatcgctgaccattttggtcatccggttatactcttcaagactggaatagaggacatcctcaagttccctctgtgttcgatcctgactcagtgcgatttcagtctgcgtcaccagattggtgatgggcgttctgatctcatgcgcgatatcggcagagaaattggcctggcgggtaaagacatcctcaatctttccaatcatatgattgaacgagataaccagttgctccagctcaatgggaacgcgtgtcggttccagtcgcgcatcaagattctcggaggtgatgtttttaatggcattgctgacattacgaaggggcaggtgcccctgacggacagcgattcgaatgatcagaacaatcaacaggcttatcacgacggcaatcgcaatcaggttctttttcagcgcatcgaggtaatggagatggaaattaatggatag

SEQ ID NO: 450633 - DNA, 222 bp, Serratia marcescens
atggaacgcgaagaccgctatcttgttatcaaatttaaagatgcaatcgaggcgctcacagttgagcaacgcgaggagttgagacgcatcgccctggctgttaccgcgcatcgaatagacaacgacaaacagccactggatgtcgttgtagttgagcgcgactggcctgagtacgagcaggtatggcaaatgattgaagcacgcgttaagggggatgcatga

SEQ ID NO: 450634 - DNA, 702 bp, Serratia marcescens
atgttccagccgcgcggcaatattctcaacgtaagccatcgacttcatattattgccgctgccaatcatcacgaatcggccgctggcgatctggcggaacaggttatacacattgccgcgattgccttcaccgaataccaccgtcgggcggatgatggtcaatttgtttgcgctatccgccttgcgccacgcttcataaacgtattccgcttcgagcttggacttgccgtaatggttgaagggatcgaaacgtcccccttcatcggtttcctgctcgacgaacccgtaaacggccaccgaggaagtgaaaatgatttggcggatattcaaggcggaggcggtcatgcagacatggcgtgcgccttcgacattgacctgataatagagcgaaataggatcgacgttgtcctgatgctccgccgccagattaatgatggcgtcacagcccgccagcggttcttgcagggtctggggctgtgtcacgtcgccatattgatagagcgccggaaaatgcgcgctgggttgcttgtcaacgatgaccaacgtcagatcatcgcgcgcactgagacgttttgccaggcgtgttccgataaaaccggaacccccgataatagctactttacgcttatccataatttgtcactcagcaggttctcattattcctgtcacctcgatggaaacaggacgctaatatgcgttag

SEQ ID NO: 450635 - DNA, 1203 bp, Serratia marcescens
atggctctaaccgatgttaaagtgaaaaccgcgaagccaaaagaaaagccctataagctggctgatggcggtggtatgtatctactgattaacgctaatggttcaaaatactggcgaatgaagtaccgcttcgtcggtaaagaaaagatgctttctatgggcgtataccccgatgtttcactggctgacgcgcgcgaaaaacgcagcgaagccagaaaaattctcgccgctggaggcgatccgggtgaaacaaagaaagaggaaaaaatcgcccagcaaatgactctgaaaaacactttcgaagctgttgctcgcgagtggcatcagacgaaagccgatcgctggtcattacgctatcgtgatgaaatcatcgatacctttgagaaagacatttttccctacattggcaagcgccctattgccgaaatcaaaccaatggagttactggaagcactgcgtaaaatggaaaaacgcggagctctggagaaaatgcgcaaggtccgccagcgttgtggtgaggtgtttcgctatgcaattgtcactggtagggctgaatacaacccagcccccgatcttgccagtgctttagctacaccgaaaaaagtacatttcccctttcttactgccaatgaacttccttattttcttaaggatctggcaggctataccggcagtattatcactaagactgccactcagatcattatgttaaccggtgttcgcacgcaagaactgcgtttcgcacgctgggaggatatcgattttgagacaaaattatgggagatcccagcagaagtgatgaagatgaagcggtcacatattgtgccgctttcaaaacaggtcattgagctgtttaaacagcttgagccgatctcaaaacaccacccactggtctttatcggtaggaacgatcctcgcaagccaattagtaaggaaagcattaaccaggtcattgaattgctggggtataagggaagactcacagggcacggtttcagacacaccatgagtacaattctgcatgaacaaggctttaactcggcttggatcgagactcagcttgcgcatgttgataagaatgcgattcgtgggacttacaaccatgcgcagtatctggatgggcgtagggaaatgatgcagtggtatgcagattatatcgttgaactctcttccggaaaggtaactccattaaaattagcataa

SEQ ID NO: 450636 - DNA, 855 bp, Serratia marcescens
ttgaaatacgtaatctatgcagacgaagcgtggacgcaatcgcaaccactttatcgttaccactgtttttttggtgggatgctatcttcaatggaagaatttaaccgatttgaagctgaagtagtgcagttgaaaaaagatcataattataaaaaagaaataaaatggtccaatatatcacgacaacatattgaattttatgaaaacttattggttttgattgaaagatttatctgtaccagtgaaaatacgaaataccgacaaatgtttatggacaggtcatatagatatattggcgaatccgcttcagagctcgattctcaatttaaaatatattatcagttcttgaagcactgttttggatttggttatatcaatgaaagaaaaacattcacattcaagcttgatacccactcaagccacgcacataaattaaagctaaaaacctttatagaaggtttagaaatacagaatgtcgatatcagagtagagtttataaatagtaaaaaatctgtacctctccaggtctgtgacttacttatgggtgctgctggttactatggaaacaaagcagactgggatttgctaccaggaaaaagaagaagaaccccaaatcaaatcatgaaatctggtttcgggaaaaaaatctatgacatgctgagacgaatcgactctcagtttcggggcagtaaagcgtttaactggtttgaaagtactggcgttgatggcgacataagcaaccggtatcatcataaaatgaggatctggaagtttatcccgaccaatagtctatctgatgcaagttggcaggacgatgcatttgggaataacaaagtaagaaaaaaagtcctgtaa

SEQ ID NO: 450637 - DNA, 1797 bp, Serratia marcescens
atgaaagatataatttactcttcatttgatgatagtcagtttttatcggcaatgaaacttagggaagatttagagccttttaaagaaaataaaatagctgcttttgcaattgagttatgttttggtgtagatgactcagtttctaccttaatgccagcagttacagggtctggcggcgacgcgaaaatggacatgatttttgtcagcagggaaatgaggatagtagtaatttgtcaagcctatatgtcaaatgaaatgaggagatcagccaaaggaaataaagggactgatttaagttatgcaatgaatgttttattgcatgctaatgaaagccaactaaatgataagataaagccacaagttatggatgctcgctcagctataaaggatggggaaataaaaagcttatatgtgtggtatgttcataattgtcctgagagtgagcaaataaaacaagatatgtcattggctataccaggatctaggcaacttcttaatcaacttggtggtgagtctaagtcagtatctctccattttaatgaggtggggcttgaaactctggattcctattatagatcttcgttgcagtccatatccgtctcagaagagattttgtttgattcccctcgaccagggtttttgattgaaaatcaaaaatggaaatcctttatgacttatgtaagtggtgattggcttgcatcgctatacagaagacacggtgacagcgggctttataaccctaacgttagggggtttatgggagccaacaataaagacactgacaaggtgattaatgctggcatacaggagtcagcagacaaggatgcaggggatttctttgtctttaataatgggataactgcattagtccatgatttcacgctaaacaatgattgtaaagaactggtctcaattaaaggtattggaattgtaaacggagctcagactacaggctctttaggcgagctcgatactgatgtagacttaactggtgttatggttggtgtgcggtttattaaatgtgaagataaagataccgttaaatcaattacaaaatacaataatagccagaataaagttatacagtcagattttagagcgaatgatattatacagacaaggcttagagaggagttctctaggctgggaatagcagactacgatggtggtttgcgagggtactcagcaggtagtaagaaaaggaaaattgacgctcacacagctgcgcaggctttgacagcatggcatgggagtccatacgatagttaccataataaaatgaaaatatgggatgatgctgagctttataatgttgctttcgacagcgccattactgccaaacacttaatgttcgtaagtagtttaaatgatgctgtcaatttgctgaaagtagacttgcagttaagtgctgaagatgaaatgacagcagaggataagcagttgagggcatttttaaacgagagaggtagctcttttattgttatccatgccatggctagaatgatagagacatttattgggagtaaaattatatctccttacggcatatcattcaaaagtgatataagtaaggaaaaggctagcgaattatggattctagttataaaaactttctctaggtttatggttattttaaagccgggccttgccaatcgtctttctaataagaaagcaactgaagaagcaactagtgattttgttaaacaggtaggaaccgctttcgatttcatgaaatcgctttctaatggtaagaatcctatcaaagattttgtttctaaaattgaaaataaaatctaa

SEQ ID NO: 450638 - DNA, 318 bp, Serratia marcescens
atgagcaaccatacctggggcctgcagcgggagattacaccgcgcctgggagcccgtctggtgcaggaaggcaaccagctgcatgatctggctgaccgggccagcatcaccggcaagttcagtgacaccgaatgccggaagctggatgaaacattcccgcactttatcagccagatggagtcgatgctgaccatcggtgaactgaatccccgacatgcccactgcgtcaccctgtaccacaatgttttcatctgcgaagccgatacccttggtagttgtggatacgtatacatcgccatttaccctactcagctttaa

SEQ ID NO: 450639 - DNA, 459 bp, Serratia marcescens
atgacaacagcgacacaaaacaacctcgcatctgctaacgaacccgaatttgaactgaccgtaacacaggttcctgacgaacagcgtatctgcttctggccgcagcactttggcactatcccgcagtggataaccctggagccgcgtatttttgcctggatggaccgcttctgtgcggattacagcggtggtatctggtccttttacatcctcagcaatggcggcgcgtttatggcccctgagtctgacagtgatgagacatggcatctgttcaacggcatgaacggtaatggcgcggatatgagcgcagaagctgcaggtatcgcggtctgcctgattgaatacagccatcacgcctgccgtacagggtgtgacgcgatgaccgcgcactattaccgcctgcgggactatgccctgcagcatcctgaagcccacgccattctgcgcatcattgactga

SEQ ID NO: 450640 - DNA, 240 bp, Serratia marcescens
atgtcccaatcagttttactgccaccgggacccttcacccgaatacaagcagaagcggtcactaccacgtacagcaatatcaccatcgaagacgacctgagcagccacttccgcctggtggtccgcgacactgaaggccggatggtctggcgggcgtggaactttgaaccggatgccggtgaaggtcttaaccgctatatctgcaggtcaggcatccacactgacactttcacccgctga

SEQ ID NO: 450641 - DNA, 468 bp, Serratia marcescens
atgataataggttcactaagccggtttgtactggcatgttcactgtttaccagctttacagcctttgcggttcccggactctggcagcagggctatggccagggcaatacggaatacaacgtgacggatgccagtgggaaaatgtttaccatcaattgcacgggaaatccggaccagaacggtttctaccagcattctgtttttctgacccagacggataacaggatggtcagttcgcacgatgacggcaccaagatcaccgtggtaatgaatcaccagcagtacgttattccgtccagactaggctggcgaaacggggataacgcctggtatgacttcatcagcgatatccgcaaagcccgacagtttgaggtctacgtcaatgaccgcaaaacgggcactttcagtgctgacccgacgaatgccgcgaaggtcctgcccacacccggagagtgtggtaacgactga

SEQ ID NO: 450642 - DNA, 369 bp, Serratia marcescens
atggccgcaatccataaagcgctggacgaatgcagcgcagagcacccggtcttttatgaggatgaggtggatatccatctcaatccaaaaatcggcgcggactggcagctacgcgggcatcaaaaacgcatagtaaccccggggcagaatgagaaatattatctggccggggcgctgcacagcggtacaggaaaagtcagctatgtgggcggcaacagcaaaagttcatctttatttatcagtctgttaaaacatctgaaagcgacataccggcgagcgaaaacaatcacgctcatcgtggataactacatcatccataaaagccgtaaaactcagggctggctgaaagcaaacccgaagttcgggtga

SEQ ID NO: 450643 - DNA, 603 bp, Serratia marcescens
gtgaaaaagcagaaaaacatcagaactaccctgtgcgcgagcatcgtgatccttgcgggaatgacgataagcacaacggcgttcgcccactgcgacggcatggatggaccggtgattaccgaggctaaaagcgcgctccaggcgcatgatgttaccccgttattaaaatgggtgccagaaaaccgtgaagataccgtcaggaaggcgtttgacgaggcaataagcaaacaaggtggcagtcaggccgctcaggagaaggccgatcagcagctcttcaccactctggtacgtgttcaccgtgaggcggaaggcgcgccctttaccggtgtaaaaccggcaggccatattcccgtggttgtacaagaggcagatgccgcactcaacgccggcaatgttgatagcctggtggcgaaggtgactgccaatgttgagcatgctctccgggaaaaatttgctaaagctgaacaaagtaagcaacaagtgaatcaatcggttaaacagggacgtggatatgtgaatgactacgttcactacatacattttgtcgaagaagtgaacggaatggcggcaggaggatcgcctgagatggaacatcagcactaa

SEQ ID NO: 450644 - DNA, 744 bp, Serratia marcescens
atgccggaacctctgccccttgcgttggtctatcacggggtatttctcggttggttgggctattcgctcggccgcttgcagtcatttaattcggatatccagcgtctttattctgatatcgcccgccagcaaatactctggctccgctttctgctgtcgggttacgcggggctgtggatcgtcagtatcatttgctgcctgtttttctatctgttcaggctaaccgatcaaaccacctggatactgcctgttgtcagtatggcggggtttgcgttcattaatacattgctgatctgcgcactgcgacagcccgctgcgtttatggggctaacgcaggaagatgaaaccctgctggtggatattcagccggttaaaacactgttgttaccggagtcaaaacaggtagataacgtggtggattttatgcgtcggaatcagccgtttctggattccaccctctccttaagccagcttgcgcgccagataaaactttcaccgcacgatctctccgccattatcaacaatggatttcagcagaacttttttacctttatcagcgagtaccgcatagagtatgccaaaaagttactggccacgccgggagataagcggaccattcttgatattatgtatgcttcgggttttaattctaaatcggtatttaatactgcatttaagaagcaaacaggtgtgacacccacagaatatcgtcggcaacattgtctacaaacagtactccgatga

SEQ ID NO: 450645 - DNA, 582 bp, Serratia marcescens
atgaaaacatcacccgattcactatcatgggcggcattgtcacatctgtcccccgtcgaaatctggcgcctcctgctgggatatctgctcagccagcactacggactgactcttaacgacacgccgtttggcagcgatggcgtgattcaggagcacattgaggccggtgtaccgctggcggatgccctgaatgatgttgttgaaaaatatgacctagtacgtacaggccagagcagcttccgtttcacggtgcggtcttcacttatcacccccacggatgtcctgcgggcacggaaagccacagggcttctgaagcggggctattacaggcgggtgacggatatcacgcaaggtctgccgattgacgggacacttccggcaggcaccttcacccgcagacaggctgaggccactgccgccctgtatatcaacgttggcattgaggatgaccagcacacccacttccggctggtcattcgcgatgcggacggccagctcatctggcgggcatggaactttgagcccggtgctggtcatgacctgaacacccacctgcagcgctacggtgtgaaaaaacgctga

SEQ ID NO: 450646 - DNA, 435 bp, Serratia marcescens
atgacccgtctggcttcgcgctttagcgccgcaaatcttatccgtcgtgaccgtccgttaacccgtgaggagctgtttcgcgtggtgcccagcgtattcagcgaagacaagcacgcatcccgcagtgagcgttacacctgcattcccaccatcactttgctggaaaacctgcaacgtgaaggttttcagccgttctttgcctgccagacacgcgtccgtgaccagagccgccgggagcacacgaaacatatgctgcgcctgcgccgtgccgggcaaatcactggtcagcaggttccggaaattattcagctcaactcgcatgacggctccagcagctaccagatgctgccgggcctgttccgtagtgtctgctgtaatggcctgagccatgcagtaataccctaccacttacatcccttcagcattacggaataa

SEQ ID NO: 450647 - DNA, 1035 bp, Serratia marcescens
atggcattgatggattatggtcgttgcaggatgtacagactacagctcgaatggcttagagcgaatcacggtgtaccagtaaactgggatgccgttaaccgataccattcggcatcacaatatacatttttaataaatgaaattatatccaatgatatgtttctcaatgctaatcggaaaaatgttatcagagaaatgaaagaatatgcttccagtagagttgtttctgggaagtatttcaactggatgaaggctgaagatagggctgcttgttactctttgttttggctggtttgtaatgcgaatccattttttcttggaagtaattccgaacataaagatcaagacgcccgcaaggggcactgtttagataatctttatgaaatagctaatggtattaaatttaagtatatcgctccatttggtgattccatcgataactatgttttttcaagtatggtttttgttgataacttggatgggaacatagcagacaaaatcacgctaatagaaaacgcctataatgcgtggtcaagacattttagtcttttcccccggccatttaaatggattgacttaagcgaagaagataatattttctggttgtgggactatatgcgaaaaaaccatattggatgtgatctgcttccgtcatcttcaaaacagcaaaaagattttttgctggcaacgtttgacaactgggccggctggacaaatcaacagtttagtaaacaaaaagaaaatgcccgtaaggtgcgggctaacccggaagagccttcttcattaaagaagctattaaaccccactacgtccgatgattgcagaaaagttttcctggactatgcacgtaatgcctgggtgcaaagacgacatcgtcagaaagtaaaaaaagatacgacggggataaagcttacggcacaatccagaaagaaacttctgactatacagcagttatcaggtgttgagccaaatgccatactaaaaagcctcattgatgatgcttataaaagaataaaggaaaagaacaaagattaa

SEQ ID NO: 450648 - DNA, 576 bp, Serratia marcescens
atgaacgataactatccgtatattgccaaatataaaatggactggtttttacatagcctgataaatcaccacctgaacagtgtcattgaacgctattcaaaggtgatcggtatccgactggatttttcgtacaaccagaactcagaacgttacaaaaaggactacagttgccttcaagaggatcttcgaaagctatttaggcaagttgaacaggaagatggtatagctggatttttctgggtaattgaatatggtgaggacagtaggtttcattctcactcagttgtgtatctggatgggcaaaaaatacgaaaagcatttccgatagcagaacgcataggtgctttttggaaggaaataactcagggggaagggaaatatcatcgatgtgaatacaaagagagttataaagccgatataaacaaaactattaaccatcgggataccgattatatccatggcttgagatatatcatcagctaccttgcaaaacaggaacagaagcataacacgcaaatatatgggagtaatgaagtaccgccacccagtggattaggtcgcccaagaaaaaattag

SEQ ID NO: 450649 - DNA, 207 bp, Serratia marcescens
atgtatacaaaacctgcactacttgaagatcaattcattgatatgaaattcattactcagcttactggcctgagcgataaatggttctataagctgatacaggatggagtatttccgaaaccaattaaactgggcagagcctcgcgctggctaaaaagcgatctcgaagaatggttatattctcgtattaacgaatcgaggagttaa

SEQ ID NO: 450650 - DNA, 921 bp, Serratia marcescens
atggatcgcatacagcagctcaactacgaaaaagacttccgtattgcctttttggaatctaagggagacagctttcaacatctattcgaaaaactcatgtcaaaagctcatccaaatgacttcatggcgtgtcgcccgtgggggaatgttggcgatcggaagaatgatggttacctgccctcggcgcgtatcttgtaccagagttacgcccctaatgaattgaccgctgctgaagcagtcaagaaaatcaatgaggatttcgatggagccaaagagcactgggaagaatatttcgatgagtggacctttgtccacaatgctcatgatggccgtttaggtccccacattatcgaagcgctgctgaagctgggtgaggctcactcccaaatcaagatcggccattgcggatatgaggaaatgctggcgaagtttcgccagttgagcttacaagatcttgaatcttggtttggtccgtcgctgacaatggaagcaaacgtgaatctgggatttagtgatctagttgccgtgcttacccacatcagcattatgcccgtgcctacttccagtgaagtgaacgatgtgtcgcgcggaaagatcgaggcaaatcttttgtctcaagctgttgctgattttttgaaaatcggtatgcaaaaatcaactctcgtggcccagtttttcaataactggaggaacccggcctacggtgagcagatcgcgcaggcgttcaacagccaatacagggcgctgcgtgaccaagttcctccgctgcatcccgatgagatatttggtcggcttgaaacttgggccggaggcacagccaatactacgcctacacataaggcggcagtgctggccgttatggcatatttgttcgacaaatgcgaaatttttgaagacgctcaagcggtgagagcagtatga

SEQ ID NO: 450651 - DNA, 1722 bp, Serratia marcescens
ttgattcatcacattttcagcactctacccactttcaagattattgaagatctgaaaccaggcctgaatgtcttgcttgctcagaaaaccgagggtgcaagcagcaagcagacgcgcaatcgcgcaggtaaaacaagtttcattgagctggttcatttcctgttaggtgccgatgctggacctgaatcgattttccgcactaaggagctagtggatagctcctttggaatggtattcgacctgaaggcggagcgcgccatcgttgagcgtagcggcggcaccaaggccaaaattttcgtgaccgtccctccagcagcgaaggctaagttctcggctacggagtggtgcgctttccttggcgaacacatgtttggtttgggcagcctggaggctgccggcagcaagccgccttcgttccggtcactattcgcctactttgtgcgcagacaggctagcggtgccttcacgaccccggagaagcaggccgcgatgcagggcactggcgacatgcagatagcgctcatgttcttgcttgggttggactggcagattgcacgagattggcaagctgttcgcgatcgagaaaagacgctggaagagctaaagaaggctgcaggaaatggtgcattcggctcaatcattggcaaggcggcagatttgcgcacggagttgactctgaaagaagctcgcctcaggaagctttatgcagagattgatactttccaggttctgcctgaataccgggagttggaagtcgaaagtgcttccctgactcgccaactcaacgaattggctaatgctaacacaatcgatttttcggccatcagagatctggaaagtgcgctggcgtccgaggtcccacctgaccttgaggatctgcaggctgtctatcaagaagccggcatcgtgcttcccggtctagtgaagcgtcgctatgaggacgtaaagagcttccacgaatcagtggtacgcaaccgcaaggactacctgtccagcgagctggaagccgcaaagctgcgcatcgaactgcgtgatggtaagaaagcgcagatcgatcagcgccgtggcgaagtactgggcatcctcaagagccatggtgcccttgagcagtttcttaagctacaaggagagctagggagactggaatccgaagttaagttgttgcgacagcgctttgaagcagccgagcagcttgaaggcaccaaaaatgaattggagatcgagcgccatcgcctcactattcgcttgcggcgcgacttcgcagagcagaaggatagattagcagaggcaatcgtggcttttgaagagacctcgcaacgtctgtacgagtcggccggaagcatgacggttgacgagacgtccaatggaccgatgttcaagtttccgatgcaggggcaacgtagcaagggaatcaagaatatgcagattttctgctttgacatgatgcttatgcgtctgtgcgctaagcggcaaatggggcctggattcttgattcatgacagccatttatttgacggcgtcgatgggcgtcaagttatcagtgcgttgcgtcttggttctgagattgcgcaggagctaggtttccagtacatcgtcacgatgaatgaagacgatgcctttaaagaaacgattgatggcttcgaccttaacgaatatgtgttgcaggagcgccttaccgatgcaacggaggaaggtggcttgttcggaattcgatttggataa

SEQ ID NO: 450652 - DNA, 1263 bp, Serratia marcescens
atggacaagaagaccaaaggttcgtggttaattcatcacactaataaactgcagggaataacaaatcaagccggctatgagaagaccttccttgcgggtaaagcgggcattttgctatctgcaatctcgtcaaataaccactcaacactgaataacgatcgcctgaacgttctggcgcaagcggcgaatatcaatacaaccttcgaactaccaaaactcatcgaagtactgaagcagcagcaactggttgacaccgcgaatggtggtattgctgtacttggtgttacaactgcaaagactctccaacatacatcagacatatatgatgccctcatgccaggtgcatctgaggttgcctcgatcgcgcttgcagagaaagcttcggtcgagcccgtactatctggtcatgtttccacggaattggccgacttgtataagcttgcaaaacccgatattcaacggctgatgtctgatgctgaacaaattggatttgtggatgctgaggacctcggtgccgggcaagcattattatttaacgggaatctcttccgtcgtgaaacgacccgaaaaataaaaactgttcttgactcgctttcatcagccgagcaatcaaagctcaatgagcttactgatacattgaaaaagcgcgcctgcgtcggcacggatttcgcaatccaactccttggcgaatctctttttaagaaggttgcagccattggattgtttgatatcagcgttgtcagtaatttgaccgaggatgctgggtttctgactttgccatccgcgttttcaaagtacagcaactcaatggtcgatgacgcatttgatctggctaaggcgtttgtcagttctgtgacctatgggatgaccaagagcagctatgccagggggcagattcagatggttgacgcgctattgagtgcactggttcgaggtgaaagtgttggaccggtgaatgccattgcacaggactataaagtgctggaactgaagggggtcgttgaagttaagcacgggacaaaaaaaggacgaagcggcccaatgctgaaattattgaaaacagaagttggtgaacttgcattacaagctatcagacaaggggacgttagcgaacattctctgaactcacttccgtctgcggcagtcagcatattcaatggccctgaacataatcgtgagaaagttcggcgagcacaaattaaagcgagccccaaagctaccaatgacatgctctctattcttcgcactggaggcggtatatga

SEQ ID NO: 450653 - DNA, 1047 bp, Serratia marcescens
atgagcaagggacagcaaaatttgctcaaaggcccccgtatggaggaactactgcgaagttatttcctcaaggctggatactatgtagtgcgaggagtcccgtttgtgtatgagggttttgacgttacggatattgacctttggctgtatagccggacgtcatctgtatcacgtgaaataactctggttgacgccaaaaacaagaggacaccgcaagcgatagagcggattttctgggtccaggggctacgcgttgcgaccaaggccaccaacgctgtagtcgcaactacggacaagcgccaggaagtgaaggattttggacgtgagttgggaattattgtgctcgacggtaccttcttaggcaagcttgacaagtcggatgagcctaacgcgttgaggtattctgacgaggagttcttctcaaagattgatgaatactctcttagcaaactcgatggcgactggcgcggacgcatggttcattctaagagcttactggcgaaatcactttcgtttgacagttgcaatgagtggcttatgcagggaaaattctttgcagaacagacgataacaaaaagcaaccagcgtgaggctgctttgcgttgcctctatatggtttgttcattcattgctatcgcagtagatttctgcatgaaagagatttcgttcaatgagcaatcggagcgcagtgtactcattaaggacggattcacctacggctcgaaaggcagtgcgggtctcaagaaaatattgaatgtttcgatagggctcatagagcagcacgcaaaagatgggatcgctacttccagacaggtacgatccagcattgaacggcaactagctgacctcaacactggtattcttggcgaattctttgcaaagcaggatgtcgccagaacccttttcgctgtggcaaaagagttcgagcaactagcgatgagccgggatttctctcccgatgctaaggcaacgcccgagcttcgtagcatgctctattgtttgcttgattattgggaaattgaccgggttatgttttctagcccgtaa

SEQ ID NO: 450654 - DNA, 873 bp, Serratia marcescens
atgtctaagaagtcgaaaactgaatatataaaaaataaaatgagaggagagttctcattaatattggctgatattcttgatgcgccacagataaaagaaagaattacagttttattagatgagattaaaactaatagtgactttgaagaaatggttattctttgctctttatctagttacttgaacttcgaactcgattccttagatgtgcaaactttattaaatgtgagggggattggaagtgtatcatttttgaagaatactgcaatatcgcaggttctacaaaaagatgttaaagggaattttatactgaagaatccaaacgtatactcaaatttactcaagatctttgggagtaaaaattctgatatcattgaagatttttatgatagagtgaaaaattatttagataatacaactaatcaacacttttggctacaatatgcgattgctaaaatcacttcttcaaagcatgatgtagccgaacgatttattgaaacggcgtattcactggccaaaaggcatagaggctataactatgattggatcaattgtcagttttcaaggttattgatcgaaagtgctcctatgcaaccaactcctactgcgatgattggtcaattgaaacacgcacattcgttaattattgatcagaataatagacattaccctttcagagtagcaactaaatattgtgatttcctacaagatcatggaaatagattgggagctgatcataaagaagaagtagttactctcataagagagttctatgaaaaatatgacattacattgaaagctctaaataactacgatcatcccattatgaaatcattcaaaagagaagctgataaaattttcaaaaaacgttaa

SEQ ID NO: 450655 - DNA, 138 bp, Serratia marcescens
atgatgatctcatatcaggaacttgttcgcaccttccttagtagttttataaacgaattccgcagtgtcactcagcgtcaagaaaccatgggcaaaaccttctggtatccaaagctgacgtttattctcagcgcttaa

SEQ ID NO: 450656 - DNA, 1308 bp, Serratia marcescens
atgaaaagcaaagtgtttaaccgcagcctgctggcgggcgttgtcatcagtctctgcagcggcctgttggcgcccgccgcgctggccgcctgtgcgggcaccgagctcagcgcctgtcccgcgcctttcgatgcgcaattgccggacacgcacaagatgctcacctggagccagagcgaccgggtgatcggttttcgtaacgactaccgcaactatgcgggggatgtgtttcatcacggcaatgccacgccgctgctggctgccgctaaaccgctaacggacgccagttatcgggtgaatggcaaaacctacagcctgcaggattacctgcagcgccagaacgtcagcggcatgctggtattgaaagacggcaaaatcgcctggaaatatctgggggagggtaataccgacgctaccctgtggacgtcgcgctccgtgggcaaatccgtggtcgccacgctggtgggcgtggcgattaaacagggcaagatccgctcgctcgacgatctcatcacgcaatacgaacccgatctgaaaggcaccgcgtgggacggcgtgaccctcaggcagctgatcactcacacctccggcgtggcgtggaatgaggattacaccaacccgaaatcggacttcgcgcagctgaccgagtgtgaagccaggcccggaacctacgcctgcgtgcgcaagctggtggccggtttgcaccgtgcacatccggccgggcagaactggtcttactcctccggtggcgcgtggctgctgggcgacgtgctggagcgcgccaccggcatgccgctggcggcctatctgcagcaaagcatctggcagccctacggcatggcgagcgacggcgtgtggcatgcctacgccaaaggccagcacgacgtgggcgcgcatgggttcaatgccacgctggaagactgggggcgcttcggcgaatttattctgcataacgggacgttgccgaacggcaaacagatcttgccggaagattgggtagcccagtcctccaactggacgcgggcggcgggctcggtatcggcggcgcatcctgacggtatttacggctaccagtggtggaacaacgaagtgccggtgaatgcggccaacgttgagcctactccgcaggcctccctcaagcattctctgtgggcgctggggatcttcggccagatgattatggtcaatcaggcggagagtctggtgatcgtccagtggtctacctggccgcaggcggagccttctttcagcgcgcaaccgctggaggcatcgctgatgtttagtgcgatagcgaaggaattgcgttaa

SEQ ID NO: 450657 - DNA, 354 bp, Serratia marcescens; identical to SEQ ID NO: 166136

SEQ ID NO: 450658 - DNA, 939 bp, Serratia marcescens
atgaataccctttacacaagccagtcaacgccggacaacatgagcctgctttacgcgcaagcgcatctttacaaccgcataaagatattcagcagcgttaattttttcatcagtattgtgttaccagtacttctctcagttgcggcagccattctgaaaagccggtacagcgttccgcaggagcttctatcagcatacatgggcctatacggcctgatcgttcttacagtcaatattgcacttagtggctacatctcttctgagcgcagaaaggcggcgaccattcaggaaatgtatgactgtaatgtccttagaataaaatggaacgacctccgcgtgggaaagaaaattaccaggggtaacgtattcagggcagcacgtttctatcaggacaggccggccaaggcacaagcccgttttggcagcgaaggatggtacgtcaataagtcctactatgcgccgcagagtgtaatggctttactgtgccacggtaaaaacttcggttgggaccggtctttaagggatcgcctgaacgtgttctatatctggggcatatccatgtcgcttttcagcctgcttctatacgggatcatgatgaaggctacgctgaacgatgcccttttttacgtggtcttcacccttcccttaatcaggtacattctcctgcagtttcttgataacagaaagagcagggacagaattgaaaaggtaaaagattacatagataaagagatatcggatattaagattgccggccgttttaacaatgatgacctgaactacaaactcaggtccattcaagacgaggttttttcacaccgtgcaacgagccccccagtgccgaacttcatacacctcaggatgaagaaggataacgaagcggtttatgacgactactttgaggaaaaccttaaactgatgacgttcccggaaagctga

SEQ ID NO: 450659 - DNA, 771 bp, Serratia marcescens
atgtttggcctgtccgcagaagggtgcacttacacgatttatagtgaccggataacgctcaattcagacgatacccctagacgactgaataacttccggcatcctgattctcagacgatcagctcggtcaggatactgaatcactttaaaaataaactgcagaacattccgcagtatgagaaggctgacctgaagcgcaatcaggaagcggtgactcttcagctgagcacaaaaacgtggaactttgatattgttccctgctttataactcacgccgatgttttgggacgcagctactacctgatcccggacggcagcggtaactggaaaaaaacagacccgcgcattgataaagcaagaacaactgaaataaacgttaagaacagcggcaacatgctgaacgttattcgggcagtgaagtactggcagacaactaaagcattgccgtccatcggctcctatcttcttgagacccttattctcaactattacgagcacaggacaacctgtcagcaatgggtagacctggagcttgagggtctctttaaccatctcagcttctacattcgatattcagttaacgatcataaaaacattcagggagacattaatcatttatcttatgaagcgagagaaaaaatatctcagaaattcagttcggaggcgctaaaggtgagcgaagcaaggggattagagaaaaataacgagcatcagaagtccataaataagtggcgcgaaatattcggctcagacttcccggcatttggataa

SEQ ID NO: 450660 - DNA, 1653 bp, Serratia marcescens
atgaacaaccaaaaccaaatgaagagggagatggaagccagccaaatcaatcagagtaataaactaattgaattagcctttgcatcagaaatcccagtacaaagagaattcggcgacagaatcctaaatgaaattctactttgttccccagaaaatgtagacctaagccgtattcagaataaagcagcagtacttttcaatcacgacaaagatgaacttatcggtgttgttgaatcttgttctgtagatgcagataaagtatgccgtgcaagcattcgtctttccagtactgcacaagaatatcaaacaatggttgaagaaggaattctaacaaaagtcagtgttggatattcaatcatcgattacagaatcgaagctgacaatctactagtaacaaaatggcaaccatacgaaatcagtttggtttctatccctgctgatgatttgaaatcaggtattggccgttctcttgaacaagaagttgaagaagaagaacaacttgaatcagaaactgaaagtactgacgaacctcaagatgaaaccagtactgaatcagaaactgaaagtactgacgaagaagtaataaatacagaagaacaagacaaagaacgtcaaatggaaattgccgctcttggaaaactactaaataaggatgtatcccgttatctcgattctaatttgagcattcgcgatataaccaatcaacttaaaaataatattgatgataaggaaatcacaatggaaaacaattctctttctctagcaattcgttccataattgaaaagcaacctattgatggtacaattattggtgaacgtggttatgttgtagatctacaacgtgataccaatactactaacgccgctggtgttgtagttcataaaactgccgactcttatattgatcagctttgggcacaatcagtactagcacaagtggcacagcctcagatctttgcaggtctagaaggtattggtgaattagttatcccagttgcaaataaactgactggcggtaattttactttcgtagctgaaggtgctgattcaccaatgcacgatgcaccatttactaatatcagtctaagaccaaaaaactttactggttcagtacttctaaccaagaccctacaactaagtaacaactccgcagaacgttacgtatctgaacagctagttaaaacagcagcttctgatttagaaaacgaaatcttaggttacattgctactaatgcaactcaacagactgctgctgtatttgaccttgctgcaattgaagctgcaattgaagctttagcgatggcaaacgtatatgtaggtgattgtgtagcagtaatgcatccagccgtttattcatcaatgcgtcaagtgccaatggccggtaacaccgccgctaagatgcttgtagaaggttatcgtgatgaacaatatctcgctgatgagattcgtgtaattgtcagtactcgcgttcctgtcgatagcattctaattggtaatttctccgatttagtcctagctcaatggggaaatgtagaattagatagggatctaacttctaaacgtgcaagccaaggtgtagtactacgttcatttgcctattgtgatttcgcagtgggtcacaaggattcatttgtactaattaagaaggcttaa

SEQ ID NO: 450661 - DNA, 2208 bp, Serratia marcescens
atgaccaacaaagagcaacttgcatctctttacttatctgtttttgatcgccaaattgatgcactggggttgagcagctatacaaggcaactggagcgaggagcaaaaaattacgacgggatcattaaagaatttttggtttctcgtgaatttggcattcatttccctaaaggcattactttaagcgactatattcagctgatttatactgatgtgcacggcgttgccggtactgccgcacagctcgcgccgtatattgctctgggcacggataaaacggctatcacgttggccatcataaacgacctccgcaactcaacggccactgacgccacgactgtaacccagcagcatggttttgaatacgatatcggtaccagcctgctgtacaaaaccgcggcgtctctgacggcaacggccgccggcggcaacgcgacaggcaccgtcaacactggcgcatctcaccaaattagcaatgccgaaacggcagtgttgacggatgtgcaactgaacgccaatgccgccagcatcgtgaacctgaagttcgccgatcacctggcgaatctgaccatcaacggcaccagcgcagcaacggtcaacctgtctgacaacggtgttaaccccggtgtcgatattaccgttaacaatggcaacgtgattctgaacgccagttccgggaatgatgatgtcatcgtaacgtcgacggccaatatcgccacgggcaccggcgactttaaccttggcaacggcaacgactcgctgaaatgggcggggaatgcggcaaccggcgcagccaacaccgtcggcgccggcatctccgctaatggcggcgcgggtacggactccatctccgccaacttcatcaccaaaaccgtggtgaccaaccaaaacgccctgggcgttcgtaccagcaccgtgaccagcaacgccaacaacttctcgaacttcgagcagatcgacctgaccggctatatcggcaagtccgtcggcacgctgattacgacgccgctgatcggttcaccgactaccaccagcgtgaccacgccaaacaacacctttgactttggcctgaccaacggcacgtccacggtcgaaggcaccaccggcggcacggttacgcagaacgcagcggccaccaatctgggcactcaggggtttgtggtctccggtctggctaacgtcaacgtcatcaacgccgccggcggcaacgccgcgcagttggcagtgaaaggggacgcgaccgctgccagcacgctgaacttcacctttgtccagaacgccaccaatcacttcgacatcaacttcgatgcggtgagttccgccaatgtgaacgccggtgccatcaccctcaacagcagcagcagcctgattggcggtactgcattgagtacagttaacgtggcctcgggcggtaccggcagctttgacaatattctgtcattggccggcaccaatgcgcaggttcagaccatcaacgtgaccggtgatcacgcgctggatctgacggtgggcagcggtttcagcaacgtgcgtgatatcaatgcgtccaccaatacagcggggctgaatctcgactccagccatggcggtaccggtgacggtatcatcattcagttgctgaacattctgccgctgagcgttgtcaccaccaacctgttggcaccggtgttgacggcgttgggcctgaacggttaccaaatgaccgtagaaggctccagtgctgccgatactctgggcgtgattggcaacaccacgctgaccggcggcgcaggtgccaacacctacgacatcaaagccagtaacacgcaggcgggtgtgaccatcaaggactttaatagcctcaaggactcgattgtcgacgtgaaccatggcggcctgactatctccgatgacgccagcggcaccgcggtagcgaactacggtacgcgttctgccgacacgttggatgcattgttggggacactggtgggcggtttgaccaatggcgttatcggcctgctgggcggtattcttggcctggatagcagcaactcgctgacgtcgaaagtgggtgtggcatccgttgtattcagcggtggcggtaacactgccagctcttacgtgattatcgacaacaacgataaccactcgctggacctcaacgataccgtggtatacctgactgggcaaaaccaccagcaattggtggatacgctgcactacgcgtaa

SEQ ID NO: 450662 - DNA, 1032 bp, Serratia marcescens
atgccgatcatagcaccaataccccgtggcgaacgacgcctgatgcagaaagctattcataaaacgcgcgataaaaatcatgcccgcagactcacggccatgctgatgcttcatcggggtgaacgggtcagcgatgttgccagaactctctgttgtgcccgttcatccgttggtcgctggattaactggtttacgcactcaggtattgaaggcctgaaatccttacccgcagggcgctcccgacgctggccttttgaacatatctgcaccctgttacgtgagctgataaagcattctcccggcgattttggttatcaacgttcacgctggagcaccgaattactggcattaaaaatcaatgagataaccggttgccagttacatgcaggaaccgttcgccgctggttgccatctgcggggcttgtatggcgcagggccgcgccaactctgcgtatccgtgacccacataaagatgaaaagatggcggtaatccacaaagcgctggatgaatgcagcgcagagcatccggtattttatgaagatgaagtggatatccaccttaatcctaaaatcggtgcggactggcagttgcgcggacagcagaaacgggtagtgacgccggggcagaacgaaaaatactatctggccggcgcactgcacagtggcacgggtaaagtcagctacgtgggcggcaacagcaaaagttcagcgctgtttatcgctctgctgaagcacctgaaagccacttaccggcgggcgaaaacaatcacgctgatcgttgataactacattatccataaaagccgcgaaacacagcgctggttgaaagcaaatcccaagttcagggtaatttaccagccggtttactcgccgtgggtgaatcatgtggaacggctatggcaggcacttcatgacacgataacccgtaatcatcagtgccgctcaatgtggcagttactgaaaaaggtccgccattttatggaaaccgccagcccattccccggaggaaaacatggtcaggcaaaagtgtag

SEQ ID NO: 450663 - DNA, 1734 bp, Serratia marcescens
atgagcgttgaaaaactgattaccgatcatatcgatatctggtcttcggccttacaaactcgctccagcgccgggcgaggcagtaacggtaaaatcgacctctatggcattaagaaactgcgcgagctgattcttgagctggcagtgcgcggcaaattagtgccgcaggatccaaatgatgaaccggcgtctgagctgctaaaacgtatcgcggctgagaaagcggagctggtaaaacaggggaagattaaaaagcagaagccgctgccggaaattagtgaggatgagaagccgtttgaactgccggtggggtgggagtgggtgaggttaggggagttatttaactcgatagcgagtggaggaactcctagtaagtccaatcctgacttttggaatggagatatcccttgggccagtgtaaaggacttgggtaaagagaaatatattgcaaaaactcaggattacatttctcatcaaggtttggacgcgggaagtaaattagctgatgaaggtgatattttaatctgtactcgaatggggttgggtaaaattggaatcgcatcatgccccgtagcgttcaatcaagatcttaagtcggtgaaactgaccagtggtgtttctcttgattttttctttaatacttattcaacggtaaaaataaaaggaacaggaactacagttgagggtataaaacaagaacaacttcttaattatgttattggccttccatcgggtaatgaacagcaccagatcgttgaaaaagttgacgaactaatgtccctctgtgaccatctggaacagcaatccctttccagtctggacgctcatcagcaactggtggaaaccctgctggcaacgctgaccgatagccaaaatgccgaagaactcgccgaaaactgggcgcgaatcagcgtgcatttcgatacgttatttaccaccgatgcgagcatcgacgcgcttaagcaaactattctgcagctggcggtgatgggtaaattggtgccgcaggatcctaacgacgaaccggcatctgaactgcttaaacgtattgagcaggaaaaaacgcaactggtaaaagatggaaaaattaaaaaacaaaaaccgttgccaccaattagtgatgaggaaaaaccttttgagttaccggagggatgggagtgggtacaggtacaagatatctgtagcaaaatcactgatggtgagcattcaacccctcaaagaagtgaatctggccactatttgctctcggcaaggaatgttacaaatgatggaatttcccttcgggatgttgattatgttcctactgaagtttttaataaaataagaggtcgctgcgatcctagtattggggatatattgatatcctgttcaggaagtataggtcgaatagcgatggtcgataagaacgatgcatattcaatggtcagaagtgccgctatgattcgacctgttaacgggcaattaaatcttcactatctgatgaattcacttcaatcaccgtttttacaaactcaaatggttaaaagatcaaagaaatctgcgcaagctaatcttttcttaggcgcaataagttgcttggttcttccgcttccaccagtcaaagagcaaagtaaaattgtcaataaagttaatgaattgacaaatttctgtgaatccctcaaatcccgcctgcaatccacccagcaaacccagctgcacctggcggatgcgcttaccgacgccgcgttaaactaa

SEQ ID NO: 450664 - DNA, 1308 bp, Serratia marcescens
atgctgccaacgggacagtggcgtgaacgttatagccatatgcttaatgatttgcggagcatattacagcaaacgttggctgaaggggccgctccctctaaggggcttgagatcttacaagcgatgacccctttttggattgaatattcactctacgatgaatgtcagcgccatatctatcctttgctttatgaaaatacttctcgggtagtattaacgctacgccagagaatgaatctcagcgctgtagcaggtaaggcgtcaacctgggcaaaaggccctacgcctgaaacacattcagcctggaaaaccgcgcttgcacttgcagaaaagctcgacgacaaagaaatacgtttacaggctcattacggattatggttgtattatctgcgtactggcgagttggataaagcgcttgagcatgcgcaatctatgtgcgagctggcacggtccattagtgacgaggaggcgatggcaaccgggctgcgtattctcggtgtatccctgcattttttggggcgtcattatgtcgggcgtgattatctccagcaatctcttgactggtatgaacatggcgaattaagtcactctttccgttttggtcttgatcaagagagcgccggtcaggcctttctgtctcgtttactctggttacagggtgagtataaggccgcgaaacagatggcatggcgcggtgttaaaaaagccgctcgtttgcagcatgtctgttctctttgctgtgcactggctgaaggcgcttgtatgacagcagcactggatcgtaatccgcgttgggttataaaggccgcaaactggcttattcatctggcaaaaaggcatgatttatatttctggaagacatacggcgagctgtttcttgtttgggccaaacagttcagtcataccgatgttagtcaaaccacactgtttagctcgttgcgggcgatgggattagattggcaatattcccccttgttgtcagaaattgataccgggttatcgttgagagccacccgccaggatcatgaaaactggtgcacgcctgagctgatgcgtctttctgccactcaattacctcctcagaagcaacgcctgctgttggagaaggccctggacaaagcgcgtcagcaacaggctcatggctgggccctccgtattgcttattcattggcgacattgcaggctgaagccggggaaaaatgggctgctaaacaattgatacaggacgctttacatgatgttgatgactcagacaatgcgacggatgtaagaagtgctattgcgctatgtgcccgaataggggcctga

SEQ ID NO: 450665 - DNA, 165 bp, Serratia marcescens
atgagtaatgcattaatcaccggcactttgccgccgtcaatcgtcgccatggggatcgatgaacccacctggaacgccctgataaactccatctattccggcgctcgtgatgactctgtagtgatggccgtcagctactgcatcgcccgtcagttagatccgtag

SEQ ID NO: 450666 - DNA, 714 bp, Serratia marcescens
gtggcaagggatgattttaaaagcagagtaaaacaagagctcgcgaagagagcagcatatatttgctctaacccagactgtcgaagtaccacagtaggtgctagtggcaacgataaagattcgataaatataggcgttgcttgtcatatacttgctgcctccccaggaggacctaggttcgatgttaatatgacaaaagaagagcggtcagatataaaaaacggaatttggctgtgccaaagttgttcaaaattaattgatgtggataccttttcttataatttcaatactctgcggttctggaaagagataagagaaaatgaaacaaggctcgggcttggtaaaacagtgtcgcaagagtactatcctcagccaagcggtaccgactacactccaatacctaaaatacatggcgtgcaatatgaaattgcaaggatgaaattaattgaaagtggctggaacccacaaatgcactcatggtcatatcctcatgaagaattcacactacaatttggtaatgggaggtactattgggagcaagggttttgggagatagaagttgcctgcccaacagggtttgcatattgtaagtttagctttagcgatgtaaaaagaaataggcttgttgttgtaactgttggggagtgttatcccgaggataatatatatccccgggtttctgctttctatattaccaatgaagatgaaaattaa

SEQ ID NO: 450667 - DNA, 354 bp, Serratia marcescens
atgcacgactacaactatcagcggatagttgaggaggcgctggagcaatatgaccgcacgttaggggcggatcctgatgaaaaagcgctgcttgatgatcgcattgaaggtatgcgtaaaagtctgcgggtatcagtgttccaaaaactgattgcggagcgctgtcacatcgcggggctggacaaccgccctttggtcgcactgaccgagtcacctgatatggaggaatacctttactcggtacaaaccgaaatcctcacccgagtggcaaaagctgaacgcgcgatgaacattaatttagtgcgcgaaccaacgtactataatttccctgatgaaatagagttcaggttttaa

SEQ ID NO: 450668 - DNA, 1113 bp, Serratia marcescens
atgtctaaaaatcatgatgtaattcaagagcgtattgtgcgaaaacgttggcaaaatgagttgtcaagaaaaggaattttctatagcgaatataggcctaaaaaaaggaataaatctaaaagagccgttgaacacttcactttcccaaaaaacttcagtatctattccgctgataaagacaaatcataccaagatacaataaatatcattaatgctatctccagatttagtaagggtgcacttaagaaagctcaccttgacttctcaaaaactgaatttataaaggcagcggccatattgattctttacgcaacaattgaacaagcaattaatgaaggagttaactttaagataatttcattcccaagagatattaaggccataagaatcattaagcggtcaggtttggaattgctttgcagggataatgttcacaagcctaagtttgatggtgactatatgccagtaattagtgggagcagcgggcagtatcgagatgatatcgttgacttcattcagtataaaatctataaaaataaaatgtcagcttatactgaaagtatttatggtggcgccatacatgaagcaataaacaatgtagcttatcatgcttatccaaacactcatgagtctattcaaaaaagatggtgggttaaatgtgatcttgcaggtgatcaacttttcttggcattgtatgataaaggcgttggcattccagaaaccgtaatgaaacgctcgtggtatgaggaaattcttaaaaatgcctaccctgagttaaaaattaaaatatcagaggagttaaccaatcaaggaatagctaaatctgaaatgtttctttacaaagtaggtttagtaagtgatgcaatgaaaattgctatttcaatggttggcgatgttacgggtacaaaaagtagcaagcatggacaaggcagtaaaagtatcaaagcgcttgtttctgagaatgaacaagggaagttgtggatttatagcaaccgtggcttgtacaagctagaatctgatatagtagaaacagtagatttgccgaagcctatgccgggaacactgttgcagtggaacattgaggtcaagttagatgagcataaaaatgattag

SEQ ID NO: 450669 - DNA, 339 bp, Serratia marcescens
atgagcataaaaatgattagtattatcaaagacttcagtaagagtccttacggtcgctacccttcagatggcgattggaatggtcaagcttttcgcaccaaaattttgacgccagcgttgcggaactcggataaagttgtagtagatttgaccggttataacagatatgggcgttctttcattgatgaagcatttggtggtcttatcagagaagatggatttacaaaagaagagctagactctaaattagaatatcatcacaatgatttaaaaagtttcgaattattaattactgagcgtattgagaaagccgattatgatacacgaaactccaagtag

SEQ ID NO: 450670 - DNA, 150 bp, Serratia marcescens
atgcaaaaagcccgctcaggtttccctgagcgggcttctctaaatatggctcctctgactgggatcgcctttgccagtaactggctaataaataagctaaacctgaaagctcttgttgtcaagaccaccagaatgaccaccaagtgctga

SEQ ID NO: 450671 - DNA, 972 bp, Serratia marcescens
atgattaagtatgcaagcggaaatcttctaacttctacatcgcaggctcttgtgaatgctgtaaactgccaaggagtcatgggaaagggtattgctttggctttcaaagaaagttttccctataatttcgaggtttataaaagagcatgtagcactggtacaatgaagattggacaggttttacttgtagaggaaaagggaaagataatcgtaaactttcccactaaggatagttggagaaaaaagtcaacatatgattttatctcgcaaggtcttgaatctttggcaaaattcatagtcgaaaaaaaaatcacatcaatatcaataccacctttaggatgtggtaacggaggcctcgattggaataaggttgaggctcttattttaaaaacttttcaaagtctagatgatgttgaggtggtaatttacccgcctgcaactaataatcaactttcaaaaaataaaaatattattaatgctaaacatcttttggttcactacgcctatggaaaattaaaagttaagcaaaaattctccctttatacggttttttatatttgcgagtgtattgagaaagcaaatcttttcttattcgattttaaacatggccggccatattcttctgatttagaaaatgtcatgaaggatatagcaaaccttaaagtcgagttgcaaggcgattttgattcttttattgaagattatattaatactcatcaatccaaagagttacaaatcgaatttggtaaactaatctcaactttaaatccaagtatcagtttgctcaatgatcttaaaaataagattgattatacagatagcgtacatgtgataacgagaattgccaaagaaaaagatcatggcttgcatattgatgatttcaaagaacataaaaatattgtacaaaatttaattaaaaatggattggtaatcgaagatatttttaacgagctaaaaataaagggaagttag

SEQ ID NO: 450672 - DNA, 582 bp, Serratia marcescens
atgagcgaaaggaaaaaaatcgaagatcaggctcttctctatcatttaacatgtatagataatttggctagtattttagatacaggattaagatctcgtgcgtcattaaaagacgagtttgttgatgtggccgacggtgaaataataacaggtcgcgaagctttaaatttgcaaacaatggttccttttcatttttttactaaaaatccatttgatggaagagtcctgagagatcataaaaaaaaatcattttgcattatttcggttaaacgaatatttgccaataaaaatggttggaaagttattcctaaacatccattatcctccagttctgctgtaagcctcttagattatgaccaaggaatggcccaaattaactgggagcttatgaatacaagggattataaaaatgcagaatgcaaatctgtatgtatggctgagtgtttatcaagtgtaacggtcgagccggaaagttttcactgcatctatgtcaaaaatgacgacgaaaaaaaatatgttgaaggcttgataaaaaagcaaggattaagtatatttgtaacaatcaactcttatatgttctaa

SEQ ID NO: 450673 - DNA, 501 bp, Serratia marcescens
gtgaagacgcgtttaagtagaaaagggctttcttgcctgctgatgttcacggccatgctatggggaggcaatggcaatgcggcaaccaccgccacggttaaagtgacgattatggcgccattgccttgcgtattaaacgaggacaaacagatagacgtggattttggcaacgagatcatgaccagccgcattgatggggacgcatatcgcaagaaaatagattatagcctgaaatgtgatgggcaggctaagaacgccatgaagctgcaaatcaaaggggatggcgcggtctatgacggcacggtgttaagaaccagcagggatgggttagggatcgcctttgaacagcagccgggaaagaagttgccgatcaacagctggatgaactttaactatcccgatcttatcgaactctatgcggtgccggtaaaaaagagtggggccgatttaaaaacgggcgagtttacagcttccgccatgctgcgtgtctattatcaataa

SEQ ID NO: 450674 - DNA, 489 bp, Serratia marcescens
atgaataagagagttaccgcggcttttatatttatgttggcagcgccatatgcctctctcgaagctgtggaagaggtaaaaatgacgtttcgcggcgggcttattgccccaccgccctgcacgattaacggcggcaaaaaaatggatgtcgacttcggtgaccgggtgggggtgaataaagttgacggggagcgttatcgccagactatcggctatagcgtggactgtgagcctggggcattaccctggcaaatgacgctgaccttaaaaggcaatgccagtttcgaacgggcggcgttgcaaaccaataagccggatcttggtattcgaatttaccagaatgacacgccgtttattattaacacgccaatacccatttcacccagtcatttacccgtgctggaggcggtgccggtagcgaaacctggcatgacgttgaccgagggcgcattttccgctacggcgactttgcaggcagactaccaatag

SEQ ID NO: 450675 - DNA, 789 bp, Serratia marcescens
atgaaaagtattatggtttgtctcattggagtgttttttttgtattccagtcaggcaacggcaggctgggcattggatataaagtatgcaccaaatgatgctgggtattttctagcaacacccactcaacttgatgtcaatgatccgactcctagtccgttgagtgggtgctacgatgatcgaagttgcggtgtggcaattttatattatggtggtctcactgggaagggatggtttggtgagtttcctttagataggcggaaagctagtgcaacaaggactgtgggtgagcttagtcaacttctgatagattctggctatttaaataagacgtttaaatcacaaactggattgtattcggggactagatattgttttgcgttaatgtctattttttctacttatataattccgggtggtgacactgaatgcacgctgccggaaatcatcccaaattattgcagcatagcagaaccctacattgagttgaatcatggctcgttgagtgcgaatgcggtcagcggtcatacgattagaaagcagcttcgggtttcctgcaatcagccctacaaagccgttattatcgctgctgaccaaagcggtctgttgtctctcggtaatggcctaaccagccagttgaaagtgaacggtgttgatttgggaaaaggatatatggcgacttttgggccaacggcaagcatagttgaattatcctctacattaagtgggagtcctggtagttatgggacgtttcagggttctaaagtgattattctatctctcccatag

SEQ ID NO: 450676 - DNA, 282 bp, Serratia marcescens
atgggaagaatgactgcttcacttatcggcgcctgcgttttggtggcatcctatgcgcaggccggttttaatggtaatcaaaatgttcagggtaatcagggaagcgcgaatggtgcgagcagtaacgttggccaatgcatagagggtaaggggcagaatgctggacaatgcatcggagaaaataatggatcggcaaagcaaaaagaaaatgaaaagaacgataggctctactctatttgcaactcaatattcatgaaaaagtacatcgcaatatgtcaatag

SEQ ID NO: 450677 - DNA, 198 bp, Serratia marcescens
atggatgaaaataaactcaaagcactggctgctgaactggccaaaggccttaaaaccgaagccgacctcaaccagtttttccggatgctgacgaagcttaccgtcgaaacggcgctcaatgcagaactgagcgagcacctcggacacgagaaaaacgcgccccaaaaagctcaaatacccgcaatggctactcgttaa

SEQ ID NO: 450678 - DNA, 153 bp, Serratia marcescens
atgccgccgtggttctgcctggcgatggatctcgcgctggtctccggccaacgccgcgaggatctgacacaaatgcgctttagccatatcgttgacggacgcctgcaggttgaacaaggcaagacggggggctttgctctctctcccccttga

SEQ ID NO: 450679 - DNA, 267 bp, Serratia marcescens; identical to SEQ ID NO: 449202

SEQ ID NO: 450680 - DNA, 219 bp, Serratia marcescens
atgctgatcggttttctttgctggcttgtcggcgcctgtatcactttctgcctgctttgcctcggcattaaaagcgggcacatctaccgcgtcaccacggccgccggcgtcctaatcctgtcaatcatttggcctattaccgccgcgctggttcttggcggattcgtctacgggctggcgcttctcgtttatagccacatcaccgggagggattcatga

SEQ ID NO: 450681 - DNA, 261 bp, Serratia marcescens
atgcagttcagcgagcgcagcggcggcatctcgcgccgccgggtgatcctgacgttcccagaggctatcgcctctgaagagcgtgacccgctgctgctagcgaagatcaccgaaaagctggcggtcatcgtgcgtcacctgatgcaacgctttgccaacccgaacgagccccgcgcactgctccaggcgcagcagatttcggcagaagccctggaaatcaaacggcatgccgatctgcttattgattttgtggttacctga

SEQ ID NO: 450682 - DNA, 255 bp, Serratia marcescens
atgatgggaaaaatcatacggttgaaattcttcaaaactgatactgccttaaaaggcacattaaagcctaccgttaatgcgctgattgtccctgagaacttcgattgcggtttgcattacgactttatcatctcgtcttttctgtttgagttgcattacctggaggtattcaagcaacgttcgggtgttaatcggcctgccttgttttcccacggccagcaccgcctcaccaaggataattttcactgggggtaa

SEQ ID NO: 450683 - DNA, 1377 bp, Serratia marcescens
atgagtggggggaagctgccggaagggtgggctacagctccagtatctacagtcacaaccctaatccggggggtcacatataaaaaagagcaggcactcaattatctacaagataattatttgcctcttatacgtgcaaacaatattcaaaatggcaagtttgatactacagacttagtttttgtgcctaaaaatcttgttaaagaaagtcaaaaaatatctcctgaagatattgtaattgcgatgtcttcaggtagcaaatctgtagtcggtaaatccgcacatcagcgtctaccatttgaatgtagtttcggcgcattttgcggggcattgcgtcctgagaaactcatgtccccgggttttattgctcatttcacaaaatcttctttttatcggaacaaaatttcatcactttctgctggtgcaaatattaataatcttaaaccagcaagctttgatttaataaatataccaatcccgtcacttactgaacaaaaaatcatcgccgaaaaactcgacacgctgctggcgcaggtagacagcaccaaagcacgtcttgagcaaatcccgcaaatcctgaaacgttttcgtcaggcagtgttggcagccgccataagcggaaaactaacagaaaaatggagagattccccaaatctatcaggatggcaacaaggaaagcttggggattttgtaaaaaaaccaagttacggaacatcgtctaaatcaagcaaagaaggcttagttcctgtattaagaatgggtaatctccagggcggtaaattagattggacagatttggtatacacgtctgacactgcagaaattaagaaatacaaacttgagaataaggatgtactctttaatcgtacaaatagccctgaacttgtaggaaaaacagccatatataactccgagcaacctgctatttatgctggttatttaattagagtccaatgtctgcctacattagatccagattatttgaactatcatttaaatagtttaattgctaaacagtattgttactctgtcaaatcagatggcgtgagtcagtcaaatatcaacgcacagaaattaatagcatatccgctacatgttccaccactccccgagcaacaagagatcgtccgccgcgtcgagcaactcttcgcctacgccgacaccatcgaaaaacaggttaacaacgccctgacccgcgtcaacagccttacccagtcgatcctggcaaaagccttccgcggcgagcttaccgcccagtggcgtgctgaaaacccggatctgatcagcggtgaaaacagcgccgccgccctgctggaaaaaattaaggccgaacgcgccgccagcggtggtaaaaaaacctcgcgtaaaaaagcctga

SEQ ID NO: 450684 - DNA, 660 bp, Serratia marcescens
atgcagacaggcgataattacacccgcgacaccacgaatctgtcgatcggcatggcccatatcgaattgcagaacgaacgggataacgtatttctggcggggccggaggcacctgtaccgtctaaacctggtgggcatcgtgacccgaacgggtaccgttggttagggcagcaggtagggaaggtgatgcatcaggtagctgaccgccggcttgactggttccctacgctgccgattggtgcaaccttttccggtaatgaagtgctcaccgatcatctcgtctggagtcctccacttcagtggcgtgagactttcagcactataacccccacgatgtttcagaacaaagggtaccgcatcactgatgctcagggggatgcagcgatcgcgagtgtagaaattgctgccgatacgataaccaggatcacgacgcaacgtgagctcatcgcgccggtttatgtctggtacgccggacaaggaacttacggtggggacggtaacctgttcgattccgacacaacccgcgccctctataactacgaatatagggaaggcaccggtcagtatgctgcggcgaacctgccagcctatgtgaataaaccctatccactgaacaacgcgagctgcgcgtacagaatacaggcggtaaaaaatgactga

SEQ ID NO: 450685 - DNA, 2106 bp, Serratia marcescens
atggtcgcacaggcatcagccgcagaaacccggcggaatatggccggtattattcaggctccgcgccgcatgccggttgccgaagctgttgaaaagtttatgcgggtgcctatgggcgcgggcaactctgttaagtgggacccgagcgtgtcgccgtatgtgattgagccaatgaactgtctggcgtcgcgtgaatacgacgcggtggtgtttgttggcccggcgcgtacgggtaaaacgattggcctgatagacggctggattgtttacaacatcgtgtgcgatccctccgatatgcttgtcgtgcaaatttcggaagagaaagcgcgggaacactccaaaaagcgcctggcacgaacgttccgcgtgagtcctgacgtggctaagcgtcttagccctcgacgcaatgataacaacgttcacgaccggacctttctggcggggaactatctgaaacttggctggccatcggtcaatatcatgtcctcgtcggactacaaatgcaccgcgctgacagattatgaccgcatgccggaagatatcgacggcgagggcgacgggttcacgcttgcgtcaaaacgtaccacaacgtttatgagtgccggcatgacgctggtagagagctcgccaggtcgcgatattctggattcaaagtggcggcgccgctccgagcatgaggctccgccaactaccggcatcctttccttattcaaccgtggcgatcgccgaaaatggtattggcagtgcccgcattgcggcgaatatttccagcccattatggaggtgatgaccggataccgggaaattccagacccggtcaaggccagcgagtctgcgcatatgtgttgccctcactgcagtggcacgataacggcagatatgaaacgcaccttgaaccagtctggtgtgtggttgcgtgaaggggagtcgatagacgccgaaggcaaccggacaggcgagcctcgccgctcccgtattgcgtcgttctggatggaggggccggcggcggcatatcagacttgggcacagctcgtctacaagctgttgaccgctgagcaggattacgaaacaacgggatcagaggaaacgctcaaggcagtcatcaataccgactggggccggccgtatttgccgcagtcagcaaccgaacagcgaaaatcggatgcattgatggcacgggcggagcctgtcacgaagcgcgcagttcccgaaggggtacgcttccttgtggcaacggtggatgttcagggcgggaaaaatcgtcgttttgtcgtgcaggtcatgggatatggtgctcatggcgagcgttggctggtggatcgttacaacatcaggcagtcgatgcgttttgataagaacggcgaaagcctgccggttgatccggccgcctatcttgaagactgggacttattgcgcacggatgtgctggataaaagctggccactggataaagaccccaacgtaaaaatgcctgtactggccatggccgttgactccggcggtgaggacggtgtaacgggcaatgcgtacgaattctggcgcaaatgccgccgggatggggtgcagaaacgcgtttatctcttcaagggcgacagccaagcccgcagcaagttgataagtaaaacattccccgataatacagaacgttcaaaccggcgcgcgcaagcacgcggggatgtgccgctttatcttctgcaaaccaacgcgttgaaagaccggattaataacgcgctgctgcgcggtacgccgggggctaactttgtgcattttcccgactggatcggcgaatggttttatgacgagcttacgtacgaagagcgcagtccagatggaaagtggaagaagccgggccgcggcgccaacgaagcattcgacttgatggtttacgcacaggcgctggtgatcttgcgaggttacgagaagatcaaatgggagaagccgccaccgtgggcagaaccctttgaatattcaacctccccgttaccatcaacaaaaccagtatcccgcccaaaagcagtacgtgaaacagaaccaaaagatcccgccggcgctgaaaataaaacttcggcgtgggcgcctattaattcttcaggagggtggctatga

SEQ ID NO: 450686 - DNA, 495 bp, Serratia marcescens
atggataaagaattggagaacgtcaggctgaatctgaatcagctggcggcaattacgggatcgcatcggcaaaccatcgctgcacgcctgaaaaacgtcgaacctgctcccggcagtaatgccaagttaaagctttacacgctgccggatgtgttggctgagttggtgaagtctgcgccggtggctgatgttgatcaaatgctacctccagaccggaaagcctggttccagtcggaacgtgaacggctcaagtttgagcaggaaaccaatgagctgatcccagcagaagatgtcgcccgcgaattctctgcgatggcaaaggcgatggttcaggtgctggaaacattaccggatatcttggagcgtgattgcgcgctgccaccgtctaccgtttctcgtgttcagtctattatcgatgacctgcgagatcagatagcgctgaaggttatgaacgctgatacagagattgaggaggaaatgcccgaggaggagtaa

SEQ ID NO: 450687 - DNA, 909 bp, Serratia marcescens
atgataatgaataaaagcattagagaagatcaaatagagtggatagcttcggcagtaaaagaaaaggtattttcatctcaactaacaaaaaaaaccaccatatttctatgtggcggagatgttctaaatgaaaaatatggccgtcataaaatggcagctatattttcgagatataaaagatatgagattttatacccagaagacctgtttgatgatttgcttgctggacaaggccaatatagcctgcttagcttggaaaatatgcttgccgaagcagtggatgtcataattattttcccggaaagccctggttcatatgcagaactaggggcattctcaaataataatgaactagccaaaaagctcatatgcatacaggataacagattcaaatcaaagaaaagctttattaattatggccctatacggttactaaagaaaaacaaaactggcaaggtattaaatttaaattacgagcatctttctgactcactccagattgatttgctctacagaaaaatatataaggccatcatgtccattaaaagtaaatatcctgtaacgcgctcagttgaaaatttactagactcggagagtttcattttaccttgtatttatttaatggatggagttaacaactttttgctatataatttattaaggaaagctacaggtaagaacgataccttatgcgaaatagcaactaagtcagcaataggacgcttaacgtctaaacggatgattagccgtacaactgttggctatcatgtcactgacattgggattgaatttgttcgcgaaaactttaggcgtgtagaactagataagttaagacttgaaataatgaacttagaaaatcgtagcagtgcatcattaagttatgctaagcttgccaaagcgcacccttag

SEQ ID NO: 450688 - DNA, 903 bp, Serratia marcescens
atgtcaagtattgttgacatggctagagaggttaggctttctgtagagatgttgcggtttctcacttatagaacagattatctatataaaacttttgaaatcgaaaaaaaaggtaccacgtctaaaagagtaatctgccaaccatctcgaaagctcaaagctatccaagggtggattctgagacgtattttagataatttaagatcatccgagttttccaaaggatttgagaaggggcaatcaatattagataatgctgttcctcatgtaggagctaattttattctaaacatagatttaaaagattttttcccaagcattgatgcttctaaagtgtatggagtattttcatcccttggctacaacaaagaaatatcttcaattttaactaacctgtgtacatacaaaggtaagttaccacaaggtgcgccaacctcaccaaaactagccaatttaacctgcgcaagactcgatgccaggattcaaggctatgcaggcagcaaaggaataatttatacaagatatgctgacgatctcactttttctgctcaaactctaaaaaagataattaaaacaaggttttttattcaaacaataatcccgacagaaaaactatctgtaaacaatcataaaactctcctttgcggacctagaaaacagaaaaaagttacaggacttgtaatatctcatgataaaacaggaattggacgacaaaagttaagagaaattagaagcaaaatacacaaaatatataccggtgaaaaaacgaatacaaatcatgtttatggtttgctatcttacgtgtatagtgtagacaaaagaaactatcgaaaattaattatctacattgaaaaactcaataagaaatataataaatcagagtttttgaaaataaaaaaataa

SEQ ID NO: 450689 - DNA, 924 bp, Serratia marcescens
atgaaaagcagcatattgtttggtaatggaatcaatcgcttaagttcaaactccgtgccatggtcaaaccttttatccaaattaaaaggtgatatgggctttgaaagcaaaaacacacccaacacaatgatttatgagagaatagttttggatcgtgttcataagaggaattgtgatataggcgacatcgagttaatcgaaacagaagtaaaaaatgaaatagcgcatgagctagcttgtcaaaacagcaatgaaatatatcttgagatagcatctcttaagttagataactatatgacaactaattacgattatgcctttaaaaatagcttaggtgattcgattgaattaattaaccacagcacggaaacaatatacagtcttagaagatatacgtcttgccaaagtaaatcaaacggaaatataaagtgtaagatatggagtatacatggcgaactggactatcctatatcaattaaattaggtctagatcattactgtggttcaataggtaagatagattcttatattaaaggtaaatatacatttactagcaatgaaaaattaataaaacccatctcaatgaaggataaactttcaaataataattttgatgggcactcatgggtagagcttttcttctccagccacgtacatattattggtctttcacttgatttcagtgagactgacttgtggtgggtactagataagagggccaggataaactcaagcggtctggtaaaaaataaaatattttgctacgtaccaaatgaaatcgatgaagaaaagaatggacttttagagtcactaaacgtcattgttgtttccatccccctattagaaaataactattatgacttttacaaaaaagcaatcaagaagataaaatcaaatatcaataaattcgacgataccttttag

SEQ ID NO: 450690 - DNA, 327 bp, Serratia marcescens
atgaaagatggcctctacgctgtgaatttcagatcgaacctgcaagattatggttcaggaattgtgagtgttaaagacaacgctatcaatggtggagatcatgggttttactaccaagggaaaaccgttgataataaaattaagttattggtaaagcattataaccctcgagttcaatctgtttttggcaacatcaataatttttacttaaacttggaagtcgcagaaaaaggtgaaggccactatgaactatcgggttcaatggaaggccagccacaaatgatcttaactgtgacagctaaactacaagcggcattagtcgcgtaa

SEQ ID NO: 450691 - DNA, 894 bp, Serratia marcescens
ttgagtttgatagccggaaatactaattgggttctatttttagcggcagatggtgaacctgaaaataggcacgtacaagatattacttttggtgttttctgtttggaatctgctggcgtatctccaaagaacatcaacatctatattgatgggcaagaccgcgcattaataaatagtttgatttcaatcggcacgaccaatttatacaatataaaacctacaaatgagttcttcgctgattgcaagagaaatcattacgataatttaatgttgtttgttaccgggcatggtagtttgtctggtatcgatgccgctccccctattacaccatgtgtcttattaaccgccttgaaatcttgtccaggactgcaacaatctgtggtgttccttggtcaatgttttgcaggcacgtttaactatattggtgcaggtaagaaaaggggaagggaagcacatgagaatgatccggagattatttttattggcgcaacgaatctccatccaagtctaagtttgtctaccaaagaaaacctccccgcaggtgaaatggcttggcttgcgaatgtattccttttgcatgttttcaaatggttatcaaatccttttgatgtcgatggtgatggtaaggtcaccgtgattgatgcctataaatatgcaggtgttatgtctaaccagataaatcataccttcaaagtccaatcattcagtactgccgtagcaatgcatccgcaatgggatgcagcaagaacagctcacttggcacaaaatactttgcaaactcttttagctttccaagcaattaacactgtttattataacaatttatcgaataactacacacatcaggaatgttggatattgaacgcagttcctgctcaattcattgaagcttaa

SEQ ID NO: 450692 - DNA, 759 bp, Serratia marcescens
atgagaaaattgataatggcaatggcgttactgtttactgttctcatgatgcaaggatgcaaaaaaaacatggaatatgaaccacaggatttttttgaaggccgtcaactggaagtcgcgcagctgatttatgatggcgatgaagtgaaactgaaagagaaacttccctctgtcagcaaggaagaactgaatcgaccggttaaggcagacatgaccctgctgttttggtcggtgctaaactcaatttatgataaaaacacgccagaaaggctgaaaataataaccgacttggtaaaagctggcgcagacccgctgcagcccagaccagaaggaggtagcagcccagcggaattcgtcatgaaagccgacaaggggatttgggtcaaagccatgctcgacggcggtttaccgccaaacgcaaaagataaggtattcaatgagcccattgtattccaaacaatcaaagccaagaacactgaaacgttaaaggtgatgctggagtacggagcggacataaatatcagagactccttgcaacaaaccttattaatggatgctttttttagctcagcctttgagcacatgaccctactgctcaatcggggtgcgaatcctaatccggtaaatataaacaatctttcgctgttaacagcagtaaatcggcaaataaaagacagccaagatgactcagaatacaatgaacagtgtaagaaaatactcgagctcatgcttttgaaaggagcaaaggaaacgccgtaa

SEQ ID NO: 450693 - DNA, 135 bp, Serratia marcescens
atgcgcggtggcggggaactgagtttttcttatcgctccccgttaccggggagcgaatctgttaaaatgcgctataccgatctgtattcactcgtttttattttattcagcgacatctgcttgatcccgtcataa

SEQ ID NO: 450694 - DNA, 1104 bp, Serratia marcescens
atggctggtaaaattaatggtagtatcaaaagcaatggcgatgaagtttataatgaatcacctgaaagtgtaggtgaggaaaaggaggccaatggtattgatgataaagaagaaaacaaaaatgatagtgatgatagaacattaattaaaggtggtgatcgagaggggaagaaaagaccgaaatttacaaatgtccttttttatatgtgcacaatgtattttggagtaatacttatagttacgccaatactaggcataaatattcctgtatttattacaaaatattactcatcaattattggtgtgcttgttttttccattggcgcttacaatgcgaaagagtttttaatgcgcccaaaaagaaaaacagaagtgaaattcactgatgtagatgagaaatataataagaattctttatcaggaagcttaaatgcagttcgagcatctaccagcgtggtaggtaacaacattgtatccaatgtaacattactggatagaaatatagtaaaccatacaaaagtaaagccatccactcgaaatagaagagaggaagatacattcataacatactttaaatcaatgaaagtgttacttgaaagaaaagcttctgctgcagatgaaaaagcctctattttattagagaaaggaacttcatacactaaattcggtataatattttaccttacatcaattttaatttggcaatatattttctggaagcaagggtttaaagtggatttcgcgtggggaatagcatcctgctcttttttatttctttttatcgaatttttgagtgcatggtttttaaaacaatataagaatttcactgacacttccacgtaccttataaaagtaaagtcaactctagatagatacatgttgatgtatatgcttggggttgaaaataaagataatgaggttaaattgatggttaggaagtcattgcttgatatgttatcgaaagaaatccaatggccagataacaaaaccataaataataatgataatggatatgctaaagacgcactatcatcgctctctggtgctattaagtcgatgtctgaaggagtatataccaataaaaaagaaggtgagaaaaagtaa

SEQ ID NO: 450695 - DNA, 222 bp, Serratia marcescens
atgcgaaatttaactgcaaaagaaatccaggcgattataggcggcttaaatctggaaggccagagagaatccaccaatgtcatagaccaacggggcaccgatatgggatcgtacattgatgccaatggcgcatgctgggcgcctggaaccccatccgcgacgatgtatcccaacggcggtggcccttcatacagcaccaacaacggggttaatgccaattag

SEQ ID NO: 450696 - DNA, 594 bp, Serratia marcescens; identical to SEQ ID NO: 78579

SEQ ID NO: 450697 - DNA, 216 bp, Serratia marcescens
atggaaataacccagcgcgaaaaacgcgatcggcgaaaggcatttattgcgccgtttttcctgatattaatttggtcgaccggttttattgccgcgcgggcggtggcggatcatgccgatcccaaccttttcctgacctttcgctttttgatcgccgcggcagtattcgctctgctggcgctgcattgcgcctggcccaaggggcgacagttgtaa

SEQ ID NO: 450698 - DNA, 165 bp, Serratia marcescens; identical to SEQ ID NO: 431663

SEQ ID NO: 450699 - DNA, 1056 bp, Serratia marcescens
atggcacaagtaattaacactaacagcctgtcgctgatggcgcagaacaacctgaacaaatctcagtcttctctgggcactgcgattgagcgtctgtcttccggtctgcgtatcaacagcgcgaaagacgatgctgcgggtcaggcgatctccaaccgtttcaccgcgaacatcaaaggcctgactcaggcttcccgtaacgccaacgacggtatctccctggcgcagaccaccgaaggcgcactgaacgaagttaacgacaacctgcagaacatccgtcgtctgaccgtacaggcgcagaacggttctaactccagcagcgacctgaaatccatccaggacgaaatcaccgagcgtatgtcggaaatcaaccgtatctccgcgcagactgacttcaacggcgtgaaagtgctgagcagcgatcagaaactgaccatccaggttggcgctaacgacggtgaaaccatcgatatcgaactgaagaaaattaatgccgaagaactgggcttgaaagacttcagcgttgctaagggtactccagcattcactgacgttgcagacaagactgtagttggtaaaaaaaccgatggcgctaccgataaagctgtagacattgctggctctgccgctctgaataaagacaatgttctggttaccgatggtaaagatggttacttcgtacagaccactgcagctgatggtactaaaacatacgctaaagcagagattgctgatgatggtaaagtcaccaaaggcgatgcagctaaatttgatatggcaaccgcagatccgttaaaaaccctggacaaagcgctggcacaggttgacggcctgcgttcttccctgggtgcggtacagaaccgtttcgattctgttatcaacaacctgaacagcaccgtgaacaacctggccgcttctcagtcccgtatccaggatgctgactacgcgaccgaagtgtccaacatgagccgtgccaacatcctgcaacaggctggcacatctgttctggcacaggctaaccagtcgactcagaacgtgctgtccctgctgcgttaa

SEQ ID NO: 450700 - DNA, 825 bp, Serratia marcescens
atggaaaagaagaaaaaaattaagaaaagtggcgtttgccaacttaccggtgatgttggtccatttcaaagatcacatatacttccaaaagctgtaacaaaactgagtgagattggagaacggtacattgaaacatcattggaaattaagcccggctggcgttccaatagttggtatgattataatctagttacagctaaaggagaaaagatactcagtgaaatagatgaccatgcaattaatgagttaagaaaacataaacttatttggagtgggtatggtcctaaatggagaaaccctccaaaaagttatcatatcaaagaagaaattagagaactcaaatctatcaatagcaatttacttagattgtttttccttagtttattgtggagagcagcaacatcagcaagagaggaaatgaatgatatttatcttcctcagagtgagcttgaaattataagaacaatgatattgaataaggattcgggtgagtcatatttcctccctatgtatttcaatcaaatttctgatattggagttcatcacaatagaacaccaataactgaaaaaataaaactaccctgtagtataaagcaagattctactattgagttagatagttttagattttattttgagggcttaatatgtcatattgttcactcttatgacagtagtcttacgaaaacaatggagcagtgttttttaggggcttctaatatgctgcttgttatcactcatccatttgaacagtctcgcgaatatagcgacttaaacttggtaatagccaactcatataatcacaatccgaagttctctacttga

SEQ ID NO: 450701 - DNA, 240 bp, Serratia marcescens
atgaccgagcagtctgtgaagttccatagttatgatgaagtatgcagccgtcccgcctttgaccctacctatgagataagccccagtaacttcaagggactaattggaacctaccttttccgggacgatcagatctgtcaggtgcgtactgacaaagggatctgtcgtcagaagcacaaaaatggatggcttggtacaactaagagcggcgttgaagctctgattggctgccagtgttga

SEQ ID NO: 450702 - DNA, 1197 bp, Serratia marcescens
atgagcatcgagaatgtatcaagattaaaacgaaatcgcggagttcctgtagcgatccgacgtaaattgcttgagaaatacgatcatgcttgcgctgcctgtggtgttaaagatgacgtggttccacttgagcttgctcatcttgttcccacctatgcaggtggtgaatcatctgaagacaatttgacaattctttgcccaaattgtcaccgaacatttgatcgccagccacgtgaatatgaatttgtcagttttctcactgagctattgaaaaatcatcctaacttcagtgacatacaacaggatatactgttaggccgcgaaattcgttatagggctgatcttctagtaaaccgacggttaaatgatacaaaggaagttttgctaatcgagtgcaagacctatttagcactaacttccggccatattcataatgtcattggacaattggaaaaatacaaatccagttacggtaatggcaggatggtcctcgctattccagcaaccttgagagcaactgacttgtcggctctgaatgcggcggacattgaagcgtgggatattaaatacattgcaaacaatttttctaaacaaatagaggctgcatctccaagctattatagggcattatttcttgcacggatcacgcgtccaacaaaaaagattactcgcgagcaagagttaattaattctttatcttcctgtattccagggaagaacgactgctatgtgtatcagaacctcgttggagatattcttgaacatttgttcacgccccctcttgggaagccaattccagagctatctgacaagttgaaagccaatcgccgcgacttcatcatgccaaactatactgataagggattctggtctttcttgcgacaaaagtatgaagctgattacattgtgattgatgcaaaaaactactcaagaaaagtcaaaaagtctgagatcttgcaaatcgcgaactacttgaaaccacatggagctggtctctttgggttaatcatatctcgcaagggtggcgacgcattaggttgtgaacatacgttgagagaacaatggctagttcataaaaaaatgatcttggtgctggatgacgaagatgttaaagcgatgctagttgccaagtcagatggtcgccagcctgaagaaatattggggcagaaaattgaagacttcaggctatcaatgtag

SEQ ID NO: 450703 - DNA, 645 bp, Serratia marcescens
atgaattggcaagtaaattatgcgattgaatatattaatgatgatctaaaagaatcagggtctgcagtgcatgtgaatggagatgctattagaatatctattcgcgataggtctgatgtattagcggtaatttcagcatcagaagaaattagcctggagattgctcagagatatcatcatgatttcccggatgtagattttatatgtgggtatagaaaagagtgtgtatggactggagaggccattagctatcttacatcagctaaaataggatggggtaacgctggaaccttttacagcgcactgtctaatgacactctcaatactgcctcccataaagactactttttctcgtatcggctcataacgcagatgagggtagtaaaggaagtagagagacagtttgatcgtgtttttattattactttagcaaataatcgaaagttaagagtaggtatgttaactgaatacgaaccgactgcagattctgtgcgcactttttggggaatatttggccctattgatattttgtggaatataaatcccaatggaagccctgctcgaaatgcctatgaggcaggtagtgaacttggttgtgaggtaatgaaatggccggagttaaaagcgttgatcactcaaaaataa

SEQ ID NO: 450704 - DNA, 693 bp, Serratia marcescens
atggcaccccgtaaaagcatcccaaatgaaatcaaattacaattgttttctgcatcagcagggcattgtcagcatcctgattgtcataagccactgtttcctcaagagatgggcggttataagcatatcggggaaatggcacatgtcattccccatggtaataaggggccaaggcatgaggagagacctgaagaggtatttgaagcagactcttttgaaaaccttcttttactatgccctaattgccacactctcatcgacaaggctcctgaggcttatcccagaagcctccttctagactggaagacaaaccaccttgttgctttggccaatcggcaaggcattattcgctatgaaaacagagagcaagcaagagaggctgttttagccgctatggatgaaaataaagctctttgggcaaaatttgcgcctggtgaaggagagcgttttacctatgatcctgaatctgaaacggcggaattatggtctctaagaatacgtagtgtcattttacctaatcattatcgaattcaagctattttaggcctgaacagatgtcatatgacacctgatgagagaggtatttttgcgcagtaccttgagcacgttcgtgggcttacagaacgtcatgtctgtggcgtttccggtaaagccataaggtttccaagagaaatggatggaatattagcatga

SEQ ID NO: 450705 - DNA, 1374 bp, Serratia marcescens
atggctaagtataaggcgtatccggagtataaagattctggggttgagtggctgggtaaagtcccaaaagattgggacgttattaatattaaatacctcagccaagtaaaaagaggctcttcaccaagaccgattgatgatccaaaatttttcgacgaggatggagattatgcttgggtacgcatcgcagatgtgacggcttcggaaacttatttattcgaaacgacgcaaaaaatgtcggtattggggagctctttaagtgtaaagcttgaacctaatcagcttttcttaagtattgctggcacagtagggaaaccatgtatcactgcaattaaatcatgtatacatgatgggttcgtctatttcccttatttgaaagtgccgggtaaattccttttctatgtttttgctggagagcaagcatataagggattgggaaaaatgggcactcagttaaaccttaataccgatacggtaggtggtattaaagtcgtattgccatcgaataatgattttatttctaacattgtaaatttcctcgatcacgaaaccgcaaaaatcgataacttgatcgagaagcaacaacaactaattgaactgcttaaggaaaaacgtcaggcggtgattagccatgccgtcaccaaagggctaaaccctgatgtgccgatgaaagactctggtgttgagtggttgggggaagttccggggcattgggttatagctcaattgaagttcaatactctagaaatgcaaacaggtccttttggcagccagctccatgctgaggactatgtaattgacggtattccattaataaatcctgcacatatgagtgcgggaatcatcatacctgatttacaagtcacagttgatgaagcgactcagataaggttgaaaagacatattctatcagaaggtgatataatattttctcgtcgtggtgaattaggacgatgtgctgttgtaaaaaaagataatgagggttggttatgcgggactggaagcttaaaagctaagcttacaaaagaaatcgttccagattacgcttatattttaatttcatcagaaggtgttgtttcagagcttaccttggagtctaagggctccacaatggcaaatctgaatacagagactttgggtagagttcggttgcctgttcctcctaagaatgaacaggaaaatattttgagctatatcaatatgatttctgagaaatatgattatttaattcagtctgcaggagctgcaatcaagcttatgcaagaacgccgtaccgcccttatctccgctgccgtcaccggtaaaatcgacgtacgcgactgggttgcacctgatatgcaagacgctgaggagccacaggagaccaccgcatga

SEQ ID NO: 450706 - DNA, 291 bp, Serratia marcescens
atgatagggatgataattgaactaattaaatctggagttggattatttcagaaaaaagaacagagtaaaaatgagttagaagctcagaatagccacgaacagaatcagatcactcttgaggaaactcgtaagggcttcacgtggcggcaggcacttgggtatgtattgactttcatcgttgcatggaattacgtgattcttccagtactgggggtatgtggtgtattactcccgccaatacctcttgatgacgtatggcgggtactgattgtgttgattggcggcagttaa

SEQ ID NO: 450707 - DNA, 1314 bp, Serratia marcescens
atgcgactaaccactcgtgaattagattatagccacggttttacacatgaaaatgatatatttaacaggcaacgttttgctacacagttagaaaatatcattattaactcacaagatgaaagtttagtatttgcaattgatgatggctggggtagcggaaaaactacgtttctccgtttatgggaaagtagccttaacaaaaaagaaccaagcactttaaaagcaatttattttgatgctttcgagaatgattatcaacaagatgcattcttagctattgcgtcaaaaatatatagcctaatcgaaaaaaaagagcctgaactacagaaacgctttattgatggagcaaaggccgttggaaaaagcctactaggaatatcagctaaagtaggcataagtattgccacggcaggcctagtaaatggtacagccattgagagtgcaggggatagtatttcagatggattatctgaccctatagataaattcattgaagacaagataaaaaatgctgaaaaagacgaactaaccctagcccactttaaggaaacattacaaaaagtagccgaaaataaaaaagtagtctttataatagatgaattagatagagcgaggcctgatttctcacttgaaatattagaaaaaataaaacatgttttctcaactaataactttgtttttatactatcaatgaatagagagcaatttcaaaaagtgatagtgagaaggtatggcgagatcgatgccaaactgtatttaagtaaatttatacatcactggttcactttacctaaagaaccagtttctctaactaataaagctgctgtagggaagtactgcgaacatctatctaatactagatttggtaataatggttcatttcaagttgcatgccatatgctttcgcatcttttatctagaaatgaagctagtctaagagatgcagaaagagcatttggcttcatgagcttaatttcggcctctcaggcggagagaaaatccgaaacggagcaagtcgctattgcaatagtcacttatattattagccatcatccggggttagttcagcgtataaagaatagaaatatatcaccagacgagctaatgagttctcttggtctaagttatccatctaattttgaagaagataaccatatcatgattattatcaatactgaactattaacagacgatgactatagaaaaatgatttcggatggtactcccttggtccttcactcatttgggcgaagacccttatggttacgtaatgtgctatcccatgtagataatatgttcatcgataataattaa

SEQ ID NO: 450708 - DNA, 663 bp, Serratia marcescens
atgagaattaaaaagcccttaactgatataatttcctataccatcatcataattgtaacattgtgcttcatctcaatgattaccgctgcgataattgtctgcattgatatagttaggacaagagatttacatttttgcttctctgaaaattgcgtattaaatgctcaggaaatttttaaaactccaatatctcttctgaagcaatcgttaatactcatacctatttttgtattttttataggcctatataattataagctggcgataataaatgcgaaaaacaacaacacacttaacaaagagcgtgatttttattcttatttaaaagaaaatacaagcgaacagaaggaattgatagaaacacttaacaagaagagactcttcaacgcactttttgatgatcacttagatttcaaagtagatgctaaggaaaaaatagaatcttatcttaaaacaagaaaagctactggcttactaaacgaacttattgacgataaaaaaaacaattataaaattaaccttacgtccattacaatacactttgggtttcacattgaagaagaagttgatatagagcgtttagatgaaattactcataacatatgcattctattgatagaaatcattgaagtctggtttaatataaatatatcaagagagtaa

SEQ ID NO: 450709 - DNA, 1026 bp, Serratia marcescens
atgccgggcacccatgcccaggccaaacgccccgacctccatcacattgccaccttctacgcccacgttgcgcgtggcggcggtgcccaggcccagactcccccggcttttcgccttgtccttgagggaggccaagttatcatccttgcgcaagtaggcatcattgccggcctggtcggacagggaaccttgcgggcgcaggtcggtaatgttgccggcggcgtcgatactggccaccgcaaacacatagtgcttaaagccggcgttatccttgtaatccgctgcgttagccgcaacggtaaatttcaccgccgccgcccattggcttaccacgttgccctgcaaactcacatcagcccacaccttgataggcttggccgtcacggtaatgttttggttggccgccagcaccgcgcgcagcccgcccacatagccggtgcccgccgtcacgaaatactgcgcgccggccttggccaccaggaacccattaccaaagaacgcgccggcaccgtagtgatcgcggttaatcaggcgctgcatttcatcaataccgcccaggcgcgcggtaaagtcgatctgccaggtttccgccggcgtggtgatcgccgtctcgctggccgcgccgtcatactccatcacaaaggagcgggtgatcgcgttgccctgctggccggcatggttggccaccttgcgttgcgtcggcgcatgaacaatcatcgccaccgtattgctggctttgttcaccaggccaatccagttgaagtcaaaatcgccagattcgggtacatcggtgcccagggtgaccgaatacaccacggcgttgttgttcacgacgccggttttgttcactgcctggcggtgcacaatctggcccgccggcggcatcccttctttacggtcgatcggcttgccggcatcaaggcccggcacgttggcgaaaacgaactcgtccagcaccacgcgggaaccgttcacggcttcttttgctttccattgctcaaaggcaaaggtgatcgcggtttgtga

SEQ ID NO: 450710 - DNA, 894 bp, Serratia marcescens
atgcccggccgcctgtgcgtcttcggcaagctgcaagcggcgttctgcaatctgaatatccagcccgtcacctgcctgccgcgcctgctccacgcccttgcggtacacgtccagaggatcgacctggcgcacgggctggccgccaccgaaagcccgctcgacctcggctatggccgctgcgcgcgcggcgtcctccggcgtcagctctggccgcgcctgcggctcacgcagggccgcaatggcttccggggtggcctgttccataccgggcacgtcgcggcggattccggcgcgttccagtacgcgggaaagggctttttcggcccggtcggcaagcccggccagcttctcgcggccgcgctcgacccactggcgcacaacgcccgcaccgtcgaaatcgcgctgctcggcaaagccataggcgctttcggcaaagtccagcgtgctcgccttcggctgctgacggcccagccgttcggccagcttcgtataggccagctcggcgctgccgttgacctgccagtgattgcgctcggcaatccctccgtccgggagctgcacggcttcgctgccggtgtgctcaaggccaatccggtcgcccaactgtgcgccagattcggcaacggcccgcgccagatccacgccccagacggtgcgctgcttgccgctgtccgattccagcgtcacgaaatagctctggctgttcgccgggtcgttctcataaggggcggcgccgtgggccaccagtcgcccggaacggcgatcggtgaagtcttcggccccggcgtacagggtcgcgctgtcgcggtgccgcgtcatgccgacataggccagattgcggtccatgccgcccgtcgccagcacataggcacggtctacggtaacgccttgtga

SEQ ID NO: 450711 - DNA, 1068 bp, Serratia marcescens
atgataggcgtccagaccggtgcgaacgtcaccgcgtgccagctctgtgctggcctcccgcgcccagctttccgtctggcggcgaatttgcgtgatttcggccgcgccgacacgctcggtaatggcccggaaaccggccccggcctcgatggcggcaagctgcttgtcatcgcccagcatgacgacttttgcgcctgccttctcggccgcttcgagcacccggccgagctgccgactgccaaccatgcccgcctcgtctattaccagaacgtcacgcgcggtcagcatgtcaacgccccgattccacgatgcttcaaggctgtgaatcgtgcggctgtcgatgccgctcccggcctgcaattcatcggccgccttaccggccagcgcgcatccacggacgcggaatccttcggcctcccatgcctctttcgccacgcgcattgcgaaggatttgccggtgcctgcatccccgataatgacggacaggcggccctctccggtaacgtgctcgacagcggtgcgttgctcgtccgaaagggtatcgtagcggtcaacggtgcgggctaccgtgcccgccgcaacaccgtgcgattccgccccggccagacgctcggcgctgtcaatcatcgcccgttccgtcatgaccatttcgcgtgtcgtgaacttggccgggaccgtgcgacggccgtctgtcatttctggtgcaagctgtacaagctccggcgcgctctccagacgggccatgatgttctggaactgctggggatcgtctatgtaccggttaagctcgcgcgccatatccctgcggtcgaaaacggcctgcgtggtggtgattttatcgaggatgagcgacggatttgcctcgattttctcggcgttttcggcgcgtgtctcggcgtgaatttccagccgttcggcgtccatccccttgcggtccatcgccacggcagaaacgccgatatgcttggtcggcgtcaggtcaacgccttgctctttatagctgcgatggtccacgcgctcgacgtgcccggcacgctccagcgcatcattgcaaagtgcgccccataa

SEQ ID NO: 450712 - DNA, 252 bp, Serratia marcescens; identical to SEQ ID NO: 312191

SEQ ID NO: 450713 - DNA, 222 bp, Serratia marcescens; identical to SEQ ID NO: 312192

SEQ ID NO: 450714 - DNA, 2661 bp, Serratia marcescens; identical to SEQ ID NO: 312193

SEQ ID NO: 450715 - DNA, 180 bp, Serratia marcescens
atgctttccgccatcattgcggacaggttttgcggacaatcgccgcgcctgccgggcatccagtcggtcgaacagccagtgccagaacccggcataggcagaaattacgccgatcagcaggccaatgaacaggcccacgccgagaagcagaaagatcgccagtcccatcgtaccccctag

SEQ ID NO: 450716 - DNA, 1002 bp, Serratia marcescens; identical to SEQ ID NO: 312194

SEQ ID NO: 450717 - DNA, 258 bp, Serratia marcescens
atgtcaattcaacgcaagccaaagaccgcgaacccgcgcgaggcggccgccgaggcgttcgtgacgggcgcacctgacgccgcagcgtcaaaaccgactacctacgagaaggggttgccgaagggcaagaagcggcaaatcagcctcactatcgcgccggagctgctgcgaaaggtggacgagcgcgccgagcgggccgggatcggccgggcagctttcatcagcatggccatcttcaaggcgttggaagaaagctaa

SEQ ID NO: 450718 - DNA, 651 bp, Serratia marcescens; identical to SEQ ID NO: 312195

SEQ ID NO: 450719 - DNA, 213 bp, Serratia marcescens; identical to SEQ ID NO: 312196

SEQ ID NO: 450720 - DNA, 618 bp, Serratia marcescens
atggcacgacacaaagacgaccccggcacgctcgacctgatgagcggcaagctgctgatcggctatgcgcgggtttcgaccgaagaccaggagctgaccaatcagcgggccgagctgcacgcggcgggctgttcccgcatctttgccgagaagatcaccggcacccacagcaagcgcgccgagctggcccggatgctggaccaccttcggccgggcgacgtggtgacggtgacgcggcttgaccgcctcgcacgcaacacccgcgacctgctggacattgccgagcagttgcaggcgaagggcgctggcctgcggtcgctggccgagccgtgggccgatacgaccagcccggccgggcgcatggtcctgacggtgtttgcaggcatcgccgagtttgagcggtccctgatcgtggaacgcacccgcaacggacgcacagcggccaaagcgcggggcgttcgtttcggtcgccgccctgccctcagtcccgcgcaaatagcccacgcgcgccgcctgattgacgaagacgggcacaccgcaaacgaggcggccgccctgctgggcgtccaccgggcgaccctctaccgggcgctgaccagagaggagagcaccaaatga

SEQ ID NO: 450721 - DNA, 252 bp, Serratia marcescens; identical to SEQ ID NO: 312208

SEQ ID NO: 450722 - DNA, 318 bp, Serratia marcescens
ttgaccggctacgttctgactgcggcggcagaagccgacctgcgcgacatcatccgctacacacgcaagcaatggggcgctgcgcaggtgcgccgctacatcactacgctggaacagggttttgccagtctggccgcaggccggggcgttttcagggatatgggcgcgatttttccggcgctacggatggggcggtatgaacatcactacgtcttctgcctgccgcgtgaggacggtcccgcgctgatcgtggcgattttccatgaacgcatggacctgatggtgcgactggccgaccggctcaagggggcagactag

SEQ ID NO: 450723 - DNA, 402 bp, Serratia marcescens
atgagcgacaccaaagaaaacaccggatggaccacccctgacgctgcaccgggcggctggaacaaggccgacaccgagcggctggccgaatacgagcagggctatcgggaacggtcagaggccaagctggcgaaacgtgaatccacggccgagcgcgtggaagtgttcgaggaacgcgacgtgaccgaccccagccgggtctatacgccgcgggagccgggcgaggttgcgcaggaacgcgaagcagacgtgcccgagctggcaggcggcggagaagccgcaggctatgacgaggtgcagacggccgaagtggtggaggaagacccggcgcgtgcggcggccatagccgaggtcgaacgggcgttcagcaatcccggccacgaccaagagattgagcggtga

SEQ ID NO: 450724 - DNA, 1212 bp, Serratia marcescens
atgatttttaataatgagagtggaatgcagaagtggctcgaatcggagctaaagagacatcaaggacttttatctataattgataatgagaatgaaattagaaattttgatgcaaagagtcttgctgaaaagaaaatacaagatagctttactctttgcatggataacctagaaagtttacatgtgatatctgcggataaagatatatctgtagataagaaagataaattgcggccagacatagttgcatattctatagatagaaactcactagttataatcgaactaaaaaacatcaagggacctactagacaggctgggacagaattatccgcatacgcagcagaactaaaaggatatttaagtcatctttcagatggtgatattataagcgtaattatttcgcgtgagtggccggcattattaaatcactatgtttttaatactatattttggcaacataaaaaccttatctgtttagaaccctttgaggattcgtcaggctgtaaaaaactacgatgcagagacattaaaacaataatacaatctgatataaaagaaaattttgcatttcaacatcttgaagggtttcatatctctctgcatgatcggacgttgggtaataggccatgcagggaaagtagacttcatgataaagttgatataatcaaagcaagcatggcaatgatggcagctgcgtctgaaaaagatcatagccatggttttgccatactgtgcaaaaaaaatgacattaccgatgcaccatatgtaattactatagctaatgtaagtggttttgcctctatagaaagacatttccatgatgaggactttaagactattgcagaccttccaataattggaaggcacatttatgaaataaatgagaactattgtaatacaggctttagcgcttccactcttaaggcgtacagtagagcgaaaagtgtattgaaaaaaatatgcactccacgcattgagtgccctaacagttggctaaatctacagagttttacaaattctcctcatgttgataaagtgcatatagagttgtggggagtatttaaagagaaatactttgagatgatttctgataccgcagaagatagtgatggtttgaatttaactgatgtaaacttaattcagtgtgtaattgatgatttgatgtatgagagctatgagcatattcgcgcaggcaaatattatgaatga

SEQ ID NO: 450725 - DNA, 693 bp, Serratia marcescens
  misc_feature (676)..(685): n is a, c, g, or t
atgggagcaatttctggagcagtgttatcctctgttggtaatgatatagccaaaagaacaatagcgtctgtttttgatcttttagtcaaaaaatatcaactcatggatatactgaaattcaaaagtaattatcttgactattgtgaaaagaaccttgaaataaagactttagtttcccaagataaatcttttaacatagatgagatttatatccccatccatataatgcagtcaggcactcagacaaggcaagaaacaaatgaccttacagctttagataatgatagagctatattgataaaaggattagccggacagggaaaatcaacactattgcgaaaattattatctaataatgcaaaaagatttaatcgccttcctgttttctttgaactaaaaaactataatggtggaactttagagctgtctatatcaaaatcattgagtcattatggagttgatatatctgaatacgcgctacataaattactttctgatagtaatgtcaaaatctatcttgatgcatttgatgaagttaaacctgaatttagacttgaacttgttgatgaaataaaacgtttcattaactcgtttaactgtcatgttatctgcaccagtaggcctgacacagaaatagatactctttcagaattcagaacatttactgtatgtgaannnnnnnnnntgaattaa

SEQ ID NO: 450726 - DNA, 555 bp, Serratia marcescens
atgaaaagagtagttaagtttggcatcatcggaatacctttaatagcctctctctgtacaatatacgcttttatgtttccaagaacaccagatactcaaaagacaggtgatatcgttggcacatggaaatcagattattcatatgacagtgggggaatcatcgtgagggtaaatggtgagacatcatacttctctaatggaaaatacaatgttaatgctgatatgtctttccaaccaaatagtacgactataataacctttgctactaatggtgctggggattggaatattaacggcaaagaattgataacaacacttaatactctaaagtctactccgaataaaatgatttataaagggaacgtattaggatctcaagattttgatatgatggaacgaatttccaatcaaaagctaaagaccatagaagatttcacagcaactggaataagtcagtcttacattataaaaaaagatggtcatgataaaaagctgttagaagctataaacccctttggaaaaaactacagtatcgtgatgcatagagagaagtaa

SEQ ID NO: 450727 - DNA, 615 bp, Serratia marcescens
atgacaactataacaggcatacataaattcactatgacatcgggggagagacgctgcattattattgataatgaaaataaaatcccattgtactatccaaatctatatctaacaattcagtacagaaacagaggttggtctttttcaactatggagtcagttgctcttagcatttctttactatacaggtttttacgagcgaataacatttcaatagaaaataatattttcgctggacagtgtttatcaaactccgagattgagagcctatccatgtatctaatgaaaaaacgttcaaggcatgagccttttgagcctatatcaacgagaacattatatcacaggctaaacactattatcggttatttatcatggctgtcagatactatcctccgatttgatgcatcagagcaaagggtatgtgctaacaggatggttcgaaccataaaacaaaggcttccagtgaatagtaaaaacaaaaataaaaaatatactaatgatggtctgagtcaaaatgttcaggaaaaaatccttgaggtcattaacccacgttcggcaaagaatccttttgaactgttgacctgctccccgttgattaatacacaccgatgttag

SEQ ID NO: 450728 - DNA, 873 bp, Serratia marcescens
atgaattgggacgacgcgcgcttctttttggccgtcgcacgctgtggcacgctacgcaaagccgccaaccagctgcatgtcgatcaggcgaccgtcggtcgacggctctccgctttcgaagacgctctcggttccaagctgtttatccgcacgccgaaatccttcgccctcagcccgttgggggaagaaatgctggcggacgtgatgaagatggagaatgcggtgcaggcgatcaaccgcaaagccgccagcggcgatgacagcctgcacggccacgtgagcatcgccaccaccgataccctggccgaagccttcgtgatacccgcgctgcaagatctgcgggaacgctatccggccatcaccgtcacgctgttgacggcactgaacatcgccgatatctcttatcacggcgcggatctggcgatccgcggtgcacgccccgatgacgatgaactgatcatcaagcggctggccaccatcgagatgggcctgtacgccagcccgcactatctggctcggcgaggtatgccggtcaaaggcgagcagttgcgcggtcacgatctgctgatgttcccgcgcgagctggtgccgcgccactggaacaatttctgcggcgaagccctgcacgagcccaacgtcgtgctgcaatgcaattcacagctgctgctgcgctccgccactcgcagcgggctaggcatcggcctgctctccgcttttttggcggacaaagacccggagctggtgcgcctgttcccggagaacaaagactgggtggatatctggctggtgctgcaccccgatttgcaacgcgccgcccgcgtgcgggcggtggtgcaggcgctggaaacgtcgtttagcgcccattacggctga

SEQ ID NO: 450729 - DNA, 198 bp, Serratia marcescens
atgcaggctcagaataagcagcacagcacggtggtgccggtgtcggactatacggggcaaaaaacctgtgggatcacggtgcattttatgccctgcgatgaggtgaaagtgacgaccagctgtgccaactacggccatccggaacacccgatcaaagaacctcttaagatgccggagccaaaagtatgcccgaaataa

SEQ ID NO: 450730 - DNA, 303 bp, Serratia marcescens
atgcaggagcatgagaaaaatattctctggttgttgatgttgggggcggtgatcgccgtggggcaagtcctgagcagcgaggaacccattaccctgcggttgtttgtcggacgcatcgtgttgggatcggccacctcgatggcggcgggagccgcgcttatctgggtgccagggctgtcgccgctggcgatagtgggattaggggccgcgctgggcatcgccggccaccaggctgttgagctgtggttacgccgtaagggaagtaatcttttgaaagggaaaggaaaatatgactctgagtga

SEQ ID NO: 450731 - DNA, 294 bp, Serratia marcescens
atgacggtgcgtattgactgggaaaccggggttggtgatacagaaggttcccctggatttggcgatgatgaaaaatatctcgcctgggctaagaaaatgaaagcccagaatcgccagcacagcaaaaccgtcccggtacccgactataacggccaggatgtctgcggcatcacggtgcactttttgccctgtgatgacgtgaaggtcacgaccagttgctacacctacggcagtccggcctacctgataaaagagcccatcaggatgaaggagccaaaagactgtccgagatag

SEQ ID NO: 450732 - DNA, 303 bp, Serratia marcescens
atgcaagagcatgaaaaaacgttctggagcctgctgttattgggcgcgctgattgctatcggcaaggtgttaagtagcgatgagccgatcaccccgcgattgtttatcggtcgggtgatcctgggaacgggcacggcaatggtggcaggcgcggcgctgatttgggtgccaggtctgcccaccctcggggtggtgggggtaggggcggccctgggcatcgccggccaccaggccgttgagctgtggcttaaacgtaagggcagcaatctgttagcggggaagatgaaagatgacgttaagtga

SEQ ID NO: 450733 - DNA, 198 bp, Serratia marcescens
atgaaggcccagaataagcagcacagcaaggtggtgccggtgcctgactatacgggacaaaagacctgcgggatcacggtgcattttatgccgtgcgatgaggtgaaggtgacgaccagctgcgccaactatggccatccggaacacccgatcaaagaacctcttaagatgccggagccaaaagtatgcccgaaataa

SEQ ID NO: 450734 - DNA, 1125 bp, Serratia marcescens
atggaaactgggattgttactttttttgatataaaagcatgcggtttttatcgattgaaaaagaatgcagaagaactagagcacaaatttggtgatgctgacgatgtattttctgaactggaaaaatggttaagaaataaaagcgttgaggagtcaataccgtgggatgttgatactcatcctctaaggaataggacttattgccgaggggttgccgtagatgatgagacaaaagatcgtgttatagttatatatcgtgctttgggctcggcaaaaggaagattgcatgctgttaaaagaagtgcagcagtaggggcgtcagaaagtgaaacagcaaaaaccataactaatgataatgattatatctgggttgaaccttgttattactggcttattccggagtataataaaatagcctcgatagtgttccctcattctggggctgatactgcaaggatgcgaaattatatatttaattttgttgttaatcatggcgactttggtcgggctaagaatacgacatccttctctaaagctagaacatcttattctgatgaggatattttagtttccaaaaccgttttcaagttcgatgaagatgggaaagaatgcaattgtgtgtttaaatttttaacagaaataacaaaggttaataagccgggtgagaatttattagagctccgagaggatatcacccagacaattattagggatacaactgtcgcacgcaccgaagatacacgtcagccgttgcttcgtttgatgagtaatgtcctgtcagagttcttaggtggggatgaaagtaagtttaaaaaaccaaagaaaatagaggtgaaaatcgacggtgcgccatctgaacaggaaattaaagacctcttggagagaaatgcagatgatgtagattgggttgatgtcggttttgtactgaaagactctacgcggcctgtgtggcttaagcgttacatggctagaacatctatttttattgatgattcggatggtgttgagcatctctccccagagaaattactatccgaaataaaatctgttcgtaatgacttgattcaagctatcatatataatgacagttcaaacgatgagagcattaatgttgcggaggcataa

SEQ ID NO: 450735 - DNA, 540 bp, Serratia marcescens
atgagtgctcgaacattgcatgacttgaaagagcttgctaagcagcaagttgtcaatttttttgttttggcctgtgttttcctaatcgtttatttttttcgtgatgctattagatacaatgatataaaggatgtgctaggtgtcttgcagaatatatctgctgctatatttacgattgtaggcctatggattggttttttatatccaaatgcaattgcaagcatagtgaatgatgatattaactatattaagaacactaaagatgccccgaggatagagaagctaatctacgttgtcattgtctcggcaattgttatggtgtttattctgtgcttttaccttttaaaggcgatgattcctaatattgattttttcaaaccatacaaagaggtgataaaaatcataggtgctggattcatctatttcatgagctggcttcaaatcaaatgtgtttttagtgttattattagcaatctatcgtttgcaaacaatctgcactctagaataacaagagctaagctagatcatgatgacgattag

SEQ ID NO: 450736 - DNA, 630 bp, Serratia marcescens
atgatttttaagtcgattatcattttattaatttgtgtgtttattttcctattaggtttttttttaggcggtgtgcattgggagtgggctagatcccctaattactctactaatgttgcattttggggaatgataggtggttggttgtctggttttgcaacactggcggcagtgattgtatcattatatatggcctatcaagcttcgcaggctggagtggaaaatctccaaatttcacttgattctattgttaaggaaagttacggagacgatcacaaagttgttctcaatattaaaagcttacgcaatgtcagggctgaggtgtcacatgttagattgcttattgataatgcgccttacgctatctctttaaatggggtttatgcgggaggggcaaagtggccaatttttttggaacgaactgggcaggtggtaaaatttgattttaatttaaacgcaggtgtgctctggtggcctattttttctgcgtttgatcggcgaggtgattttaagtttaagaaaggattcttcattgtagaaactacaatgaaaaaatacaaagtcgcggtgccacgggtttttctaaatgttctattgagtcgctacgagtcttttaaaaaaatgcaataa

SEQ ID NO: 450737 - DNA, 927 bp, Serratia marcescens
ttgttaagctatgttgattctttgaaagctagcttaagaggttcttttgtgaaatttgaattcggtgacttatataagttcatagtgtctcttggagtagttttggctatgtcggcatttataattccgtggctttttcttcgtgagccatttgacattttcaaatcaactcaggatatagcgaaattaaccgctctatctcaaagtataatcagggagagagagggtgttgttttctttgtatcaaagcacttgatatgctattcgatgtttagtttcatttctggagtggcgttgagtgtctatggactgtataaatggtgggggaatcaattaataatagatgaaagaacgaaaatagacttaaagattattaaggcggcgaatagggatgcgactgaagatgaaatagaggaaaaagtcattttagacattgcaagtcaaaattcagaggtgacacggcacgtaacgaacgggtttgtgagtagttatagacagatggagttgtcggtttttgaaaggttttcaaaatactattctagtgcatatgatttaagtagagacaggatggttgctgatgtgaatattgatattttaatgaaaggaaaaggttttttttcaaaggactggattattgaggttaagtatataaagaaaggctttaaccttggttggttgcgtcaagtactacttaagaatttatatgcaaaaaacatatactctcagtttgaaaatagaacaccatatacgttggcattgatcgtggttgaagatgaagcttacgtgaaaaataagggtaaatatgatgaattacttggcgttgttagcaatgatggaagaaaaggcaaggatatagtggtgattgttaataaaagtagtttttttaatgcgggtgaaaaagagtttaaggagattgtaaaaatataa

SEQ ID NO: 450738 - DNA, 717 bp, Serratia marcescens
atggaaaaaaatgactctgattattataaagaaaaatttaaaattaataataattgcgcatgtactgacgaaaagctaaaaaatgcattcgagaaaatatccgacataagaaaattcgagatagaaatgtattggaagcgtgcaacatatttttggactataattgcagttactttcactggttactttgctctttcagtagctgaaaagctagagaaccgagagaattacttattactcatttcatccatgggattggtcttcactttcgcgtggtactttgtcaacagaggaagcaaatattggcaagaaaattgggagaatcatttagatcttatcgaagatgaaatcactggaccgctttacaaaacagttctagaacggccgagcaaaaaaacacatagttctatgacggaaactgaaggacgctttgacagttttcttaccgggccaagtaaattatcagtatcgaaaataaaccaatgggttgcattatatataatattgatttggattggaatggtaatagtaaaccttccatttcagcctttaattaaagatgtggaaactcgaatgactttagcctccatcacaatcctttttatatcaattatggcaatcacactgatggtatcaaaaggtaaaagccatcagggtaaacatgaggtttccctaagaaagagagaaacagcaataataaacaaagacattcaataa

SEQ ID NO: 450739 - DNA, 633 bp, Serratia marcescens
atgctaatttgttattggcttttagttcgttccaaacacagcaagagtgaaaacatggatataaaaccagcaagaaaacaactacgttttgcaacaagctcgtttcacgctatgcagtcagcgaaaaactttgatgacttcgaaatgaattggagtaatttcctaagctatattgagcaggttttcgacaaggtaagaatagcgtgttccacaatggcaaaaaattatgcttcattcattagtccaatcaatgcacaaagagcaggtgacccattgcttgtctatctgaagcaagctagaaatgccgtgcatcacggagtacaggaaactgcaaagcaaacgcctgctcacatgagatacgaaatcggtgcaggtaatatggttatcgaaaatttagaaattgaagatgggaagccaataaaatactcgggtaaccttccccttgaaatatatgttatccctgaaaggatcgttgctgttgactttgacaacagaggcgtaaggtacaaagttccaacttcccatcttggtaaggacttagcggacaaccatccattagcgctggctactctagccttagactattactcggattttttaaataaggttgaaggtgaattaattaacaagtaa

SEQ ID NO: 450740 - DNA, 480 bp, Serratia marcescens
atgggacgaccacgtaaagaaatccaaaccccggggcaggaaaatcagcgaccggaagaaaacgccgctgacgcactgctgctgaattctgtcgtgcaacaaccagcaaacacgcctgaacagctgaacgacgccaccgctggcgccacggtgattactggaggcgatgacaaatcggcgattatgcagcggcgcgtcgcaaagttgctcgacggcgcagcactgaaagagcgcaacgcgattctgtccgggctaaacgagcggggcgccgccgttatcgctcgatttgaggcgttggagttccttgacgctgacgatcaacgcctgaccgacaatctcgaattcctcaccctagtgaagaaagccaccgaagtggcaaccggtggcgccgggccgatggtgacgaacgaagagggcaagaagcagccggcaccgggcaaacctgttttaaccgaacacggctggcacgtaccaggctaa

SEQ ID NO: 450741 - DNA, 921 bp, Serratia marcescens
atgagttcaaaagcaaagaaaattgataacactgagcaagatgattgcgcaagtaatgtttgtgggataatcatgccgatagcagatacacagacgtaccctaaaggacattggacggatgtgtacactattttatgcgaagctgcggctagcgctggttttgagccaaatctcgtaagctttgatgatgatgtaagtgtaattcaaaaacgtatagttcaaaatatttacaacaatccaatagttgtatgtgatattagctcacgcaatgctaatgtgatgtttgagctaggtatgaggttggcattcgataaaccgaccgtgatagtcaaggatgagaaaacaccatattcatttgatatttcctctatcgagcatcttgagtacccaagtgatttaagatatcaagccataaacgaattcaagaaaaaactagctgggaaaatttcagaaactcacagaagatccgcgacagatccagaatacacaacctttctaaagcactttggaacatttaaagttgcaaagttagatgaaaaagaggttggacctaacgaaatcttcctggaagaattaagggaaataaagagaactttaagtaatatcattaagaatgaaaggatttatagctctgcttctagatggatttcgccttttgaattgcctaaaccaaagcggcatgaatctaactcaagcaaaagtttccaatatgtgtttactgctcctaatattggcgagaaattgggtgagttcgctgaaatagtcgaggatttcaaccaaatatacgagatgggtttgattgatgtaggtgtgcataataatgatatggccactgctacctatatcaatcctgttgatgagaaaatatttgacatgttaagctcagcggtttcggcacgtttttctggtgcgggttcgtaa

SEQ ID NO: 450742 - DNA, 702 bp, Serratia marcescens
atgaaaagttctaacaagaaaagtggtaaggcgaaaatcagttccctcgttcctgactcttacaactttagtacattaatttcattgctggacgaaaaaaccgattttgaagtggtcgtgttaggtggggcgtatttagatagaataatagagttgaggattatagctaagttacatgagataaatggaagctttaatataaccactttcaatgatcacagggttctaaaagatttcgataataaaacaaaactagcatttcacttgggaatctttgattcagaaatttatgggtattttaaaacaataagagatataaggaatgtttttgctcacagtgtgatgcaagttgattttggaaatgagtcaataaagagtaaatctttaagtttgaatccattttcattttttgatcccaagaaggggctttccaaccccaaagggatggaacagtattttgacctgcctgatatcagttttactaatagtttgggaagaactatatcaagcaaagaatatatactagttactgataaaaagcataaggtaggtgtttatgtactagataaaagcaacaaggatatatcttcacctagagaacgctttatctgcactgttcaaatggcttggtttattatgatgttggaaattatacagtgtgatcaaaatcttgtgatgaatgaaatacagttgccaatataa

SEQ ID NO: 450743 - DNA, 1647 bp, Serratia marcescens
atgcagcttgattcgataaaggtagaaaaattcaaacgcattgatgctatagatttgaaacttgctgacttaaatatacttgttggatcgaatggcagtgggaaatcgtctatccttcaggcattgcatttggcatcctgcctcatgcgtcaggctgagcgcatacgagcaggggcgactgtcatggtacgcgtgagcgacctcgactatcttccgtccgatgagtattggcggcttggtcatggtgcagattggggtaatagggcgaatagcccttcctctaaagtttctttcaattttcgccgtgatgacggagataatgtcaccgccaagcttgaaatgcgctcggcgcgaaacgctggtatctcagtacagggagagcttccggacatagtcagacctcaatttcgtggcgcagaggtattttttagtggtttcattccgggaatatcaggtattccaaatgtggagcaaaaaaattcgaaacgagtcgtactgaaagcctgctccttcggggattcaaatgtttatctgcgaaatgccctccacctactttctctggaagacataaatcaaatcgaaatgtggttggagccgcttttaggacagctaaaactgactgttaagtttgacgaggcgtctgacttcgacattaacgccgaggcacagatagatgaaaagagggtgccgctggaattgctcggcactggatatctgcagcttatacaaatcttttgctacatcttgctgtttaagccaaaaatccttttgatcgacgaaccagacatccatcttcacccaagcgtacaggagaagcttgcgcagcagttgctggatattgctcgcttgcagggcatcaaaattgtgatgacaacgcattcccccttcatcgttcgcggcgctcctgcagacactaacgtcgtctggctggcaaatggtgagaaaaagtctgatgatcgaacagaagttgagttggcccttggatggggcgcttttggaaaaaaagttatcgtggttagcgaagatgccaagaacgacttgctgaaaaagcttattcatcaatggccggaaatcgagcgggctgtcactgtgctacctggcaggggttataaacatcttttgactaaagatgaggctatggaactccggaagtctctcggtgataagtttaagttgctggtacatcgggatcgagattcgttaacggatgatgaggtcgtggagcttaggaacgcatacaatagcgacggaattcggctatggctgaccgatcaatctgacctggaggcagaattttgcgaccctgggtttttgtccgctttgaccggagaacctatacacacatgcgagggctggctggcggagattacgatccagaaccaggtgccaataggggatcagtttgctaggcaacgtgcggcgcacaacgatgaattacataaggcagggggtagtcccaccaacgatgaggtgtgggcggcgtttcaaggtcgttcgctaaaaggtgccaaaggaaaattcatttttaatcagttgaaaaataaagtaccagcaaatgcgttctctgagtccactgttgaggcactcgctgactaccctcagcgcgctgcgagtctaaaggccaaccttgaggatctactcgcttag

SEQ ID NO: 450744 - DNA, 246 bp, Serratia marcescens
atgatgcagttaaccctgggccgacagagctttaccctgaacgataacgatgcgctgtttgtggccgaagctatcctgctgcaacgccagcacccggatattgtcttaccggaacaccgcagcactaaacacggcgttatccgtttaacccgtcgccaggccacacctcacctgttttgcgccgggccggtgcctctgagcgacacagccgccgacacccatcaccacctgcaaaccggtcattga

SEQ ID NO: 450745 - DNA, 1158 bp, Serratia marcescens
atgacaacactcaaagaactgaaagatgaactcaaacagcttactgacgaaaccgacaaggccagaaaaaaggctgaaatagcagcattggttgcaaaagctgacaatgacattaggctttcacaaagaaacattggttacaatgtgagagaatggaccgtcgaagttattgtccaaaaatatggggataatttaggctcagaaaaaaacgaactgttcatacctgactatcaacgtgactataaatgggatgtaaaaaccgcatcaagattcattgaaagcataatactagactttccaattccatatttatacattgcagatgtattcaaccaagacccagaattagatggtcgagttgaaattatcgatggctcacaaagaattagggcaatatactacttttggaataatgagtttgaacttaaagatctcaaggaacttacctctttagagggattcaagttttcagacttactcgctagtagacaaagacgctttcttagagcttctctaaggtttatagaattaaaaggagatgtcgaagaacaacatcgcagagatctttttgaaagaataaattcaggtgtgaaaagactagaagctatggaagttaggcatggttcagatgctgcaacttctattttctatagaaatgttatttcaccatgttctgtcaatcctctgttttccgagctggctcctttgtcagatcgtaaaagatcaaatggcgatcacagagaattagtcttgcgtttctttgcttatttaaataatttagaaaattataaaggttttgtagctcctttcattgatgagtacttaaacgagcaggcaatttccattaccgaacaagatgcaatatcatacattgatgaatttttgcgcatgcttaattatgttaatttatatttccctatgggattcaaaaaaacaccaacaagtaaaacaacgccaagggcacgatatgaagctatcgccgtgggtgtcgcattagcaattagagctaatgctcaacttgctgaaccagcagaacctattgcagattggttattcaatgaggaatttgaaagcatagtaacagcagacagcgctaacaacacaacacaactaaaaacacgaattttctatgttagagacaagctgctaggagtttaa

SEQ ID NO: 450746 - DNA, 690 bp, Serratia marcescens
atgagcttgacagacttgagagatgagtatgaggaaagagcaaatgatattgcagaaatgctatcattggcgtcatctctagaggaaaatattaatcaattagatgctcaattagaagctgaacaaatagaatccttcaacacaaggataaatatattgaagtcatccattcatatgatgttgtataatcaagtagagaatactgcacgtggatgcatagaatcaatttacgatcacttacaagacagtgaagtaaattatgcctcactaaaggagaagtttcaaattaacattctccaccgcataatatctgacaatgagacaggtaaatcgctttatcaaaaaataggcactgacatatctaaaaaaataatttcagcatcattaaacatcagaaaggagtttaatggaaatgtgtgcaaacctgttctgcataaaataacacaggcttatggtatcaccgtagaaaactctcctgaatgcaggaatggagttgatctagatctcttaaaagacattagaaacgaattagcacatggcagtaccagcttttcaaaaaagggtcaaatcgaccctttacaagaggttattgagcgctcccaacgaatagacatttaccttcgcttattgataacatctaccgaggaatatattgccactagcggttatttatccgctcaatatgtctaa

SEQ ID NO: 450747 - DNA, 1041 bp, Serratia marcescens
gtgaatattcaagcggtagacattttttgtggtgcaggtggtttgacgtatgggttaaggaccgcagggatagaagtgtctcatgggattgatattgatgaagcatgtcgctatgtgattgaggaaaataataaaaacaccaaatttgtgcttgagtctgtaacagacctgcaatctggtacagtttcatccatgtttgcagatggaagcattcgattattagcgggatgcgcaccgtgtcagccattttctaagtatagaaaccctaatagtcgtaaggatgattcaaaatggcgtcttctgagtgaatttgaaaggttggttattgatatccagcctgagttgataactatggaaaatgtccctcagctgcggattcactcggtttttaagcggtttgttagaacgcttaaatcacttggatatcatttatggtttgatgtagtgaactgttctgattatgggttgccgcagaatcggcgtcgtttaatactcattggttcacgtttaggggatatttcttttgaccaggaaaaggttgttcaaaaggtgtccgtaagaaatgcgatagctaagctgccaaaaattgaggctggagaaaaattggattctgatccattgcactgttctccaaaattacgagagctaaacttaaaacgaattatgcattctctgcctggtgggacttgggatgactggccagaggaaattagagctgaatgccataagaaagattcagggatgacatataaaagcgtttatggacgaatggcttgggatgatactagtccaaccataactacccaatgttatgggtttggaaatggacgttttggtcacccagagcaacacagggcaataacactgcgtgaagctgcaattttgcaatctttcccactagattacagattcttagatggggtgacccctttttctttcaaaaagttaggaacgatgatagggaatgcagttcctcctatcatcgggaaagcgatcggtgaaacatttattagacatattgagcggataaataaccgctag

SEQ ID NO: 450748 - DNA, 234 bp, Serratia marcescens
atggctatcgacattaccgtaaaagtaaaaagcattaattcaattgaaagcaccagctatcaatcagatttagaggtagaacttaaatccgctgaattaacggaagcagtagatgcgaaagctattgtcggtgaatacgacaaggacgaattgcttgaagcaattggtgaagaatatgtccaagaatggttagaggaacaaggattcacagtttcttatggtgataccttatga

SEQ ID NO: 450749 - DNA, 540 bp, Serratia marcescens
atggggctggcgatcgtgcatggcctggtgacattgctcgacggcaccatcacggtgtacagcgaaatcaagaagggcagcacctttatcgtcagcattccggtgcagatcagtgaagacgaacgcgccgacgcgcccgccgccgccaatgcctctctgcagcagaagccgcagcaggtgctggtggtggatgacaacaagtcggtgggtgacgcctttgcggcgctattggacaagctgggctaccagcacgaactgtgcgactcgccggagcgcgcactgcagaagctgctcagacgcccttacgacgcgctgttgctggatctgcagatgccgggcatcgacggcgccgccctggccaggcagctgcgcaaccgccgcggccccaaccgccatgtgccgatcatcggcatcagcgcctacacgccggagcagctgacggcggatcagcgcgccctgttcgataactacctgatgaagccggttcggctggatgcgctgtcaaacgcgctggccgaggtgttccccgctaaagattaa

SEQ ID NO: 450750 - DNA, 1212 bp, Serratia marcescens
atgttattacccaataagcttcaaaataaaaaatataccttctattatgatgaatctaacaacgtaagaaaattggctttgtcagataagattgacgggtacaatattgaacatgacgaagataagtattcaagtttaaactttgttttaggtggagtggcacatttaaatgactcatctacggctgatttcgatgcgcttaaaaaatccattatgcttcaacctacagcgaaagagatcaagagagaccatgtagccactggcgacttcatctttatgcttaattctcgaaagcttaaagggctgtttgaatggctgctacaaagcgatctctatgttcaatattttaatctcaacatggagtactgggcttaccttgatattattgaggactgtgttctattctgccttgaaaataaacttcttagctttaattcattagaacattgtcggcactaccaagatgttcacaaagatgaattatataaagtagtctcctttaatagagaaaagttcataagattccttaaattctatgattacccatattttacagggaaagaaaaaaactttcttcaagagctacatgacatagttcttgattactacaacaccattctttataagcctcttgttacacaagatgaaaaactacacatggatagcctcagagagctacttgaaatgtgtattgaaaacgaaatggaggatttcactcttaccacagactttagatatgaagctaaagaagataaatctaaagccagtgaagatgaaggtcaggatgatagcagtgataactatttagtggatgcctttgctgtcttctatcgatatcgtggcatggattttcctaacagtaagcacatttttgatgttgaagaggttgtaaaagagaactttgaatcttcgctcccgcatgatgaagaattggtaaggcttgactatcagtttgatatttctcacgataatttatttattcaagtgagtgatgttgttgccggagttttccagaaatactttgcctatttgaatgccaatcgcatagaagacataaaaaatgttcgtgacaacctcaacccaatacaaaaagccaatcttgagctttttagaaaacttattaacaagtcagacagtgaaaataaacagcttttgttttatgtaatgtctatgcgtgagcatgaaaaacattatcaatttacatttgcttga

SEQ ID NO: 450751 - DNA, 909 bp, Serratia marcescens
atgaactggaaagacaataaagaaattgctgcgtattttaatttttcgaatgttatggaaggtgactcaagtgaattacgccaggcaatagttagaaaaatggcatcaatacatccagacaatagcagtggtgtttttattgacgatgaatcaaaaaatctttggcaacatcttaattcagcaaaagaatttattgataatcagtctattgaaaaatctacggttgaaaataataaacagttgatacccatgtcacaagtaatggatttggttaaagtgattactgcgacaggaactcaaactgttagtctgacttcttcattaataaaatcagaagttcggagtgatacgcgagctcgtgcatttcttcctcgattggggtcaggagtatttgcgacgataagcgctttcttttttacgtttcccaatacggctaaagataacccaataattggcccttggttacagcgccctgaatcgcaatattatttattatgtgtgtcgttattatcaggatggttatttattagaacttggattcaagaaaagagaaaagattatttatcatctgatgaaggacttcgaggaattctatctaacatgttctatggacatgttggacttaatatttcagaacgaaagttttcgcttcctagttttactcacgccattaaattagggcatggtaattgggagccttttattgaaaaattcattaggacatataaatcactattattgggttcgacgcctaagttatctcgatctatcgtagataaaatagccttaatgcaaattgaaaaacttattcaacgggggttgattgtggagctaccccattccggattggatcgaattttcgaactctccgaggctgcgtataatgatattcgccataggaattattaa

SEQ ID NO: 450752 - DNA, 159 bp, Serratia marcescens
atgctgaaacaacaaatggatgtacatcaggcgcgagagctggcacgagattaccttgcggccatcggcatgtcaggtacccccgaagaatacattgcgcgcgtcaaagcgctggaaaaccaattcctggccctgctaaaacaggcgcataaacactga

SEQ ID NO: 450753 - DNA, 1716 bp, Serratia marcescens
atgaacttcgatcgtatttttttcctatttgtctttttactttttataccactggcgatctatatccccaatcccggtggcgcggggctggcactgccgtttaatctgctggtctacggcggtgcggctctattaatgggtgtttgctggcgggcaacaccgctgtgccgaattgtgataacgccgacctgtcgcgccatatttgtcgcatgttcagtgctggcgctgccggttatatttactcggccagaatggcaaagcgccgccgtttggcggctggttggcttattttccggggtggcgttctatttcacctggctgcaggtgcgcatgaccgcacgccagcgccatgcggtgttgtatttgattttatcggcggtggtggttcaggcattaattgtgctgttgcagctgtttgcgccagcaattgcacaatcctggatcccatccggcagctcgcgcgcctttggcatattccagcagccaaacgtgctggcgagttttatcgccaccgggttggcgctggcgttggcggcgtatgtgctgcctggcttccagcgactggatccgcgagtagaacgctggcgtcgccgcgccctggccgtggtgctggtgctgctgccgatggtgttagtgtgggtgcaatcccgcaccggctggctggcgggagccctggtgctggggttgtttatcctgtgtttttgccgccgttatccgcaggctgtcgccattgcctcactgctggttgccggcggcaccgtcgcggcggcgctggtgctgtggtgggggagtgagctgggcggtgcgttgcgctacgccagccatgccggttccaaccatgcgcgctacaccatgctgcgcgatacgctggcgatgatcgtcgaaaagccgctgcttggctggggttacggcggttttgagtacagttttcagcattttcgcattaaccaaaccccgcccacggcggtgaccgaaatcgcccgtcatccgcataacgaattgctgttgtggtgggtggaagggggcgtcgtcgcgctgctgggtatgctgctcttggtgcgggcgggcatcaaactgctggcccacgcccactggcgtgacaagagggcttttgcctgcggtaaatcatcgtcgggtgaggcattggcactgtgtctggcgctgttgccgattgcgctgcacagccaaactgaatacccgttttacctgtcggcactgcactggctggtgttcctgttgttattggcaatgctcgatcggctggtcagtccgcgccttggcaccggctgcgggttaaaaccttggcgactgccgatgctggccctgtcactggtggcgctgttcgtgatggtgaccggattttacagcgggcgggtattgacccaggcggagcgcggcgggttgcaggatatgcggcaggtggacgccttgcaggactgggccagctggatgcatgacgatcgcctgcagtttgatcgccagttggcaggcttgctcgcctttaaccgaacgcgtgacgagcagcggctggaaacctatgcccaatgggcgcagcgttatctgaatcaccgcattgataaaaacgtttacgccaacctgttggttatcttgcgtcaacagcagcagtgggtgttggcagagcagtgccggcgtgacgccgcgcgtttatttcccttggatatccgatttattgatgcaatgaatggatattcttag

SEQ ID NO: 450754 - DNA, 795 bp, Serratia marcescens
atgaagaaccatcttttcctgacgcttctatttttatcctccacgggtctgcaagctaacatgaccgtgtccgtcgttgacgtaccaaacagcgggaactctaattttaccgcgactgttgtgggcgggccgtcacccgcaacgcccaatccgtgttggaaacgcgggaagacatgcggcttccgcttctatacgatcgatgaaagttggctgcctggtggtcggggcgggtaccaaacccacgatcctgcgttttcatcacccgaacgggcgaatagttacccaactcttaacgaatggtgggcatcggtgactgacaaaaaccgcttgggtcgggacttccttccgtcgagcgacggggatcgcccgtgtgtagtggtagcagctggcacggaaacaaccggaatgatacaggggtccatcgtatcaaattgcgcaaaagggatcgttcaggctaagtcttgtgaagtaaaaccaaacaacatccacgtggatctgcatgccgcgctcgggggggccgcgcctaccgtggatgtaaacaatgtcaccctgacctgtaccagcgacgcgtctgtgttgatcgagacgaatagcggggaaaggatccccctgggcgggtcctcgtcctcctatgcgctcctcgactggggcgccggatttgggaaacccaaaaccgtcaaggcgcgccgcgacgtcgctgagaaactcccgctgcgtgtacagggggtgggtctcgatttgcttggtgccggtcaatttatgggcagcgcgatagtcaacgtgtcgtacaactaa

SEQ ID NO: 450755 - DNA, 657 bp, Serratia marcescens
atgcgaacaacatcccggcgatggaacggcggcggttaccaccgccatgaatggttgtatgccctggtgattactgctgcggcgttgatggtgccattgtgcgtctgcgtgatgttatggctgatgccgcctgcgatggcggcggataactggcaggtggaaggcgcccatggcgtgctgcatgtgcgcggtgaactgaccgaaagcgcctgccggctggagatggcgagcgcgtatcaggcggtgtggctgggcagtaccgctacggcacagctggcgaaggcgggggatcgtggcgtgccggtaaatgtgcagttgcacctgcgcgactgcctgcgcggcccgtccgccaaccgggacgaacgcagtggcaacctgttgtggagcgcccagcagccggcggtatcggtcagttttaacgccccggcggacgccgataacccggagctggtcaaagtgcatggtgcttccgggctggcattgcgcattagtgatgagcgcggcggggatatccgcctcggcagccggggtgcgccgttggccctggccgtgggacagaacgcgctgaactaccgtattacgccggaacgcacccgtgcgccgttgctgcccggtgcttatgcggcggtggtggatttccagctcagctatgactaa

SEQ ID NO: 450756 - DNA, 546 bp, Serratia marcescens
atgcattcacagcgtggaaaaaggatattacggcgcgcggtgttagttaatctgttgctgtgttcctctttggcgcacgccgccaaccaagggcgtggtgaggttaccgtgaacggcagaattatcgcctccgcctgcgccattgataccgatagccttgaccaaaccattaccatggcgacattacccgtcagccagattattcgtgatggccagggtgagttgcatgaatttaatattaaactggtgaactgcacgttggagaaattcaaccctgcattggatgactggcgatattttgccgtgacctttgatggcagagaagatgccgggttatttggtattgacggaaacgccaagggcattgccctgcaaatatccgataagcgggggaatgtcgccgcaccgggtatgcctatggaaaaaaatgaattacaacccggtaccatggaatttaattatggcctgcggttgatgggcaataatcaggtaatgaaggccgggagttattactccaccgtgcgctttaaaatggattactactaa

SEQ ID NO: 450757 - DNA, 525 bp, Serratia marcescens
atgactttgaacaaaatcatgctggcagccgtaatgactctgggtactatctctatggctaacgccgctaaccagggttccggtaccgtgacctttaaaggttctatcattgatgcaccttgctctatcgacccgggcacgctggatcagaccgtgaagctgggcgatatcgcttctgcccaactgaaaaacggtggcaagtctacgccgcaggacatcctgatcaagctggtaggttgtgatgtagaaacggctaaagacgtgaccaccaccttcagcggtactgagtctgaagcagcgcctggcctgttggcaatgaaaggtactgcacgtggcgccagcatcgccatcaacgaccttgacggtaaactgctgccgttgaccaaagccagcaaggcgcaaaaaattgaagacggccaggctaccctgcgcttcagcgcgcacctgcagggcgacggcgcttctgctgccatcaccccgggcgaattcaactctgttgctgactttaccctggcgtatcaataa

SEQ ID NO: 450758 - DNA, 645 bp, Serratia marcescens
atgaataccaccgtacattcaatcataaataaaacatttaccatcgccatcatagacgatgatgctttttacaaagcaggattgattatggcattgtccacctactttaaaaataaaaacaggaatgttagttttatccatgggcattctattacagggcctgcagatattatctttcaggccatacgctgtggcactttcattgacccgcgtagccaacatcatgcaacaagcggcaggtcgcattgttttgctatcgtagataatagagattcccacctgcaacacctctatcgtcatgtggaaaaaaacaatgtcttttatcggcaccagtctgtgacgactttattacagctgattgaaaaaaaacttgtcctatcgcaaccgtttaccgggaaccaccttgccgaagaacaggtttttctccgtgaaccgctcaccctgcgtgaacatgaagtgttgtgtcacctcaagcagggtaaaacgcatgccagcgcagcaaattgcctgggcatcaaagtgaagaccatcagctctcacaaacgcgcagcaatgaaaaaattaaatttcagacgcactaacgaacttttccattggatgctgcaaggtggtttaacccgccaccagccaataaaaggacattaa

SEQ ID NO: 450759 - DNA, 951 bp, Serratia marcescens
atgaaaaagtatcaggtttttatatcttcaacatacattgatctaaaattagaacgtcaagctgcagtatctgccatccttaaaagtggccacattcctgctggtatggagttgtttactgctggtgacaaaaatcagtgggaaacaataaaaagttggattgatgaatctgatatttacatgcttattcttggggggaggtacggttcgatcgaacctacttctggaaagtgctatactgagctagagtttgattacgctttaaagagtgggaaaccattattctcggtagtcatagacggtgagcttttacaggaaaaagcaagggaaaatattgactttgcggaaagggctcattatcaaaagtggctagattttaaggagaaagtaacttcatatatggttagttttttctgcgacgaaaaggacattcgtttagctgtgttagagagtctccctgagcttgctcggcgtgaaaatctatcgggttgggtttctggaaatgaggttccggataccaatggtctggcatctgaggtaagcaaacttactgatgaagtaagattattaagaaaagaaaatgacgcactgaaatttaagctaaaagctaatggaaaggatgatagctcctttgagctgatatcaagggttttaagagataggaaatatacgtttgattcagaagagtatggtttcaatagtgaccaggagaggaatgcgttgcagcttcttattttatatagaagttaccttgtaaagggggttgtggagggggttaaaataacaaaaatgtttgattatgttttatctgttgtatttcctctctatattacccatggtttggcagaaatggagaaagttacaggtaatgtgcgtcgccgcttcatcatcagtcagaaaggcagggattttttggcatatttggacttgaaaaacatcgagaaagattaa

SEQ ID NO: 450760 - DNA, 204 bp, Serratia marcescens
atggcgaataccacgataaatatcaccgttcctacaggatacgtttcacttgatgcttacgcggagatgaccaaattacccattggtacctgccgccgtatggtgcgagacggccggatcatcattcgtccaaaggtgaaaccaaaggacaagatcgaggtaaaccttgtcgccatgctgaaagacgcaatagccaacagttga

SEQ ID NO: 450761 - DNA, 1323 bp, Serratia marcescens
atggcagcaatttattctaaattatgcgggcgcggacaaggagatgcaaaaattttctactgtcaggtggaaacgtatttcggtacgaaggagtatgcaaggcatgggcgttgcgtccgcctcattgggatcgaagaaggcgattttcataatttgagaaagggtggggaagatggtgtcaccacacatattatcgacttggatttttggcgctatttccagcagaggttgagtcttgcacattggtgggaggttttgcaacacattgaaatgataaaaactctcgaagcacagcttcatggaaaacggtcatggtttatcatcgaaatagagactggacagtcgtctgcagattactattatccaaccttctccaaggatgaacccacttatataggtgcgtttagtataaaatcagtaaggaggaagggcttaccagatctaactaaaagtataaagttacaagtgtgccaatccttcttaaagatagatcactccttattctttgattcctaccctaattttcattgcggcgaaatctcaccgttaattcataggagagggagctcagttccttacagatttcatgcatttcacgtagggcaaggtatgtgttcgttggtcgataatgggcagtttggatacttgttggacgcaggtgctggtaaacctgtcacgcgtaagcgttactttgataagactaagccaatgctcaatgaccttgctttgaaagtccaactgttggctgaactcgttatggtgacttctcatacggactatgaccattggaagctactcgcttgggatactaaccttcgcacaaaaataagagcaattatggtgccttacggtgtggaccacctccttttcaaagacaaggaaatcatcaagaagtgtttttccacttcatcaatgaagatcaaattggctgacaacacattcctagagctgatcaggtccaagcctagcttcaacgatgcgaatggcgactgtatcgttacagtcttcactcgaggcgcagaacgtgtgcttgcgccaggtgactacgtgtacagccgtttcactaccgattcttcctcacatattaaaaatcttcatcagtattcatataaggcagtaattgttccccatcatggcgacaaggagagtgcgaacaatgtggtaattgcggactctccggatgcacacgctttcttttctgccggaacgcatggatattacaagcatccgacatatgagtctcgaacaaaacataaagttgcgaactttgtcgaaatttgcgacgaaactaaagactacataaaagcagtcctattgctttaa

SEQ ID NO: 450762 - DNA, 2943 bp, Serratia marcescens
ttggcgggtcaggttttaagttggaggtggtctgaagactctttatcgttacttaaaaatttggacattgaagaaaaaaatgttggactcccacaaggtttagcatctgctggagctttggctaatgcatatctcattgagtttgacgaatttttaaattctcaccttcgtactgagatagacggtagccaaattatactgcatgattattgtcgatatgtcgatgatattagattggtgatttctggagaggcacttacaaatgaggaaattaagaattccattcatgagttagttcagcgaatcctcgataaaacgttagatcaagatgagtcagacaacgaaccatatttaaaaattaatgagaaaaaaacttatatattgggactctctgatattgataacggaagtagccttacaaatcgaatcaatgaaatccagaatgaagtaggagcttcaagtattccggagcgtaatgggttagataataacataccggcacttcaacaattattattgactgaacaagataatttcttagatgacgcagatggtttgttttctggattaaacaatgataaatcgattaaattagaatcgttacgtagattctcggcccataggctggaaacaagtttagctaataaaagtaaactaatctcacctgcagaaagaaaacagtttgataatgaatctgcgctggttgcaaaaaagttattaaaaacatggctaagagacccatcaattatggttattttccgcaaagcgataaccataaaccctaatctagatgtttataaagaaattcttgaaattatatttctaagaatacagcgtaaccatgacaaattcgatagatatatcatgttgtatcttctttccgatgtatttcgtagcgttgttgatatctatcgaaaactatccacaaagcacatttctgattatcagaaattggtgagtgaagttacatcatttgcccataagctactttcttgtaaagctactattccaaactacgcatatcagcaagcacttttttatcttgcagcgatcaataagccattcatagctagtaaaaaagcttcttctgatctattaaagcttcaacatgtcttaattaaacgacatttagatccgttgagtagtagtgatggatacctatttgaattatctgctcagatcagtaaagactaccaagcaaatgttgcttttctactttctcctacaaatgctactgaagtagtagactcaatcgtcgagaaatttgcttatcgtggtggtgagttttggaatagcatttggaaagagtttgttaggacgcaagataaagttaggatcaacaaatttagatgggccataccaaaaaatgaggcaaaaccaaatggttcggagcactacctctcatcagtgatcagttttaaggaaaatccatttaaatacgaacatgcgcttctcaagctaggtatagcattagttaatattttagaagataaagagaaaaacgtatggcaacctgatggtaagcagtattccccacatgaaataaaagtaaaattagaaagctattcaacatcatggactgaattatggcgcccaaattctattatttcatgctctatagataaaatagctaaagatcctcgctatgaatgccctaaatggttggtggattgtcaacaaggcaaaaatgatgaaaaaaaaatatattgggtttgcagtgtactaagaagtgctgctttaggtaatatagattacacccagcgaaatgatttaaagcctgatagaatagagtataatgggatccattctcagttttacaagcgacgtatgggaatgttacatacaccagagtcaattgttggttcatatgcaactataaccgattggtttgcaagttttcttcagcatggactgcaatggcccggtttttcatcttcatatataatccaagaagatatattgtcaattaccaatcttggtgattttaaaaaatgcttgtcggaaaggctaggctacttgaatacgcaaatatgcagttcatcgaatgttccgaccttacctactgttgtcagcagacctgaattggcatctaaccattttagaattgttacggttcagcaattatttccgaaggataagaattttcacccttctgatgtaacacttgataatcccgaggtgcgttggaagcacagagagcaccttgcagaaatttgtaagctaacagagcagactttagatgcaaaacttaaaactgagtctaaggatcatatgagtactgctgatctaattgtcttttctgagttggctgttcacccggaagatgaagatatagtaagagcactggcatttagaaccagatcaatcattttttgcggttttgtcttctgtgaacaagatggtcgaatagttaacaaagctcgctggattattccagactcttccgagtcgggtacgcaatggcgtgttcgtgatcagggtaaatatcatatgaccagtggtgaggtgactctgggtgttcagggatatagaccatctcaacatattatttctattgagggtcacatagaaggaccatttaaattaacaggtgctatttgttacgatgcaacagatataaaacttgctgcggatctgagagatttgactgatatgtttgtcattgcagcgtataataaagatgttgacacgtttgataatatggcttcagctctacaatggcatatgtatcagcatgttattattacgaatactggagaatatggtggttcaacaatgcaagccccatacaaagagaaacatcacaaactgatttctcatgctcatgggattggccaaatagcaattagtactgctgatatagatttagcagcatttagaaggaagattaaagaatataaaaagaccaaaacccagcctgctggatttaatcgaaaacattaa

SEQ ID NO: 450763 - DNA, 213 bp, Serratia marcescens
atgtatgatcaatatgtttggtacgtggccagaatgatattctgttttgagaaaatcattgaggttgaaggaaacttaaaagatagctcttggacaaatacgttggaaaaacatttgaagtttcattctgaacactttaagaaaactaaagttgttgaagagacactctatatcaccccaattttagatctcataagatgtgcggctaactaa

SEQ ID NO: 450764 - DNA, 528 bp, Serratia marcescens
atgcatcaattcaatgagcttgcatatagatgtacatatttttcattgagggtgataaacgaggcctatgatgaaacgatgaatgaattatcagaaactggctcaactcctcctgttaaagttttacaagctctgaatctacaaaagatgatacatatagttggattgttttcaatttttgaagcacaccttcaacaaggacttgcatgtcgaaatggtttcaaagaggctgcgttgattctagaaaaagcgggtgagtatgctgtaaaagaagactttcataatttttatctcgcaatcaatgcactaaagcatggagacgggacaagttacaagagtcttattagtaaaattagtactcttaacttcgtggtggaaagctcaaacacaccaacctttgaagaaggggatgtttccggtatttttggactagtaagagtcgatgatggttttattgaaaattgcatggaaataattgaaaaagtttctaagtgcattaaaacgcaccgacctgacttcatatcttga

SEQ ID NO: 450765 - DNA, 582 bp, Serratia marcescens
atgtctactgttgcagatttagtatcagcattagcttggccattggcttttgtatggtttgttcagaaatatggtaatgatgttaaagagctaattcttcggttatctaaagtaaaatttggaaatgctgaagctgaatttactttagggttaaaagccgtggaggagttagctaatgaagctcccttgattgaagcatcaaaagatctgcctgaggaaggtatcgagttttctaaacgtatgtcgcagttagagcgcattgcggacgtatcgcctagggccgcaattatggaatcatggttactaattgaagaagcggcaggaaaagcaggttttgtccagggggcatcaattccaagaattaatccattattatttattgaatggttagtaagagaagggaaaattgataaatcaaccgctatcttggtagataagatgagaaagctacgaaatgaagcgagtcatctgagagatttcgaactcacaaaagatgaagctgaacgatatctaaaaatagccgttcaaatctctcttcttatcatcgagccggagttatctgtagtgttagaaaatgagtga

SEQ ID NO: 450766 - DNA, 132 bp, Serratia marcescens
ttgccggacgtgagcagcgccatggtcagtggcgagttcaactcgccgattctgcaaaaggccgagcaggaaggctatctgatgctgtgcaagccgctggagtcggctaggctgcatgcactgttgacgtag

SEQ ID NO: 450767 - DNA, 1068 bp, Serratia marcescens
atgatgaaagaattgaaaatcgcgaccagcgccagcctggtcgccaccattgagacgctgcgtcagatcgtgcgcgtagagcagacggactacaccgacgtggcggcggtggtggtgtcggtcgccgacgtgaacgccggcattctggcgcgcttgcaggcgacggggttcgacatcccgaccttcgtggcggtggaaggggacgagcatctctcgccggactatctgccgttcgtcagtggggtcttcgcgctgctggccggcgccagcaagccgttctacatggcgcagctggaggccgccgccgacgcctacgagcaggcgctgctgccgccgttcttcaaaacgctgaagacctacgtcgagatggaaaattcgaccttcgcctgcccggggcaccagggcggcgagttcttccgcaagcacccggccggccggcagttcttcgatttctacggtgaaaccctgttccgttccgacatgtgcaacgccgacgtcaagctgggcgatctgctgatccacgaagggtcggccaaggatgcgcaaaagcacgcggcgcgggtgttcaacgccgataaaacctatttcgtgctcaacggcacctcggcggccaacaaggtggtgaccaacgcgctgctgacccgtggcgatctggtgctgttcgatcgcaacaaccacaaatccaaccaccacggcgcgctgatccaggccggcgccacgccggtctatctggaaaccgcccgcaacccgttcggctttatcggcggcatcgacgcgcactgcttcgacgaacgctacctgcgcgagcagatccgcgaagtggcgccggaaggcggcggcggcgcggccgttccggctggcgatcattcagctcggcacctacgacggcacgatttacaacgctcgccaggtgatcgacaccatcggccatctgtgcgactacatcctgttcgactccgcctgggtgggttacgaaggctttattccgatgctgaaagagtgctcaccgttgctgctggagctggacgagcacgatccgggcattttcgtcacccagtcggtgcataa

SEQ ID NO: 450768 - DNA, 1143 bp, Serratia marcescens
atggtacggttcatcccatccttcgttctttctgagcatcgcattcaggatggtcagcagtttgcggatacaggcaaccagcgccacctttttgggttttcctgccgcaaccagcctcgtgtaaaacgcttttatcactggattgaatcgggttgcgacgagtgcggccatgtacaacacggttcgcacacccgcccggccaccaaagatggttcgtcggcctctcatggtgccagaatctcggtttaccggcgcaacgcccacgagcgcgctgatttctcgtctcgaaagccgacccagttccggaacctcagccagcagtgtggccacggtcatggtgcctacacccttaatgctgctcaaccgctcagaaagttctttaaagtggtttcggatatgggtgttcatatcttcatcgattcgcgcaagttcatcttccagcgctttgatgatgatattaatactctttctgctttgaggatgagcaggatgcaaccggttacgctcagcgacgagcatcgtgatcaactgccgtctgcgaacgaccatagcattgagaacctgacgttctgcatccggcaaagcccggataaatcggtctcgttccggatggcgattgataacctcggccatctgcgcaagtgctctcgcatcaatacgatcagtcttcgccagataccccatggcgcgggcaaagtcgcgagcttgcttggggttgaccacagcgatctcaaaaccttcagcctgaagtgcacaggcaacagcagcttcaagtcctccggtagcttccatcagcacaagagcaacggtgcgcttcctcagcacagcaatgatggaatcaaagccgtcagcgtcattggcaaccgaaaactgctcaattgcgctgctagcggcaatgtccagcgttgctttcgaaacatcaatacctacacagagtggacttggcagactcattattacccatccttgcaaatgcgttatggagtacggacaactgttcgggtttcagatgagtggctcagtgtatgcgccggtcgctttttaacgggcttaaaaccccaggagcaagcaggctgcatacatcttgccaaatttattcgtagctattttaaccggttttcaagatacaaggagctaacatga

SEQ ID NO: 450769 - DNA, 327 bp, Serratia marcescens
atgaaggtttcatcattgccactgctgtgcggcgcatttttaatttcaactcaggctttggcctcaagcccggatgcatggacgaaacatgattcggatgttaaagcggcgtgtatcaacgcgagcggcttgaagaatgcgaaaacgctcggtgatatcgtgctctttgaagacaacgtcggttcggcgttgctactggagggaacctattctagcaaaatgaataaggctcagcgtgagcgtaaactctgtctctatgaacgcactggcgagcataaagtccatataactaacgcagataccttaattgtcactaagaaaaagtaa

SEQ ID NO: 450770 - DNA, 948 bp, Serratia marcescens
atggctagcaaggtggtggcgcgcatgagcagtcacgactggcggcgtaatgatgacctgatcgcgctgcgccggcagggctatatcccctatacccaacgcaataacccggactaccgtcccaaaccgatgcgcattgccgcgcggtcggagagccgtgaagcgctgacggtgctctcgatggtgctgggcgccaactgcgactacaacccggacagcgactacccgttcgagatcatgctgccttttgaggacgtggccaaagcgatgggcgtactgcacgtctacgaaagcggccgtaaggcgtatgacgtggcgctgcatgcgctgtcggtgttcgagcagctggactatctcatcgtgtcgcgtgggcaggataccgacaccggtcagaacaagccgctgcgcatctggctgacggagaacttcttcaccagccgcggcattcaggtcgacgaaattcgccagtggctgaaccagtaccggctgtgggcgattaaaaacggcctgaccgaaacgctcaggcaaaaatacgagcgccacctggtgcgcatcgcgcatctggggatcgacatcgagcgcaagcactcgctgaaaaaccggctgaaacagattcgccgctgggtggtgagtcccgatctgcaaaacctcaagcgcaacgcggagcaggtgattggcaacgaactggccaggcgtcagcatgacgcgcagcggctggatacgctgctggatgacaccgctgccggcatcaaaaagctggctaccgcccggcgccagaagcagaacggcttttatcaggcctgggtgcagtggacgatgggcagctcgccgctgaaggcgatgcaactggagaatacgctcaagcatgaacagcccggactgctgaacagcgatccggaggcgttctatcgcttgctgctggagcgcgccggcgctatccccgcctaa

SEQ ID NO: 450771 - DNA, 582 bp, Serratia marcescens
atgctggaaaccattattggctttttgaccgtgggggtgagcgtatttgtggcagtgtccttcctgccggtcatccagccgcagaacgcggcgctgttgcgctgggtacgcggcagtaacgtgaccgtaacagtggatgaacaacgtccgggtgaccggtacgacagggcggcgcgcgagaccattcaccgctttgcccaccatcaccgggtcactgaccaggtagagcaggcgctgctcggcctggtgaaacgccccggcctgttgccggtgacggtcctgctgcaccctacactggtcagattaagcacgcaaacgacgttctcggcgacggggcgacggcagacgcagcgggtgtttgagcgcagttgccacctcaatgcgctgatggcctgcctcacggtgattgcggtggtttttccgccgtcggtgggaattgccctggggcgcagcagctactggctttttccgctgctcaacgtgctggcatttatcaaatgctgggcgctggtgcgggccgtgatagccgatatcggcgtgctcaatctggtgatgccacgcgatgaagagccagggcgctga

SEQ ID NO: 450772 - DNA, 783 bp, Serratia marcescens
atgcgaaggatctcaaccctggccgccagccggcttgattttacctcactgcagcaggacggcatcaggctgctggcgctgctgctgatgatgggcgaccacgccaacgcggcgctgcacctcaacagcgacgccctgatgtggctggggcgcggcgcctttccgctgtttgcgctggtatggggatttaaccaggcgcagcgacccgtcacccagcgtcaggccacgcggctgtggctgtgggcgctggttgcccagccggtttactggcaggcggtggcgccggacgcaggcgtgctggatgacatgaacatcctgtttctgtttgccgtggtaacgcagtatctgtgcctgttcgagcggttccatttgaaaggcggactcgggtggccggcaatgagcggcgtgttgctggttatctgggtcaatcactttgcggccggctgctttggctgggccggggtgttcgtgatgctggcgagcaccctgtgctacgccccggcggacgcaactcgccggcaggggtggattgccgggtgtcggccggcgattgcgcttgtctggtgcgccagcgtcttgctgctgaacctcgagggcggcagtataccgatgctggccgggttgctggtgtcggtggttgtgctgctggtctccatcgcactgcggccgctcggtaccctgcgcgaaagacgactgctgccgcggcagttcttcccggtggcctacgttgcgcatctggcgctgctgtgggcattatcggcggggctgtcatggagtgcgtaa

SEQ ID NO: 450773 - DNA, 1005 bp, Serratia marcescens
atgccagcaaagaaagtactggtcgctttttgtcacgagctgggctgtaacgtgacaattgatgatgcacgacgtgcatattttgcgctcgaacagaaagaccgtaagcggttcagattttcctgcagcgatcgccattgcaacgtcactatgagcggcgtcaactatcacgtaaaagctgaagacggtgataaattcaaggccgctcactttcgctcacctcatccacacacgccaggctgcgaatggaatcagttcacctatgatatcgaacaagatatacaaccgggtgaaacaaaggatgatttcactgaaaggaaagccagacaaaaacttagagacgacatcaattattttgatgcgtcactcgataacgatacaactacaggaattccgtcacttcgccccattaacacgccagccccggaacccaagccagacgaatcaaacaacagcaagaaaaattccaggtggagtaaatatacgaaaaccacggtgcttcagcggcttattgatttctggcaggaagcgaagaacactctgccccataaggaattcatgaagttgcgaatacatgtaaaaggtatcggctcagtttacctcaacagatatatcacccacattcagaatggactaaccaaccaatatgacggggttatatacggcggtggccgcctggtccgacgatatggccgaggttttctttttagcttttttgacaagcatgtagaaaaagacgtttcactttacgtagataaagaaatcatggcatccggcaacgggatgtctaattacctccatgaaatattggaaaccgaaaatgttcgctactttcgggtgtttttattaaacccgtcctggtcacaaagaatcaataaagtcggcgaacatgtaataaatttacatataacgacagtaaagcagctggtaattttttatgaactaaattcgagcaaggtacatgaatcgacgtccgccgaaaatgatggcgacaatcctgcataa

SEQ ID NO: 450774 - DNA, 207 bp, Serratia marcescens
atggggcattacggtaactcgatcgctgattccgatttcatccgatcagcgattccggtcgccatatacaaagagcccgccacgcaacgtatttcaaccctggccgccagtcggctggatttcacctcgctgctggcgctgctgacaggtgaccagcgtctcgtcaatgcatgccgcccgtcgctgatttcagcggcacaaacgtaa

SEQ ID NO: 450775 - DNA, 309 bp, Serratia marcescens
gtgggtatctgtgtggttctgacgacactggccgctcgggcagaaccggagggatcacgcgagcggacagcgcgatttttggcggcgctgcagggcttcagcgttgacatgcagaccgttctgacagacatcgtgcagatccaggcgcagagatgtcgtcacgcggtcaccgttgaggatttgaaagcgctgtcggccaacgatgagcactatttctcgctgttacgcgcggtcatgacggacaagacctatccgcagtccgaggactatcgtcagcagatgaaccgacacttcggcgaatgccgataa

SEQ ID NO: 450776 - DNA, 468 bp, Serratia marcescens
atggccaaggcgatgcgcgccatgtggcgcatgaaacgaaaggcggaacagaagcaactgaatcgattggcttttggggtgttacgcaccctatgggctgagtcaccgtggcaagttattacgctgcttgcgttgcgctcggtcgtcagttggttagttatctgggggctcctttttgcttgtttaggctggatattgctgtgttcctggctgccctcgttcggggcgttttatgacgcgctctccactattgggcgtgaggaatttatcaggcagagccaacagtttgcttccttcctggggggctcaggttgcatccaaacgggtctgttggctttgttcgtcggggctatttcaatgtggtcgaagtgtgtaaacgttgctcgtcgtgagcagcgtgaccgtgggctgcaaaagcaggcttcatcgctggccgggggagataatgatgacaaaacgacacattag

SEQ ID NO: 450777 - DNA, 1929 bp, Serratia marcescens
atgacattacgacaagcgctatctcgcaccttgctcggcagcctgctggcggcctgttcggctaatccggtctttgccggtgacaacgacacgagcgaaggtgaagctgcagcctccgctgcgctcagcggtgcacagaagggggccgggcaggtgaagccggagcagtattttgaccgttacaccgataacccgccggaaagcggctattaccagggcgggacgcagacggataccgatatcggcgccaaagggcaacaggcgctggcacagaccgagctcggcaaggaaatgcgcaaatctttcatcaacaaccctgccgacaagattgattacgactccgacatgattaaacgcagtgacgacatccgcaaagacgcggacgtcatcgccgccggcgtcgggccaaaatgcgtcaagcaggtggtaagcaaggtcacctacacgtcgcgcagctgccggcaagccaagaacgtgagcgccgactgccgccgtgaggcgcatatcgagacgcgtgaaaagcgagtaaaaaaacagcagcaggcgtccgtgcacgtcgacatgcctggcggctggggaacccggtggcagggcaagctggtgatgccgataaaagggcggttgctggccgttgacgtctcggcgtccatgcccattccctacaaccagcgctgtaacaaacaatggggcagtgactgccgaagctcggtcgcggagacattttccatcatggggcgcgcgctgccggtcacggtgacgtcgctgcccagccgcgacgaacagtgcagcggcgggaaaaacagccactgcagaaccacgtacagagacggcagcagcacggtcaaggcgcgatttgacgtcaatatggacgtcgacgcggggcagtcattcccggtcatcaagacgtcgaaaacgtccggcagcggtgcgaacaagggatttggcgtcagcgttacgctgacgtttgaggttgaggaaaccgttgccgatcctgtcgtgacatggacggagtcctgcacggccgacaagtcgcgagacgtcctgctcaacactcaatgtgtggcgcccggcggcaaccgcacggtcacggtggacggacagaactacacgctctatcaggactgctgggcctggaaggaggattatcaggtgtttgaggatgacgaaaacagctgtcagcggtacgagaacgacaagaattgcacggtcggcacgcgcagctgcctgcagaaagtcggcgacttttgcgtacgcgaatctatcagctaccagtgccagcacgccgtcagcggcgaaggctggctgtgcggcgacaaattctattgcgatgacggcagctgtgcgtccatcaaggacgagaagaacaacgacttcaaggcggccgtttctcagctagccgcgctggcggcggccggcaaggacgtggccgggcttgaccccaacaccatccgcttctttaccggcaagcccatgtcgtgccgcaaaaccgccatcgggttcagcaactgctgcaagggcggcggttgggggcacggtgtcgggctggcgcactgcaacgatgaggaaaaggccatcggcaaggccaaggaacgcaagctggttatcgatgtcggggagtattgctcgaaaaaggtattgggtgcctgcctgcagaaaaaacacagctattgcgtctacgacagcctgctggcgcgcatcgtgcaggagcagggccgccagggccagttgggtatcgggtttggcagcggcaaaagcccggactgccgcggcatggtgatggccgagttcgaacggctcaagtttgaccgcattgatttcagcgatttttacgacgagctgcagggcaaggtgaagctgcccgaccaggatgcgctctcagcgcgtatccgtgagcaaatcagtcgcaacatccagaaggggagcccgtga

SEQ ID NO: 450778 - DNA, 210 bp, Serratia marcescens
atgcaccaacacaaaaattacgataccggcctgtccacgatgctgacgagtgcgccacacaacatggctatctccggggcgtgcggcgtcggggaggtcactctgccggatgcgttgatcgtcgatggtgatatgcagcgccgatggattattgagctcggccaggcgctacgcgccgatgacgctgccgctgaaaaccccacgctgtag

SEQ ID NO: 450779 - DNA, 465 bp, Serratia marcescens
atgagtcccaccatgatggccaatgagcagcgtaacaggctgaatcaaatcggacgacttggccagcgatatgcgcgcttcgagaagttcagtcaaaggtcgctcatcgtcgccgcgttggccactttggcctacgtggcctttgttggtctggtggtgagcgagcaggtggcgtctttacgggattttatcgtaatgctgcgttcgcccgattcggaccctttggtcatgcacagtcagtactttttgtgcgcgattgcgctttggacggttctggctctgggggtgcaagcccagatcaggcgaaaaattacggtcttgctggcgcactacgttcccctgataccggagtggcaccaggcgttactggagcttgctcacgaagacagactgatgccccgccaacttttgacatgggtgagggaggaggcctgccttctgcaaagcgattctgaacgtgcgtaa

SEQ ID NO: 450780 - DNA, 567 bp, Serratia marcescens
ttggtctcacctaactttattaatccggaatggcgtcgcgagtatatagttttgcgactaatgctgaatttaaaagcacttgaggcaactggttcaccctgtaacattaaaagcaacgctatacattccttattagataactgtagagatttattatgtggcgtaatatctttttttatattgtcaagattattcgccaataatatcaagtcacatatttttgaagccggtaatttcgaactttctatactaacgttcacattgccacctatgcgtataaatatatctagaattttatcgttattaaaatcagatagaatcgtcactctatcaaaacggctcatttcaaactccctgagttgtaacagcaaggaaagagcaatagtggggatgggcggcaaatttatgaccaaaaaattaaatgtattaatttttattgtctttttaatttgtcgaatggatattatggaaagcaagttggacaatgagatttcatgtgaaatctgccattttttctcgaactctgttcttatccgtaaagcttctattagtccttctcgactataa

SEQ ID NO: 450781 - DNA, 867 bp, Serratia marcescens
atgcaaaatgcaatctgtgcgagctgcagcctacgaggctcaggcccgcctgttacgcattcacgtgtgaagagccttgaaggtctggccacttcgattgcccacgaggtcaaccaaccgctggcggctatcgtgactagcggcaatgcctgtcagcgttggctagcacaggagccaccaaagttggacaaagcctgccaggcacttgaacgcattctcggtgacgctagccgtgccagcagcactattgcacgtgtacgtagccttactaagggggagcctccgcatattaacgcgttcgcattcaacgaggcagcccaagaagtcctgacaatgtcgcaaggcgaaatggcacaaggaggaatagtgctgacggtcgaactagcccccaatttaccttacgcgctggccgactgtgtgcagatccaacaagtcattggtaatctgatccttaacgccatagaggccacagtagtagtaccgacatttcgacgagctatcagagtcaactctactcatcaggatgaaaatatcatcttcacggtatctgattcgggcgtgggtttaccacttggtgtttccgaccagctattcgaagctttctggacaaccaaggaagaaggtatcggtgtagggctgagtatcagccgaaccattatagaggctaatggtggccaaatatgggccaaacagaacgaaggaggcggtgctgtatttgcgttcagtgtgcccactacagacaaggaacatacgttattaaccaagttactgcagcaactgagacactttctggggttctacgccggaaccgccgaaatttccgttaccccagtttcagcccggcaaccagcgcatccaggtcaataa

SEQ ID NO: 450782 - DNA, 546 bp, Serratia marcescens
atgaacaccgatttttcttacagagatttatttcgtgacttaagttcgctaatggcgggcgaaaccagctttgttaccatgatggctaacaccagcgcgctgctgtataaccgtatggagaatataaactggaccggtttttatgtgctggagaaggatatccttgttcttggaccattccaggggaacattgcctgtacccgaattccggtaggctccggcgtttgcgggacggcagttgcagaggaacggatcctgtgcataaataatgtccatagttttaatggtaatattgtctgtgatacagccagtaactcggaaatcgttttacctgtccggattaataataccgtcgttggtgctctggacatagacagccccgcattttcccgtttttcatcagaggacgaactgggattaaataaactggcagtacaattcggtaaaatggctgaattaaccgattatcttaaaattgtctctcctgtatcgaaagatcgcgtaaataaactctatttgcataccagtccatcagtttgtggatga

SEQ ID NO: 450783 - DNA, 921 bp, Serratia marcescens
atgttaaagaaaaccgttataaccagcgcttttgtgtctgccctgttactctcatcctccggtattgcggccgccgccgccggcgataaatccggcgcgcaaatgccggcagccagccggcacgtcatgtcgtcagattcttacggcgaaattattgggcaattcaacagccctgacggggcggtcgtgggggccactttgcctggcaaaagtgtttcattcagcattccggtgaagaaacatcacgaacagtatctgcattttgccttcatgcatgccgcctctgcgtcagaaggctggttctttgccccggcgtcagaacaggggattaatctcacaggtctgatgactgaggacgggaaaccggtagacataacggaacagattgctcttttccgggctcctgctgcagaccagcttgtgaaagttacagcagatagtggaaaactcaggctcggggctgcagcgaagtttatgacggcaaaactgacccgtcataatggtatgtttgtcatcagcattaaaaatatttctgaaggagactacgaaacaccattttcctccggtgtgtggggcgtgacaggaaccgcagtccgaagtttcgaccatgaaccttcttcagccttgtcaaaactggccaccacagggcacagaggcgaattgtataaacttgctcagaaaaaaataccagaacaaaataacgcactttcaatggagctgaccagaggtgccattaaaatggccgaagaacagatggcaggtcataaaaaaataggtagcatcagcggaactgcgctaactcagggagagctggagaagaaatttgccatggctgcggcgcaaatgggggccagatattacgttatcactggcctcagtaataacaaccatgcctttggtaacgctgatatctacgaataa

SEQ ID NO: 450784 - DNA, 492 bp, Serratia marcescens
atgaagaccagacttaaagttatcctgctaatttcacacctggctgttctgggagcgggtaccggcctggggatttatctgctgccggtactgaccgcccaggaaaatgcttcgctgaacgaaatcaacgatgtgcggaagctggcaaaatataagggtgaattcagccgtaatcagaaaggcagcgatgtttttcactgggcggaaggagatctttatgtaacggacagtgaaatcgccttcaaaggtgaagtagcacctgggccggattacaaaatctatctaacgaaaaaacaggcggtagataagagttcttttctggaaatgaaaaaagaggccgtgctgattggagaactcaaaaactttggtaatttcagaaagagtattcctgacagagttaacgtcaatgaattcaccaccgttcagatatggtgtgaacggttctcaaaatttattggctctgcggaataccggcatgaggccggacaataa

SEQ ID NO: 450785 - DNA, 168 bp, Serratia marcescens
atggagggcaacgtcaagctgaccaaacaccctggttttgtattcgcagtaggccagacccaaatcggttttccccggaaaatggtggtggatactggcttttctgataccaatcgctttttccaggtcggcatagctgaaacccagaaatccgcgttgctgaattaa

SEQ ID NO: 450786 - DNA, 261 bp, Serratia marcescens
atgaaacgcattatccataccaccgttgccgcacttgctcttaccctggccggctacgcagccgccgcagatgaaattaaccgtcaggacgctgcgggtctgatgccgtcaggccatatttctgccggtaatctgtcaacgccagacgaagtgaccgctgcgcttaaagccagagcagagcaggccggggcctcttacttccgtatcacttcgcttgacggtaaaaataaattttacggaaccgccgttatctaccgctaa

SEQ ID NO: 450787 - DNA, 420 bp, Serratia marcescens
atggactttcatcgcaagatggagggattagggttaaacttgccagtagtgttcatcaccgggcatggcgacatcgccatgagcgtaaaggccatcaaggctggcgcaattgagtttctgactaaacccttccgtgatcaagaattgctagatgccatccatcaaggaatcgaacagaaccatgctcagcgtcagcaagatgcgatagtagctaaattgcggtcatgctggctattgcttaacgaaggcgagcgcgaggtggtgaaactagtcgttcaaggcttactgaacaagcagatcgcatatcaactcggtcttagcgaagtaactgtgaaggttcgccgcagtaatgccatgcgcaaaatgcgggcgaactcactagcaaatttagtcaggttaacggagaaaattggattgtag

SEQ ID NO: 450788 - DNA, 960 bp, Serratia marcescens
atgacaataagaattaagtttattattacagttactctatttactgcagcgttgcctacattagctaaaacatccgaaaactttatctataccagctctggtgagctagaggcagcatcagttatgatgtcgcgtagcgatattggcggtgcgcagatcgtttataattggcgatcactcgaaccaaagaaggataaatatgacttttcgcagattgagaaggatctagctcgtctcaagatagccaataaaaaactatttattcaaattcaagaccgtttttttgaacacgatgccagacacgttccagattatctgatgaatgacactaggtatggcggtgggatatcgcaacaatttgataatcctggcgaagggaaacctattggggcgggttgggtagcacgtcaatgggacccagctgtgcgccaacgttatcaggctttgctggccgcaattgcaaagcgtttcgatggtcaagtttatggtgtgaacttacccgaaactgctattgatcttgataagaaaaagctacccaaaggattctcgtgcgataactacttcgctggagagatggaaaacctcgcctttgcgcgaaaggtgttctcaaaaacaattgtagtacaatatgtcaatttctggccgtgcgaatggaacaacgaccacaattatatgggacggatatttgagtttgccagtgccaataacataggacttggtggaccagatatcattccaaaccgaaaggcccaaatgaagaactcatacccgttcttcaataaatacaaaagcaaactgaaacttatttccatggccgtacaggaaccaaccttaacctatacgaaccctaatacgggcaagccatttagtaaggatgagtttgtaaaatttgcagaagattatctcggtgctgatatcattttctggagcacgacatctccatggttaaataataaatag

SEQ ID NO: 450789 - DNA, 771 bp, Serratia marcescens
atgcgtatacgttgcaccaggttggagggcaagcaggtgttggtaacagatcttctttggtaccaaggcaacgatgcacaacccacttttacggtggaaactgggcatcgcgtacttcgtatggagcaggtgtttgaacgaatccagtcgcaaggtttgcctgccggcagctcgcagtcggtttcgctggtgttgctacaccaattacttggccagactgcattagtgctcgatcgtatagaccaggggttctcagtatccatgaagactattcgtggatttcagctcaacgcaggtaccgatcgagtatgcggtgcggaggacttagcagaaatcgataatcatttgtcgatgctcaataagccgcttctcttcgtgctgcaatctctgcacgatcttgagcaggcatcactgcggctgcgtcgcatggcaaagagctcatccacgttgacagtggaacatgttgatgaattggttgctgagatcgaaggagtgcagcgccgagcgcgattggtgctagagtgtcagctcttccagaggagcgccgccggcgaaactgtagctatgagtgacctaaacgttaacaaagtgtttaatgttttgtgggcggcctttattccaggcacagccttgataaactggtatgggcagaacttccgcttcatgccggagctgtcttgggacggctcgctctggacgcagttgctcgccgtattagtgctgaccgctgtgccggttctgatggttaagcattccggtgcattacgctaa

SEQ ID NO: 450790 - DNA, 303 bp, Serratia marcescens
atgctgctgtcggacatccatagtctgcgccgctacgctcgtttccagcacgataagattcgcaacttgcagcagtcgctgatgactacgttggatctcaagcagaaccaggtcatcaaggtgttcacggtagtcaccgctgtatttacaccaccaaccttaatcgctgcgttctacgggcagaatttcgcctacatgcctgagttggagatcccttcgggcgaatggatcgtaatggggctaaccggctttttcgcaatggcgccgctagcgtatattaaacgaaaagggtggatgcgatga

SEQ ID NO: 450791 - DNA, 651 bp, Serratia marcescens
atgcgttgggaaaaagagtttttcaaagtgggtaataatttttcaatcacaggagcacaaaaggagaaaaaaatacaagatatgatcttgaagcatgggagagaattctcagttgaaaagaattatgaattcttcctgtgcgaaactgacaggcagaatattttttacgtcaataacggatgtatttgcctgggtgataatgaaaaaaaatccattatcaaactattccctagcccattaatcattgggattagggaacataaatttcaatcaagattatcatataaatcattatctgcttgcactggatactttattaacaaggatttgtttctaaaaaaaataaagacagaaaacctgtgcttaactttagcagaatacattggagaatactgtgatgaaataataaattcatatgcattgattcatgggaagaactcttacgtaatgataaaacaatgtataagagagttatacacactcccaaaaaatgttcgcgaggaagttaatttaaccagctacatcataaaaaggactagtctttctcgtagcggagtaatgaggattgttagcgacttatgcactggcgaatacatagaaataaagaatgggaagctggaaaaaataagacacttaccacacgattattga

SEQ ID NO: 450792 - DNA, 519 bp, Serratia marcescens
atggaaatcattaataaaaaaacagtcatgacgcaatatactttgggtgatatccttgaaatagatattgcgtttgataagctaagagaatcgataagatgcacctacttaacatatctttatgagaatgataacataaaggattatttctgttcgaactgtgattggcaaaagcaacttattgacaaccatttaattaacgtttgcccaatttataagtatgccttcgagcgcacacatgacttaagagaagataatggtcatattataactgtttgggattacgtaccacataaaaaaggagaagaacaagacctatcagatttcaggtcgtcctataatattgcgcatggaatcggaattgccatttgcaaaggtaaatatcgtgaatcaatagtctttggaggccatgttgatgataaaaggttctatgagaaaacacttaaaacagaatttttgtcacgccacctaaaattatttagagaggctatatctcaacccaaaacaaaggaaatgtaa

SEQ ID NO: 450793 - DNA, 723 bp, Serratia marcescens
atgaagagaaatgtgttaataactggagctaatcgaggaattggtttaggtatagcaaatgagtttttaaaatctagagaactttataatattatatcaacaacgagaaaaaaaggagagctagccaatttaaagagagatggatttaccccagtattcttggatgtttctagtcagacttcaatagatgaggcagaggcccaactaaaggaactcaaccttttacctgacattattatcaacaatgctggtatagccaacacaaaattgtttatgcaaatttccgaaaaagatgttgaggaaattttcaatgttaatttttacggtacatttagagtaatcaggaaatttataaagaacatgtctaaaaataagtttggacggataataaatatatcgagtgtattagctggaatgccacaaaagggcttttctcattattgcgcatctaaagcggcaattgaatcgatgacgagagttatatcgttagagtacgcaagtaaaggtatcacagccaactgcattgcacctggatttgttgaaactgaaatattagactgcttaggagaagaaggggcaaacatgattgaaaataaaatacctgtaaaatcaatttctactccagcagacataggtgccatttcggtatttcttgcatcagaagcagcaagacatataacaggagaaacaatcaacattaacggaggtttgtactttagataa

SEQ ID NO: 450794 - DNA, 261 bp, Serratia marcescens
atggaaatgttcaaactcggtatgcgagtagaggagaataaaaagaataaagatgaggggcagaaatctttagatgagaaacttcatatgttatcaaaaaatgtgctcatatcttcattttttacagaagctctctactttgtcatgaaagaagttgttgatagagagaaggtcgtcaaaacggaacaatttttaagtgatgatttcatcactatggtaaatgaaagggtggctggtaaacttgcagagttttttaaatag

SEQ ID NO: 450795 - DNA, 2700 bp, Serratia marcescens
atgactcagattaatgaaagaacgcgtcgccgtgataaagacgcggtgacctacgccattgcgcaagaggccaccaacagcatcgctcaaacgctggcgaacctgaagtgcaaccgcaacggcttgacccaggacgacgccgatgagcggctggagcagttcggcgccaaccaggtcgcccatgacaaggcgccgcatgccctgatccagctgatcaaggccttcaacaacccgtttatcttcgtgctgatggtgctggctgcgatcagtttctttaccgattattggctgccgctccagagcggtgaagaaactgaactcaccggcgtcattatcatcctgaccatggtcacgctgagcgggctgctgcgtttctggcaggaataccgcaccaacaaagcggcggaagcgctgaaatcgatggtgcgcactaccgccacggtgctgcgccgcagcagctacagcgcgcatccgctgacgctggaagtgccgatccgcgaactggtgccgggggatatcatccagctctccgccggtgacatggtgccggccgacgtgcgtcttatcgcctcgcgcgatctgttcatcagccaggcgattttgaccggcgaggcgatccctatcgagaaatacgatgcgatgggcaacgtggcgcagaagtcgagcgaaggggaagtgtccagcgagaacgcgctgcttgagctctccaacatctgtctgatgggcaccaacgtcgccagcggtaccgctacggcggtggtggtggcgaccggcgggcgcacctacttcggctcgttggccaagtcgatcgtcgggacacgggcgcagactgcgttcgatcgcggggtgaacagcgtcagctggctgttgattcgcttcatgctggtgatggtgccggtggtgttgctgatcaacggcttcaccaaaggcgactggagcgaagcggcgctgttcgcgctggcggtggcggtcggcctgacgccggaaatgctgccgatgatcgtcagctccaacctggcgaaaggggcgatcgccatgtcgcgtcgcaaggtggtggtgaagcgtctgaacgccattcagaactttggcgccatggacgtgctttgcaccgacaagaccggcacgctgacccaggaccgcatcattctcgagcaccacatcgacgtcactggcgccagggataacgaggtgttgcacctggcctggctgaacagcttccatcagagcggcatgaagaacctgatggatcaggcggtgatccgctttggccgcggcaaaccggggattgaagccctggggcgtttcagcaaggtggatgagctgccgttcgatttcgtacgccgccgtttgtcgatcgtggtggcggatgagaatggccgccagcagctgatctgtaagggcgcggtggaggagatgctggagatcgccacccacgtgcgtgaaggcgatcagacgctggtgctggacgacgcgcgccgtgcggcgttgcaggcgctggcccgagaatataacgaagacggtttccgcgtgctggtgctggcgacgcgcgagctggatgcgcagcgcccggccgaaccgctgagcgtggccgacgaacgcgatatggtggtgcaagggctgctgaccttcctcgatccgccgaaggagagcgctcagcaggcgatcgccgcgctgcaggaaaatggcgtgacggtgaaggtgctgaccggcgacaacccggtgatcacctgcaagatttgccgcgacgtcgggctggagccgggcgagccgctctccgggctgcggattgaacagatggatgacgaagaactggcgcgcgaagtggaacagcgtacggtcttcaccaagctgacgccgctgcaaaaatcgcgggtgctgaaaatgctgcaggccaacggccataccgtcggtttcctcggcgacggcatcaacgatgcgccggcgctgcgcgacgccgacgtcggcatctcggtcgacaccggtaccgatatcgccaaggagtcggcggacatcatcctgttggaaaagaacctgatggtgctggaagagggggtaatcaaagggcgcgagaccttcggcaatatcatcaagtacttgaacatgaccgccagctccaacttcggcaacgtgttctcggtgctggtggccagcgccttcatcccgttcctgccgatgctggcgatccacctgttgattcagaacctgatgtacgacatttctcagctgtcgctgccgtgggacaagatggacaaagagttcctgcgcaagccgcgcaagtgggactccaaaaacatcgggcgctttatgctgtggattgggccgacctcgtcaatcttcgatatcacgacgtatgcgctgatgtggtacgtgttcgccgccaacagcgtggaacaccaggcgctgttccagtccggctggttcattgaggggctgctgtcgcaaacgctggtggtgcatatgttgcgcacccagaagatcccgttcattcagagcacggcggcgctgccggtcttgctgactaccgggttggtgatggcgctcggcatctacattccgttctcgccgctcggcgccctggttggcttgcagccgctgccgtgggaatacttcccgtggttggccgctacgctggtcagctactgcgtggtcgcacagttgatgaagcgtttctatatccgccgcttcggcgagtggctctaa

SEQ ID NO: 450796 - DNA, 699 bp, Serratia marcescens
atggctatgactcctttcgttttgaatttattgctggcgatgtgcctgggcgcggtcattggcgccgaacgccagtggcgccaacgcatggccggcctgcgcaccaatgcgctggtggcgaccggcgcggcggtctttattctcagctccatgtccaccgatccggccagcgccggccgcgtggcggcgcagatcgtctccggtatcggcttcctcggcgccggcgtgatcatgcgtgaagggcttaatattcgcggcctcaataccgccgccacgctgtggtgttcggcggggatcggcgtactgtgcggcctgggccagcattgggatgcggtggtcgctacgctggtgatcctgtgcgccaatatcctgctgcgcgaagccgcgcagcgcatcaatctgcagccgcatcagcaggcgaccgatctggaactgtgctatcgcattcaggtgacctgcggcgagcaggacgaaattctggtgcgcaccctgatcctgcaggcgctgaacggcgtcgccttgcggctgcaatccttgcgcagcgccgatatttcgagcccggggcaattggaagtgtgcgcggaaattaccgctacgccggccgcgcaaaaagaaatcgaaggcattgtctgccgcgtcagtctggaaaaaagcgtgagcgccgttcgctggcgcgtcgtgtccgaattaccggtctga

SEQ ID NO: 450797 - DNA, 459 bp, Serratia marcescens
atgaaaattgaacgcgaacgtccctatctggcgatttactgcatcgtccgcgatggcagtcatgtgcttatgctcaggcgggcaaacaccggctatgctgatggcaaatggtcattccctgcagggcacgttgatgaaggtgagtctctgaccgcagcggccagtcgcgagttaaaagaggaaacgggcctgaacgtcccggaaacggactgggtatttcactccatgatgcatcgcaaaaccgcagatcgccgggtcatcgacgtgtttatggaagctgtcagctggcagggacaccccgtcaataccgaaccacataaatgcagcgcactaaaattcatctctccggcggatcgtgacatcgacctgattgattatatcactccggtatttcttcctctggcaggtgatacaacagagtcttatcttgaatggggctggagcaaccagaatgattaa

SEQ ID NO: 450798 - DNA, 597 bp, Serratia marcescens
gtgggagggacaaggataatatatgaagggagcaaaaaagaggcctctataagtattagcaatccagataagtcatcgtatctgattcaatcatggatagagttggctgaaaataataaaaacactttcattgtaacacctccgctttttaggctggatgccgagcagcagaatatacttagggtggttcgcgcaggtggtaatcttcctgaagatcgtgaatctcttttctggatgaatataaaatcaatcccttcaaataagaaggagagcaacgcaaatcaattacagatagcggtgaatacgcgcataaaattaatatatcgccctaatggtattagtaaggaaaattcagttactcaagctgataaagtaagtttttcaatagctcctggtattcttaaaataacgaatccaactccgtattatatgaatatcagcaaggttctagttggcgggagggcggttgaaaatataacttacataccacctatggcaagtaaggaattcccgatacctaaaggtgttaatggtgctgttacatggtcattaataaatgattttgggggggtaggagagcttcacaaggcaatgtga

SEQ ID NO: 450799 - DNA, 531 bp, Serratia marcescens
atgatgaaatcaaaaattatcgcattaagtgtcatcctaagtgcgtgttccatttctccattggctttagcagcagatggtacagtgaactttaccggggagattattgatgctgcttgcactgttactaacgatccaactaatcccctaaccgttaatttaggtaaagtggctcgtacagcatttccttcagctggagcaacggctgcaccgacaaagtttacaatcaaattgacgaattgccccgcgactgttagttcggctcaaataacattcgatggcaaagctgataatgggaacaatgaagtgctggctttgacagcggagactggagtcgcaacaggggtaggtgtgcaattgacagatgatgatagtactgttgtaccactttatactgcttctaaagcgtatccactagttgctaaccaagaaaatgatttgaactttatcgcaagatacatttcaacggcagattctgtaactgctggccctgctaattcaactactgattttactattacttataactga

SEQ ID NO: 450800 - DNA, 2784 bp, Serratia marcescens
atgaaatttcaaagaagtaaacccttatatttcaaagaacatcatctgtctactctcgtagcatcaatcagtttgacaactttcattgctattcctgcagcggcagccaccatcaccacatctggagcagttatactctctaatccggtgactacaccaatgtggaatgccggcgctgatacctacataggttcagggggaacagggacactcaccacctcgcaagggacaattattaccggcacgaacttttatattggccaaaacagcggggatacggggacgctaaatttgttcgatagcggtactatcctgacatccgacggacttacagccattggtgagagtggaaatggtacgctgaatatttttaatgccgttttgaccaataactggaataaacccacctcccctggctcagtcagctactccgttaatattggtaatttggctggttcacagggcattgtcaacattgccggtacaggagctgcactcaatgttacaggcacaggtgcatacagcggcataggggtcggtatttatggttctggtatgctgaagattaaccaaggaggagtcgtgagctctcccagggttcgcgtaggttttgcttctgccgctgaaggtacagtagtggttggcggggccggttctaagctttctataaccaatcctaatcagtggatgattgttggagtgaacggcaccggcaacctgatagtcagtaatcaggggcagttggataacgcaggctatttccgcatagcagaaggcaataatggtggcacctcaggtaccggtaatgtccaggtgctgagtggtggcacggtaaatgttaaccaatttactgacatcgcttattttcaaaatactaacgggcagttacgcgtcagtgatgttggctccacctttacatcaaacggcaggatcatcgtcggacgccaaggtaatggtactctgacaacctccaattatggcaccatccgtagtggccagggaattattgttggctccaacattcttggaaccggtaatatcaatataggtgaaggagaaatagcaggtgtgcttgatgtgccgactgtaacaggcggaccgggtagcaccaatattaacttcaaccacattgacgatattgatttttcaccccagatgttgggtacgcttaacctgaccaaaaacgggtcaggtaccactacgctgatggccaacaacacctatagtggacggacaactgtcagccagggcaatctgcaggcaggtgctgaagatgtcttcagcccgaactcttcccacctcgtggagagcggaggacaattagatctgaacggtttcaaccagaaaatagcttcactgacaaacggcggcatagttaagatcgccggctcctcggcgggcactattcttaatgtaaccggagattatgtaggcaacaatggcctactaatctttaacacagtgttaggggaagataattccgtaaccgatagattgataattggtggaaataccgccggaaacacacaagttacagtgaataatcttggtggtagcggggcaaaaaccctgaacggtatcgaattgatctctgttgggggtgactcggacggtaacttcattcagaccggtcgcctggccgcaggagcttttgactacaaactgcagcgaggggttggcgacaataataaaaactggtacttgattagcgatatttcgtcccttgatccaggtaatccaggtaatccaggtaatccaggtaatccaggtaatccaggtaatccagagaatccagagaatcctccggtgatacaggttgtgaggccagaagttggcgcttacagtgccaactttgtaggtgcacgtaatatgtttactaccgacatcagcgatcgtctaggggaaaccgaatatactgatacaatgaccggtgaaaggaaactgaccagtctgtggatcaaaaacaccggtggccatacccgcagccatgataacagcggccaactgcacacccaatccaaccgatatgctctgatgcttggcggcgatatagccgatggttacaccagtgatggtggagcgtggcgactgggtgcactgggcggttatggctaccatcacagtaaaacgcgttcaaatgtcacaaactaccatgccaaaggagaagttgagggttacacggctggtctttacggggtctggtatgcaagtggtactgatgagaaaggctattatgccgacgcagtaatcaattacaactggtttaataacacggttgatggccaggatattgcaagcgagaaataccgaagccgtggcttgagtgcctctttcgaaaatggctatgtattccagacaagttcttcgcctcgcctgaacagttatattcaacctaaactgaaagtatcgtggtctggtattgatatggatgatcacagggaacacaatggtactcgtgtctctgcggtcggagaaaataacgtaaaaaccagtctgggagtccgtgcttttcttaaaggccacaataaaattgatgacggtaagcagcgaaatttcaaaccctttattgaagcgaactggatccataacaccgaagattacggaacgtctatgaatggtgtccagggaaatcaggtcggaacacgtaatctaggtgagctgaaactgggagttgaaggccgaatcactgagcagtttaatctcaccggctattttgcccagcagattggcaataaaggctattcagatagcggggcgatgattggtgcaaaatactctttctaa

SEQ ID NO: 450801 - DNA, 567 bp, Serratia marcescens
atgcagcaaccaaatctcgagatgtcacgtatcatacttagacctcttaatataaatgatgtctcaaggatacatacactgataaacagacctgaaattgcagaaatgacatcacaaattccacatccttatcctctaggcctagctctgtcctggttatcatcccaacaggataactggaataggcaaactggagttgtattcggaatagaactgaaagatgaaagtgtacttataggtgtggtatcgctgcaaaaattaaatgaagattttcctgttttaggatactggcttggtactgatttctgggggagggggtatactacagaagcggctatgtgtatatgtgggtttgcattcaacattctgaatgttaaaggtatttttgctggctgccttaaaaaaaacgcatcttctgccaatgttctgagaaaattaggtttcaaatacactggtgaaaatgaagtgtttattaagaaaaatcataagactgcgagggttttgaattattttttaagctcagattgttttaactttcataagttatatttttctggtcggaaatag

SEQ ID NO: 450802 - DNA, 537 bp, Serratia marcescens
atgattggaaagaattactctagctatttacattcaatagggattttagtacttgttgtttttattttttcgccgcatgtaaaagctgatgatgctacaaccgttaatatcaccggcagagtaacagcatctgcttgcactgttgatgcttcctccattaatcaaacagtgccttttggaaaggttgctataacgagttttccttctattggtagtagtggtgcttggaaagatttttctttaaatctttcttcttgcccactctcgacaacaaaagtcataggcactttttctggtaacgcagatagcaatgatgttaacaaatatgcaaatactggtacaagcaaaggaatagcgttacaaatgagctctcgtgatcatcaaactgatttagggccaaatagtagtctaactattaacgtaaatagcactgatcaaactgcaatattcccgttatcagcgcgtttaataagaactggtgatgctggtagtggttctttccagagtcaagcacttgtcactttcagttatgaataa

SEQ ID NO: 450803 - DNA, 1014 bp, Serratia marcescens
atgagtgatttaaaaaaagttttttttcctcttgttatgttaggtggtgtttccgtaagttttagctcctacgctgattgttctttcagttccggttattcagctgatactcgggaatcaattaattttggtgatatcatagtctctccttctgctgctgtaggctctgttattgcaacctctacttctaacgagatcaataggcgagatatttttataaattgcaattcgactggacaggaatttaggcaacaggattggcgtgatccgggattacctgctgttagctatggtagtgaagtactttatcaatctggcgtagaaggttatgccatccgtattgttacaccaggtgcaggttccaccgctggtaaatttggtaatggtgcttttcctcgccgactgacagataattattgttttacaagtggtaatacttggagttattgtggtggttcatggggagctgtaactttcgagttggtaaaaatatcaaacgtaacgggtacaggaatgatgaccgcaggtcaactagttagagctagtattcccggttttcaatttatatatactgctagcttaataagctcgaagattactaatcccacttgtagtgtgagtaatgctaatataacagtcccaatgggagatgttccatcaaacaaattcacaggtataaatagtacaactgcggaaaaagaatttaacgtggcattgtcatgcaatccaaatacaagtatatcggttacgttaaatggagtgcaaaatcctgatacagctaacaacactgtattagcattagataataatggagggacaggatctgctgatggcgttggtgttcagttgatgtataataataccccggttgcattaagttctactacaatgcttaaaactagttctggcggcatggataacattacatttattgcgcgttatttccagactaaacctgcagtaactccgggtcaagctaatgccactgcattattaaatttcacatatcaatga

SEQ ID NO: 450804 - DNA, 348 bp, Serratia marcescens
atgatgtcgctgccggcgggcagtcgcatctggatcgtggccggcatcaccgacatgcgtaatggctttaacggcctggcctcgcgggttcaaaatacgctgcgtgacaacccgttctcggggcaggtctttatcttccgggggcgtcgtggcgatatgattaaagtgatatgggccgacgccgatggcctgtgcctgttcaccaaacgcctggagcgcggtcgcttcgtctggccggtggcgagaaacggtaaaatccatctgacaccggcccagctggcgatgctgctggaaggcatcaactggaaacatccgcaacggatggaacggcctggcctgcgaatataa

SEQ ID NO: 450805 - DNA, 633 bp, Serratia marcescens
atgagtgaacgggcatggttggttgaggtctttcgcctccactatcaggaacagctttctcagaaccgcatcgccaaacagttggggctatccagatcaacggtcaacagctgtttccagcgcgctggcaaggccggtgttcggtggcccgtcaacgaactgacgctggaacgcaccctttatcccggtaaaaaacggtcacggtcctctgcctcaccgccgctacaaacaccggtaacaaccgtgccatcaaaacccaaaagaagggggcgcagacccaacttcccgttggcgttcaagctggcgctggttgaacaatcgatgcagccaggcgtcagtaccgccaggctggcgcgcgagcatggcatcaacgacaacctgttgttcaactggcgcaacctctacaaacaggggcgcctcggcgcgatcatccctgctgagctctgcctgctgccggttgagctggacgatgtgccgtcaccaccgccaataactgaagcagataaagcaccgccctccgacgtcgcggagtgtgaactggtgttgcctggtggcaggttacggctccggggcgcactcagtcctgcgttgctgagcatgttgatccacgagttgagaggaacgtgtcgatga

SEQ ID NO: 450806 - DNA, 1596 bp, Serratia marcescens
gtggaatccatagcaattcacaacctgcgttcattaaaagacacaggagacatttcgttaaaaccaataaatatactggttggaacaaatagctcaggaaaaagtactttcttaagagtttttcctttgttaaggcaaagtgtggaaagaaaaaccatgggtcctatcttatggaatggtgaatatacagactttggttcatttgaaacatcactgtgcaactataatactattgcgacaaaagatggaacctcagaggcaaaccatatttcttttgactttgaattcagcattccaagagaaacttacaccccttacagaagaagacatgaagatcaggaaaaaataaaaataaaagcatcgataaagatcaagaaaggaaactttaccgaatcatcatatactaacgaatacaaaataataataaatgataacaaagtcgtttttgaattagatgaaatgggtgtcattggaagaatatcttcccctacaatttattgggaacttagaaaacaagaaataaaatatcagcgcactataaaagatacactattacctgtattcataaacactaatttagataacccgtatacctttttcaatgagaaagggcaaatggctgatgcactacttaaacaaataaagagaaagttgacagaatatagcggtagctctagtgaaagcaaaacacatgatatggcgaagtatttaacaagaaaacttgaaagtcccgaggaaagactcaatagaattaaagccataagcagcacaatgaagttcagacaaaaaacacaatcatggagcacatcaaactccgaatttttatttctttcggcacttattgattggtactttattgtaacaaattcatttgtcataaacaatgaaatcacgaaaatattaaaaaacgtccattatatagcgccccttagggcatcgacagagcgctattatcgctatcaagatcttggggtggaggaaatagatcataagggtagtaatttagctatgttcatacgaaacatttatcatgtagatagagattcactcgataaatggacaaaagacaactttgatttcagaatagaaaactctgatgatagcgacagtcatttatcaataagaatatcaagaggtgatggcaggtcttataacatttctgatatgggattcggatactcgcaaatattaccaatcatagttcaactttgggctatatctagcggatatgaactgaagatgaaaaacaatggggtgaatcataacgagtttacaagcgtaattgtagcaatagaacaacctgaactgcatttacatccaaaaatgcaagctgacatcgctgtggtttttgctaaagcaagaaagttagctgaagaaaacagaataagtctaaaattaattattgagacgcatagtcaaacacttatatcaaaattaggtgatatgatatgcttaggtgatgatatttccagcaatgatgttaacataatattatttgagcaagacaatgagaaaccgttaactaaaataagctactcgtcatttaatgaagatggcgtcctcaactcttggccctatggtttctttaattactaa

SEQ ID NO: 450807 - DNA, 165 bp, Serratia marcescens
atgctgcagcgttacgtcagccatattccggagcggcattttaaaatggtgcggtattacggttttctggccaaccgcaagcggggcacgctgctaccgaaggtttacgacgcgctggagatgacggtacgagaaaaccgaagcggcccagattcgcgatgctga

SEQ ID NO: 450808 - DNA, 1077 bp, Serratia marcescens
atggctgataaaaagtttctcacgctgatcactgccgccggcgcagagcgcctggcgaatgcagcggtgacgggaacgccggtcgccatcgcggaaatggccgtcggcgatgccggcggtcaactgccctcgccgaacgccgcccatgctgggctgattaacgagcagtatcggggcatgctgaataaactggtgatcgccgacagtgacgccagtgtcatcgaagctgaaatgatcatgccgccgcagatcggcggattctggctgcgtgagctggcgctttacgccgatgatggagaatgcatcgccgtcggcaacatgccggaaacctacaagccattgctggcagaaggttcggggcgtttccagatcatcaggatgcagctgaaagtcagcagtacggccgacgtggagctgattgccgatccatcggtgattttagccaccgccgagggcgtcaaggacgcggaagatgcggccaaggactacacggacgaagcgatcggcgagctgggcgaaagtgtaaacaaggcgatcgccgccgcagtaaaagctgcaatccgtgacgcctgggagcaggacaaccccctgggaacttcgcgcttgttcaaccagaatgtagaccccaacgagctatggccgtggtcaacatgggagtatgccggagaacacctgacgatcaggacagccaaagctgacggctccgacgtaggcaccaaaggtggcagcgacacgatgagcatcacgcgcgccaacctgccggcagaagaaatcagcgtgtcgggagaagcacaagataccgaccttgggactaaacgcaccacccttagcggtaatcacgttcaccacggcgtcccgaaacgtaacagcgattacgagttagggggcgacaaccgggtaaacttcgacccttacgaggaaggcgataccgatgaggctggtgaacactatcatgaggttgagttgggcccacacgggcaccctgttgaagggaagaccgaagcgctcggccagggccaggcgatcagcgtcgtcgagcgccacaagctacaaatgctgtggcatcgcgtagcctga

SEQ ID NO: 450809 - DNA, 1311 bp, Serratia marcescens
atgatagaaaacataactccctctcactctcttctcgcctggctcaagcaggaagtcaggccagccttgggttgtacggaacctatcgccatcgcctttgccgccgccaccgctgcccaacatgccgaaggaaatattgttgaaatattcgggaaaatatccaaaaacctctataaaaatgctgacggcgtccgcctgccaaatatatcaggccacggcgtgcagcttgcggcggccattggcgcagtaggcggcgatgcgtcactggcgttggagttattacgcgacgtcaatcctgaacatattactcgcgccaaaaaattaatcgatgaaaacaaagtatgcattcaaacacgggacagcgactcgcttatttacgtcgagattaccgtcgttactgatataaagcgttgccgggtagttatcgaagataaccatacccagattactcatttatctgtcaacggcgtgacagggaatctggcgccgcaaactcgtgttggccatcgtcactcaaccacgccgccgcgattttcaattcgggaggcggtggattttattcagcacgtcgcctacgacgatatcgccttcatgctagaagccgtccaactcaatagcgcgttgtccgcagaggggcagaacatgccgtatgggttgaatgtcaatggcgccctgcgcctggccggggccgagatctttcgtcaaaccacccttaaggatcgcatcgtcatcgatacggtcgccgcttccgacgccagaatgggcggcgccgccatgccggccatgaccaatttcggctccggcaatcaaggcatcgccgccacgataccggtcgtgacgctggccaaacacctgcagcggagcgaagaagaactggtgcgcgccgtcaccctatcccatctggtcgcgatttccattcattctcgttacgcgcgcctgtcggccctgtgcgcagcatccactgccgcaatgggcgccgccgccggcatggcctggctgctgagcaaagattacgccatcatcagcggcgccattaaaaacatgattggcgacatcagcggcattatctgcgacggggcatctgccacctgcgccatgaaggtttccagcacgaccgaaagcgccgtcaaatcagtgctgatggccaaacagcattgggtggcgaatcagcatgacggcatcgtgcatgaagatgtcgaagctacgatcgacgccctgtgccggctggccgcatcagccatgcaatacaccgacagacaaattattcaaatcatgtcggataaaacattccaaaaaacgcactctctataa

SEQ ID NO: 450810 - DNA, 1161 bp, Serratia marcescens
atgaaacccgtaccctctattgcgacattggccgtacatgcaggcaatcaaaccgacccagggcataacgccatatttcctcccatcgtcaccgccagttcgtttattcaacccaacctcggtgaaggcggcgatttctgttactccagagtggcaaacccaacgcgaaacgcctatgaaagcgcgttggccgagcttgaggacggtatctattgcacggcgaccgcctccgggatggcggcgacgtcgctgatcctcgaattactgccccgcgattcacacgtcatcgcgatgtgcggcgtttacggcggcacctggcggctctttgaaaagctgcggaaaatgacgtcgggaatgacattcacctatgtcgatctcaacgatccgcaggcggtcagcgccgccattcaggcgaatacgcgtctgatctggatcgaaacgccgaccaatccgctgctggaactggtcgacattcaggaggtctgtcggatcgccaaagcgcggcacatcaccacctgcgtggacaacaccttcgccagcgcctggaatcaacgcccactgacactgggagccgatatcgtgatgctttccaccagcaaatatattggcgggcactccgatctgatcggcggcgcggtgattactaaccggcaacatctggccgaacagctggatttcatcaaaacgaccgtcggcgccatcgcctcgccgttcgatgcttacctggcgctgcgtggcctgaaaaccctggatgtgcgcatgcagcggcaatgccaaaatgcgcaaaccatcgccgaattcctcgaaaaccatcccgccattgtcggcgtctgctacccggggcttaaatcacatcctcaatacgccctgtgtcaaaagcaaatgcgttcgggggccgccgtggtcaccgtccgtttgaaaggcgacattcagagtgtgaaagcctttctgccgcgcctgaagtatttcgtgttggccgaatcccttggcggcgtcgaaagcatggttaaccattccgcctcaatgtcgcatgccgccatgagccgcgaagaacgggaatccatcggcatctatgacaccacgcttcgcctgtcgatcggcatcgaagacgccggcgatctgatcggcgatctcgaccatgctctctcctgcatttcttga

SEQ ID NO: 450811 - DNA, 1416 bp, Serratia marcescens
atgcacgattacgggatatggaccgtcatcacgcctttggtgactatttttctggcgatttttacccggcaagtgatcctgtcgctgctggccggtatttttgtcggcttcgtcgttatcaatcacagcctgctcggcgggattggcgccacgctgaacggcatcattgataccttcgcctctgcgggcaatgcccgaaccgtcgttttcatggtgatgatcggcggcattatgcggctcattgtggttaccggcggggtcagaaggctggtgcagtttttaaccgagaagaacgactacgtcaccaataaacgctccgtgcagttattggcgatgatcgtcaccgcactgatctttattgaaagctccatcaatcagctgattgccggcgcctccaccaaagacctggccaaacgctaccgggtgtctcccgagaagatgtcttacattatccagacatcctgcgtttcggtctgctcctcggtcatgatcaacggttggggcgccgcaatgatgggggttattggcgtgcagatcgctaagggatatatcgacggggaaccttttgaaattttagcgggcgccatggtgtggaatatcatggcatggttctcgcttgcctcggtgctgttttatatcctttccggtttttcatgggggccgatgaaaaaggcggagctccgctttgaggccaatgccgacgcgctcgacgatgacgacagcgggccggaggatgacgtgatcgatcacccggcatgcaattcgttgcttaattttttcatccctatcctctccaccgtactgatggtgcccatcgcactctatattaccggtgacggccagttctcccggggcagcggctccatgtccgtttattccggcgtgatgttcggcactgcggtttcattcatctggtttaccctgcgtggcgttctgaatatcgaaaactttttcaaagagttatatatcggttacgccagcatggtgaaaataagctccatcatgatcctggcttttctgatggggcacatttccgcagagctcaacaccgggcaatatattgccgccgtcacttccggcgtgatcccctccggctactcgatcggcttcatcttcctgatcagcgccgtgatgtcgctggccaccggcacctcgtggggcaccttcgcgatcatgatccctatcggcgtgcagttgggcgtctccctggggatcccggtggaatatatgatcggcgcagccattgccggctctatcttcggcgacatgacctccccgatatccagcgatgccatcgtggcctccatggcgaccaactgtgagcatattgagcatatcaggacgcagttcccctacgcgttagtaaccggcgggctggcgctgctggtttacctggcgctcggcttctcgctttaa

SEQ ID NO: 450812 - DNA, 348 bp, Serratia marcescens
atggaaaaagatcggttgtttttactcaatatgggatttcacgatggccagtatccgggagagcagttcttctgccccgactgcacgctgctggaagggctgctggcgaaaaatccggaattggcaaacgccatcgaagtgacctacgtccgctttgagaaacccagacaggccgttatcgagctggccggcgagcaacatcaatcgctgccgctattggttttgcctcgaggagaacgctcgggatttccggcgccggaatatcacggtagagagtgcctatctacgctgaacgacattctcgccacattatcggcgcggcacgctttccctaaaaagcacccttaa

SEQ ID NO: 450813 - DNA, 585 bp, Serratia marcescens
atgtcaaaaagagcggcccgttccgctgacacccaggaaaaattacgccgggcggcaattaacgtttttgccagtaagggtttctatgaaacgaaagtcagtgacattgtggctgaagcgcaggtgagccagcctgcgttttatctgtactatgcaagtaaagaggccgctttcgacagtctggttgatgagtttcgcactgccttgcgggaagcaacgcgtctgtgcctcatttctccggggttaacccctgacgaactgtataaagacctctgccttagctttacacgctttctgaccgtactgacacaggatcaggctttgacgcagataggttttttccagccccgaagcggagacgccactaaattagaaatgaccggatggataaccgaaaacatggagcgtgagcgtagtgccggtattttacgcaccgatatacctgttcaatatcaggcggggctggtgattggattactcgatcaaatgacccggatggctgaggaagaagacaatactgaggatctagcgaaaatctgcgccagaatattttgtgatgcgctggccgttgttaaggttaaatga

SEQ ID NO: 450814 - DNA, 300 bp, Serratia marcescens
atgtccgttcctgtcgttgcgatctttattgcaaaacccggtactgaagagcttgtcgaacaacttttccgctcggttattaacaccacgcttggagaggatggctgcataagctatcagctcaatcgtgatacagagaatccacgccgtttcgtctggacggaagagtggaaaagtaaggcactcctggagcgacatctcaacgccccgcatatcacgcaactgtttagcatcatccctcaatatattgaaacatcagatattatcgtgcttaatccgctggcaggaggcgcagcgtga

SEQ ID NO: 450815 - DNA, 573 bp, Serratia marcescens
atgacattctgctgtggccggtattacgttgtctgtccattgtcaaagcacttactttctcgccggctgtccatgattatgccctcagtcttgaggcacagactggcattcctttactgttccgtcaggcaatatagagggactgatatgaaaatgaacacccgctccgcacgcttcattccgacagaaatagcaaaattactgccagaaagttcagataccatgctggctgataagtaccttactgacagacctgaagcaagttgtcgggtgtttcgtgcttatcagggcatcaagccccactaccatcagcaatgcgatgagtatctgtatgttctgtccggccggggtacattctggatggaagaccccagtgacgaggccgaattttctccgggtcatttactgttctttgaacgaaatgtcattcatgccatgccgaccttacttgaagagcctgtcgtgtttctgtcgttagacagcccacgccgcagcccggacgacattatatttgtcgatccagaagatggtgatgccgcaagctttatggcaaggaacaaaaagcagatttag

SEQ ID NO: 450816 - DNA, 912 bp, Serratia marcescens
atgcctgtcattccttctgatgtttcaccatttcgctatcctggtggaaaaggcaagctctcaaagtttcttgccttatttatcatcacaaatcaacttcaaggatgtaaattggttgaacctttttgcggtggggctggaggaactttgcctctgttgcttacaggtttagtcgataaacttgttcttaatgatgccaacccagctgtttctgctttttgggagacgctcaagcttaatcctgacgctttaatcaatcgggtggaaaaagaagaaataagcataaatagatggcatcattggagggaagtctattttgagagaaataatgtttctcaagaggaaaaaggtttttctgctctgtttctaaatagaacaaaccgttctggcatgtttcatgcgggccctattggtgggcgggcacaattaggcgattatttacttaattgccgcttcactcgctcaacactaattaatcggataaaaaaaattgtagctgtatctgataagctgatagtcacaaataaagatgctattgatgctatatctcgactgtctgctaatgactttatatatgccgatcctccatatgttaaagaaggtaagaatatttataatgccttctgcttttctgaagttcaacaccaacgatttgctagctctttgaagcgaaaaaaagcacattggttactttcctatgatgaccatccacttgttcataggttttactccaagtcagggataaacattattgagttaggatatgccatcaataaagctcgagttggtcaagagcttttaatagcatctgcaaatttaagacagcctattattgccaatgtgtcgagctttgataaaaccacaatggataataatgatgtattgctacatcgagctgaaggtaaaacctag

SEQ ID NO: 450817 - DNA, 1542 bp, Serratia marcescens
atgtttggtaaaataaagcttggctctcgttctttatctagtttgaaattggatgagctcaatcctaggcttattggatatagaaaaagagggaagattggtaccgagaaaaatataatatccacgttggttaatcattatgatgttatgagtctgtgtagatctatattgcagaatgggtttcagccggatgaagtgttaattgctattccggacgattctggctcctcaaaaagaatagtcgttgaaggaaatagaaggctatctgcttgtaaaatactgaaaaaacccgaattattaaaggggaccaattatgaaggtcaaataaacagaataaagaaacataagaactatttgtatgtaattgatacgataaagaagataaatattgttgagcttaataatcgtgcttcagctaggtcgtacatagcatcaaaacatacaaaagagtcgataaaaagatggagtgtttatacgcagggtgcatattatattgacctcttgaatgaatgcagttctgttcaagaactaaggggtatgataaacaacactgtttccatctctagaataaaaactgtaatacttttttctcgtattgcagattatattgtagatctcaatgacttgtctctagatgagaaggcattaatacttgaagatattgataatattaaagttgaagccattcttaggttgatgcaacgctctgattttaaagaaaagatagcgagggtaaaaatagatgataggggagggatggttttaaatggaatcagtcatgatgcatttgatgtgatattggccaaattggctagagattccaattttgaaaaaactcttactacacgtcaagagaactctaaagagatgcaagattacctgttagagttggagtctttaatatcaagctttgacaagccagatgtttattctgacgagcctggaacttcagaggatattgaccttgggctttttagtaatgaagatgatgatagtgatgatttgttagaaagtaataatgataataactcaacgcaaccaaaacctgacgatgggaatacaaaaagaataagggtaagttacaaacttttgaacaaaaaaacgctgttaattactgattattataagctaaattcactcatagaagaggcaaagaaaatcaattgcatgacatataaacatgcctctgtgctacttagtcgtactattatacaggttatgttgactattcatattaaatcgacggagttgcatgatgattataagaaaaatgcaaaacacaaatatttagagctcgatagtttgcttgaatattatatttctaacacaagcaagctgatccaggatgatgtaaagttaataaaagaagcaattaaaaatttcaaaaacgatggcaagaatattgcgaatttggcaacacacagtgataaagatattcttactgagttagaagtaaagcatatccaagctaagctacaaattcttgctgatcattttttaaaagtatttatagattcaaaaaatgaagttttagctgtataa

SEQ ID NO: 450818 - DNA, 1002 bp, Serratia marcescens
atgacaaacccaaatcgaacagagatgcagatccgggagaaaaatgagatcgaacagcgggcaattggctgggtgattctactggcttccgggcgggcgacggtcgccgacggtgaggcttttcgccaatggtgcgcgcacaatcccgggcatgtaaaggcgtttgtcgaatgtcgtaaacattggcaggggctacaacgggccgccagcgatcgcgccccggacgaggcatccgcccggtcacccgcaaaaatcatcggtccatcgtcgtccgcgcgcctgagtcgccgcgcgttattaggcggcgccttggcggcatcgatcggctggctggcgatcagcccgccgctgcagctttggccgagcctggacgcgatatcggcggattatcgcaccggtatcggtgaacagcgcgaagtggcgctcaatgcgcatgtcaaattgcaactgaatacacaaaccgccatcaatttgctacggcaacaaggggtggtcacgggcatggagctacgcagcggggagacggaggtgctggctcagcccggtaatggcttgccgttcgtcgtcctggccggcaatgggcagattcaggcgcaggaagcgttgtttaacgtccgctatatcgatgaatcgacctgcgtgacctgtctggcgggggaagtcacggtggagcgtgaagggcggcagattttgttgcagcgtcatcaacagctccgctatgacgatcaaatcatgttgccggttgaacgcgtcgatacggcgtcagtcagcgcatggcgtcagcggatgttggtgttcaataatattccgatgtcgcaggtcatcgaagaaattaatcgttatcgcaccgggaaaatcgttctactcaacgcccggttgggcgctagcctagtgcaggcgaggctgtctgtcgaccgtttcaatgacttcacttcgctgattcaacgcgtttatgacgctaaagtgcgttatttaccgggaggcatagtcgtcatcagttaa

SEQ ID NO: 450819 - DNA, 552 bp, Serratia marcescens
atgcctgatgcgataaaaaaaaccatgcgtgaactgtttattgccagctatgctgaatttcggcagcggctttgtcgacgccttggctccggccatttggccgacgatgcactgcatgaaacctggttgcgcatcgacagcgtgagtaatgacggcgttgtccgttatccggcggcatatttgtttcgtattgcgctgaatgtggcggaagaacaacgacggaatcaagcgcgaatcatgagtaccgatgaaatagaagtgctttacaattttgctgatgaactggccgatccggcgcgtatcacccaggggcaaatcgaagtcgagatgtttcatgccatattggccgaactgccgccgcgacgcagagagatgatcatcgcagcgcggtttgacgatctgccccatgtggacattgcccgccgttttggcgtgtctttgcgcacggtggaaaaagagctgaaagcgggactgcagtattgctgcgaacgcatggaaaaacagtatattcaacgttttgggccaaaaacagagaccctgccaaaaccatga

SEQ ID NO: 450820 - DNA, 711 bp, Serratia marcescens
atgataactcaacaacattacatccacagggttctattgcacttcaatatattttcacttctcggggtgctgggaggggcgtgtccgttttttgttgcggcggcgcaggccgatttgccaccgcaacggcattttactttcgatttgccggcgcaacccttatcgcaggcgctggtcatctatggcgagatcaccgggctatcaattctggtcagggggaatttaactgctggccgtcaatccagtccggtcagaggcgagctcaccgctgatgaagccctacgcgccttgttggccggaacccggctgacggtggtctataccagtggttccgcttttaccctacaaccgcaaaaccggaacagcctggatcgcgatcgggaaatatcatcgccggctttgctgcggggagcttaccgcgcgcaattgcaacgcggcgtgagtcgtttgttgtgctcgttgcagccggccaatttggggcgctatcggttgggcatgcagctatggatcgatgcggcagggaaagtggtcagagttcatatcttgaattctcccggcgccgaacagtggggggcagacgtgaaaagagtgcttgagacgcgagagttggtggcgcctcctataggattgcgccaaccgataacgttgttgctgcgggtgcaaacggacattcgcgccgaatgtcgccgtgtgaacattgggcaggggtga

SEQ ID NO: 450821 - DNA, 192 bp, Serratia marcescens
atgaaccggttactcgcagtcctcgtcgtgctatgcgcggtattagcgacgctgtataggcgggtgtattttggctcgcgttcagcgccgcgggcgattgcgggcaacaaagcaccgctggggtgtgaggatgaaccggagctcgccggcgagtgcaacggcagtgatgaacgccggccgacggttaattaa

SEQ ID NO: 450822 - DNA, 11802 bp, Serratia marcescens
gtggtcaaccgcaacggtgtggtgttcagcggcagcagtcaggtcaacgtgcgcaatttggcggcggcggcggccaatatcagcgatgagcaattcagtcaacgcgggctgtattacgacaacacaggcagccgcccgacattcaccgatgcggcgggcgcggtgcgggtggaacagggagcacagttgactacggcgccttcggccagctcgacccaggggggcggatacgtgctgctcctcggtggcgaggtggagaacgccgggcagatcgtcacacccaagggccagaccactttggccgccggcgatagttttgtcattcgccgcgggcagggtaccgacggcaacgtgatgtcgaccacgcgcggcaacgaggtgctgccgggcttcgccgccgacagcagtgccggccgggtgcgcaacagcggcctggtgcaggccgccaccggcgatatcagcctcagcggccgcgaggtggagcaggccggcgtattgctttccagcagttcggtggacagtcgcggcaccctgcacctgaaggccagcgagcggatcaccctggccgaaggtgccaccagcgcgattctggtggacagcagcggcagcgccgccctcgatagccagcgcgaggccttgctcaagccgctgaacggctccagtgccgccgtcagccggggcgacgacgaccgccgcgacctgtcacgggtagagatcgactccgccggcagcgtcgatttccagggcggctccatcaccctcgccagcggtggtcaggtggcggtcaacgctggccagcgcgcgcagctgcgtgacggcgcggtgatcgatgtctccggcgcgcaaggcgtgcaagtggcgatggagaccaacagcatcaaggtcaacgtgcgcggaaacgagcagcgcgacgcctcggtcaaccgcgagggcggcggtctgaacagccaagacgtgtgggtcgacgtgcgcgacctggtacgggtgcctgccggcaccaacggctatgccagcgaccgctggtacaccgccggcggcctgctggaactgggcggttaccttggcacgcgcaaccattcggcaggcgagtggatggcccagggcggcatcgtcagtttcaccggcaacgacgtggtgacccaggccggttcgcagatcaacctgtccggcggtaccctcgatgtgcagggcggctacatccgccagacctggctgaagggctcggacggacgcctttacgaactcgggtcggcgccgggcgacctgctctacgacggcatctaccgcggttacgaggcacacagcgagcgctgggaccagacccgttatttctacaatccgctgatcgcgccgacccagcgctacgagaacggctacatcgtcggccgtgacgccggcagtctggtgatcggcagcgccaatgcgcggctcgacggcctggtagttggcgatacctatcgcggcgagcggcagagcgaagcgccacaggccggtctggacggctacaaccagtcgcagaatgccgtggcgcgcggcgcgcagttggtcgtcggacgctacaccccctactacgtgaagagcagcggcctgctggagtacgctctcggcgccgatgccggcagcctcaagcaggtggtcatcggtgccggcgaggcggcggccgaagagctgaccctggacgctccggtggccactgagcgccagggccgcctgagcctggacagcgaactgctcaacggcttccagctgggcggcctgaaggtggcggccggcgagagcatccgcgtcgacggcgcgctgaccttggccaatggcggcgaagcgatcctgttcgccaatgacgtggcgatcgacgccgacatcaccgcccgtggcggcagcctgcaggccggcaacgtactggcgcagatttccccgaacgggacgaacgatggggtcgtcgatgccggccgcgaagccggcatcctgcgcgtgggcgatggcgtacgactggatgccagcggcttgtggagcaacctgctgctggcgccggaggtcaacgatacgttggcctaccgcgacggcggacggatttccctgcgcagcggcggcgacctgagcctggggcagggcagtttgctcgatgtgtcgtccggggcagcaatgctggccgatggcaagcgactgggcggccgtggtggggatatcgccttgcatgccagtgccggtccggcgctggctggagacggccaactgcagttgggcggtacattgagcggtctcggcgtgagcggcgccggcacgctgtcgctgcagagcggcaaggtgcggatcggcggcgacgatctcggagatggcagcctgcaactggccgaagatttcttccagcagggcttcgccaactaccgggtggtcggtcgctccggattgacgatagccgaggatgcccaggtgcgggtcacgcgaccggtctaccgtgtcgccgccggggccggcgaggtcgcggctggcgaggcgccgcgagaggcgctggaggcctggacgccgccgctgtacctggaggatgtcttggccggacgcttgatacaacgcgaaggggcggatctgtacctgcaggcaggcggcgacggcaatatcctcgagcaactcgatcccgccagccagacgctggagctggggcatggttcgctggttgaggtcgatccggggcgcgccatcgtcctgcgcggttccggacagatcaccttggatggcactctgaacgcttggggcggacgcatcgacgtgcgccagcagcagttcggccagatcgatgtcgccgaaagcttccagagcgcccaggcgcaggctcacgcacgttccatctggatcggcgaacaggccgtgctggatgttgcggggcgcgctacgacggcgctcgactggcgcggacggacttatggagaggtgcagtccggcggcagcattgtcatcggcggtgagatcgacccgaccagggcgaccgcaacctcggcggatgcctttgtcatcgttcgccccggcgcgcgcctggaggcctctggcagccaggcgctgctggatgtacccggccagggaaggatcctggtggctggtgacggtggacgcattgccctcagttcctataacggattgttcctcgatggtgcgttgcgcgctgcagctggcggtcatggggcggcgggcggcagcctggaattggcgctggagtcgccgctgtatcgcgtcagcgagttgcagggcgctggagtgctggcgtggcgcgaactgcaggtggcgcaacagatggaggagccgctgggcagcgagttatcgccggggcaggcggatactgcgctgcgctatggccaggggcggctggcggtcgaacaggtcgaggcgggaggtttcgatcgactgtccttgctgagcaacggcggtatcagttttgcaggtgatgtgagcttggcgctggggcagagtctcaacctgtacagcggctccctatccttggccgtgggagcggcagatgacactgcggtgagcctgagggcgccctatgtgcatctttccgggctcggaaattattacgccgtcagcggcatgcgacgaccgcaaatcctgcattcgcaattgccagaggcggctgtctcccgggcgcgactgcagatcgctgccagcggactactggagcaggccggcagtctgtccctcggtatgcgtggcgatatcccgggccagtccgagtattaccagcgactggggttcgagcaggcgatcctgagcagccagggtgatctgcgtttcttgggggccgtgtcggacggggactcgcgcggacgattgtggacgcgtggtggtctggaactgctggcggcgcaactttatcccagcagcggggtggtcgcagaagtccgtgccggggtcgtcagcgatcccggtcggtctgaacgttttgacgaagcctatggcctgcggatcggcaggacgacgtcgacctcgtcggctatgccttactccgtctttggtgctctcgaattgtttgcctccgatgtgcagcagggcggtgtgatccgcgcgccgctgggccgcatcgaactgggcaatggcctcagcggcgccgagagctggcaggtcgagttgctgcccggcagtctaacctctgtcagcggtaccggcctggtgatgccctatggcggtaccaccgacggagtcagctatcgctacgacggcaaggatatcggtctggccggcgccggtggcgtttcgggtaccgggctgaccaccggtatcacgttgaatggccagcgggtgaaggttgacgatggtgcgcgcctggatctgtccggcggtggcgaactgactggcgccggctttatctcaggtcgcggcggttctaccgacgcccgcttccatccgctggtgcagatagatgccgaggggcgcttccacctgccggagttgggcgacaatccggtctacgccatccttcccggggtgcagcccggctatgcgccgcagggcggcgaggccggggcggtggcgccgctggccggccagcaggtcaccctgaccctgggcgtccccggattgccggccggtacctacaccctgttgccttccacctatgccctgttgcccggtgccttccgcgtcgaactcaacggccgtgggacgccggtcgcgacccaggccctgcgcaatggctcctggtccagtgccggttatctgtccgtaggcggaaccgcgattcgcgatagcctggccagccaggtgatcctgtcttcggccgatactctgcgacgatactcgcagtacaacgaaaccagctatgccgatttcgtccgtgcagacgccgcacgcctgggtgtgccgcgcgccatgttgccggcggacgcccgtgcgctgctgctcaacctggctaggagtgaggacgcgcaggtcggttttcacttcgctggcgaagcctcgttcaaggcggcgaaggacggctatggcggctcgctgatcctcagtaacctgaatggctacgaggtgctggccgccggtacccaaccgacctccggcttcaacggtgcctcggtgtacgccgacgatctcgttgccctggacgccagccgcctggtgattggcggcatgccggcggtgcagtacggccagaccggcaatctggtcaatttcaccggtcccaacggagcggtcgcggtgcgctccggagcccgcctgtccgccgccgaggtgttgctgctcggtaatgttgaagtcgaggcgggcgccgccatcgatacccgcgggcgtggagagggcgccttcgattccagtgatggctatgtctaccagtctggcgaccgtggtctgttggcgctgtccaacggctggctgaatttcctcgcgccggccgctggcaataccgcccagatcagcatcggcgaatgcacgctcagcgtttgcgcgccggtggaactttattcggaaggcaccctgggaatcgccaccaacggttcggtgcaactcgacgacaacgttcgttatggcacgcgcaatctaagcctggcgctaagtgcgatcaatatcggctccagccagtcgctggccgacgcggccgctcgtggcgtgttgccgaacggcctggtgctggatcagacggtgctccagcgcctgctgcgcggcgagcgcggggcgggtattccggccctggaaaatctgatcctcagcgcccgcgacgcggtgaacatgtacggtagtgtcagcctcgacacctacgacccggccaccggcaaatccagcctggccaacctggtgctgggcacgccggccatctacggccatggcaccggcgaggatgtcgccagcattcgcaccgctagcctggtctggagcggctccagccagccggctgcggcaccggtcgccggcggcgccggtagcggcagcggaaccctgcgggtggacgccgagcgcatcaccctaggctacggcgcgaatacccagccgaccggcgagaccgacgaggcgcgcctggcgctgggcttcgccgaggtgcaactgaacgccagcgagcggatcagcgccaaccacaagggcagcttgcgggtctaccagcgcctggacggctatgtcgccggcgaaggcttgcactacagcggcggcgacctgcgcctgagcacgccgttgctgaccggcgaggccggttcgctgagtcggatcagcagtggcggtagcctcagcctggcggcaccggcgggcgctgccgcggtgaccttcgacagcggcaccgccgggcttggtgccgagttgtccctgagcgcccgcgagatccgcctggatagcgcggtctcgctacccagcggcaagctgagcctgagcgccgaagacgacctggagctgggcgatggcgcgcgcatcgacctggccggacgcaaggccagcttcaacgatgtggataaatacagttggggtggcgacctgctgctgagcagtcgcgccggcgacatccgccaggctgccggttcgctgatcgacctgtcggcgcgtaacaaccgcggcggtaccctgagcgccgtggcgttggccgaggacgccggggttgtggacctgcagggccgcatactgggtagcgccagcggcgactacgatgccggcggcacccgcgtgccgttcctcggtggcgagctggaaatccgcgcccagcgcctgggcgacggcgtcagcctgagcgagcagttcaccgccttgaaccagcgcctgaaccagggcgaggtcttcggcgcgcggcgcttccagctcaagcaaggcgacctgcagatcggcgacggcctgaaggcgcatcgcatcgaggtgtccctcgacaatggccagctcggcgtgagcggcacggtggacgccagcggcgcacaggtcggcgagatccgtctggccggcggccgcggcctgagcctgggcggcaacgcgctgctggatgcgcatgggagcctgctgcggcgcgacagctacgggcagatcatcgacagcccgaaccgggcgatggtcgagctgagttccggcagcggcaccttggtcctggccggcagcgcgcgcatcgacctgcgccatggcaccgcggcgccagcggaacaggccgatggcgtcgcccgtggcacgttggagttgcacgcgccacgcgtgggcgaggtcagcgccggcgacatcgccatcgatgccagcggcgcgctggacatccgcggcgccggcagcatcaccctgaacgcggtgcagcgttacgacggtgcgccctggggcaacgatccggcggccggcgggcggccctaccaggtgatcgaccaggcttacctcgatgcgcggcatgccgagagcagcgcgttcatcgccgcggcgctggccaaccgcgagttgctcgacggcaagctggccggactgaccaatgccacctacgcggatgctttccacctgcgtccaggggtggagatcgtcagcgcaacggcggacggcgacttggtggtgcagggcgatctcgatctgtccggctaccgctacgccagcctcaatccgaacacgccgctgaccgaggtctacggttccggcgaggtcggcgcgctggtgctgcgcgccggcggtgacctgaacctctacggcagtatcaacgacggcttcgcgccgccgccggactcgccggacgacaagggctggatcctcaccccgggagtgcagccgttcggtggcgacctggtggttcccggtccgggcgtggtgctcggcgacggtaccgcgttcctcggcggccgtaccctcaactacgacctgccgatcaagggcaccaccctggccgccggcacccgtctggccaccgaggcggtactcgaacagccctataccctggccgtcggcagcgtgctggtagcggacatccacgatgccgctggcaacctgctgtacgccgcgggcagcctgctgcgcgacggggtgacgctggaggccggcagccggctgggtgccggtaccctgctggcggcaccggccagcgtgcaggcgatgacctggccggctggggtaccgttgccgagcgtcgaggcttccggcaatacactgctgctcaatggcgaactgcccctggcacggggcgcgctgattccttcgcagaccgacgtggtgctgagcggcgatgcgtcctccatcgaactgcgccccagcgacggaacacgtcaggggcgcaactgggcgctggccgagatgttgccggccggcagccagtcctggtccctgcgtctggtcgccggtgccgatctgtcggctgccgacaatcggttggtgcggccggattccacggcgagcttgaacctggccgatgcgcattatcaggtcaggatcgcagaaggggctggcggcggccaggtctggagcgatcgcatcggcgagatgggcatggggttggagccgggaacgccggtcgatgaagacaatgcctggatttgttccatcgatgccggctattgcgtatctacgcccaaggccacctgggcgcctgggaactggctaggtatgccggaaggtgtggcagtaaccgacgaggagtttgcaggcatctgccagttcttccccgaccaatgcatcatcaactcgacgaccaagctggagccgcagaaccagttgttcagcgtcctgcgcactggcaccggtgacctcgatctggccagcgccggcaacctgacacagtggtcgccgtatggcgtctataccgcgggaacgcaggccgtcgatgtcggggcgccgttcaatcagccgcgcggccagttcgacggaacgctgttgggtagcaatggcgcggactacgagtcgctggcggcaggccaataccaggcctggtatccgcaatacggcggcaacctgaatgtcagtgtggggggcgacctggcgggtgatgtctgggcaagcagtctgaacaacgccatgagtctgacgcgttccagcgcgtcggtcggcaattggctatggcgccagggcaatgacgatacacccgtcgcttggtgggttaatttcggtagctatgcaatggtagcggatgccgaacttccggccctgctcggtttcactggttttggcaccctgggcggtggcgatgtcagcatgcgggtcgggggggccgctggcaaccttgtgccgcggggaaccgacagcctgccggcgattagtgagaaagccttccgtagccaggggttaattgtcgcggtggggagcaacggacgggtcgagcgcgatggcaccctgacgcttggcggcggcggtgatatggacatccgcgtcggtgggacgctcaatcccgacttgcaggctcgggtcatttccgtcggcgacaagagcggcagcagccggcttgatctgcagggtgtgctggtcaacctgcgcggcacggcgcagtttagcagcggcgctatcggtggcgtcggtcctttatatgacatgttcgccggacaacgggacccgacggacacccgcccgtacgatgcctttaccgccacgcgcagcaacgcgtccggcggtctggtagtgatccccggtgacgccaccttgcgcctggatactcgcggcgacctggtgctcggtgggagcggcgacccaggacgggtcaacctgcccaacagctctgttttctcgactcaagagggtattcagtacgctggcggtggggtcagctggtttagcctgtggagcgagcataccgccattgacctgtttgccgccggcggtaacctgacgccgagcactcaagtcgcggagtatgccgtcaatagcgggttgaacacctcacccagcgatgggcgtttcatttatccagcgattctgcgtgctgccgctccgacagggagtatctacctggggccatcgagcagtgtgctgcaatcggaccatttgctgaataccgccacatcgttgctgctggcgccgtcgctcaatggcgagctggcgttgctagccggcgagtccatctatgcgggaggctactcggtgcagcgctcgggcgccgatccggccagtctcccatcgatctggtcgccggctttcgccggctatgcggacgccggtttcgtcgaccgggtagctggcaacggtagtccagacggcaacccggcgctggtagaggggctaccgttgttctacttcggcgctgacagcgcagcggccctggtgcgcaacctacagccggtacgtttctatgcgttgagtggggacatcgtcgggctcaacagtggtgcgctgattcgcttcagcgaccaggcgggcgggcgcgccggacaaatctggtatgagggcgctggtccggtgtggatgcgcgccggacgcgatatcgtcgcttccggcactccgttgggaaggacggccagccagatcgatatgacgacctctttcaccggcaacctcttcgtccatgacaaccccaacgacctctctttggtccaggccggccgcgacatcctctacagcaacttcaacgtcgccggccccggtaccctggatatcagcgccgggcgcaacatcctcatggaggaccgcgcggcgatcaccagtctcggcgcggtggtgccgggcgacagccggccgggtgccgatatcgtgctccaggccggcgcggcgggtgccgactaccaggccttcctcgagcgctacctggatccggccaacctagcgcaggccggcaccccgctggccgagcagccgggcaaggtggtcaggacctacgaaagggagttggccaagtggttggacgagcgcttcggcttcgccggcgacgcggaacaagcccaggcgtttttcgccggcctgtccgccgagcagcagcggatcttcgcccgccaggtgtacttcgccgaactcagggccggcggccgcgagtacaacgaggtcggcggcgtgcgtcaggggagttacctgcgcgggcgcaacgtcatcgccgcgctgttcccggagagtgatccggcaggtaactcgatcagttatgagggtgacatcattatgtacggcgctgccggcgtacacactgattttggcggtgatatccagttgctcaccccaggcgggcggcaggtattcggcatcgaaggtgaggcgccgccgtccaccgcaggcatcgtcacccagggccagggcgatatccagacctactcgcggggcagtatcctgctcggccaaagccgtatcatgaccactttcggcggcggcattctggcctggtctgcagaaggcgacatcaacgctggccgcggcgcccagactaccgtggtgtacactccaccgcggcgtatttacgacggctggggcaacgtgacgttgtcgccgcaggtgccgagcaccggcgcgggcatcgccacgttgaatccgattcctgaggtggcgccgggcgacatcgacctgatcgcgccgctcggcaccatcgatgccggcgaggcgggcattcgggtctccggcaacgtcaacgtggcggcgctgcaggtggtcaacgcggcgaacatccagacccagggccagagcagtggtatccctatgacggcggcggtgaacgtcggggcgctgacctcggccagccaggcggcgggcagcgcggtgcaggcagcggagcaggtatcgcgccaggcgaagcgcaatcagccttcgacgatcagcgtggagatcctcggctacggcgatgaacgtctggaggcgggaggcagcgcgacggctacgccggtggccggctaccgctatgacagccaagtacaggtattgggtgccgggccgctaagtccgcaatcgcgcgagcaactgacccccgaggaacgtaatcgattatcgctgtaa

SEQ ID NO: 450823 - DNA, 1629 bp, Serratia marcescens
atgcatgacattgataagaataatcggtgggttgtttgcctgagcatgctggcggtaaccctgcctgcgatgtcgtcagcggctaccgaatcgccgtccgccgtcgcgtcggaaaccgtcgtcgacgctgcgcaagcgcctcgggtcaatattaatgaatatatcgtgcgcggcaatacggtgctcagcgcccgcgagatagaaaaggcggtctacccgtttttagggccgcaacgcacactggcggatgtggaaagcgctcagcaggcattgcaacagatctatcacagcaaaggttatcaatccgtttatgtcgcgctgcctgaacagcaggtcagcggcggagtggtctatctgcaagtcaccgaaacccgcgttggccgggtgcgcgtggtgggcgctaagtatcattcaccgctggcgatccgcgatgaggtgcctgcgctggctgaagacaaggtgcccaacttcggtaaagtgcaagacgagttaagcgcggtgaatcgcagcggtgaacgccaggtgacgccaacggtaaaagaaggagtggtgcccgggaccatggatgtcgacctgaacgtcgacgacaagaacccctggggtggcagtctgacgttgaacaacgactacagtgccgataccaagcggttgcgggccatcgcgtctttgagcaattccaatctgtggcagaaagggcacagcgcttcgctgaccttcttcaccgcgccggagaagaccgataacgccaaagtctggtcagccagttacagcctgccactgagcgaacaatgggcgctgcgtttctccggataccagtcggacagcgacgtggcgacggtgggcggcaccaacgtgttgggtaaagggcactcttatggcgcgacgacgatctacaccttgccgtccggcggcgagtggactcatcaactgagtctggggctggagtttaaagattttgatgaaaacgtgatgtacggcggcgtcgaagaccgggtaccgctgaagtatgcaccttttaccttcggatatagcggctactacttcaacgatcggcggcagggcaacctcagtctcagcatcgtgaccgctaccagcgattttctccattacggcagcgactacgacgagtttgatcgcaagcgctatcgcgccagtaaagatttcgctttgctgaaaggggacgcaggtctgacggaagcgctcggcggcgattggctgttggcggtaaaaagcgcgtttcagatcgcctccggcccgttggtttccaatgagcaattctcagcgggtggcgccacatcggtgcgcggctatctcgcggcggaacagtccgccgatgatggagtgatgggcagtgtggagctacgcacgccttcattctcttcctgggtgggttcaccggttaccgagttacgtctgcacgcgtttacagatgcggcgcagctgtggttacgcgatgcgctgcccgaacagaaagacagtttcaacatggccagcgttggcgtaggagccagcgctgcgatttccgactggctatacggcaatgtcgatctgggattgccgctgattgaagggcccaacaccgggaagaacgacccgcgcgcgcagttcagcgtcagcgcgaatttctaa

SEQ ID NO: 450824 - DNA, 1839 bp, Serratia marcescens
atgcaacgcttattgatgttattgctcgtttgtctaagcacgctattgacgccgttagcggcgcaggcctggtggcaggaagactggagttaccgcaagcagatttccgtcgataccaccgcggaaggggctgcgttaaatgaccgtatcgggcgtgtaccgttgctggtgcgcttgcataccggcaacttcgcgtttgatggcacgcaggagaaaggcgcggatttgcgcttcgtcgccgccgatgacaagaccgtgctgaattatcagatagaaagcttcgatccgttgctgggggtggcctacatatgggtcgatgcgccggatgtcgcgggtggacagcggcaggacatctggatgtattacggcaacgcgaaggcgcccgccacggtcaacggccagttgaccttcgatcccgattataccctggtgtaccactttgacagtgcgccgggcgctgcgccgcgcgataccacggcgtatgcgaacaatgcgcaaacagcgccgggcggcattgtcgacggtgtcctgggacatgccgcgcagtttaccggcggtgagccgatgatgatcccggcgtcaccttcgttagcggtgccggcagcgggcagctttaccttaagcgcctggatccgtgccgatcagccgagtggagagcagttgatctatgcgcgccgcgattccggcaattcattcctgatcggcctggcggagggaagtccgttcgtggaagttaacgggcaacgcagtgcggcggcgcagccgatcggcgaggcgcaatggcagcatcttgctgcggtcgccggcgcggacggcgtcacgctgtatctgaatggccagccggtgagcacgctggcgctggctttgccgcctttgaatacgatcgccgccgtcggcggtgatgtcgcaagcgtaccgacacaggaaggcgctgtcgccccaccagagaatggtgttgcgctagatcatcgggcgtttatcggtgcgattgatgaactgcggctgtcgaaagtggcgcgcccggcggctctgctgatggctgattatctggcgcagggggcggattcgaaactggtggtctatggcgtcgacgaaaagcagtccggtttcggattcggcagccttgggttcctgctgaacgcggtgcccgtggatgcctgggtaatcatcgccatcctctgcctgatgatggcccaatcctgggtgatcatggtgcgtaaaaatcgcaacgtcagccgcgtcgaagaagccaacaaaaacttccgcgaggtctttgccgatgtcggcacgcgtttggaggcgttggccgacgacgcgccgttggccaaccggctgcagcactccacgctatggcgaatttacgctgtggcagtgcacgagttgcgcgtccgccgcagccagtcgggcggacgagtgatgacggtttcgctagctacgctggaggcgattcgcgcgtctatggactctgtgcgtacggaagagaaccgcaagttgggcgcgcgcatgggtattttgtccaacgctatcgccggtgggccgtatatcggtctgttgggaacggtgctgggcattatggtggtgtttcttggcacggcgatggcgggggacgtgaacattaatgcggtggcgcccggtatggcggcggcgttgctggcgaccgcgatgggactgttggtcgctatacccgccctgtttggctacaaccggctggtggcgcgtaatcgcaacgtcagcgccgacatgcgcgtgttcctcgacgagttcattgcacgcatggctgaagtgtacggctccgaaggtcgtgaaccgtcccctgcagcggcaggaggggagcgctaa

SEQ ID NO: 450825 - DNA, 426 bp, Serratia marcescens
atggcctcgatgaacctttcccatgacgatgaggataacgacggcccggtagatgggatcaacatcactccgttggtcgatgtgctgatggtggtgctggtgatgttcatcctgacggccacggcgcagatcgccggtattcaggtcaatctgccgaaggccagtgcgtcggtctctttatcggaacaaaaaaccaaggccatttcggtgaacgatgccggacaggtttttctcgacgcctatccggtcaccttgcccgaactggaagatcgtttacgcactgagaaagcgttgaacccgaattttccggtgatcgtgcgcggcgacgccggggtgcaataccaaaaggtggttgaggtgctcgatctgttgcgtcgcctcgagctgtctcaggtggggctggtgacgggcaaaccccgtcaataa

SEQ ID NO: 450826 - DNA, 723 bp, Serratia marcescens
atgttgtttaactcaaaacaaacgaaccagccggctgagcctagggttaagcgttcgccgaagttttacctttggctggcgcttgccgtagcgctggtggcggtggtgggaacgtttatctggcaatgggccaatgagatgagcggggttcggcgtgagacgccgaaggtaccgatgatcattcctttgccgccaccgccgccaccgccaccggaaccgccgaaacagccggaaccggaaccggaaaaagtcgtggagccggaaccgccgccggagccgaagcccgttgaggaacccaaaccgcaggaagaagcgccaaagccggctgacgatctggccaaggcgatggagatggacggcgccgcgcaagcgggcggcgacgctttcaacatcggcgccggttcgggaagcggcatgagcggtagcggcggtggtggcgggataggtaatgcgacctacggccaatatttgtcgcacgtctttcagaaggtcctgcgtgaggacgagaacacgcggatgttgagtttccggctgcagctcaatctgtggctgaacgagtccggacaagtaacacgtgtggacatcgtgaagtccagcggcgaacgggatatcgacgagaaggtcgtcgccgcattgcggcgcgtgccggcgatgacgcaaaagcccccgaagtcgctgtcgttgccagtgcgaattttattacaggggcggcgcccaggctga

SEQ ID NO: 450827 - DNA, 1704 bp, Serratia marcescens
atgaatttccagcttaatggtgtggcaacgtgggttgccgtaagcctggctctgtctgcggggtcggcgttggcggccccttcggaaaacgccacggttaatttgatccggctgttggtcaagcagggcgtgttgaccaaggaacagtccgaaacgctggtgcgccaggcggaggaggaggcgcagcaggcgcgtcagcggcagccgcgcaccgcggtggccgctgacgcagggtctgacgtgcagccgggcgatgtacgtgtgccctatattccggaaaccgtgcgcgatcaaattcgcgacgaggttaaaggggaagtgatcgcccaggcgaagtcagagaattgggcggcgccgaatactttcccggactgggcttcacgcattaaagtgaccggtgatgtgcgaacgcgcaacgaatcgcgtttttattccggcgcgaacagcgatcaggtcatcgattttaatgcgttgaatgacggtgagccgtatgacgtcaatactatgaccagctcttcactgccgccgttgctgaacacgcgtaaaaatcgtgagaatcgcttccgcgtgcgtgcgcggctgggcgtcgaggccgcgctgagcgataactggagcagtgccgttcgtgttgcgacaggcagcgacgatagcccagtctccactaaccagacgctgggcgataattcgagcaagaaaaacatttggttggatcgtgcctggatcggttggcattcgtcgaataacgtctgggacgtaaagctcggccgtgcggctaacccgttcgtttctacggatatcctcttttccaacgagttgaatctggatggcgttgcgctgagtgcatcgcatctgaaggtggcggacaacgccagcctgttcggcacgctgggcgctttcccattggaatacggttccgactcctggccttcgcgcagccaaaataaaggcaagagtgaagacaagtggctattcggcgctcaggttggttccgagtggcaaatcaatgagaccaataaattgcgcggtgcattggcctattactacttcgataatattgaaggacagcgctcgtcatcctgcagcttgtatactggcgatcccgcctgcgatacggactggtcgcgccctggtttcatgcaaaagggcaacacgttgttcctgttacgcaatattgcgctggaccccaataatccgcaacaaacgccgctgccgcaatacgtcggtctggcttccgaatttaatctgctggatgtgaacctgatttgggataccgaaacctttaacgcgctgaaactgcgcctgcagggtgactatgtgcgtaacctggcctatgacgagagcaaaatgcgccggcgttccgaggggcagatcatcaataacctgaacggcgatggcgcagtgcaaagtggggcgaatgcctggatggtgcaggcggtgctcggccgctctatggatatgagccatgaaggcgattggaatgtgtacgccggttataaatacattcagccggatgccctgccggacgcttacaacgattccagtttccatctgggtggtaccaatgccaaagggtattacctaggcgccaattatgcactgaccggcaatgtgtcggtggaagggcgctggagcagttcggatgaggtttacggcgatcctttatcgatcaacgtcttccagctggatcttaacgcgcgtttctga

SEQ ID NO: 450828 - DNA, 669 bp, Serratia marcescens; identical to SEQ ID NO: 238389

SEQ ID NO: 450829 - DNA, 501 bp, Serratia marcescens
atgagtgcacatgacatgatagagagtgttacttccccgttattgacggaaatgctgcagtcggcgggataccgaaccaatgaaacggaactgaatggcgtaatgcaattgctcagcgccagccagggagtggggtttagcctgcggttcggtaatccgggccaagcgttgggtgaatacctggacttcacgctgagcaccgccctgcgtatcgatggggtcttgccggaggggctggtcgcgcaatggaaccactccaggcgtttctcacgcttgacggaacagaacggttttctggtgctggaaacggatgtgatggttgccggtggcgtaagccgcggttatttgcaggcgacgctcgagctatgggaccgcttgctgcaggagtttctgttgtatttgcgtaatacgattcattcggtaaatgaaaaagaacctgccaccgtcgaagagcccgatcccgcgctgccgcaaacgttgcgcagtgagttagcttcgtaa

SEQ ID NO: 450830 - DNA, 987 bp, Serratia marcescens
atgtcgatgaaagaaaggggccggcgtcgtcgtgtcgttatcggtttggtgggaggaggaataggcattgccgttctggtcggcgtcatggcgctgcggcccactacggtggaaagcgtcgcatcacgcgagcagccggtcaaatctctcagcccggtggcgagtctgggagccgtgtccgtggcgtcgacggaattgcgtcaatggttggcaggcttgacgccggcctggcgtaacgcactggcggaaaaagccgagctcagagaccaatggctgaaggagcggctggccgaaaaagcgctggtggccgaagctaaagccaaaggctgggaacaaaacgaacaggttcacgccgcgattgcggcggcgacgcagcagatcctgttgcgcagctatcttgatgccgtgagccaaccaccgcaagagtacccttcgcagcaggagttgacggaggcttatgagcaggcaaagagtcgcttgcagatcccggaacgttttcatttaaggcagatttttttagccgcatcggctgaggatatgtcgtctctgaattcggctcgcactctggcgaatcagttggtgaaagaagctaaggcgaaggacgccaatttcgccgatcttgcacgccgctattcgcaggatccgcaaacggtggtgcaaggcggtgatctgggcgagttgccgttacaacagctgttgccagaagcccgttcggcggtctcggcgctgaaacccggcgaggtgtcggcggccattcagtcggcatcaggctttcatatcatcaagctggaaggcgtcacaccggcgcgcaccgcgacggaaaatgaagtggtaccgcagttgcgcagcgcgttgcgtcaacaacggcaggcgcaactggcgcaacgttatctgcagaacatggttgggacagcgacgctgaatatcgacggtgcggccttgagcgccatcatggcatccccctgtacgatggaagacctatgttga

SEQ ID NO: 450831 - DNA, 966 bp, Serratia marcescens
atgccacgatataaagagcagcgggaggggggggccgagacacaggacgagatggaaaatgtgctgtcaaacgtcacgtggaaggtcatctttgatgaagatgacctggccgcacgcaagtttgcggctgtggcgcgcagcggcagcctgaaaaaagtctcccgccagttcggtgtgcgcgtcgataagctgcgcgatgaattaactctgcttgaatcgcgagtggggtataagttgttcgtgcgcaataagagcatcctcgaactcacaccagttggtcggcggatttatgctctgttgcatgcctcgacattgtccggtttgaatgtggcgtccgcaacaataaaaatatcggtgtcgccgctgttgttggatggttttttgctgcggccgctgatttcctggttgcgcaaaagcgccggtgaaaaagtcgtgacgctgattcccgattgcccgtatgaagacgatgcagatattcgcgtatggctcagtcaacccggcgaagtttcgagcctgaatcagcatgtggcggggaaacggctggccccgttgccgtttatgccttttattgccagcagttacgccagtaaactgatattgccgcattgtcttgacgatctgaatgactatatgttgattcattatcagggatatcaggaatacccggcgcttgacccctggaatcatttcatcgcgcaccgcaggcattcggtaatgcacgtctcctcctatacggcggcgaaggagctgattcgctgggccggcgtaatcggcctgttgccggcgcaactgccgcagttcaatagcaattttttaccgttacctgacctgtttccacaactgatggcattggacgtttggattgggctaacgctgcgcgcggaaagagaaccggaaatttgcagggtgtttaaactgtttgaggctggcttgcttaatgccatcaacgaaaacaactcgcggtag

SEQ ID NO: 450832 - DNA, 2631 bp, Serratia marcescens
atgattggtgaagctgccgaagatcggtttcagattcgcgcactggtggcgcttgcaaaggcgatcttctccaatcttgatctggtcgcccatctagaaaaaagagcaaccaacggagcggcagatgagtatctgatgaagctctgcgtcaccgctgaagattgtgctgagatcgctaggacttatgtcactggtcggtttctacggtttcgcaagttacatccgtccctgactgacgaagcactggaacacagagttgcttgggcagtcgctggtccggatcgggagcgagctgagcgggcgagatgcgatctcgatgatcccgcgcgttgtcttgtgcctctactcacgcgccttgcagagacctttctgtgtgaggctcgcgacggatctctgcgtgtacggtcgcgctttctcgccgactggcaggatcttatcctcgtcgtcccgccaatgctggtttgctctgcctggatggctgcacaaccagacgggccaggtgtaacaatctcggagcgcagggcttttgaaaggagagttcagcgttggctttgcgacagcacgctgcctgtcgacgatgatccgcttcttgaccagctttgcaaggctgaaggtttggatgaaacccacatgcacctcaatggtaccacagaggcagagaaagtctggatggatgctttgcgcaagacctccaaggttgtggaagctgttagtggaatcataaaacatgaggatgggatgcacgctagtatagggaacggcgtcaaccgacaactgcgtcaggaagactctattcttacccctaaacgcctcagagagcgagtcgaacatgctgtcgcactaaagtcattcctactagagagctgtgctccgactggcgtacaagttacgttagaagaattgagtcttgagagccgatacgctgctgcggttcgaaacaggcttacagatagcagtgtatccgcgaccaccgctgaagcactacaactagtagatatcattaccaagcttgctgacggtcgaggctgttatgttcatgggattgctttcctctggtacacactgatccgagctcaattctgcaggctcttagttcagcaggtcgagcagacggggttcgatcagttccagtacatcaccttcaacgaattgcgtgaggcaacagaaaaggggtttgccgaacgcttccgccagatcgagagaggattacagcaaccggttgactttcttgagggacgttttgcaccgaagacgacaccagatggaaacgcaagccgattaatgcagatcctgcgcggctatctccagttcttagatgaggaaccggagggcaagtcgagcggcaaattggcgagaatcttttccgatcctgagacggcccatttgtcgctaccagagatactagaattagtacgctcgttcgaggacggaaaaatggagaatggcaaagaggtggtgcctcgaagtcaacgacgactgcggcttggacttgtggcgcatttcatcaaacggaccgatcccttagaacgtgctcgtttccgaaaggggggggggcttgcgccggtttgcagggatagtaaggctcggcgagaggctgaccaggtcgcgcgggcgttgatcgtcctgatgaataaaactactggcctttccgagatgatccgaggcgtggatgctgccagcaatgagcgtcatgccggtcctgaggtctttgcccaagtttttcgacggatgcgacgagctggcatccagcgcttcacctatcatgcaggtgaagactttgtacatcttgcttcaggtctaagggctatcaatgaggcggttcggttcctcgatctgtcggctggttgtagaattgggcatggcactgctgcagggctgatgcctgagaaatggtggtcatccgtcgaaggctgggtgatccaaccgtgtgaggagcgtctagatgatctcgtctttgcatggggaacccttgtgcataagggggttttgctcgacaggctacccatactcgatttggaaatacggcggttagctatgcagatctggcaggatccggcgttaacaccagagattctcttacgtgcttggcaactgaggcaccttgaccccatcgtccgtatttacggcaactatgacgtcgatcgagaccgtaatttcgaaatccaaatgtttcaggacagtaaacgccgagatccccatgcccatgcacagtttcttcgccgtcacggtgttggcgtgtccggtgatgccctgttaagaggtagtgaatccctcctcgtcacccgcgagacggatgttttgagccctgatgtccttgagatcctgcaagcagcgacactggagctgttgctggaacgccgtatcgccattgagactctgcctagcagtaatgttcggattagcattcatcaatcttatgaggatcatcatgctcttgggtggctaggctttgggcgaagcttctgttcaacctcggttgttatcggatcggatgatcctggcatctttgcgacaagcttaaggacggaatacgcccacctactccgtgctctggaggcaaatggtgctggcttggaagcgacggcggttttggaacgtattaacagaacgtccaagcgtttccgtttttga

SEQ ID NO: 450833 - DNA, 2793 bp, Serratia marcescens
atgcgtattattgatctaaatgggaatggagcggaacgtttcgataatcctgataaagtgcttcaggacgaagctttagaccagttaaatgcaataattcaggctcagatttccagtcttgaagcccccccctttacaccgccgacagggaaagagctaagttacactcgcccccataatggtatcttggtcgaaggcggacgcggtagtgggaagacaacctttctactcaacgcgttacactatctccaaaggcaatcgcaaggttctgcatataaatggtttgagggactttcatctaaactgcaagtgctgcccccggtcgatcccactctgatagagactaaggagcatattataatcgtcatcatctcgctgattgatgctgcacttgacgaccctgccaataattctgaagcagatcgtacggcagtcaacgaggcacgcagaaagatggcggaaggtctggggcttcttgacggtattgggaaatccaaaccgtatggagatgaatgggaagatcctgagtggatcatgagccgaggtctacgaaaggctcgcaatgggagatcattcgagatcaagcttcaggtatacatcttcgaagccctaaaggttctcaataaaaaagcttttgttctggcgtttgacgatgtggacacaaatttccagcacgggcgcacgattctcgaaacaatgcggaaatatttaacatcaccgcaattggttctgttgatctccggtgacctcgacctctatgggcggctggtacgacgtaatatctacgacacgttcggtaagaatgttatggaatacgactcggatgtcatcggccaagaaaaaacgggtatcgctgctgctgtgcaagagcttgaagagcagtatcttctgaagattgcccccccacagaatcggatctctatgatgccgctgggggggatcatgcagtctgaatcctctactgaaataatggttgtcccattcagacagactgagaaaactcctttgcgagagtgggctagcggtaatatacgccggcagttgctggaagggctatcagtcaacggggagcggtccccgtatcatccttttcttgagcttatctcccgcgagcacctgcgattggtgataggataccttcgagcaattggtgatccaagttcggtacttgcatgtcgtggggtcttttctgtcttcgaaacacgtctccgcctttctggcgtggattcattacagttagcgcatgcaactcacaacgatgtcctattgcttgtattccgttggcttgtggcgcaggataaaccgacgtctcttgctcgtttcggtgttcccagcgatgcagataaagcaattatcctccactgctttgcgttggccatttccaaagagctgaacggctctcccgtaaagtgcctgagaacccttcttacactaaatcttccaatttcgatgatgcagcgcccgggcttctcggaagtagaggtgcgcaaggcgatccttgaatttatctgggatgatgccagcccagaccttcttgaagtagcgggacgtattggctccatcgctcgtttcgataccgtcgaagagagttcaaacagcatcggtaacttgagagcgagttgttttggctcggtaggcacgaagaagaaagaggatcggtctgagataatgagccggatgtttcatttatcacaggccaaagtcaagacggttcaggacctgaaaaatgccattaagtcagagggttttacggtttccgcagacaagtggttgaacacacttgcaagcaacacggagatagcaggcttgaatgctgagaagggggttgtctggtttccgctagagaatttgacaattcgctgcggagcgtttgggtctctactagatttgctgacgtacgacaggtttagcagccgtggagaacaattcagatccatctcggctctctcactgttggcggcaatctcaaaaattctagccgatgaagaagaccgtgaactgcatgagctggcgctaacttctataattccggtattccgccctgatgctggtgttgtgcgtgcagatcaatctgagatcgatgatacgccctctaatagcaatgtcgaaggagattctgaaccgctcgaagccgagtataaatctgattttcaggcttttatggagcgaatgaatgcttggaaatgttttgcacgacagtacgccagtgaggccgagcagactgaccggaaaacagcagaggtctccccgtcggagctggcgcgtattgccgaacgtatacacgaccaactgacctcgttggatgaaaaagttacttcggagtggaagaccggacatatcctgcaccggcagatcactaatgtcttacatgcattgcttgtcattacatcaggcagttctggccgactggcttcgccaaagtctacggatcgtccgctggttgaggcactgcgacatgcaactgctaaaaatgctcgtactttccatcctctagctgcaattgttctcgcctgtcccttagtctgggctttcctgaaccctgaggaggtttacgacgtcagtggcagtagcaccgacaacgtaagagatgaggttgatagagcactcaaggtgttccaagacaataggggtacagaagagataccctttaactcggactggctcagcccgcccgagatatcgatcgcgatcggtcgtcccaaggcgattccacgtacagtaaagcagaaaggcttcttcgacgtgttgaatgtagttcctcgatactatcccaagtctagtgctgcaaaatga

SEQ ID NO: 450834 - DNA, 1992 bp, Serratia marcescens
atgttgggaaaattaacacttgatgcggttccgtaccacgaaccgatcatcatggtcaccgtagccgcaattattgtcgggggcctggcagtgctggcgctgctgacatatttcggcaaatggaagtggttgtggagcgaatggctgacttcggtcgaccataaaaaaattggtatcatgtacatcatcgtggcgatggtcatgctgctgcgcggtttcgccgacgcaatcatgatgcgtagccagcaggcgttggcgtccgccggcgaagccgggttcctgccgccgcaccactacgaccagatcttcaccgcgcacggcgttatcatgatcttcttcatggcgatgcctttcgtggtcggcctgatgaacgtcgtggtgccgctgcaaatcggtgcgcgcgacgtcgccttcccgttcctgaactccctgagcttctggttcttcgtggtgggcgttgtgctgatcaacatctccctgggggtcggtgagttcgctcagaccggttggctggcgtatccgccgctgtcgggtaaagagtacagtcctggcgtcggggtcgattactggatctggagtctgcagatttccggtctgggtaccctgctgaccggcgtgaacttcttcgccaccattctgaagatgcgtgccccaggcatgcctatgatgaagatgccggtgttcacctgggcggcgctgtgtaccaacgtcctgatcatcgtttctttcccaattctgaccgtcaccatcgcgctgctgaccctggatcgctatctgggcacccatttcttcaccaatgatatgggcggcaacatgatgatgtacatcaacctgatttgggcctggggtcacccagaggtgtatattctggttctgccggtgttcggcgtgttctccgaagtcaccgcgaccttctccagaaaacgcctgttcggctatacctcactggtatgggcaaccatcgcgatcaccgttctgtcgttcatcgtctggctgcaccacttctttaccatggggtccggcgcgaacgttaacgccttcttcggtatcgccaccatgatcatttccatcccgaccggggtgaaaatcttcaactggctgttcaccatgtatcagggccgtatcaagctcaactccgcgatgctgtggaccgttggcttcatcatcaccttctccgtaggtggtatgaccggcgttctgctggcggtgccgggcgcgaacttcgtgctgcacaacagcctgttcctgatcgctcacttccacaacgtcatcatcggcggcgtggtgttcggttgcttcgcgggcctgacctactggttcccgaaatccttcggtttcacgctgaacgaaaaatggggcatccgcgcgttctggttctggatcatcggcttcttcaccgccttcatgccgctgtacgcattgggctttatgggcatgacccgtcgtatcagccagaacatcaaccctgagttccaccctctgctgctggttgcagccggcggtgcggcgctgatcgcctgcggcatcctgtgccagctgatccagatcttcgtcagtatccgtgaccgcgaacagaaccgcgatctgaccggtgacccatggggtgctcgtactctggagtggtcaacctcgtctccaccgccgttctataactttgccgtagtgccacagattcatgaccgtgatgaattctgggacatgaaagaaaaaggcgaagcgtataagaaaccggctaaatacgaaccgattcatatgcctaagaacaccggcgccggcgtgatcatcgccttcttcagcctggtattcggtttcgcaatgatttgggaaatctggtggatggctctggccggcttcatcggtatgatcgttgtctggatcggcaagagcttcgatcacgatgttgactactatgtgcaggttgatgaaatcgagcgcattgagaaccaacactacgaacaaatccgtaaagcaggcgtgaaccatgtcaactga

SEQ ID NO: 450835 - DNA, 1620 bp, Serratia marcescens
gtgaaatattcatttaatggcaagaatttggctggtttaatcctcctggcttttaactcgacggcagctcaggcggccgaggtgccggcgggcgctaaactggcggaggtgcaagagctggtgcgtgccaacgggtatgagccggcgacgctggatccgaacctggccgagagcaatgtggagttctacatctttaacgatctgttcgaagggttgctgcgcgtcggtaaagacggcgaagcggtcccggcgctggcgcagaagtgggagcatcagggcaacgtctggactttccatctgcggccgcaggccaaatggtcgaacggtgatccggtgaccgccgacgattttgtctacagctggcggcgcctcaccgatccgaaaaccgcctcgccgtacggcagctatctggcgtcggcctacgtgctgaatgccgcggcgatcaacgccggcagcaagccgccgagcgagctgggcgtcagggcgctggacgcgcacaccctgcaggtgacgctgtcggagcccaactcctacctgctcaagcaactggtgcattttccggtcttgccggttaaccgcaaggtggtggagcggtacggcaagaactggactcaaccggcgcattttgtcggcaacggcgcattccgcctcagccagtgggtggtgaacgaaaaggtggtggtggagcgtaacccgcagtattgggacaacgccaacaccgtgctcaacaaggtgacgttcttgccgatacagggcttcccggaagtggcgcgttttcgcgccggtgaggttgagttggggtataccacgccgccggagctatatcagcagctgaaaaaaacgctcggcgagcaacagctggtgacctatccgctgctctccaccagttacttcgccttcaacaatcgccaggcgccgtttaacgacctgcgggtgcgccaggcgctgaatctggcgctggacaaagagattatcgccggcaaggtgctgggatatggccaacagccggcctggacctttaccccaaccggcgcgggaggctatagcctgcagcccggcgctgcggccggctggacgccggaacagcggcacgcccaggcgaaacaactgctggcgcaggccggtttcaacgccgaaaatccgctgcgctttaccgtgctgtacagcaacgacgccaccatcaagaagatcgtcatcgccgccgccgccatgtggaaaaagaaccttggggtagaggccagcttgcaaagccaggagcgtaaagtgacgctggataatatcaaccgcgggcagtatggcgtggcctttacccgctggctggcggattacaacgatccgtctactttcctgaacgtgttccgttccgacagcagcgagaacagcgccaaataccgtaacccggactatgaccgcattctgcaccaggcgacggcggcgcagacgccgcagcaggtgcagcgctacttccagcaggccgaggcggtgctggccgccgatacgccggtggcgccggtgtactacgaggccaacgccacgctcattaaaccctacgtgaaggggatcgactttacccgccagggcgccttgtacgataaaaacgtctaccttctcgaacactga

SEQ ID NO: 450836 - DNA, 618 bp, Serratia marcescens
gtgagaaataaaatttggtccgtggtaaaatatgcacttttctttattgctggtttcataacgaattttagcggcggattgagaagtattagcgatatacctaactcgtacgaagagtttaaaaaaacatatctttacgacgagtcatttcttagtggcaaatggtctactaacttagaatacctaattgatggaactgataaaggacttctggttggacaacctgacatcataatggccttgaataacggaaacagtggtcaagtttatggtgagatccttagtgaaaggatatgcgatgccatgccattaacgtgggttatttcaatagaaagtacctcgccaaatatattaaattttttcgttgatagaaaatttatagtaaaacagctacataatgggagtatggagactgttgctgagttaaggttgatcaatgaggatcgggaaaaaggcgttataaaactaaaaagagttaatgatagcaagtctgcctttcccgagtatattgttttcgggaaagacttgccaatgtatgaaaacgacgttaagaaattgataaattattgtgcaggatcatctgctagatttctaaaagaatatcgttccaataggtga

SEQ ID NO: 450837 - DNA, 2064 bp, Serratia marcescens
atgagcagcaatatgatcattacatcaacaaagaacgtcgtaagctgggaagtcgatcggggcagctttgccaaggcaaagaaagcgatcaagagcatcggtcaagagtgggataagacagctagcaagatgaaagctgccacctctaaagtgaccccgccgggcgctgaacgcttcaagcaatccgagtatacacgacgcactaaagccgcccgtgcagaagcagccgcagccaaacaggccgcacgcgaacagctgcaagcagagcgtaagattcaacagatccacgccaagtctatccgcttctctactgccgccagcagctacaacctgaccggcaagcagagaacggaatccctctcccagtttggtgatctgactcgtcaattccacgccgggaagattgctgtgggtgagtacaacgccgccgtaagcaagctgcaaaccaatatgcggaaacagggccgtgtgggcatgaaaggccagacactgccagttactgccaaggtcaccaagttggacacttcaatgatcgaaggtgcgaagggtgcaatcaccattgccgccacggtcgccgtcgggaagtccatcatgacagcgggccaagacctgcaatcgatggagtcgggccttacagctgttaccggttcagccgacaaagcagcgaaggaaatgcagtatcttcgtgatcagtccaaccgtctgggccttgacctgatcaaagttggcaaggattacacttccttctacgcggcggctaaatcctcaatgtctgacggtcaggttaggaaccttttcgagggcgtttctgaatatgggaccgtcctaggtgcttctgccgatgagcaatcccgggcattgaaagcgcttaaccagatggcgtcaaaaggtcaaataatgagcgaagagctcaaaggacaactttctgagagcctccccggcgcagtagacgtattcgtcaaggctcttcagaagacccaaaataacgtcaacctgactaccaaagacctgtttaagatgatggaagagggcaagctgatgtctaaggacatcctcccggccgtcgctgatgagttcaaggcactcgcccgcaatggtggcgctctcgatcgagcggtcaactcgaatagggcaagcttccagcgactgaagaccgcaatgcaggcgtcaatgggagaattcttcgatggtggcttcggtagtgctcttaccaacgcattcgacaccatttccgctgcgctgaacaataacgcggattcgttcaagttctggggtgatttggctggtaacgtaatcgacggagccacagacgccttcgcatacctctatgacacgatcgtatttgttgcatctgttggcggtcattaccttgaacagatggggatctctttcgaaggtcttaaaggctggggagaaatggcggcctacgcattgggcgtaacagcttttgcgggcagcatgtggaagttgggcggggcgctgaagtggatcatcggcttccttcacccactaacaaaattgcttggtgtgctgaagtcaatcagcgcactcggcggagtggaagcggctaccgctggcggtgttgctaagacagcctccaagacgacaggcggcgttgccggggcggcctctaaggtcggcatggtaggtaaggccggtaagcttctggggcctctgggaacgctgtattcagcatgggaagtaggtcaatcccagtttggtgatccaactgaacggatcaatcaagccagactcgacagtaagcctactaatccttggctggaggccgcaggccgggccgctggaatgtaccaactagccgactctatcgcgccacctccggcactcagaccacagcctacaatcgacctgagtagtatttattcgggcagtgccttcatgaacacttaccgcaatcctgttgaagctgcaacccaaaagcaccagatcgaagtaacttcggtggtcaaggttcaggatggggccgtgaaaggtttggtacgtgaagagattgaagacttcgacggacgccaaatcaacatgatgatcggcggtggacactaa

SEQ ID NO: 450838 - DNA, 414 bp, Serratia marcescens
atgtccaacatcgcagacttgatcaagaacgttcaagcccatgtcgccgaacaaaagcgagtccttgaactggaagccgcctcagaggtcaccaagagcaccaaggcacaggatgagctagaagccctgatcgccagctctggtgagttcctcgcagctgtggaagctaccgaagccaccaagggccgaaaggtcaaatcacgcgggattgcaatgtgccatgttgcacagggtggaccggcaaacggtcgcgctgattctcttctcatgaagtccaaggagacagaggtcagtaaatccaagctgcgccgtgtggagatcagcaagcacgggatcaccgttctaacgccagaccaagaggccaacctgaagggcgtgatcatgagcctgaccaagaataaagaggctgaataa

SEQ ID NO: 450839 - DNA, 927 bp, Serratia marcescens
atgaccacagcagcacccgcagcaaataatgtagtaaccctgaataccgatattcaaaacggcaacgtcgcagcactgaacaccgtcatgatgttggaatcatacaagggggttaagttcacccttgaaatgaaaatgacttacaacctgatcctaagcttcacccgaaccggcaagcgtgccgagtttagtcagtcgtatcttgcagcctatttgtcatgctccctctctacggtgaagcgtgcaatggcaactctgaaagaattggaattgatcgctgccgacccagacaaccggggaaggggagacgtagacttgctagaagcgctgccgatcgtggtggagttcgcgaagtctgccgaggtgaagagagtaaataaccgtaagtcaaaggggaataaaaatgctgcaagccgtccagttggaaagggtaagcctaaactgtctgttgtccaagaccaagaacaacttgacgatgataacagcggcgacgctggggatcctgtccagcatgatgatcttgattcagaacagcccgatgtaattaaaacaactgaggcaatcgaagtagccgaaccacaaaccgaaggggaaacagttgatagtattcttcctgttgatgactgcgatcacgatgatagcgacgcggtgacagctgccgagcctgaccagttggatcagcagattgctgccgctgaactgcatggcttcaagtatgatttggccgagactatgcgccattgccaagggagccgtgctaaggctgccgtgcggttgcagggcgagatcggcgtattccaccgccagcgcattctagaagctcagggggccactcaggcctcagattgggcatctaacaacgacagttacgatgacggttacagcattgatgatgattggaacccggatgacggcgatgcttactga

SEQ ID NO: 450840 - DNA, 183 bp, Serratia marcescens
gtgaagattgagtttgatgatgaattgatgcgtgaattgtgtgctctggccgctacccgggagcatggctccatttacaccattgtaaagaaagccactcgtgaattcgtaaagaagaataccgttaattccaccactgttaaggaaaaagacaatgaccacagcagcacccgcagcaaataa

SEQ ID NO: 450841 - DNA, 1929 bp, Serratia marcescens
atgctgattattattaaacgtaccttctcgcatgccttgttttttggctttactgggacaccaattcaagaagaaaacgaaaaaaacggcaataccaccagtaccgtatttggtaacgagctacaccgctatagtattgctgatggtatacgcgatggcaacgtgctgggtttcgacccttacaaagtccccacctttagagacagcgatctaagacaggcagtagcgttagagcaagccaagaccggttcagtaaaggaggccatggataacccggccaaaaagaaaaagtttaaccactttatgaaagatgtacctatggctggccataaagacgccacaggcaagtaccacaaaggcattgaagactatgtgccgaaaagccaatatttaagcgaaactcaccaagccaaggtggtggaagatattctgcataaatgggatgtgctcagccagggcaataaattccacgccattttggccactaacagcattgccgaagccattgactattaccgtcatttaaaagctgccaaacctgaacttaaagtatcggccctgtttgacccgaacattgataacgacggcagtggcgaccgtggccctacttttaagggcgatggtctggaagaaattatggccgactataacgggcgttatggccaggattttgattttgcccgccatgcagcctttaagaaagatttagcggcacgccttgcccataaaaagccctacgagcgcattcataccgaaccttcaaagcaattagatttactgattgttgtagatcaaatgctcactggctttgactctaaatggcttaataccttgtatttagataaggtgattaaataccaaaatattattcaagcgttctcgcgcaccaatcgcttgtttggcccggacaaaccccacggtattattcgttattaccgctatccacacaccatggagcaacatatcaatgatgcggtaaaactttattcaggtgacagacctatcggcttgtttgtagatcagttagaaagcaaccttaaagccatgaatgaattagtgatagacattaccgagctgtttatcagtgcgggtgttgaaaattttgaaaaactgccagacgatatagaaacctgtgcccaattcgccaaattatttaacacatttagccaccacctagaagcggctaaagtacaaggtttgcattgggagcagtcgatctattcctttactggaaatgatgtagaacatgaagtaactctgtccatagacgaacaaacatacctgagcctagttctgcgttacaaagagttggttgccaaaggtgatggcagtggcacaagtggtggcgatgtgccttttgatatcagtggctatttaactgaaatagataccggaaaaatcgatgccgactacatgaacagccgatttgataaatatttaaaagaactgaaccaacaccaagacgctgcgaacattgaaaccacattaaatgaactgcacaagtcgtttgcatcactcacccaaagcgagcaaaaatacgccaagctattcttgcacgacttgcagcgtggtgatgcgcagttacttgaaggccatactttcagagactatatcaacacctacaaagataacgctgaaaatgcgcaattaaacgcagttgttaatgctcttggtttagataaaggactactcatagcattaatgtctgatagtattaattataataatctcaacgactttggtcgctttgacgcattaaaagaaacggtagataaagcgaaagccaaggcttattttgaaaaacaagacggcataaccatacctctattcaagctaaatattcgtattgatcagtttttaaagcagtttatttttgcacaaatggatgatttcttaagtgacaaagactttgttgatgatgtgatgtga

SEQ ID NO: 450842 - DNA, 360 bp, Serratia marcescens
atgacccttataacctccggggcgactcgatacgtgttgattatctgtggttacgccctgaaatttccgcgcgttagcagctggcgcagtttcttggctggcatgttgcacaacatgtccgagcgagatttcagcgcgatgaacatcaacctgctgtgtcctgtcgtcgccagtgttccatgtgggttgttgaatgtcatgccggcgtgctgcgtcagtcctgcagcattacggagctggcgagcagcagcagaacagcatgagcaggcatcgctgttattgaacatcgtcgagctgaaatccgactcggcgggaatgctaaacgggcggccggttgctgtcgattatgggacttactga

SEQ ID NO: 450843 - DNA, 990 bp, Serratia marcescens
atggctaccccaacaaaaaagaaagcggaagaaaaatacgtcaaggacgataaaaaaaagccaggtgacggcaccgagaacggcgcaggctccgctgcaggcgatggcaccgagaacggcgcgggttccactgcaggtgacggcaccgagaacggcgcaggctccgctgcaggtgacggcaccgagaacggcgcgggttccactgcaggtgacggcaccgagaacggcgcgggttccactgcaggtgacggcaccgagaacggcgcgggttccactgcaggtgacggcaccgagaacggcgcgggttccactgcaggtgacggcaccgagaacggcgcgggttccactgcaggtgacggcaccgagaacggcgcgggttccactgcaggtgacggcaccgagaacggcgcgggttccactgcaggtgacggcaccgagaacggcgcgggttccactgcaggtgacggcaccgagaacggcgcgggttccactgcaggtgatggcaccgagaacggcgcaggctccgctgcaggtgacggcaccgagaacggcgcgggttccactgcaggtgacgacaccgagagcggcgcaggttccactgcaggtgacgacaccgagagcggcgcaggttccgctgccggcgacggctccgaaaacggcgtgggttctgctgcaggtgatgctctgattactgtcgatactgccaatacagggttatctggcctgatcaacaccgctgagggtcaaaatattctgctcgatttaatccgctcttcggtgaaaaaaccagaggtcaacacggacacaaaaccccattggttcaccgtccaggtggtgcgctcaccgagcgggcggcgtttccgggccggtgttgagttcacctccgagccaaaaccctacgatttttcgctgtttagcgctgagcagctcaaagcactggctgcagatccgttcttgcgcataaagcggattgcgccggctgaggagtaa

SEQ ID NO: 450844 - DNA, 798 bp, Serratia marcescens
atgagtgatttttattacggtcaagggaaactttacctggctcgccggaatacggcgggccaggctttatcgtggcgatgggtcggtgatgtttcagcgctggatttagagctggagtttgacgagaaaaaaaccaaaggttcggcaggcggccagctcgttacaatgcagcgttatatttcagccgttagcggaaaagttacgtcaacctggcatgagtatgcatccgataatctagatattttgctggcaggggatcatgtttcacgctctcctaacctgtttgcgcaagatacactgccgacggggattgtggctggcgatcgcatcagcttgagtaatcaacaagtctggggcgtgagaatcaatgggctaactgagggggtaaattatattgtcgataaattgtggggagttattgtctggctcactacaccggtgaatcagccagtggttgtcgattatgaacatttaggcaatgagacgttacccattctcacacaccagggtgaagaatttgcgttgcgttatgagggtataaatcttgctgaaaataacagcccaattttaatcgagatataccgggtgaaatttgaccctatatccaagatggcgttattaagcaaggactctgacctgagcgggctggaaaccagcgccgatattctttatgacttttcgaaaggtgaagacccgttattaggccgtttaggccgtgtcgttatgtttaaacggttaagcgggataactcacaacggagccattacccataatggcgcatatacacatagaggttaa

SEQ ID NO: 450845 - DNA, 2193 bp, Serratia marcescens
atggccagctcactgccagaacaaaacaaatgggaaccctcaatttatcagcttgagaaggacacacctgtattaggtggccaaggtggccctgataatattcaagccgagcaactggcaaaccgaaccgtattcctaaaagaccagttggaagcatacaacgcgctgattaaatctggcgagttgccgtttagctcttatgctgatgccgtgattgccctgaacgctggtaaaattcccctgaatgccaaggtgtccattcgttctgagaattcctctgcctgggttgaggagtatatcaaccagaatggcacgttggtgcctacaggtaaaaagctcccggacggaaagatgatcgccgtgtcggtctttccaacggccgaagacccaaccgggattgaaacggggttgacactgaccacaccaggccaaacgttccgcgtactgtttgatgaaccaactggccctaaagaggtcgtctatcaaaacaatggtacatcggcgatccgtattgcagaaatcgcgtcgcaatccgctatggaacgcctgctgatggatgcggggatattgacagaaagcgatccggattacgctatcgagtttgttgataagctgctccgccgggccgtaggtatcgccaagaatggccgttttgaagcgaatgccggtatgaatatttccggcgttcctgtgacagaattaccagcggacagtgattattgtgtgctcttccgcgatgctcgcgaccgtgtcgcatttggcattggcaaaaccggatttatcgaagtaaacgggatgcgggtatctgttactgagggagataacctggttgaaatcgttgactcattccagcgtgttgcggggggcatcgatggtaacggggtgattttcagtaatacggaatcaacgaatgggttaaattcgaaagattcatttatgctgtttgcggaattaatacacctatttatttatggccagtcattatctaatggcgcgttcggtattcctgttttaaatacaccggtttctaatgcgctgatgtttaataccggcgtgcgtagcaacggtaaaaacccgtcatcgctggtgccattgaaagaatcggtgacagacaccagcggtgaaaccattgcgtccggtctggctcatggctttgtggcgcactcaggcggcatgtatgaccgccaactcatcttcaatgcggcaggtgtgaacggcatcaacattgaaggtctgatgaaaggaacgggtaattacgcgcaagccgtttcacagtttaacttcactgctcaacaggcgaaattaagcggcattgaatacagccaagattttatgctgttcatgcagggggaaacaaatatggccaatggcacccccgcagccagctataagtccatgcagacccagctccatgccgactttgacgccgacacagcgcaactgcgttcatcgggtactaatttggtcatgctgacctaccaaacatcgtcacacggttattatgttggcacaccggaaaatccaccggaaatgattgccctggctcagctggaattggcgctgacacatccgaacatcgatatgtgggggccaacctacatggggctgccggggaaccatatatccggccagggtaacgtccatcacaataatcacggttatcggattcaggggttatatgcggcgaagaccattcgccatcgcattcggacacggacggcagaaaagcccaacggggagaagtatttgcctgttcacgcgatcagcgccacaaaaatcaatgatacgacggctctggtgaagctattcacctaccacccgcccttcgtcattgatgccacgctggtctctgagctggccgacggcaatcatggcgtcgaactgcacgacgataccggtcgcctggctatcgccgctgttgaaattgttgggggaacaaacctcaagatatcgtctgaatcgactatcggcagcggtgcttttgttgcgttcgcctggacacccgagaatcgcggagaaatcagcaacccaggcagcggcccacgctatgcatcatggttctttggtcgcgagacaggggtacgtacaaccatccacgactccgacccggagaccaccacattgctgaatgaatacggtattccgtatccattgcataactatctgccaatccaaaagatttatttaagctga

SEQ ID NO: 450846 - DNA, 696 bp, Serratia marcescens
atgttgcagtttcaagtaatcgatgattttaacaacccgaatttgccgatcagcaacaccggctcgacattaaatctggcgtcagcactgcgtatttatgagatgaagagtgcgaccgataaaagtaaatttggtatcccgctgagcctctccgggctgacgttcgacggtgaggggctggttttagatggcgttgtcggtcatcaagcgaacacctcgttgattgagccagaagaattcaccatcatcaccgcgttcagggcggatatcccgacagcgtccgcacaagtgcattcaagtctggccgaggctgcgtctcctttcaccggtagccgcatggctgttacgacgacaggtgctgttgctgtgaacgttggagctgttccgactgccggtgtcacaaccagcgtgatcatgccagcgtgggagatgtttgctgagaccgttagcgcaacaactgtcacacttactcgcggctctaatatgggtaaattgacgggtgaaatcactggccgccgcccggcgttgaactcactcatcattggcggtggctatcagtcacctcataacgtcggcatcaaggggaaaattggggtatgggctgcgtatgaaggcgttctgtctgatgccacaatcacagacctgtttacaaaggtgcgggctattatggcaccgcgtggcgttatcctgccttaa

SEQ ID NO: 450847 - DNA, 375 bp, Serratia marcescens
atgcctggcaaaataatgtctgcggtggtgatcctgctggcgctggctgccgttgtcggcgctggcgcctggttggctgggcgtcactaccagccaacgattgaacggctcaacgacgcgctgacgcaatgcaaagccagcaacaagcaacaggcagcgacgatcgccagccagaacgcaggcataacgtcgctacagcgtaaacaggaagagatggaagccaaggccagggcagcacaggaaaaagctcgcagggaggcgcagagcaactatgagagggcaaacgaggttatggcagagcgaaccacaggcgaagcgtgcgccgccgcatcggccgctttcgacgctgagctgcgccgggagcgtgcgcaatga

SEQ ID NO: 450848 - DNA, 192 bp, Serratia marcescens
atgattaaatcaatcgatctttcagacaggtctgtaacactggtgggattgaaagaggttatcgaagactgccagcatattcttgactcagtaaacacaagcgacaaaaacagccagaatcttgttgatttggtaaaagataaactttcaatggtagagattgagctttcggagctacagaaaagggaatag

SEQ ID NO: 450849 - DNA, 777 bp, Serratia marcescens
atggcaactcaactttcttttcacgatcatcaattttccgcaatcacgcgcaataatcaaatctggctatccagcaaagatatcgccaaggctctcggttatgcgaaaactaatgctatcacccacatctacaatacgaataccgatgaatttacatcaggcatgaccgagatagtcgaatcgaatacctcggggaatctcaagtgccgtagccgtattttttctctgcgtggcgctcacctgataggcatgttcgcccgtaccaaattagctaaagaattccgcaaatgggtgttggatattctcgatcaggagattggtgctgtaacaaatgaaatgccacctgaacagaccaccacctacagccgcacaccactgcgcgacgcagttaatatgctggtgggcaaaaaggggatgatgtaccccgacgcgtacagcctgattcaccagcgctttggcgtgcagcatatcgatcaactgagccaatcgcagatgctggaggcgatagagtatatccactgcctgctgattgacgatcaccaccctaacgccgtaccgatgaatggcagaatacttaccacattccgcaatggtgagatggtggggcagcgttttgttcgcgatgatgaacacgtcgcaaccctgcctgcatttatggacatagctcgtcgagcgcattatgtcgttattcatgaagacgacgcggcgcctttggttagaatcctaacgaataacccaccagttgaaagacggggaaaattaatcactcaattttaa

SEQ ID NO: 450850 - DNA, 525 bp, Serratia marcescens
atggattctacgttatttaggtttacatctttatcagacagtagactgtccacgacatgctcagcaaagtttggagtaagccttgtcccttttggtaggcagtatgggatttccgtgtcattttttgctttttggaattggctaatttcattaaccccagaagcaacgcccattagatatgtgctaatcatatcctttgctcttttagcgccctctgcatcagatgatgtggttaagtgtttcagctccttatacatagccacagtaaactcagcatgtgatattgatggtagtaatgtgaatatgatggttgcaatcgatagtgaaatttttttcatttctgctactcagaatgtaataatattgcgcatgttactatttataaaatcagtttcctatcaacaaatccaagccgtgacgcgacacgcttcgcttgcctcaatcctttcactatcgtatagtcacaaggcagcggcaaaatccgctgccgggattggtctcccggaactgaaaccgcgacaatag

SEQ ID NO: 450851 - DNA, 2073 bp, Serratia marcescens
atggaatggcgagcgcaaaactatgccataagcaaccccaccggatggctgaacggggatttcatgtccaacagcggcgccggattggatatgcgggcaatttcgatagttgagtccggcgggaagcattttaatgccgacggaagcatagtcacttcatcagagggtgcgcaggggaaatatcagctgatgccggccacgggcaaagagttggcagccaagcgcggactgcaatacgacccgaaagacgaacagcaaaacgcgctgctggccagcgattacgccaacgagctttatggtaaatatggctcggagactttggcaggtgcggcatataactgggggcaaggccgcgttgataagttgatcgataagattggcgatccgcgaaaaggtgaggtttccgaagctgaatttattcgcaatctcccggcggagactcgcggctggctggcgcggtaccgaaaaaacaaaaccggactcgatccggtatcggtgaataaaatcgacagcatggctgaggcgcagataaaagaacagcgcacagcggttcgcaatcaaattgacccgatactaaacaacaccatgtcgcagctatacaacggtgaagtgccagatgccatgccagacagggccacaattcaatttgcgtatgggccgcagggttcaagcatggtgaagcagctcggcatcgccatcgacagcgcgcgaacgttccaggccattcagtacatatcgccggcgcaacagcagcaggagctttcgaaggtaaagccgcaggttaacgatccggactacgcgataaagatggacgcctacggcaaactcgccgccctggtgcagaaaagcaacacggcaattcaggctcagcgcgacgccagccgcttcaacgatgcgctattgatgggcgagaagctcgaccccacagacaaatcaatgcagaaagcggccgactcaacgccaacggcgcagaacttccgcattaacgacgccagcacgcatgacgctgttgtgcagcaggttgcgcaaaccgggattatccccgagaaggtcaccacgcagctaacggctatttctcgggcaaaaagtccggaggtcgtgaagcaaggcgctgaactgttcagccggctgtacgacacggatcctgcctctgtcggtgatatgccgaaagagatgcagggtttttacatgacagttaagcaaatgactgacgcgggtatgagctcagccgatgctgtgcagcatgcccaggatgtcacttataaccaaaatgatgcccttagaaagcagttgtcagcagatcaaagcacgagtccctataaaaaagaacgtgatgaggccatgaaatccgcgagggataccatgacccagttgtttcggtgggacccgtcagccgacgataaaacgccggatgccgcggcattccgcgcggattaccagtctctttacgacattaactaccggactaccggcgggaatgctaaagcagcacaaaagttgaccaatcaacaggtatctaaaaactggatgatcagtacggtaaatggtaccgcacaatttatgaaatatgccccagaggctctatataaccacggcccggcggggtggcaagcttctcaatgggaagaggaaaaacaacggcttatgtacggagaacgtaacgacacaatagtaaccagtggcgcaaagcttggcatcacttctgggcgtactgcatttgtcgaaacaaaaacgcctgagcctaagattgggggtgagctggaaattgtgccggatgtatccacccccagaagtggagactacgccatttgggttaaaactgaagatggggccccgcgtccgtactacaacaaatacggccaagctatgcgctggagaccctccttgcaggattgggaaccttaccaaaaaatgcaaaaagaacgagaggaaaagggtctgtcagaacgggaaaaaggtcaagagatccgagactttaaagaaaagcatcgggcacttgatgaaatgtataagcgcctacatgacgagcgagtcaaccgtcaaaagcaatatttttcatggagttatgaataa

SEQ ID NO: 450852 - DNA, 966 bp, Serratia marcescens
atgagttattttgcatggcgcgcgaaaatccgtctgacgcgagaggccactaactggctgattcgcctgacctccgggcgagtgacgaccgaagatgcggatgcttttcggcaatggtgtcagcaaagcccgcagcatcatgccgcgttcgatgaggccaggcgcctgtggcgaaatctggaacctgccatgagtgcggctccgtcttgcgcgcacgagcggcaggcatcggcatgcgcgccgaagtgggggcgaagagcgtttttgggcgccgccgccgcctctgtcggcatgctgtggctgaagccggagctgttgcttaatccccaagtgggctggtcctcattgtcggggttggcaagcgactaccagacgtcgctcggcgagcagaagaacattgtgctggcgggcaacgtcacggtggaaatgaacacgctcacgcgtatcgaccgacggaaagccggcatggcgctgctggcgggggaagcacaaattttgacgcgagcgatgaatctcccccggtgggtggtgtatgcggaaaatggtgaagtgcgcgctggagcggcaaatttcaacgtacgcaatgtggaaaggcaggtcaacgtgacttgccttgagggcgaagttgccgtgatttgtcagtcggtgcatcgccagttgcgcgctggtcaacagttgagttacaacgcttccggcgtcggcgaggtggtgcgagccaatctggaacaggttaccgcctggcgacaacagcagttgattttcaatcgccaaccgttgtctcaggtgatcgatgaaatcaaccgctaccggccgggcaagatcattcttttgaatagccagttggggcggcgattggtgcaggcgcgcttccggttggatcagttggagagcgtcgcggcgctgattcacgatgcctatggtgcaaaagtgaccgctttgccgggagggatcgtggtgttgagttag

SEQ ID NO: 450853 - DNA, 525 bp, Serratia marcescens
atgcgccgacatttccttacttattatgatgcattgcgtaaacggcttaaatatcgtctgggttctgaggatctggcgaatgacgtattgcatgaaacctggctgcgcatcgaacagcgtgatgaggaacagcagatacagaatccccaggcttatctgtatcgcacggcgttgaacgtcgcctatgatcggcagaacagcggtccccgtttgctgcaggtagacgaaatcgatgcgctgttacagttggaggacgagacgcaagacccggtacggattgtcaatgccagaaatgagatacatgaactgcaacgcattctgcatcagctgccgtggcggcaacatcagatattggtggcttcgcgtctggaagggatcgcacaccgcgaaattgcccagcgtttccatatatctacgcgcatggtggagaaagaattgcgggcggcgttgaatttttgcgctaaaagtatgcagcgaaacgtcattcagcgattcggtcccggggcgggaaaatcgtctaagtaa

SEQ ID NO: 450854 - DNA, 714 bp, Serratia marcescens
atgtgcactggatcttacgtgagaaaaattacgcttccgtcgtcggtcggatattggtggtttatttttctgcttgtcgtcgtgccgctcctcggcattgcgggggaaccgtcgaaagacattcgcccggtgaacttcaatattccatcgttgccgctggtgcaggcgttggcgcgttatggcgaagcgtcgggttttgcggtgttggtggatagcggcatggcggccggccggcgatcttcgccggtcaaaggttatctcgatccctacttggcgttgacctatctgctgcacggcagcggattgaccgcgcgttatacgggcgctaatgccttcacgctgatggcgaaaagcgctgaggttgcgcgcaagcccgcgggtgacgtatccacgccggggttggggggacatcgcttcggcgccgctttgcagcaggcgctgcaacgggcgctgtgtcaaacgccgcacacccgtccgggtgattaccgtgcggtaatccagctgtggctaaccaagaatggcacggtagagagacttagacttcttggttcaacaggctcatcgctgcgagatgacgcgattcagaaacaaataagagagctgcggcttgcgacggaaccgaatgtccgtttgccgcagccgctgactattttgatcttacctggggaaggagcctcaatgacgtgtcgaatgcagccagcatcacggcattga

SEQ ID NO: 450855 - DNA, 12048 bp, Serratia marcescens
gtggtcaaccgcaacggtgtggtgttcagcggcagcagtcaggtcaacgtgcgtaacctggtggccgccgccgccagcatcagcgacagccagttccgcgaacgcggcctgtatttcgacgccaacggcagccagccgagcttcaccgacgccgccggcgcggtacgggtggagcagggcgccttgctgcagaccgccaatccggccagctccaccgcggcgggcggctacgtgttgctgctcggcagcgaggtggagaacgccgggcagatcgtcacgcccaagggccagaccaccctggcggcgggcgacagcttctacattcgccgtggcgtcggcaccgatggcaacctgcgctccaccacccgcggcaatgaagtggccacctccctggccgctgacagcgccgccggccgggtggtcaaccagggtctgatccaggccgccaccggcgacatcaccctgaccgggcgccaggtccgccaggagggcgtcgccctgtccagtagctcaaccgacgtgcgcggcaccatccacctgctcaactcggccagcgacgccaggggcagcgtggtcctgggcgagggcagcaccaccgcggtgctggtcgacgccagcggcgccggcgccctcgacagccagcgcgacgccgcccagcaggcgctggatggcaccacgccgaccaacaacgtggtcggtcgtttcgacaacctcagccgggtcgccgatcgcagcgagcagtcgcgggtcgagatcgtcagcggcggtagcgtggatttccagggcggctcgctgaccctggccagcggcggccaggtggtggtcagtgcggcgggccggagcctgctgcgtgacggcgcgcaggtggacgtcgccggtgccgtcggggtgaaggtggcgatggaaagcaacaacatccagatcaatgtccagggcaacgagcagcgcgacgcgccggtcaaccgcgacggcggcggactggccagcaatgatgtctgggtcgatgcccgcgaactggtcctggttccggccggcaccaacggctacgccaccgatcgctggtataccgccggcggcctgctggaactgggtggctaccttggcacgcgcaaccattcggccggcgagtggatggcccagggcggcaccctgactttcaccggcggcgaacttgtgagccagcccggctcgacggtcaacctctccggcgggaccctcgatgtgcagggcggcctgatccggcagacctggctcaagggcagcgacggacgtctctacgaaatctcccgcgcccccggcgacctgctctacgagggcatctaccgcggcttcgaggacagcagcccgcgctgggggcagacgcgctatttctacaatccgctgatcgccccgcagagccgttacgagagcggctacatggtcggccgcgatgctggtcgcctggtggtcggcaccgcttcggcggtgctcgagggcgacctgctcggcaaggtattccagggcgagcgccaggtgcgtgcgccgcagccgggcgcggatggctaccagcaggcgcagaacgcagtggcgcgcggcgccgagctgatcgtgggcagctataccccgcgctacgaaagtgccagcggcaacgtgctgtacaaccttgcgccgaccctgcagcaggtgcgcttggccgatggcggcgagccgctggcggtgaacctggatctggataccgcgctggccgacgaacagcggggtgtcctccagctcgacagcgaacggctgtcgggtttcgagttgggggcgctgcgcgtggccgcccaagagcggatctcggtggacaacgccctgcaggtcggcgatggcggcgagattgtcctgtacgcgcccgaggtcgaggtgaatgccgacctcacggcacgcgccggcagcctgcgcctgggcaacgtgctggagcaggtagaggtgacccgtggcgagcggttcgatacctatctcacccccgctgccggccaacgtgccgccctgaccctgggcgatggcgtgacgctggatgcgcgcggtctctggagcaatctggtgcagggcggcgtggatgccgaccaagcttatctcgacggcgggcggatttccctgcgaagcagcggcgacctatcgctgggcgatggcagccggatcgacgtgtcgtccggagccgcgctgctcgccgatggcaaacaggtgggcggcaaaggcggcgacctgacgctgtcggccaacaccggctcggcggcaggcgacggccgcctgcaactgggcggtgaactggcaggccatggcgtcgccggcgccggcaccctgagcgtccaggcgctgcgggtgagtatcggtgcggcggcgcaggacggcaccctggcgctggccgccgggttcttcgacaagggcttcgccagttaccaggtgatcggcgagcagggactggaagtggcggaaggcgcacaggtgaaggtgcagcgtccgctgtaccgtttccgcgacgccgccgccagcggcgccgacccgctgctcgcgctggagccctggctgacgccgctgtacgaggagctgccggtcgacggcgaactgcggcagcgccccggcgccagcctgttcttgcaggccggcagccgccagagcggtgccgggcaggtggccgatagcgtcctcaacataggtcgtggcagtctgctggaggttgatcccggccagcgcatcgaactgcgcagcgtcggccagttgaacgtcgatggtcgcctgaacgcctggggcggctcgatcgaattgggcagcgtggcgttgcccgatccggtgcgcgaccaggtcgagagcgtcggccaccagcgcgccatccgcgttggcgagcagggtgttctcgatgtcgccgcacgcgccgcgaccgcgctggacttccaggggcggcgctacggccaggtggccgatggtggcagcatcgtcatcggcggcacagttgaccatgccagcggcaaggccgatgccgccgaactgttcatcgacctgcgcccgggaagcctgctggatgcctccggcacccaggcgcttctggacgtgcctggagtcggccagacccgggtcagcagcgccggcggcagtatctccctggcgtcggccaacggcttgtacctggatggtgacctgcgcgccttcgccggcggggaaggtgccgccgccggcagcctgacgctggcgctggccacgccgaactacctgaccagtctggcgaccgaccaggtattgcgccagcgcgagctgatcgtcggccagcagcgcgaagccgccggggaagggagagactatgcctatggccatggccgcctggcggcgagccaggtacaggatggcgggttcggtgacctgaccctgttcagcgacggcctgctgagtttcgctggcgatctggagctgtcccaggcgcaacgtttgcgcctctacagcggggcattggggcttggcgaaggtgccgccggcgatagccgggtcaggttgtcggcaccgtccctgctgttggcgggagcgttcgtcaacgacggaattacggaaaacaacgaaacccggccgctgtcgaccggcctgttcgaggtttccaggcagcccagcgaggcactcttcgaagccagcgcgcaggtgctggatattcgcgacagcatggtcttcggctcgcgtggcagtttccgcgacgccagtggcgggacgcagacgattgaccggcgtggcttcgaccgggtcgagctgtccagcacgggcgacatgcgtttgctggcggggaacgcgacgcctgtcagtaacattaacacccaggtgctcagcggcggcgatctgctcatccgcacggcgcagctctatccgagcaccggcgcgcgcgcgcggattctcgccggctatggctaccaggccgatggcgccgctgcggcgttcgacccggcgcgcagcctgcgtatcgagcgcagcgacgcgacgacgccagagcagcccctggcggtcttcggtcgcttgacgctgggggcggcgagcgtcattcagggcggcgtcgtgcgcgctccgttgggctatctggaaatcggccagaacgccgacagggtcgagctgttgcccggcagcctgacctcggtcagcggcgccggcctgaccttgccctacggcggcacggtagacggccaggtctggcgctatgccggggaggaaatctccctgaccggcgtcggcggtagcttcaacgatagggggataatggataccggggtcgacctgggtggccgctccgtgcgggtggcgtccggagcgacgctggatctttccggcggcggcgaactgctcggcgccggtttcgtctccggccgcggcggctccaccgatgcgcgctacaacccgctggtgcgtttcgacgaggagggccgcttcgacctgccgggactggccgacaatccgatctacgccatcgtgcccggcgttcagcgcatcgcgccggtggccgccgaaggcggcgccgtcgacccgctggtcggccagcagatcagcatcggcagcggcgtgcccggcctgtcggcgggaacctacaccctgttgccgtcgacctacgccctgctgcccggcgcgtaccgggtcgaactcaacggccaggccgggctgggacgggcagcgcccacccagctcatgcgcagcggctcctggtcgctggccgggcagttgtccctcgccggcaccggggtgcgcgacgaactgttccgccaggtgctgctgaccccggcggatgtgctgcggcgccattcgcagtacaacgaaacgagttacagcgacttcgccatggccgatgccgcccgccgtggcatcccgcggccgatgctgccggtggatgcgcgcagcctgcgccttgacctgctcgccggtggcggtgccgatgcgctggcgttcgacggcaccgggctgttccaggccgccagcggcggctatggcggtagcctggtagtattgggcaacgaccagcggatcgagatcgtcggcgccggcgcgcaggccagcgaggggttccagggcgtgacgctgcgggccgacgatctcaacgccttcggtgcggcgcgcatggtgatcggctcaacgccagcggtactctacgggcaaggcggtaattacgtcaccttcgacatcaccgatggcgcgcaaagcatcgtcctgcgcaatggcgccgaactggccgcacccgaggtgttccttctggcgagaaggccgggagaggcgatcagcctcgagcaaggcgccgccatcgtcaccctggggcggggagctgcggcctacgatgcacgggatggcttcctgtatgcgccgggagggcgttccatgctcgccctgtcgaacggcgtgctgaacgtcttgccgccggaagccggaacgccggacagtggtcccggcgacatcctgctcggcgttcccgctgccgatggtgtggccggcgaaacccggctgtattccgagggcagtctggtcgcggccaccgacaagcgcttcgagctcgacggcagcgtgcgttacggcacccgcaacctgaccctggcggcgggcggtttcaatgtcggcgagcaggcgctgctggccgaactggccgagcgcggtgtgctgccgaccgggttggcgctcgaccagcaagtgctcgaccgcctgctgcagggtgatgcgtcggagggcgcgccgcccctggagacgctggtgctgaacgcccgcgacgcgttcaacttctacggcgacgtcagcctcgattcctacgatccgagcagcggtcgttcccgcttgtcgcgcctggtgctgggcaccccggcgatctatggctacggcgacagcgacagcgtcgcctcgatccgcacctccaacctgatctggaacggcgcgcagacgccggctgccggggtcatcgccggcggcgccggcagtggccagggcacgctggacatccgcagcgaacgcctggagttcggctacggtcccttcagccagcccagcgccatcgacagttaccagcgcctggcgctgggcttcgccacggtcaacctggcggccagcgagcggatcaccgccaaccacaagggtagcctcgcggtctatcagagccagggcgagtatcgggctggtagcggctacgcatacagcggcggcgatctcaacctgatcacacccttgctcaccggcgaggccggctcgcgcaacagcctgctggcgggcggtgcgttgcgggtcagcgcggggggcggcggcgcggcatccaccccggtcgaactggccaatggtgcactgggcgccgaactggccctggagggcgccagcctgctgctggacacccgcgtcggcctgcccagcggtaagttgagcctgaccgcgcaggaggacctggaactgggcgccggcgcccagctcgacctggccgggcgcgcgctgcgtttcgacgacgtgacccgctacagctggggtggcgaagtcaacctgctgagccacggcggcaacatccgccaggccggcgcttcgcgcatcgacctgtcggcgagcaacaaccaggccggtagcctgacggcggtggcgctggacagcgcggccggcgtggtcgacctgcaagggcagatactggcggcgagcagcggcgaatacgacgctggcggcaccctggtgccgtacgccgcgggcagcgtcgagatccgtgcccagcggctgggcgaggacggtacgccggacagccggttcgctgctctcaaccagcgcctgaatgccggccaggtgttcggtgcgcgcagtttccagatcaagcagggcgacctgaacatcggcaacgacgtcagggcctcgacgatcgaggtgtcgctggatggcggccatctgagcgtgaacggcgtgctcgacgccagcggcgagcaggtcggcagcatccgcctggccgccaagcagggcctgagcatcggtggcgaggcgctgctcgatgcccatgggcggcggctgcgggtggacagctacggcaagatcatcgattcgccgaaccgtgcgctgatcgaactgaacgccggagacgggctgctcagcctcggcgccggcgcccgtatcgacctgcgccacggcaccgaggcggcagtgggaagcgcgcccgggcagaacgacggcgtcgcccgcggcaccctcgacctgtacgcgccgcgtctgggcggggcgacggcgggcgatatcgccatcgacgccggggcgccgttgcagatcctcggtgcccgcgccatcaccctcagcgccgtgcagcgctacgacgacgcgccggtcgccgcgctgccggcgagcaacggccggccgtaccaggagatcacccaggcctacctggatggcaagcaccagcagagcgaactgttcatgcaggcggcgttggccaatagcgccctgctcgacggcaagctggccggtttgaacaatgccgcctacgcggaagctttccacctgcgccccgggctggagatcgtcagcgccacggccgatggcgatctggtggtgcagggcgacctggatctgtcgggctatcgctatgccagcctcaacccgcggacggcgaaaacctcggtatacggctccggcgaggccggttcgctggcgatccgcgccggcggcgacctgaacatctacggcagcgtcaccgacggtttcgccccgccgccggaaaccgacgacgatcagggctggttgctgctagccggccaggatcacctgggcggcgatcgggtggtgccgacggctggcgtgcggctggacgacgacagcttcttcccggccggcaagacgctcaacttcgaactgccgatcaaggccctgaccctggccgccggtacccggctgccggtcgaggcggtgctcagccagccgctgcaactgccggtggggacggtgctcgagggggcgttgctggatgccgccggcaacctgctccggccggctggcagcctgctcggcgaggctctggatctgcccgccggcacccgcctcggcgccggcagccgtctgccgctggcgacgcccgtgacggggatgacctggccgggcggcgtgccgctgcccggccgcgccacgctggccaacggcgaagtcgacggcgaagtcgacggcgtgcgcctggccggtgggctggccttgcgcgccggggccttcctgccggccggcagcgatatccgcctgcccgatggtgccgcgtcggtggacgtacgcccggccggtgcggtgtcgcgcaactgggccatcgcgccgatgctggcggccggttcgcagtcctggagcgtgcgcctggtggctggcgccgacctgcaggcggccgatccgcggctgaccgatccgcgttccagcgggcagatgcgcctcgccgatacgcactacggcatgcggcgcataccggcggcgggtggtgggctggtgtggacccaggaaggggtggatggttgggcttcccctggagacaccagcgtctatcccggagcgccagtcgatctcgaaagtctgggttggccaacgatgtgcgatgaaaaccccacatggtgtgccgcaaagcccagcggcttcacttggactgaagaaggggtggctggttgggcttcccctggagacaccagcgtctatcccggagcgccagtcgatctcgaaagtctgggttggccaacgatgtgcgatgaaaaccccacatggtgtgccgcaaagcccagcggcttcacttggactgaagaaggggtggctggttgggcttcccctggagacaccagcgtctatcccggagcgccagtcgatctcgaaagtctgggttggccaacgatgtgcgatgaaaaccccacatggtgtgctgccgctagcgaggattatgctctggaggtagggccacacgcttcgcgcttcagcgtgctgcgcaccggcaccggcgatctcgacctgttcgccgccggcaacttgcgtatggattcgccgttcggagtctacaccgccggtaccgcgagcgcggtcgattccagctacaacctgccgcgcgccagggatggcggcagcgttctgagcgatccggcgctgggcggctacgagcagtgggtggacggcggcgaacagagcctctacagcgcctggtatccgacccagggcggcaacctgacgctggcggtcggcggcgatctgcgcggcgatgtgctgggccggttgtccggcgccgtacccaactctggctacgactcggcggccgtcggcaactggctctggcgccagggcagcggttcgaccgccggtacggctaacgatgctaccgcctggtggatcaatttcggtacctatgcgcgccagccgggcggcactgaaaaggatgccgtcacgcagcaggtgggcttcaccggcatcggcaccctgggcggtggcgatctgagcctgaaggtcgcgggcgatgcgggcgtcatcgaggcgcgcacgtccagcgttccgctggaaacgtcgcagcgcagccaggggctggtgctggcggtgggcggcagcggtcaggtaggcgccgatggccaattaaccctgagcggcggcggcgatatggacgtacgtatcggcggcgcgctcaatccgttgacgcccttcgttcagaacagttcgctgtacggcgcgatggtcaacctgcgcggcaatgcccaggtccgggcgacgagcctgggcggtatcgatctgatctatggtcgtcaggatagcggtcaggttccgggcgaacggcgcgcctacgatcctttcgtctcgaccctcggcctggccaacggcgggccgacgctggtgctgggcgacgccaccttcagcctgaacagcctgggtgacctggtgctgcaaggggtggtcgatcctgggaggacgccgttgatgaacggcaccccctataccagcgccagcggtgtcgagggttacggcctgagcggtttctcgttgtggaccgaacgcacggcgatcgacctgacatcggcgggaggcaacctgaccccggtttccctattcaggccggaacaggacaccgattccgcgctggtctatccggcgaagctgtcggccgtggcgctgaccggcagcctctattatggcaacgcgacactccgcgaaaacgctcgcagcgacaggaccgcgctaatcctggcgccgtcgagccagggtcgtctcgacctgctggccggcgactccatctacgccggcggctacagcatcagccgttccggcgccagcgccggcagcctggccacgccgctgaatccaagctaccagggttataccgggttcacgcggcagggcgacaacctgtccagcgacggcagccgcgccaacagggagcgcttcccgttgttcgccttcggcgccaacagtgtctccggcgaatggggggcggcgttggaaccgtcgcgcttctacgcccttgcgggcgatctggtcggtgtcgacagtggccggctgctgcgctacaccgagaccagcgatgtgcgtttcggccagttgcgttacgaggggcatggtgcggtgcgcatgatcgccggccgtgacatcgtcagcagcggcaccgggttgggctccgagcggaccgcgagcgacaacatggggaactacgccagcagcggcaatctgttcgtcaatacctcggctaccgacgtgtcgctggtgcaggcggggcgcgacatcctctacggcaacttcaacgtcgcgggaccgggcagcctggagatcagcgtcggacgcaacctgctgatgaacgacgaggtggcggtcaccagcctgggggcggtcgccgcgggcgacacgcgctccggcgccagcatcgtcctgcaggcgggcgccagccaggcggactactccggcttcctcgagcgctacctggatccggccaacctggcgcaggcaggaacgcccttggcggaacagcccggcaaggtggtacggacctacgaaaacgaattgatcgaatggttgagcgggcgctatggcttcagcggcgacgcccagcaggcgcgggagttcctcgccggcctctcggcggagcagcagcggatcttcgcccgcgaggtgtacttcgccgagctcaaggccggcggccgcgagtacaacgaggtcggcggagtgcgccagggcagctacctgcgcgggcgcaacgcgatcgccgcgctgttccccgagcgcgatccggcgggcaatccgatcagctacgaaggcgatatcgtcatgtacggcggtgccggcgtgcacaccaacttcggtggcgacatccagttgctcaccccgggtgggcagcaggtattcggtatcgaaggtgaggcgccgccgtccaccgcaggcatcgtcacccagggccagggtgatatccaggcctactcgcgggacagcatcctgctcggccagagccgcatcatgaccactttcggcggcggcattctggcctggtcggcggaaggcgacatcaacgccggtcgcggttcccagaccaccgtggtctacaccccgccgcggcgcatctacgacgcctggggcaacgtcagcctgtcgccgcaggtgcccagcaccggcgccggtatcgccaccctcaacccgattcccgaagtggcgccgggcgacatcgacctgatcgccccgctcggcaccatcgatgccggcgaggcgggcatccgggtctccggcaacgtcaacgtggcggcgctgcaggtggtcaacgcggcgaacatccagacccagggccagagcagtggtatccctatgacggcggcggtgaacgtcggggcgctgacctcggccagccaggcggcgggcagcgcggtgcaggcagcggagcaggtatcgcgccaggcgaagcgcaatcagccttcgacgatcagcgtggagatcctcggctacggcgatgaacgtctggaggcgggaggcaacggcactcccttgacccaccagggatatgatccggcgggtgcggttcaggtggttggcgccgggaagttgacggccgacgagttggcgcaattgagtgagcgggaacgcaatagcctattatcgcaataa

SEQ ID NO: 450856 - DNA, 2334 bp, Serratia marcescens
atgagcgcccacttcgtttcccagaccgtacgcaccgccaccggccactggccggtgatactcccggccctcggcattgccttgcagccgaacggcaagccgcaaccgtgcccgacctgcggcggtaaagaccgcttccgcttcgataaccagaacgggcgcggcacctggttctgcaatcagtgcggggccggtgacggcctcaacctggtggaaaaggccctgtcgctgtcaacaaaggccgccgccgaacaggtggccgctgtgatggggagtaacaccaacgctttgccaccggccgctgaggccggtcattcaccacaagacaaggccgaggcccagcgcaaggccgcgcgacaggcacaggctctggtggctgccgctcagtgcaaaagcggcaatgcctacctgagcgccaaaggctggccggaggcagaaaccctgaccttgcacgaccagccgctgcgcgtcggcggtatcaccttccggcccggcgacctgctgttgccgctgcataatgccggaggcgaggtggttaacgtgcagctgattaacgccaacggggacaagcgcatgctggcagacgggcaggtgaaagccgcctgccacattctgaacggcccggacaacgcggttatctggctcaccgaaggctacgccaccggcctcaccgtgcatcgcctgaccggtgagacggtgtgcgtcgcgctgagcgccaacaacctggcggcggtggcgcagcagctgcgcagccattacccggatgcgcggttgctgctggcggccgataatgaccgaaacggcaccggacagacccgcgctgccgaggcggccaccctcaccggcggtgtcccggcactgccgcccttggaaggagactggaacgacgtttatggccgggaaggggccgaggccacgcgcacccagctacaggcattcagccaaccgccgcagccgagcccgttcgacacgctgagcgatgctgacctgaaagccatgagcgccagcgagaaggccgaactgctggccgagcactacggcaacaccttggccgtgccaccggtgggggaagagctgtgccgctatacgcgcggcgcctggcaggtgctgccacagcgacagctgagccgggaaattgccgcgctgttccagaaggtgcgcgcgccgttctccgccgccggtatcaacagcattttggacaccctcaagctgatggtgccgcaaatgggcgacccggttcgccggttgataggttttcgtaacggggtgtttgataccgtcagcgggcagttcagcgcccaccgccaagagcactggctgcgcaccgtcaacagcgtggactacaccccgccgcgcgacggggagaacttggccgaccatgcgccgcacttctggcagtggctgacgcgagccgccggatgcaaccacgacaagcaggagcgcattctcgcggcactctttatggtactggccaaccgttacgactggcagttgttcctcgaagtgaccggccccggcggcagcggcaagagcgtgatggcggccatcgcccggctgttggccggtgccgataacaccacctcggccaccattgacaacctggagtcggcgcgcgaacgtgccagcgtggtcggcttctcgctgataattctgcccgaccaggagaagtggagcggtgacggggcgggtatcaaggccatcaccggcggcgatgcagtcgccatcgaccccaaataccgcgatgcctacgcggcgcacatcccggcggtgattttggcggtgaacaacaacccgatgcagttcagcgaccgcagcggcggcatctcgcgccgccgcgttattctgccgttcccggaggctatcgcacccgaagagcgcgacccgttgctattggcgaagatcaccgaagagctggccgtgattgtgcgtcacctgatgcaacgctttgccagcccgaatgacgcgcgcgcactgctccaggcgcagcaaagttcggcggaagccctggaaatcaaacggcatgccgatccgctggtcgatttttgtggctatctgacggtgctgggcaccccggaagggatgatgatcggtaatgccaacatcaccccgccgaacccacgtcgctacctttaccacgcctacctgtcgtttatggcggcacggggctatcagcacgtgatgaacctgacggcgttcggccaggcggtgccgcagacgctgaaagagtatgagcatacgctgctgaaacgccgcaccaagcaaggaatacagaccaacctgatattgagtgaggaatgtgaggcggactggttgccgaagtgtggcgccgtgtga

SEQ ID NO: 450857 - DNA, 255 bp, Serratia marcescens
atgatgcgctgcccgctgtgcacccatgcgtcctatactcgcaccagtcgctatatcacggaacggacaaaagaggcgtattaccaatgtcagagcctgacctgttcttgcacattcaagacggtggaaagcgtcgataaaatcctgtgccagccgatacaggcgcaaccggtcgatgagaacgccttgccaccgccggagaaacggacgctgaaccgctatcgccgctacaacagcaatcataccctgcactaa

SEQ ID NO: 450858 - DNA, 246 bp, Serratia marcescens
atgatgcagttaacctttggtcgccagcatttcaccctcgatgagcgcgacgcgctgtttgtggcggaagctatcctgttgcagcgtaaagagcctggcgtcgtcttgccggagcaccgcagcgaaaaacacggcgttattcgtctggcgagtcgccaggctgagccgcgcctgttccgtgccgggccggtgccgctgacttgcgcggctgccgatactcgcaacgaccagcttaccgactgttga

SEQ ID NO: 450859 - DNA, 1113 bp, Serratia marcescens
atggataacacttcatatcaactagtgacagtaaaacgccgtaacgaaggtatagtgcccagagcagtacttaaagggaaaaacatattagttaaaaattacttcagtgttgaagcgggtgattacctaatttcaaagcggcaggttgttcatggcgcaaatggaattgtgccagacaatctcgatggcgcagttgtatccaatgagtatcttgttgtcacagatagcgatgatataactgctagatactggactgttatctcaatcagacctgaaatgcacaaactattttttattagctcctatggtgttgatatagaaaaattggtgtttgacgttactgattggaaaaatagaacaatcttcattccacaggttacagagcaaaaaaatatcactgactacttccaaaagctcgatagtctaatcgctcaacaccaaaaaaaacatgataaactcagcagcattaaaaaagccatgctggaaaagatgttccccaaacaaagcaaaaccatcccagagattcgctttaaagggtttagtggggtgtgggaagagaagatgttaggtactgatatcgctgaaattattgggggaggaacacccagtacgtcaatttctgaattttgggacggtgatattgattggtattcacctactgagattggagaaaatgtatatgcggaaggtagtcagaaaaagattacacctctaggtttgaaaagttgctcagcaaagatacttcctgctggtaataccgttctctttactagcagagcgggcataggtgacatggctatccttacaaaaccaggctccactaatcagggttttcaatcacttatagttaaagggggttattcaccctattttatcttttcagcgggtaaacaaatcaaagattttgcgcttaaacatgcatctggctccacttttttagaaatttcaggtaagcaacttgggcgtatgaaaattcttatgcctagcttagaggaacaaaccgccatcggcaactatttcaaaaaactcgacaacctaatcaaccagtaccaacaacaaatcacaaaactcaacaaaatcaagcaggcctgcttaagtaaaatgtttatctaa

SEQ ID NO: 450860 - DNA, 738 bp, Serratia marcescens
  misc_feature (577)..(586): n is a, c, g, or t
ttgcgtgattggtggctaaaaaatctagcaaaacacaattgtcgttcagtatctgtcattcctactttacgaggagtacccctttacggtactgacatgtcatttatttttagtcatgaagtgatgattcttagggtcagcaataatttagcaaagcgctcatcgcgttttcttaaacgtatctttgatattttcggttcatttgcaataatgcttgttttgtcaccagtactgctattcttagcttatactgtatcacgtgatggcggaaagccaatctatggtcatgaaagaattggccgtgacggaagaaaattcaagtgtttaaagttccgttcaatggttgtaaattcgcaagaagtcttggctgaattacttgctaatgatccggtggcacgtgaagaatgggataaagattttaaactaaaaaatgatccgcgtattactaagataggttctttcatacgtaaaaccagtcttgatgaacttccacaactttggaatgtttttattggcgaaatgagtttggttggaccgcgacctatagttgaggcagagcttgagcgctatgcaggcnnnnnnnnnnatggcaagttagtggacgtaatgatattgattatgatacccgagtctattttgatgcatggtacgtcaagaattgggcactatggaacgatatcgctatcctttttaaaactattaatgtcgtgcttaaaaaagatggcgcttattaagtga

SEQ ID NO: 450861 - DNA, 159 bp, Serratia marcescens
atgaggaaacaaaacgacagcgcctattatgactcgaaggcaaaaatcagccgcagaaggacgaatgtcaggttcggctttagacatcgccagattcaaaaaaagatcatctgtcactggcagagcctgcgtgatgcgagggaaattcgctctacatag

SEQ ID NO: 450862 - DNA, 300 bp, Serratia marcescens
atgagaaaaaaaatcgcattactgggttgcacactgctgatgtgttcacagcttgttcacgccggtctggtgattgaaggtgatataagtggcaatgttggcagcggtaatggctcctccgtagacgtagggattaatggtggaggcactaacggcggcaatggcgttggtgtgatcgtcggtggtcaaaatggcggctcatctaagccggaatcttccaccagccaggtgcaaaaagacatttacgcgtcaatttgcgccagcccgtttatgaagaaatacgcttcgatttgccagtaa

SEQ ID NO: 450863 - DNA, 1071 bp, Serratia marcescens
atgggcttaagcaaagaaggttatccgaaaggcgtgttagtaagagctgtgtgggactgttgtcatgaattgcatgagcaacttggcagagcgccgacacgactggaatttatggcagaaattcaccgtcgagagccggatagaaaaggcattagcacgcattcacgccagtggggggactggatgcgtcaccacagttttaaaagcgatatattattgagtggtcataatattccggatgaatatttggaaccgcaacgtcttcgggtggtatacgcagtggaactgcttggtgaagtttctgttgccgaagtagttaaatggataattacaagcaatgcaccacttaagaaatctgaaatagagtatcagtttcaggcgctgactgtgaatcacagtcagcgatggtttcaccgtggaacacgaaaagacatgcggagtaacagtaaccatcccatggacaagctttatcgttctggaacaggaaggaatacgcgatatgtcatatacatacctgaaaagcatggtatctgggacatcgctgagaatggcaaaactcccatttgcattgtagcgcctagattggccgatttgattatgctgcaactcagagatgaaaacgaactcgcaaacaacatccctactgacgaaacataccgtgatgcgcgtgtgaggatgatgcgcgaaacacttgtacgagaggggcagccagccttcagacgtcgtcttgttcgtgcatatgagggtcagtgtgctatcaccgggtgcactatttctgagttgcttgaagccgcacatctccgtccttatgctggagcttggcattcccgggcgtgttttggattattgctgaaaaccgatatccataccttgtttgataaaggcttattgtggctcgataatgaataccgggtatgtcttgcccctgtaattatgcacacggaatatcacacgttgcacggtaaaactattagcttaccccgatccccggacgattggccgctgaaagaacatattgcctggcaccgtgatttctgccttgaaagagctgaattttctccggcagattaa

SEQ ID NO: 450864 - DNA, 987 bp, Serratia marcescens
atggataaaaactaccacgccacgcccaagttcgttcacaacctctggaccaccaatgaagatgacgaatactaccttcgctttacggcgggactttacgaagtagaaaaagaagatgcccgggatttttataaaatacgccgttactgcaccgggcataacaccgttgccgaaattgcacatcacaccaatctgcccgtgcagcgcatcgaggagatggtcgcctcgcttcacgaaatcgggatggtgagaaatgaaacccaaccggccaatgaagatctgctgagtaaaaccatccaggcctgtgaaatgtgggccgaacaggtagaagaaacgcatttatttaacaagtttctgtatggcgacaccagccgcaacgtcttgatcggctttttcctggaaacctaccattatatcaaggcgtttccttcgatcatcagcgccgcgcttgataacacagacaaccccgaactcaaaaagatcctcaccgaataccaacaacaagaaacaggacacgaagccttcatattatcgacgttgctgaagctgggcatgaaacgggccgaggtggaaagttcggtgcctttggtctcaacgctcacgttgatcaacatgataagcgagctgttccgcaagcatcccagcagcgtcttcctgatcgccaaggtcattgagtcccacgattttgatcaggcggaagtcacgcaggccatccaggagatcacgcggcactatacgctggcgcccggcacccttgagcccttcttccaacattcgcaaatagactacgaactgggccattcacaactgctcgacaaccatggccatctggtcaccctcgccagcctggaagagacctccttcattttgaacgcgatacatgacatcaaacatgctatcgatcttcagtgccttgaaatcgaggagtattattcaaaagaaggcaactacatcccacgtcaacgggtcgattacttcggtatataa

SEQ ID NO: 450865 - DNA, 1218 bp, Serratia marcescens
atgcttccgattttgctctctgcgctcacgtccggcatttccatggcggtattctttactgccatcgcctggtttatagagagcacattccactccaccctgctggtgtctgccgttctgtcgtccgggtatatcgttaccttttttgctctcccctacataggccacctgacagacaagaccacctgcaaaagaatgctgaatatcatttacatcgcgggcgcgctcaatgccctggcgtttttgctggtcaaccccgccaggcacggcacattgctggcgttcgccgtcattttgttatcaacatcgatattcacgctgatacgggcgtcggaccaggtgatccgttccacctacctgaagaaggtcttacccgaacatagcctgtaccacgccaacagactgctggaaatggtcaggcaagggataaccttcctgtccggcgggattgcctttttaatcctgcaggacaaatccatccaaaacgtttgtctgatagccctggtctgcttctgcgtttcattactcatcaaccggtatattccccgggacgatgtcaatgagaccagagacgcgccgcaggcgaacggcaaaaagctgacgatgtaccataaaggctatgccttcttcctcggcgaaaaaaagcgaattgttgaactgctctcgctgtttccctatatttgcgtcgtctttttaaacgccttatatccggcgctgtttacgcgcataggcgccccggtcagcgcatacgcgctgctcgtcgttccttacgggctgggggcgattgcaggcagcatgatcaattcgcagcgttgggcgtcgtcgttaaaatccgtatacgttattttcggcagcgggttcattatcgggctgctgttgcccttattgttcaaaagcctccccgccgtctacggctgtctttttgcgatcgcgttctgccactcccacatccgggtaagaagaaatacgctgatcatgacccagtcgaaaagccaagagctggcccgcatcctggccttcaatgaggtgctgttcatttgcctgtccacggtgctgggtctgggattgagcctgatagccgaccaactgggcttttggctggcctgggagatagtgatcgccctgaatctgatggtgctgttgctgattgtcctggcgcgcagccaggcgcgcgagccctgcgcgccgatggcgagcgccccggaaaacgaccgttaa

SEQ ID NO: 450866 - DNA, 282 bp, Serratia marcescens
atgaaaaaatcgattatcgcctttacctgcagcttatttttactctccggcctggcacaagcaggcataaccattaatgggcaagaattgtctccaggcggttatatcactgacgagtcaggaaaactaataaaggtcaatgaagtagataaaaatgggaacggcgtaggcgtcaatattaacaacggcggcaatacgcaacaaaaggatgtagaggctcaggtcaacgcaagactgtgcgccaacgcttttatgcggaaaatcttacctcagtgtcgctaa

SEQ ID NO: 450867 - DNA, 615 bp, Serratia marcescens
atgaaaaaaaacatcatcattgccatcattaacaagaatgccttcttcaatttcggactaatgtctctattaagagaatacttccccgaaagtgaatacacgcttctctttaaacaagaactttctgataacatttctgaggatctggtttttttctctatgccaaccaatcgcaaggggcattactgccaaagaaagaaaggtacggcacacggtaaaaccttgtatttctcattgtccccaaaacgaacggcatatatggaggagaaagaacactgcctgaatgaatccggtattatctactttgacgacagccctgggttcgtttaccaactgttagacaaccgatggcaaacacgctctcatccttccacttctgcgcggcgctgcccacaatgcagcgtcagccgcctgaccccgcgggaaaggcaggtcatggattatctgtgcaccggcatcagccagtcgcaggttgcagagcatatgcatctgagcgtcaaaacgatcaatgctcataaacagtcgctgatgcggaaaatggatctgaaaaagaaacaggatttcatttattggttaataaaaagagaaaataacacttatgattacacagactag

SEQ ID NO: 450868 - DNA, 795 bp, Serratia marcescens
atgacaggcctttacggtgtcatatttgtattactaatgttgatgtcatcctctctctttgctgcgcaaggagatatcgactgggcatggaacggaatgacactgaattataccataaagcaattggacgccacaggggttggtggttcgatgaactgcggaaaaaatggcgtgaactgtgcggtcgagatgtacgtagattatattggtccgaatgaacggctattatggcgcgacagtgtcccctcctatgttcccagtaccggtggcacactgcaggaaattatctctatttataactatgagaagctccccaaaagcggcagcattagtaattacaaaaatgagtgtgtggctatatatttgcgtgacaaaacgcgtcttacgttggtagggagtacttgtaacggagcgctcaccccaccgccgccaccggcgcccagtccggtctcttgcgatatcagcccgatatctctgagacatccgcccttagcgcccgaagacatcaacaacaaccgcgtcagcgccaatatgctccttacctgtacccgacaagcaacggtcaggatcaaggctatggccggagacggttcgaatttgctcaaactgcgcgcagacggcagcctgaaatcgacgctgtccgtcaatggtgctgcgggaaatagcgggacgctggtaacggtgcctggcccgtccggtatcggagtgatgtttacttcaaccctgatcgcctctggcaaggtcgaagcgggaaactttagcgccagcggtgtcgcacaaatcagtgttttatag

SEQ ID NO: 450869 - DNA, 846 bp, Serratia marcescens
atgtttttatcattgctttttcctgcaagcgcgcttgcgtacgcaaacatcaatcttagtatatttaaaaactggagctgggatggtcaaagctccaccccctactatatggctatgatttcagattggttcggtgcagatgaccgaccgaacccctgttaccaagccagcagttgcgacttaggatttcagttatatcaatggacaaatggagaagatatattcccaggaaaagcaataggctctgctatttggcttacctccggcagcaggtgggccagagcagatcaaaacatcggcgaaatggggaagtcatttcggcgtaactttgatttcccggtacaaagaacgatgattacaaaccctacagaaccagggattaatacttattatgtcgtttgtctgatgtatcgcgtcaacggcggcggcccccgtattttctatgagacttgtgcaagcaatgccgatagtggtggcggcggtggcggcggaacctggtgtaaggcttattcccaggatgttttaaatttcaattatggcccagtcaacagcgaggaaataaatggcaagaccaaaagtgtaaattacagcgtctggtgcaaccgggactccactgcgaaaatttatacaaaaagcttgaccaatggccgactgtatttacgcgccgacaatagtttgtactcagaccttacaataaaagaccgggacttaagcactggaattaaggaaaactttagtgagggcataactaaaagttataccatcaagtccactctgggttcagtcagcgaagtctcgccgggtacttttaatggcagcaccattatttatatagatattcagtaa

SEQ ID NO: 450870 - DNA, 540 bp, Serratia marcescens
atgaagcagcgaacactgtcagccagctggctttccgcactctggtgcgtcgcattttattttccggccacgaccggcgccgcagccaataacttcaagctgcatggcgccttagtcgccgaaccctgcacgctgcaggaggccgatcttgagctggacttcggcaccgtggtggacaaagagttgtatacgcaccagcgtaccggcggtaagtctttacaaatcaccttgcaagattgcgacctcagcctggggaaaagcgtcaggatcagttttggcgggcaggctaaccttgccctgccgggcctgctggcgctggacgccggcagcgcagcacagggtgtggcgatcggctttgaaaccctgcagggccaaccgttgccgctgaatgactggagctcagacaagatattgacttcgggccataacctcatcgccctgcaggcctatattcgggcagagccggaagcgatagcccaaaagacgattaccctgggaacgctttcggccattaccactttcaccttacgttatgagtga

SEQ ID NO: 450871 - DNA, 492 bp, Serratia marcescens
atgaagttatcgagctattgccgagcggtattgatcatcggcgccggcttctgcacgcaggcatatggcgtggaaaatatgcacttctccggcacgcttatcatgccgccgccctgcaccatcaaccaaggtcagctggtagaagtagattttggcaagcgggtcggggtgaaaaaagttgatggcaaaaattatttgcagacggtggattaccgcattgactgtgatgagcctggcatcagcggcttggtgctgggattgaccgtgaccggcgcggcaacggggttcgacacagcggcgctgcaaaccaacgtgcctgatttaggtattcggctgctgttgaacggagaagccttcactctgaacaaacgcctggcgattaatgccggcagtacccccaccctgcaggcggtgccggtgaaaaaacccggtgtggagctgggggccggtgcctttgaagtcacggcaacgctgttggcggattatcagtag

SEQ ID NO: 450872 - DNA, 471 bp, Serratia marcescens
atgtacttgcccttggttgccctgttcggcaccgtcgcgcatgccaacacgacgttgacggtatcaggttccgttatcgcaccggcgtcctgcgtgattaacgacaataaaatgataaatgtgaatttcggcaaccaggtcattaccacccgcgtaggtaccagtgtcttcggcaccgactatatgcaacaggtgatttataccatgaattgcaagaacgccagcagggtgaaaatgaagatcctgggtgatacggcaccatttaacggcaacattttgcgaaccgagcaaaacgatttaggcgtggcgctgcgcatcggcagcaccttaatggccatcaacagcgctgagtatatatttgattacccagataaaccggcgttgcaggccgtgccggtcaagcgggccggcggcgcgctgacaggcgggcagtttaacgccggcgccaccatggtactgagttttccctga

SEQ ID NO: 450873 - DNA, 648 bp, Serratia marcescens
atgcgagacacgaacgacaaactgggccgcctcgactggcactattacctgacgctggcggcgctggggctcatgatcccggccagtacggcagccgtgctgtggctgctgccgaaagcgcaggctcagacggtagaaggctggtacgacgatggcgcctctggcgtgttgcaggtacgcggggcattaaccgaaagcgcctgccggctgcagatggagagcgcccggcaggatatctggctgggtgaggttggcaccggccggctgcggaacgtcggcgaccagggcgacccggtaagggtaacgctacggctgcaggactgcctgcgtggccccgcaggcgggcaagacaatcgcaatggcgcctggagctgggcgccgcagcaaccggcggtaacggtcagcttcagcgcgccggcggatatcgataacccgcagctggtgcaggtggcgggcgcctcgggtctggcgctgcggctgcgggatgaaggcggccaagatgtccggctgggcagccgcggcaaaccgctgctgctgacgccggggcaaaacagcctgaactatacggtgcagccggaaagaaccgcctcgctgctggcgcccggcgcctggcgcgccaccgtcgattttcggctgagctatgactga

SEQ ID NO: 450874 - DNA, 747 bp, Serratia marcescens
atgaagatgagtaaacagtatgtgatgaccaccgccctattgggcgctttgctggcgcctcaggcacaggcggcgatagcgctggatcgcacccgggtgatcttcgacggtggccagaactcggtcagcctgaacatcagcaaccagaacaagcagctgccgtatctggcgcagggctggctggaagatgtgcagggcaacaagatccaaagcccgctgacggtgctgccgccggtgcaacgggtagagccgggcaagccgagccaggtgaaagtgcaggcgctgccggcggccaaacagctgccgcaggacagagagacgctgtactacttcaacctgcgcgagatcccgccaaagagcgataagcccaacacgctgcagattgccttgcagacgcgcatcaagctgttctatcgcccggcggcgatcgcgccacagcagaatgcggccccctggcaggaacagctgacgttaaccaagcagggtgacaagtatgtcgtcaataacccgacgccgtattacgtgacgttggttgacgccgctgccagaaaagaagcggcggggataaaagactttgaaccgctgatggtgccgccgaagggcagcgcgccgctcggcgtcagcgcagcggcgctgggcagcggcccggtgctgacctacatcaacgactacggcggccgcccgcagctgacctttacctgcggcggcagcgcctgccaggtggcgccggagaaaagcaagtcataa

SEQ ID NO: 450875 - DNA, 2538 bp, Serratia marcescens
atggcactttctcctgcaaggaagcagtttcgcattcagttattaagcctctgtattagcctgacgctgagcgcttttatttcccccattcatgctgctgaagacggtattgaatttaatatggacgtgctggacgttaacgatcgtaaaaatatcgatctgagccagtttacccgcagcggctacattatgccgggcacctatagcatggtgatccatcttaataaaaatgaattaccggagcaaagcgtcagcttttatccgccggagggtgatgagaacggcagccaggcctgtattaccccggcattggttgagcaactgggattaaaaccgacaatggcggcacagctcacctggtggcgcggcggcgagtgtttggatctcaacagcctgcaaggcatggaggcgcgcggcgatctggcgacctccgcactgtatttgagcattccgcaggcctatctggaatataccgcagagaactgggatccgccgtcgcggtgggatgaaggcattccggggctgctgttcgactatgcgctcaacggccaggcccagcgccagcagcgggacggctcgaagcgctacagcctgagcggcaacggcaccgccggcgccaacctgggcgcctggcgcctgcgcgccgactggcaggggcagctcaatcaccaaaccggtagtgggcaaggcaccgagcatcggctggactggggccgttactacgcctatcgcgcgctgccggcgatacgctcacggctgacgctgggtgaggattacctcaactccggcctgttcgacagcttccgctttaccggcgccagcctggtatcggacgacaacatgctgccgcccaacctgcgtggctatgcgccggaagtggtcggggtagcgaaaagcaatgccaaagtcaccatcagccaacaagggcgggtgatttacgagacccaggtggcggcggggccgttccgtattcaagacatcagcgaggcggtgtccggcgagctggacgtacgcattgaagaacaggacggcagcgtgcaggcgttcaagatgaacaccgccagtattccgtatctgacgcgccccggctcctggcgcttcaaaatggcggcgggcaagccatcggactggcagcaccgcagcaatgggccgctgttcggcaccggcgagttttcctggggggtgagcaacggctggtcgctgtacggcggcggcctgttcggcggcgattataacgcactctcgctgggtatcggccgcgatttgatgctgctgggtgcactgtcgttcgacgccactcagtcgcgggcgcggctgccgcagcaggacggcacgctgagcggcggttcgtaccgcctgagctattcgaagaccttcgacgagaccgacagccaggtgaccttcgccggctaccgcttctcggagcaggacttcatgagcatgagcgagtatctcgacgcgcgttactacggcggccgggtgggcaacaacaaggagatgtacaccatcacctttaaccagcagttccgggacatcggcctgagcctgtacctgaactatgaccaccagacctattgggatcggccggctaatgatcgctacaacctgacgctgtcacgctacttcgacatcggccggtttaaaaacctgagcctgtcgctgtcgggctaccgcaacaagtaccacaacgtcaacgacgacggcatgtatctgtcgctgtcgctaccgtggggcaacggcggcaacctcagctacaacgccatggtgaatcggcgcgataccacccaccgggtggggtactacgaccggctggacgagcacaacaattatcagttgagcgtcggcagttcgcgccagggcgccaacctgaacggttattacatccatgagggcgatatggcgcaggtcagcgccaacgccagctaccaggagggcagctacagcgcgctggggttcagcacccagggcggggccaccgcaaccctgcagggcggcgcgctgcaccgcaccggcatgccgggcgccacccggctgctgctggataccggcggcgtggccggggtgccggtgcgcggttacggcagcaccgtcgagacgaacccgtggggcaaagcagtggtgacagacgtcaatagctactaccgcagcagcgccaacatcgatctgaataagctgggggacaacgccgaggcgaccaaatcggtggtgcaggcgacgctgactgagggcgctatcggctaccgcaaatttgatgtgatcgccggggagaaggcgatggcgatcatcaaactggcagacggcagtacgccgccgttcggcgccacggtgatgaacgcccataaacaggaaacagggatagtgaacgacggcggcagcgtgtacctgagcggcatcaagccaggggaccgtatgaccgtgcactggaacggcgcggcgcagtgcgccatcagcctgccgcaggtgctgccggccgcggaggcgctgagtaacctgctgctgccgtgcggtgccgtagcgcaaaacgataaccctatttga

SEQ ID NO: 450876 - DNA, 546 bp, Serratia marcescens
atgaatcgcatctcagggaaggtcatgtttccttgcctattggccgcgtctctttcgggtcatgccgtgcaggctgcttatcagccccatgactgggggcgcgtcaatatgcaagggagcataattgactccgcctgcgcgattgccaccgagagtcaggaacaggtgattgatatggatgtggtacctgtggcagagattctgcgcaccggctggggaaatacttaccccctttccattgagttaatcaactgcacattaacgccccccaaaggcgaggtggaaaatagcaggcagtttcagatgactttcgacggcgaggcggatggcaaactattcggtatcggcgggaaagcaaaaggcattgcgctgcaaatttcggatgaacggggaaatattgccacaccagggaatccattacctgtcggaaataatctttacagcggcatgcggcttaattatcacctgcgagttgtcagcaacagcaggccgctgcatgccggggtttattctacagcgctgcgtttcaggctggattattactga

SEQ ID NO: 450877 - DNA, 555 bp, Serratia marcescens
atgaaactgaataaaatcatgatggcggcagcactggctttcggcgtaacttctgtggctcacgcagcggtcaaagatcagggccacggtaccgtgacctttaaaggttccattatcgaagcgccatgctcaattacgcctgaaaccgtcgatcagaccgttaacctgggccaggtgtccaacgtggcactgaaagacggcggccagtcaaatcctgaaaacttccaaatcaaactggagaactgcgatttgatctccgacccggcagatccgaagaagaacaataccgtatccatcaccttcaccggtgcagcctccgttgatgacgccaagctgctgggcattaccggcacggcaaaaggcgccggcatcgcgattaccgacggctccggcaaactgatcgagctgggcaaagcctccagcgcgcagacgctgggcaacggcagcaacaccctgagcttctccgcttatctgcagggcaacaaggcttccaccgcagttatcaccccgggtgacttccagtccgtggctgacttcactctggcttaccagtaa

SEQ ID NO: 450878 - DNA, 294 bp, Serratia marcescens
atgctcttcccaaacgtcgttaagcaatgtttcccggtgaaccacaacatcattttttctaacaaaaatggacagcattctgcgcgttggattctgcaacaacgttttactgttatcgtcatctacccgctcaagggtgccatcattttcatcgtatatgatggtttcatttattataaatttcatatatcaatccatttaacttacctgtccgatttcaattctgctatttacttccacctttttcaatgcaccgacgaacgaatcaataagatgattcccaataaatattag

SEQ ID NO: 450879 - DNA, 306 bp, Serratia marcescens
atgttgtcttcgctattgctgatgggggtaatcttcatggtttgtgtgatcggctggaagtttttcttccagtcaccacctgcagggataaacattgccagtaaaggtgcttacaagagctgcaacatttatatcgtcaaaaatgagagtgcggacctggcggagataaaaaaggctatatctcaggcggggtttgactgtagcgtgaatgccaacgtctattactatggcaggcaggaaaagcagaaaatgatgctggcctattgcccggtggatatcctttccccctgcagaaatactggctaa

SEQ ID NO: 450880 - DNA, 489 bp, Serratia marcescens
atgaaaacgagaagctataagtccattccgctgaaggcctacgctatcgcgctgctgctgctgtgcgcagcgatcgcgtttgtgttcagcaaaacacgccaggccaacacgcccgttgcttgctcaacggtgatcaaaaccgccatcactctcgacaacagatctacacatggccttattttggtcaacaccgtgcccatcgcctcgaaccagatgaaaattctgctcagcggcaagattgaagagggtgataaagcctataccgtctccagagagctggttttacgctaccgctatagtgacacctatcatcccatgaccctcgagaaatccatcaatcgggtaagagataccgttgcgcaggcggagttggaaaagttattccctcaacaagggcagtatttgcacatgaaaatcaaccgtattgatgaaaacacttacgtgttctccgataattactcccctatattcatctgcaccacgaattga

SEQ ID NO: 450881 - DNA, 777 bp, Serratia marcescens
atgaagttcattattaataaaagaattagatatcatgaagataactccagtattgatacgctggataattcagccgagcccgtcatactgacggcaacgttgaatcgcctgctggcgttatttgtcaagaacaacaacctggtgctttccagggagcatgtgctgacaacagtgtgggaagaacatgggcaagtggcttccgacaataatttgaataactccatgtcccaactgcgcaagattctcgcctctttcggcgaagaggacatactggtcacgctgcccagacaaggttttacctttacggcccaggaaatcaataccatagatgatcagatcatcatcaatgaacagagcctcgctcaaagtgtcccttctcctgtcgctcatcccacactcaaagcaatcctcttgctactggtgtgcctgctgagcggagtgctggcatttctggcgattaactttgttaacaattccggcgtttctcccgacgattcgatcgaactgggtgctgtagataactgccatgtcagcatcatgtctgcccatcataaagttgcccacagccagttggagctcaacacaataaaagccaagatcgaccaactcggtttacgttgtcagatccccgccaaaatttattactacgatacggacctgctgacacagagcgccagcggccaggcccacacccgttttatcgcttactgccccttaactcccggcacacaacagatatcccgctgcgaaaactattatgaaaacgagaagctataa

SEQ ID NO: 450882 - DNA, 744 bp, Serratia marcescens
atgaatcacctgcagaataaaaccgctgttatcactggcgcgtcgtcgggcattggcgccgcaaccgcgctggaacttgcacgtcatggcgtgaatatcgtagccgcagcattggatcagactggccttgataggctggtaaaggatattgagtcagccggcggccatgctaccggtctggtgacggatgtgactcgtcttgaagacacacaggcgctggtaaagcatgctactgacaccttcggtactgtagatatcctgattaacaacgcaggactgatgctgttttcagcctggagtgacatcgcgtggaacgactggaacaagatggtcgacgtaaacatcaaggggtatctgaatgctattgcgtccgtactcccggttatgcttagcaaaagtgacggacagatcctgaacatggcctctgtcgctgggcaccaggttgacgccggcgcgggtgtgtacagtgcgaccaaattctttgtacacgccatggcggaatctatgcgtaaggatctgggtgtgaataagggcatcagggtcaataccatcagcccgggcgttattaacacgggatgggctgacaaggtgagcgatccggaaggacgtaaggtggcgcaggagctgacaaagattgctatcagcccgcaggatgtggcaaatgcggtggtctatgctctcaaccagcctaagaacgtgacggtcaacgatcttatcgtatcccctacgaagcagaactggtaa

SEQ ID NO: 450883 - DNA, 1104 bp, Serratia marcescens
atgactgacaacagtaaccgtaccgatctcttttcccctgtgacaatggggaaacttcagctggctaatcgtatcgttatggcgcctgtcacccgtagccgctatggtgaagagggtataccaaatgagttacatgcaacttactacgctcagcgcgccagcgctggcctgattatttcagaagcgacgaatatttcagctcagggccgcgggtatgcggcaacgccgggtatctggagtgaagagcaggtcgcaggctggaaaaaggtcaccgatgccgttcacgcagaaggcggaaaaatcgtctgtcagctctggcatgtaggccgtttttcaagcgttgaactgcagcctaacggcgagtgtcctgtcgccccctccgctatcaaggccgaaggccagacttataccgtcaatggcttcgtaccggtatcgacgccgcgcgcgctcgaaaccgacgaaatcccgggcattattgagcagtataaacgagctgctgaaaatgccctgcgcgcaggttttgacggcgtggaagtgcactctgcaaacagctatctgctcgatcagttcttgcgcgactcaaccaatcagcggaccgatgcctacggcggatctattgaaaaccgtgcgcgcctgaccctggaagtaactgaagcgatcgtcaacatttggggtaacgagcgggttggtatccgcctttcaccggtaacgcctgatgcgggtaacacgccgccggacagcaacgtgatggcaatgtacggatacctgattcagcaacttaaccgttttaacctcgcgtatctgcactttgttgagggggcgacggcgacctcacgtgaggtacctgccgatgtggatatggatgcgctgagcgcccagttcgacggcccgttcatcggtaacaacaactacgaccttgagatggccatcagtcgccgtgatgccgggataatcgacgccgtcgccttcggtcgcttgtttatttccaacccggatctggttaaacgtctgcgttatggtgccgagctgaccatcgcgccgaaagaagcctactacggcggcggcgcgaaaggttacaccgactggccggaagggaattactga

SEQ ID NO: 450884 - DNA, 582 bp, Serratia marcescens
atgaaaaaacaaacggctaacgtgcgtcagcacatcattgatgttgcccgaacgcttatcacccataaaggttatagcgccgtcggccttgctgagattgtcaaagccgctggcattcctaaaggatccttctattactacttccagtccaaggaagagtttgctgaagctttgctggaacattacttcactcattatctcgttcaggttgaagagcagttgtgcggcagccaacccgcaagagagcggctgctgcgctactttacattttggaaggccacacagggagcagatctgccggaaagcaagtgccttgtcgtcaaactcggggcagaagtctgcgaccagtacgacagaatgcgaagcgtcctggcaaacggaacccatgagattatccttaggatcacggcgtgcatacaacaggggcaggaggatggctccctgccatcaggtgtggatgcagaggctcttgcagaagagctttaccagctgtggctgggcgcatccctgatggcaaaaattcatacgcctgaacaggcgttcgacaaagcaatgagtgcaacaaagcggctgctcgcgtag

SEQ ID NO: 450885 - DNA, 642 bp, Serratia marcescens
atgtccgacatgaagacgaaaaacgcaggtgccactggcgagaagccaaaaggccggccgcgcagctttgatcgtgactgggccctgctcagggcgctggacattttctggcgtaaagggtttgagccagcatcggtagccgagctttgcgctgcgatggaaatcaatccgcccagcctttattccgccttcggtaacaaggctaaacttttcctggaggccgtgagctattacgagagggtctactggaaggcaacctgggagcggcttgaagaagagcccgatatcacgcgggcgattgataagttcttcagcgaagcggctgatattctgctttcgccttccgcaccttgtggctgcatggtggtccttgcggccatcaacgtctctcaggagtctgctgacgttgtggaggcggtaagcatactcaggcaggaaggaaaagacctgtttgaaaagcgactgcgcagggctgtacatgaagagcagttacctgcagataccggcaccgccgcgctggccaccgcgctgaatacgcttctggaggggatgtcgatcgaggcgaaagatggcgccacactggaaagcctcagagcaaccggccagtatgcgtcgcgtctgctgccttgcagaaaacagtga

SEQ ID NO: 450886 - DNA, 651 bp, Serratia marcescens
atgtcagaactcgcgttctccttcagccattatctgcagtcctccggagaggcaggggttgtgttgtatttcgtaatttttgtcacggccacgctgatgtttttcccggcttctctgctgaccgcactgtccgggtggctgttcggcgctatgggaggaaccgtgctggctctgctggcgggcaccacctccgctctggtcgcgttttgcctcagtaaaagtcatttatttccggttgcatcgcgcgctgcaggccggaaccgctatctgaaaaccctgctttcactgtcgcataacaatgccctgctgctgatcctgttgcttcgcctgagctcggtcctgccgttcacgccgctaaattacgtgcttggggtcagcggtgtatcgctacgaaagtacgccgcagcgacggtgtttgggctgatccccggcacatatgtgtatgccgctgccgggagtgttatttctgacgtccaggtgcttctgcacggcggtttcagcgccggggatattttacagcgagcggatgtgttaaccggcatggcagttgctgtggcgggtctgatgctgctgtttgtcataaaaaagattttcaaccgcatagcgggcatccgtgcggatacccgtaacaacataatcggagacagatga

SEQ ID NO: 450887 - DNA, 384 bp, Serratia marcescens
atgaccgacttaacttatgtgcaggaatataacgccatcgtggaagtcctcagcaaatataacgaaggcggaaagcaggcaaagagtgagataatgaagcccgcattcagcgaccaggccacgatttttggtgttgacgctgatgcaaatctcacgggcggtccgatccagggcctcttcgacactatcgataccgcgttccagccttcaccggaggcgaaggccgccattgtatacgtcgacatcgtgggcaccgcggcaagcgcgcgtatcgataccgacgatatttcaggcttccgttttacggactttttcaacctgctgaaggtcaacgggcgctggattgtagtgagcaaaatttaccatacccatgccgcttcctga

SEQ ID NO: 450888 - DNA, 387 bp, Serratia marcescens
atgagccagaatataaaaaccgtcccagtttctgcctatgaggccgttctcgacacggcgcgtcgctacgttgacggcctgaaaaaaggctgcgccgaaacggttgcagaagcgtttcacaaggacgccgtcatgtatggctttactgacggtgaactgctgggagggtctatcgacaacctttataaattcatccgtgaaaacggcagtgcgccagagattgaaacgcatctggatgtgctggccatcactccgaccacggcagtggtgcgcgtggacatggaaaaggatgctatcggtgccgactataacgactacctgaccctcatccgtatcgacggtcgctggcaggttattgcgaaagtctatcaccagtttacgggctga

SEQ ID NO: 450889 - DNA, 660 bp, Serratia marcescens
atgagtacggtgtttattatcggaggcgcaggcaaggtgggccggcgcctggccagaattcttactgagaaagggcacgctgttcatgcgctgcaccgtcagccggagcaggcgcacttgattcgtcagcagggagcaatgcctgtcagcgggagcctgacggagctggatgccgaggctctggcgaccatgatgagaggctgcgatgtggtggtcttctcggccggtgccggcggcaaaggtggcccggaaatgacgaacgccattgacggagaagggtttaagacggccgcagaggcggccgcgctggccagcatttcgcgcttcctgctggtttcagcatttccggaggcctcaagaaatgaatccacctcggcgtcgtttgaaaactatatgcgggtgaaaaagcaggcagaagtcgtgctgaccgcaagctcgctggactgggtcattctgcgtcccggcctgttgctggatgataaaggttcaggatatgtccgcgccgggctggccataccttacggggaggtcgcccgggataacgtggcggccacgctggctgaaattatcgctcagccccgcgtcagccgcgtcatcattgagctgaccgacggtgaggtgccggtacgaaaggcggttcagcagatggcggaacgctga

SEQ ID NO: 450890 - DNA, 681 bp, Serratia marcescens
atgcacaggtccgctgattcagaaccggatatgcggctactgctgctcggcgcaacggggctcgtgggcagtcatgtccttcaacaggcgatgtccagcccgcacatcggtactgttattgcgccgacgcgaaaacctatcgtatggtgcgccacaggccatacccggcttattaatcccctgatcgactttgatgcccccgacgctgacgctctggagtggcgcgttgacgcggttatctgtgcgctcggcaccacaattgccagagccggcagccgggaggcattccggcgggttgattatgactatcctctgatgtttgcccggctggcacgtaatggcggcgcctcagcgttcgcgctgacctcggcgaccggcgcaaatgtcggctcccgattcttttataacctggtgaagggggagcttgaacaggcgctgaggcaggaaaatttcccctcactgacgctggtccgtcccggcgttattgccggcgatcgggctgaatcccgcccgggtgaagcggcgctgaagcaggtgctcaggctcttatcgccggttctgccacgcagctggcagctcagcccggctgaagacatagcccgccatctcctcacggctgtgaccacacccaggtcgggcattcatattgtttctgcgggtgaaataaattctgcaagataa

SEQ ID NO: 450891 - DNA, 441 bp, Serratia marcescens
atgtcagtagtgaactttaatgccgtggttaacgcccatgcggatcgcgtatggcagacgctcagccagttcggacgcatcagtgactggcatcctgctatctgcagcagcgaaatcgaagataatcagcccgacggtcgcccgggctgccggcgccgactggtacttgaaaacggcgatgtcctgcgcgaagagctcctcatgctggatgcaggtaagcgggccttctcatatcgctttattgaagccccgctggccgtagatggctatgtggcaacagtcagcctcatacctctgagcgatagcgacgaaacggtcattgcctggcaggcgagttttgaagcccggtcccgcaacgaggtgcaagcgatggaggctagcgttctggagctgatagcgtcaggtcaccgcagcctcgctgcctaccttgaaaacctgtaa

SEQ ID NO: 450892 - DNA, 609 bp, Serratia marcescens
atgcttgactacattgtgcccgtagagccagcaaaggcctacaggctgataaatcatggaccagcaacgctggtctctgcgcgctataacggaacggacaacgtcatggcggcgtcatgggtctgcgccctggattacgaaccggcgcgactgaccgtcgtgctggacaagaccgcattcacccgcgggttgattgaaaaaagccgttcctttgttattcaggtcccggtggcaggccaggcctcactcgtgcactacctcggttcacattcactgtcctgcgaagcggataaactcgctcagtccggggtgtcgctgtttgaactgcccggcgccgatgtgccactggtgtcaggatgtgccgcgtggctgtattgcgaactcatccctgaagcacataaccagcaggcctatgatttattcatcggagaaataaaagcggcctgggctgacagtcgcgcttttaaggacggacactggcaatttgaacggggagcggcggactggcgaagtctgcactatatcgcgggcggccacttttacactaccggcgatccgctggacgtgccggacgcgccgctgcaaacgcccggagagccgcaaggctga

SEQ ID NO: 450893 - DNA, 870 bp, Serratia marcescens
atgatccgtgaactgaaaacgtttctgatggtggcaaaggaaggatcctttgcggcggctggcaataaaattggtctgacgcaggcggccgtcagcgcccagatgcagaggctggaggccgacttaaacttcccgttgtttgaccggtcgggtagaaacgcacgtctgaaccagaaagggctacaactgatctctcaggcacaggaactcctctcgttgtatgacgggctgggtgagcgactgaatttggctacccccggtaagaccatcacgataggcgcaattgcctcgatacagcgtacgctgctgccggatgcgctgacggtgttttgcagacacagcgccggctgccgtatccgcgttataccgggcctgtcgatggaactgattaaccttgtggacgccggtgaaatagatatggccgcggtgctgaaacctccgtttgcactaccaacggggctgcagtggagtacgctggcacatgaaccttttcatctcatcgtgccaaaaggtgttgccggtgacgatattgcagcgctgctgagcgaccagccttttatccgctatgatcgttcgtccttcggtggacgccaggttgatcgctttcttcgcgaaatgaacctctcggtcaatgaaatctgcgaggtggacgagctggaggccatcctcaagctcgtcagtaatggcatgggggttgctctgctgccccggacggccaactggcggcgctggccggcttccgtcagggccatcggtctgaatgagaaggttttttaccgggacgtcgggcttattcaccgcccgcttgaaaaccttgacgataacgtcaggcggatctccgagcagattatcctgcaggcggggcggtaa

SEQ ID NO: 450894 - DNA, 426 bp, Serratia marcescens
atgagcctttcccccttccatctggcgatccctgtctatgacctgaaagcaacacgtcgtttttacggcgaggtcttcggcctgagtgaaggccgttcgagcgaacagtgggttgactttgacttttacggccatcagttggtcattcacgaacatcctaaaaccgcatcgcaggagagcgtgcattccaattctgtcgacggtcatgacgtacccgtcccgcactttggcatcatcctgaagtgggaggaatgggaggcacttgcagaacgcctcagatcatttaacaccaaatttgtcatcgaaccttacatccgctttaagggacaggtcggagagcaggccaccatgtttttattcgatccctgtggcaacgcgcttgagttcaaggcgttcaaggatatgagtcagcttttcgcaaaatga

SEQ ID NO: 450895 - DNA, 1260 bp, Serratia marcescens
atgaagaaaataacactggtttggcagatagttattggacttgtacttggaataattgtgggatggtattttaatacgcaccctgagtatcagcagtgggtcagccacgaaatccttaaaccgctgggcgatatttttatcaaaatgatgaaaatggtcgtggtgcctattgtcttctgttgcatgatcctgggcataaccggaagcggtgacaacaagtcgttcggacgaatgggcgcgaaagcgctcggttacttctttatcgtcacgggactggccaccatctttggactggtgctggctaaccttatttccccaggcgaaggcaccagtattcagggaatggcacacggcggcggacacatgaaaatggagccggcgcggggcgcactgattattcttcagaatatcgttcctgataacctgtttgttgcactctccgagggcaaactgctgtcagttttgttctttgccgtgctgtttggcctggcgctcaatggccttcccagggataaaacagccccgttcctcagcgttctccaaagcgtatcagatggcatgttcagggtggtgtccattgtcatggcctacgcgccggttggcgtcttcggcatgattggtgccaccgtgtccacttttggtttcgcttcccttctgccgctgctcaagcttgtaggcaccgtttatctcggtctggttttattcgccctgatcgtgctgggcggtatctgcgcgctgatcggagaaaacgtctttaagctgataaaacattttcgtcaggaactggtgctggcattctcaagcgccgcttctgcagcggttatgccacagctgatgtacaaacttgaacgctatggcgtaccgggtcggatcgtcagctttgtggtgcccgtgggatatgcttttaatcttgacggcgcgtcgatatttctcggtgtggcgaccatatttgtggcccagctttacggcattgaacttacgctgatgcaacagatcattttagttgtcacaatggtgctaacgtcgaaaggagcagccggtgtgccggggtttgccatcctgattctctcagccactctggcgtctgcgggattaccgcttgacgccgttgccttgatagccgggatattccgtattattgacagcggaacaacaaccctcaacgtcctgggaaatgttgttgctccattggtcattaaccggtgggaaaaagaaccacgagcctttgaaagctctcagccggacctgagtaaacgctga

SEQ ID NO: 450896 - DNA, 2406 bp, Serratia marcescens
atggataaatatctgctcagcgagcgtgatatctgcacaaaattcattacaccagctattcaacaagctggctggcagcagcatcagttccgagaggaagtcaacctcaccgacggtcgtgtcatggttcgcggtaagatggcctctcgagtaaaaaatcctgaagctaaaggcggtcctaaacgtgccgattatgtgctttatgcaagaccaaacgtgccgatcgcggttgtagaggccaaacaggcgaagttctccattgggcacggtatgcaacaagctctagcctatgctgaaatgctagacgcgccgtttgccattagtagcaatggcgatggttttctcctgcatgaccgaacaggcctttccctacctgtcgaacgagaacttcagcttacccagttcccgaccttggccgatttgtggacggtatatcaacaatggaaaggattagttgcacctgaagctgtaacgctgattgaacagccgttttataccgatggtagcggtcgcgaaccacgttactatcagcgtgtggcaatcaaccgtgccattgaagcagtagccagaaggcaagagcgaatattgctggtcatggccactggtacagggaaaacgtatacagcttttcagattatttggcgtttatggaaagcaaaatccaagaaacgtattctatttttggccgatcgcaatatcctcgtcgaccagaccatgcagcaggatttcgcccctttcggcgaggtgatgcacaagatcactaaccgtgaagtcaaaaagaactatgagatctatcttgctctttaccaagcggtaacggggaaagaagaatggaagcaaatctatcgccagtttccaggggattttttcgacttagtcgtgattgatgagtgccatcgtggcagtgccgcggaagactcagcatggcgcgatatactagattatttcactacagccactcaccttggtctgactgccacaccgaaagaaaccaaggaaacaagcaataccagctatttcggagaccctatttatacctattcgctcaagcagggtattgaagacggttttcttgccccctacaaggtgatccgcattgcaaccgatgttgatgcagtcggctacataccagagaaggggaaaatcgataagctaggccaggccatggagcaacgacagtacaacacaaaagactttgatcgcactttagtactggagaaacgcacagctcttgtcgccaacaaggtatgggaatacctccaagcaaccgagccgatggccaagacgattgttttttgtgacgaccaagatcacgctgagaggatgcgacaagagttggtaaagctcatccccggagccacaaataatcgtcgttacgtcatgcgaattaccggagacgataacgaagggaaagcacagctctcttattttatcgacaacgatgaaccttacccggttattgccactacctctaagctactcaccacgggcgttgatgctaaaacctgcaagctgattgtcttggaccaaagtatcaactcgatgacggagttcaaacaaattattggccgcggcacgcgcctgcgcgaagactaccaaaaactctacttcaccatcatggactttaaaggcgctacgcgactgtttgctgatcccgatttcgacggcgaaccggtggtgatctacgaacctcgccctgaggatcctgtggtaccgccagatgtcgtcacgccccttagtatagaagaacccgaacctccaccctatgaccctagtctcacagataaggctggtcacagcgcaggccgagtaaggtatgtgattgatgacgtcaatgtgtgtttagcggtagaacgctcgcaatatcttgatgtcgacggcaagctcatcactgaggactaccgagacctgcttaaaagtgacattaaaagcaccttgcgggctaaatttggtaacctaaccaactttctacggcgctggagcaacgccgagcgcaaacaagcagtattagaggaattagccgaacatggcgtaccattcgagatcctgcaacaggctgtcgctaatggcagcgaactggatgcttttgacctggtaacccacgtcgcctttgatcagaagccactcactcggcgtgagcgggccaacaacgtgaaaaagcgtgatgtgttcggtaaatacggtgagcaagctaaggccgtactggaaggtctactcgaaaaatttgccgatcatggtgtacaagacatagaggatgccaacgtgctggaattaccaccatttgaccaatttggtagtaaaacacaaatccggcgggggatttttggtggcgtagagcaatacactcaagccgtgaaggcgttggaactggctctctacgacatatccgaacaaaaacaggcttga

SEQ ID NO: 450897 - DNA, 1977 bp, Serratia marcescens
atggacgcacagcagtttttgaccgagtttgggcatattgccaatgcgccgggaggtgtgggcaagctgcgaaaacttgtactccatctagcagtgtcaggaaaactgactgttcaagtcgtaggtgaggaggctagcgatttcttggatgaaatcaaagcaacgcaggcatcccttcagtcagacgggaggattcgagtaaatcggaagattcgatcggagaagtgtcagggaggatggcaaatacctcagaattggatttggtgccaatttggtgaactttgcagcttttcggcgggtaagacaccatcgcgcaaagaggataggtactggaataccggtgactatccttggttctcgatcgccgatatgagtcatggccaagtcgtcacctcaccaagtgagacagtctccgagtatgctcgtacagaagtattcaaatcagagcccagcccagttggctctcttttgatgagcttcaagctgtcgattggtaagctaagcttgctcggcgtttctgcatatcacaatgaagcaatcattacgattgatccattcgcgccagagctcaaagattatttcttcaaatgccttaatggatttgatctttctacggggaacaaggcagccatcaaagggaatactcttaaccaggattccctatccaacatttttgtagctcttccaccgaagagcgaaatatcccgcatcgtcgccaaagtcaatgagctgatggccttgtgcgacaagttggaagcgcagcaacaaacccgccgcaaactgcaaaacaagctgcgccagtccatgttacaagcggtagccagcgccaccagcccgcacgaactgcaaactagttggacgcgtttggctgacaattttggtaggctgtttcatgcgccggaggatgtggatgagttcgtcgcagagctcaaaaatattgctgtccgtggtttgctttctttgccatcaacatcgcttgcacctgtgggcggtatcatagccgattgcgatagcttacgcggccaatacatctcgtcaggtttgatgcgtcggcagaaactcatctcagttgctgactcggacgttgtatatccagaacattgggctattgcaccgtttgataaggtcgcggtggttattggtggggtaactaaaggtcgtgacttgcgtggacgagatgtcatgacgtgcccttatctgtctgttgccaacgttcaacgcggattcttcaagctgactgatctgaaaacaatccagatcggaaaacaggagttgaataaatatcttgtccaagaaggtgatttgctcatcactgaaggcggtgattgggacaaggtcggtcgcacggcaatatggcgaggaggtgtcgataactgcctccatcaaaaccacgtattcaaggctcgggttccttcattgtccttgctgaacgaatgggtcgaacttgtattcaattcaggtatcggtcgtgactatttcgccggggcttcaaaacagacaaccaatctggcttcaatcaatatgacgcaacttcgaagctttccaatgcctattccaccgcttgatgagcagcgagcagttttggccaaacttgatgcactgacgaagcaagcgggtatttggcgcaaaaagctagagagtaagaatcacttggcattattgctggctagcgcgactgttgcagcatttaccggcctaactatcgaacaacaagaggaacccatgaaagccccgcaaaccgagttgattgccccgttacgcttgggcaccacacccagcatcaaagcccgggcaccattggctaccattctggcacgtcaccacggcgaaatgagtgccaaggatttatggcagcgctttggcggtgagattgatgccttctacgcgcaactgaaaacagaagtggtgcacggttggatcttggagccggcccccgccgagatgcgtgaaaaaccagccgacacggtgagcgcctga

SEQ ID NO: 450898 - DNA, 291 bp, Serratia marcescens
atgaatttatatctctctccggcggtgcttatcgcgcatcgcctgggcatctttgagtttattgctctgcacccccgcaacctgaccgatatatgcgctcaggccaatgtggaaagacgcccggcggaaacgttgatcatggcgctattggcattgaaattgatcgccagagacggcgaaacatttcatcttacgccggaagcggaaccctttttgttaaaaaaaccgcattatttcggttatttctggaacttggtcagcagcctttggccgccgcgggatgcggcctga

SEQ ID NO: 450899 - DNA, 564 bp, Serratia marcescens
atggaactaggctcattaacagattggattagtgcaggtgctaatatattcatggcgggggctgccgtttatgcagcctttaatgctaaagactggctttcacctaaattaaacgatcgtaaagtaaaattcgcagatgaaataattgatggcttctgtagactacagcaagaagcttcatatcttaactctgatgttaaaaatattattaacacagatcctgatagccaaggtgataaaactaactttgcaaaacactgggaaaagttgcgtgatagagaatccatctataggaaaaataccatatccttgagatctgacatggcaagaatggaactatgggggttaaaaccaaaaaacaagaatgaatttgatgcgataatatcggcacatttaaatctatcctatactatcgaaaatgcgttatcaattggggcttatgatactcagagtagaatgagtaatagttttgagtatgatggcgagctaagtaaaaagcacaaaattgttcgtgcatcacacaacaaaataattaaacactattcagatttgtttattgattaa

SEQ ID NO: 450900 - DNA, 1101 bp, Serratia marcescens; identical to SEQ ID NO: 426043

SEQ ID NO: 450901 - DNA, 558 bp, Serratia marcescens
atgaatacagcctccgtttccgtcagccaaagccaggcgatacccaagctccgctggctgaggatcgtgccgccgatcctcatcacctgcatcatttcttacatggaccgggtcaatatcgccttcgccatgcccggcggcatggatgacgaactcggcatcaccacctcgatggccgggctggccggcggcattttcttcatcggttacctgtttctgcaggtgcccggcggcaagctggcggtatacggcaacggcaagaaattcatcggctggtcactgttggcatgggcggtgatctcggtgctgaccggcctggtcaccaaccaataccagctgctgttcctgcgcttcgccctcggcgtttccgaaggcggcatgctgccggtggtgctgaccatgatcagcaactggttcccggataaggagcgcggccgcgccaacgccatcgtcatcatgttcgtaccgatcgccggcatcctcaccgccccgctgtcgggttggatcatcaccgcctgggactggcgcatgctgttcctggtggagggggctctgtag

SEQ ID NO: 450902 - DNA, 1158 bp, Serratia marcescens
atgataaacgcgttaacgctggatgcaggcgcgactatccgcccggctttcatgctcaaaatgagcggcaaagacattacccataacgtcagcgatcggctgttgtcgctgacgctgacggataacagggggttcgaagccgaccagctcgacatagaactcgatgacgccgacgggcttgtcgttatgcctgcgcgtggcgcggtgctgaatctgcgccttggctggcagggacagccgctttttaacaaaggcgatttcacggtcgatgaaatcgaacaccggggcgcgccggacacgctgaccattcgcgcccggagcgcggattttcgcgggacactcaactcgcggcgcgaacagtcataccacgacaccacgctcgccggggtggtggaggcgattgcagcccgcaacaaactcacggccagcgtggcgcaggcgctgcaggacattaaaatcccgcacatggaccagtcgcaggagtccgacgccaagttcctgacccgactcgccacccggaacggggcggaggtttcggtcaaagctggaaagctgcttttcctcaaggccggaaacggcgtcacggctagtggtaagccgattgcaccgatggtgattgagcgccgcgacggcgatcggcatcagttcgctattgctgaccggggcgcatataccggcgtcacggcgaaatggctgcatacaaaagacccgaagccgcaaaaacagaaggtaaagctcaagcgtaagccgaagccgcagcacctgcgcgccctgcagcacccgaaagccaaaccggcaccgaaagttaaagcggccaagccgaaagagacgaaagagggggagtatatggccggggctgcggataacgtttttgcgctgacgacagtctacgccagcaaggcgcaggcgatgcgagccgcgcaggctaaatgggaaaagctacagcgaggcgttgcggagttttcaatcagccttgccatggggcgcgcggatttgtacccggagacgccggtcacggtgaaggggtttaagagcatcatagacgcgcaggcgtggacggtcactaaggtgactcactcgcttaattccggcggctacacgacggcgctagagcttgaggtcaggcttaatgatgtggagtacgaggaggaaagttaa

SEQ ID NO: 450903 - DNA, 477 bp, Serratia marcescens
atgatgatgacactagggatgtttgtgtttcagctgcagacgctgccctatcagaccatgctgcgcactgttgattaccggtggccgtctaacagccgtatcggccagcgtccggcgctgcagttcctcggcgttaacgaggagaaaattaccctgtcgggtgcactgctgccggaaattaccggcggtaaaatctcgctgcagctgcttgacgtcatggccgccgaggggaaagcgtggccgttactggagggaaccggcacgatttacgggatgtttgtggtgaacaacgtcagcgaaacccgcacggagtttttttctgacggcagcgcccggcggattgagttctcgctcacgctgacccgtgtcgatgagtcgttaacggccatgtacggggatttgcggtcgcaagctgagagcctgctcggccgtgccggtgggctggcgggcgagctgaccggcggggtgttctcatga

SEQ ID NO: 450904 - DNA, 2448 bp, Serratia marcescens
atgagtaacaacgtcaagttgcaggtgctactcaaagccgttgaccaagccagccgcccgttcaaaagcatccagacagcgagtaaatcgctgtctggcgatattcgcaacacgcaaagaaacctcaaggagctgaatgctcaggccgggcgtgttgaaggtttccgaaaatcgagcgcgcagcttgcaattaccggcaatgagctgaaaaaagccaaacaggaagccgccgcgctagcggtgcagttcaaaaataccgaaaagccgacccgtgcacaggtgcaggtgatggaagcggccaagcgttcggccgccgagctgcagctcaagtacaacgggttgcggcagtcagtgcaacgccaacggcaagagctgacgcaggcaggcatcaacacgcgcacgctggccgctgatgaacggcgcctgaaatcgtccatcagtgaaaccactgcgcagctgaaccgccagcgtgaggcgcttgcgcgcgtcagccgccagcaggaaaagctcaacgtggtaaagcagcgctatcaggccgggaaacagctggccgggagcgcggccgggatgggagctgccggggtggggatggcgacggccggaggcatggccgaggctgcgctgctgaaatccggttatgagttctcgctgaaaaactccacgctgcagggtgtgctcggccttgagaaaggctcggcagatatgcaggcattgcgcacccaggcgcgccagattggcgacaacacggcagcatcagccgatgacgccgccggggcgcaaatcatcatcgccaaagcaggcggcgacaaagatgcgatcatggccgcgacgcccaccacgttaaatatggcgctggcaaatacccgcagcatggaagaaaacgccacgctgctgatgggggtgaaatcggcgtttgcgctcactaatgacaaggttgcgcacatcggggatgtgatttcatcggcgatgaacaagagcgccgctgactttgacggcctgagcgatacgctgacctatgcggcaccggtggcaaaaaatgccgggattacgctggagcagaccgcagccatggcgggcgcactggccgacgccaaaattaccggctccatggctggtacggggagccgggcagtgattacccgcttgcaggcaccgactggcggtgccgcgacggcgctcggcgagttgggggttaaaaccgccgacagcaaaggggacatgcggccgctgttcaccatcctgaaagaaatgcaaaagagctttgataaaaacaggctcggcaccgcacagcgtgcggcgtacatgaaagctgtttttggcgaggaggccagctcggcggcggcggtactgatggccgatgcggtgaccggcaagctcgacaggttaaccaagacctttgagaactccgacggcagcacggaacggctggtcaaggtgcagcaggataacctcgggggggatttcaaggagttccagtcggcttacgaggcggtaggcattgacctgtttgaccagcaggaaagcagcttccgcaagttgacgcaggccgtcacaaagtacgtgctcaaactcgatgactggataaagaaaaatccagagctggccgccacgttcaccaagattgcgaccggggcgctggccgtggtgggactgattggcgcgatcggcttgctggcatggcctgttattcaggggattagcgccatcatggcggtggctggttcgctggggacggtatttagcgttgtgggtggcgcgattggcgcggcgctaggggcgattacatggccgattgcggccgtcgccgcggcgatcgtcgccggtgccttacttatccgcaaatactggcagcctatcagcgccttttttgagggggtggtcgagggcttgaaagaggcattttcgccagttgcggacatgttcaagccgttaaagcccgtgtttacatggctgggcgacaagttaaaggctgtctggcagtggttcaaagacctgattgcgccggtgaaagaatcgcaggagacgctgaacagctgcaaggatgccgggcgggcttttggtagagggctggctgatgcgttgctcctgccgctgaaagcgttcaataagctgcgtcaggggattgattgggtgctggggaaactcggcattatcaataccgaaacgggtgacctcgacaaaaaagcgcaaaaggccaatgactacgccaacggcgcagacggccggggctattcacccagcggcggcgtgttgacgggcggttatgcgccggtgaaagcgccgggcggaaagtcctacgttgacaacagcgtcaacaatttccacttgggcggcaagttgccgggcggtgccactgcggaggagacgcggcgcatgctgctcgaagtggtggaagaacgtgaccgcaagcgccgggcggcgatgcgttcgaatatggcgacggactga

SEQ ID NO: 450905 - DNA, 300 bp, Serratia marcescens
atgagcaacgaaaaaaatgcagtcactgaaaaccagaacgtcgtgacgctgggtgcgccggttaaacgcggtgaaaccctgattgacagcgtcaccctgattaaaccgaatgcgggcaccctgcgcggtgtgagtctggcctcgctggcaaactccgacactgatgcgctgattaaggtgctgccgcgcatgacgtatccggcgctgaccgagagcgagctgcagctgcttgacctgcccgattttattgcgctggcgggcggcgtgatcggttttttgtcgccgagttcggcgcgctga

SEQ ID NO: 450906 - DNA, 1029 bp, Serratia marcescens
atgccagctttttatagcattctgaccaacattggtgctgaaaaattggcgcttgcggcgcaaagcggtgtcgctatggctatcagctatatggccgtgggtgacgggggcggcgtgtcacccacccccgacccggcacagttgacactacgggctgagcaataccggtcagaactcaacacgctgtcagtgtcgaaccgcgacggaaatgtcatcagcgctgagatgattatcccgccggagtttggcggcttttggatccgcgaggtggggctatattcagatgatggggctttagtggcggtgggcaacctgccggacacatacaaaccacaactcattgaaggctctgggcgaacctccactatccgtatggcgctgattgtcagcagtaccaaagatgtgcgtttgcttatcgaccccgcggttgtcgttgcgactaccggttatgtggatgagaaatttaaagaggcaaaaaaccgggcggatgacgcgtatcagttggcggcggataaaactacctttgatgatatctaccccccaggcatcagtatctttttcgccacaaatctgaacccgaatcaacgttggcccggtacgcagtggtattacaccggtgaaaacaagagtatcaggattgcgaaacaggacggctctgatgtgctgaccacgggggggagtgacagcgtgcgcctcacaaaagccaacttgccagcggaggcactcagcctgacggggagagcgggtgatactgatcttggcaagaagaaaaccgagaaagccggaaagcacgttcatgatggcgtcccattacgagataacgcctatgagctaggagggaataatacggcgttattcagccctatgaatcagggtaaaacggatgaaagtggcgagcatgaacatgaattcattttggggtcgcatggtcacgatgtgacagggaatacggaaaaaatggggcaaggggagacgttcagcattgtagaaagtcacatcaaactcatgtgctggtatcgcgccgcataa

SEQ ID NO: 450907 - DNA, 912 bp, Serratia marcescens
atgactatcggatttaacagcggcattccatccgcaaacagcggttacgcattattaaaactgtcggattatgtgctggacgaaaacaccatttttgccgcccataaagcgcgcgtgttggctgatggcggcattatccctgatgaggtgggctgtctggagcgcattacgtggctgctggacaatggcttgtatcgcaagatggaaagcatgattaatcccgcctttggcgtgaagatgaacgaggaaagggaagtcagcaagctgtactcattcaaggcgggcgacgactatgtcagcctgatgcaaggcacgggcggggcagtcatgtatgaagacagcgaaggggggccgggcgttaccgtgaaaatcacatcaaacggtggtgcctacctgcgctcagagaaaaatcaccgtgtgcagcgtggccgccagtatgccatcggcggtcggctgtcggataaagacaaggcggatgtgctgggtatcagcgccggtgtcagtatcaacggtttgcaaatggcttacctgcgtacccaaatcaccaataaccaaaaagacatagaggcttggcgttatggtacgcgtgacggtgcctggactggttcggggccatcgggcgcggcaatcggtgcagtgcgccgcccctatgctgattttatcccgtcggcggcgttatttgacgttgacggcggcgaggtgcgggggtacgagtcgggcgctttgaaagcccgcgatgcggcagcaacagggacattggccgatttgaccgctttcgcggtaccgatttatgttggttcgacctttgccaatggcattgtccaaccctgctacggcacgttgcgtgatgtcatttttctgcataccgctgacgatgccgacgcggcattgttgtcgcgtctgggcatgtaa

SEQ ID NO: 450908 - DNA, 2331 bp, Serratia marcescens
atgagtaatttaaacgagcaatcaaaatgggtagaggcagttaatcagattgctgacactgaccgcgtgaagggcggggaaagcggcgcagtgaacgttcaggccgcgcaactggcgagccgcacgttattcctgcgaaatttgcttgattcgctgatgggaataatcgccctgggtgatggggtttacaaaaccgtggccgacgcccagcgcgatattgatagcggcaagctggcggccgacgcaattttcaatgtccgttcaaccagtgaaaaccgttggttggatgagcatcaaaaccgtgacgggctggcaacaccgaccggccgctatctggcgtccggcaattttattgccgatatgctggctcaactgacctcgaccatgaccagcgtcagttcactggaaaaccgcattcagtcgattaaacgctatcactccgaccattactcaatgctattcaccggtgaaaatggcccggatgagacctatggcgcgtttgataataacgccgggttttggctggccgggttgcaggcggcggtacaggattatctggcgggcattacgccgaaaaatatcagtaaccgttaccccgacctcgccatgttttttgccgctgccggattggatgaggcttacgccatcgttgaaaaaaatggcgcgtggcggctcgcgtggatggatgacattttgcagcaccgcttagaggggttgcattcaacgcgcatcacccggcgcgtgcaggggtggcacgcttaccttgcctcaaaagaagctgacccgaaaatcttgctcggcgtccgtgagcatgacgccgggctgattttgggcggtctggggaacaccgctgtgcaggattacatttccgccaatattcgcccggctgacggccagatcgccttacacgttggcgaaaagctgttatggaatgactatccagtgatgtctgcgagcaatatcggcccggatgccgtgctgtttagctacctgtacgcaaacgaagccttaccccgccatgcggtcatgttcatcaagtcactgcgtgaaatgccgctgggtggcgttatgcgtggctgtggggaggatggccagtcactggccggagccaaagacagcccggacggcaagaaaatcaacatcatgaactatgacccgcgctggcgtggtcgagcgttggcactggcaaaggggagaccggagggcggtggattgcggccggtgacacaggaagacgcagacacggccaatgatttgaattaccccgactggcggcaggggcagtccctgccgcgcacgtattccctgcttgaacgtatcgcgacgtcgggggctgagctgccggtgttcttccatgctccggccgccgccggtggccgctcgtttaaacaaatctggcccggcactgtgccttatcaaaacggcctcgatatggtcacgcgagcgaaacaaatcgcggatgccgtcggaaaaaaatacaccttcgattttctagggcttgagcacggcgaaacggataacgacaacggtgacaatccaaaccccggcgattatctgaaaaaagcggaagcctatttccaacagcggcaggcggattacaaagccatcaccggccagagagatgactttctgattgtgatcgggcaggtcggcagccggataaatacgaaggccggtcacgtggacgaacaaggcaaccccaccggggaaagcgtggtagtacagccgtattctgtcagcgcggttgaccagcgcgagtacgttcgccgtcatgctaacgctatctgctatggcccgaaatacccccttaactggttgttcagtgacgacacgatgagccatttgagcgcggccggtaaggtattgcagggcgagtatcaggcgcaggccatccactggcagctctatgacccggagaaaaagggaacgtggacagataccacgattgagtcagttaccgtgacggataacgtgattgaagcacgttgcaaaatgccgtatccgccattggtcatcgaccgcaccttcatcagtgatgcgcaaaacctcggtttgtccttcgagcaccagtcggcggaaattttgaacgttgaaattgttgacggcacgacgttgcgcctgacctgtgacaagcagccggctcagtccgattttctactggttggcttcaataacaccacgccacaccagaataaaaacatttacccgctggtttgcctgcgcgattcctcaccggaaatcagcaaaaaaatcatgcacaagggaacgttattcccaatgtacaactggatgtcgctggatcgcatcccattatcaggagaaagagcatga

SEQ ID NO: 450909 - DNA, 612 bp, Serratia marcescens
atgagtagcctgctgccgccggggtcatctgcgctggagcgccgtgcggctgaggcttgtgcggcgggtatggatttacatgtgccgcttcgcgacctgtggaacccggcgcgatgcccggtcaaattcctgccctatctggcgtgggcgttttccgttgaccgctgggatgaggactggccggaggcggaaaagcgcaaggctgtcagcgatgcgttttacatccaccgccgcaaaggcaccgtttcggctattcgccgcgtgattgaaaacatgggctacagcttgagcatcgcggagtggtgggaagtggctgaccccgccgggacgtttcgtctgtcgattgatgtgaatgacgtcggcatcacggatgacatcgttaatgagcttgagcgccttattggcgatgccaagtcagcgagtcgacacattgcggggctggatattcgcacccgtaccagcggggttatccattgcgcggccgccagttatttcggtgaagtgctgacggtttacccgctcggttatacgccggaaaccccgatttattacgacgccaagataaagcacagcggtcattattcttacaccgggaacgccaacaatgagtaa

SEQ ID NO: 450910 - DNA, 909 bp, Serratia marcescens
atgccaatcattgatttaagccagcttccggcaccggatgttgttgagccgctggactatgaaacgctgttcgaagaacgcaagcaaacgctgatttccctgtatccggcagaccagcaggaggccatcgcgcgcacgctggcgctggagtctgagcctatcgtcaaactgctgcaggaaaacgcctatcgcgaggtgattttgcgtcagcggattaatgaagctgcacggtcggtaatggtggcttatgccggtggcgcagacctcgaacagctcggagccaataacaacaccccgcgactgacaatcactccggccgatgatgctgctatcccaccggtggcggccgtaatggaatcagacgaagactatcggcctcgcatccctgcggcatttgagggtatgtcggtcgcggggccgatgggggcgtatgagtttcatgccctgagcgccgacggccgtgtcgccgatgcctcggtattcagtccggccccggctatggtctcggtcagcgtgctggcgcgcgacggtgacggcactgcccccgatgagttgcttgcggtagtggccaaggcactgaatgacgagagcgtgcgcccggtggctgaccgggtgactgtggcgtcggccaagattgttgattaccagattaacgccacgctgtttgtcttgcctgacccagccgtcgaacccattaaagccgccgctgagcagcgtctaaaagcctatatcaacgcgcagcgacgtcttggccgcgatattcgccgctcggccatttatgccgcgctgcatgtgagcggggtacagcgtgtcgaactggcggctccgcaatctgatgtggtgctggacaagacgcaggcggccaactgcaccgattatcaaatccttatcggcggctctgatgagtag

SEQ ID NO: 450911 - DNA, 351 bp, Serratia marcescens
atgacagcgaattacaccggcatgagccgggaaagcgggcgcggcctgaatgaccttgagcacatcagccaaagcgtgcgtgacattctcatcacgccgatcggctcgcgggtgatgcgccgggattatggctcgctgctgtctgcgctgattgaccagccgcaaagtccggctgttaacgggcaagtgatggccgcctgttatatggcgatcctcaagtgggagccgcgaatcaggttgctgtccatcacctttgaaaaaacgttcaccggtcagatgttcgttgagattaccggcgtgcgccaagacaccactggcggcacattttcgctaaccgttccactgagctga

SEQ ID NO: 450912 - DNA, 642 bp, Serratia marcescens
atgcaaacactcgaatctatctcagaactcgcgcgcgccgtgcgcaaccttgtccgcattggtgtcgtgaccgacgtcgacaccgcgcgggcgctttgtcgcgtgcagtccggcggcaataaaaccgactggctgcactggctgacaccacgtgccggggctgcgcgcacgtggtgggcgccaagtgtcggtgagcaggttttactgctggcgatcggcggcgagctggacacggcttttgtgctgccgggcatctattccgacgacagcccgccgccgtccgcatcgtcgtcggcttatcacatcagctttcacgatggcgcggtgattgagtacgagccggaaaatggtgcgctgaccgtcagcggtatcaaaaccgcggcagtggccgcctcgtcatccgtcgcggtcactgcgcccgccgtcactgtcaccgccatcgagcaaatcacgcttgatgcgccggaggtgcgctgtacgcataagctcacgacagggacgctggaactgcaacagggcggcaccatggcgggcagcattacgcacagcggcggcgcgtttacctcaaacggcgtgcaggttgaccagcatgcgcacggcggcgtacagagcggcggaagctggacggagggaacgcaatga

SEQ ID NO: 450913 - DNA, 450 bp, Serratia marcescens
atgaatgagtttaagctgtttgatgacaggctggccgggctgattgccagcctgtccgcgccgagccgtcggcagatggcgacagaaatcgcaaagcgcctgcgcgccagtcagcagcagcgcattaagcagcagcaggctccagacggtacgccgtatgccggacgcaaacgccagctggtgcgcggtaaaaaggggcgggtaaagcgggcgatgtttaccaagctgcgcaccaaccgattcatgaaagccaagggcgcgcctgatgagtcggccgtcgagtttatcggccgagtgcagcgcatcgcgcaggtgcatcagtacgggctgcgcgacaggccgagccgaaacggccgcgaagtgcaatactccgcgcggccgttgctcggattcagcgacgccgatcggcaaatcgttgaggaggttcttgtctcacacctgagcgaatag

SEQ ID NO: 450914 - DNA, 468 bp, Serratia marcescens
atgctaaagccgaaaaacctgcgtaaagcgctctgcgatgcggtgccggtactgaaaaataaccccgacatgctgcgcatttttatcgacaacggcacgattgccgcgacgctggcgacctcgctgtcatttgaaaatcagtacacgctgaatctggtggtcactgactatcacgacgacattgattttttgctggtgccgatcggcgcatggctgcgggaaaatcagccggacattatgaccacggacgacggcaaaaagcgcggttttacgtacattgtggacatcaacagagacgagagcatcgacgtcagcatcagcctgcgcctgacggaacgcaccctcgtcagagaagtcgaccgggaactacatgtcacacacgcaccggagccggagctgcccgtcccggttgagcggccgacaaaactctacgcgggcggtgagcttgtgagcgcctggcatgaatga

SEQ ID NO: 450915 - DNA, 429 bp, Serratia marcescens
atgtccagagtcattatgattttgtttgctgttgcgctggccgggcttctgtggttgcggcacgagaacaataagctgaatcgctcactggagaagctaaacggcattgttgttgagcaaaagcggacgatcggcatgttggaaaatcagctgagtgttgccgctgacagggctgacaaaaacgaacgggcgcaagtgaaattgcgcgagaagctgagcgcggcaagcaagatggaagctcgccgggaaaaaatcatcacgaggttgctcaatgaaaacgaagtttttcgccgctggtatagcgctgatttgcctgactctgtgcgtcgcttgcaccaacgcaccggttgcgcctccgccggtgattgtttacagcggttgcccgaaggtcacgctttgcccgatgccagccagtcagcccgccactaa

SEQ ID NO: 450916 - DNA, 216 bp, Serratia marcescens
atgcagattttgcgggttgtttttaccaagcctgttaagccactgcgccgcttttggtcgtggatgtttttcgctttcaccttcaatgtcttgattgcctccggctgggtgttcacgggcgtgctctatctgatttgcgggttaatgttcaaggtcgtcagggagcattaccgtcaacgtctggatgaggatggtttatgtccagagtcattatga

SEQ ID NO: 450917 - DNA, 513 bp, Serratia marcescens
atgaactcaatcgttaaacgttgcagcgttgccgcagtgctggcgctggcggtgatgttgccggacttttcccggttgcatacctcaattgccgggctggagcttattgctgacttggaagggtgtcgcctcagcccgtaccagtgcagcgcgggcgtatggacaaacggcatcggccacacggccggggtaaaaacggagcgcgttattactgaacgtgatgcggccgtcaatctggtggctgacgtcatgcaggttgaaaagcagatcgcccggtgtatgccgattgcgatgcctcagccggtctatgacgcggtggtcagctttgcgtttaacgtcggcaccggtgccgcatgcaagtcgacgctggcatatttcatcaatcagcagcgctgggcgcaggcgtgcaatcagctcccgcgctgggtctatgtcaatggtattaaaaacaaagggctggagaaccgccgggcgcgggaactggctcgctgtatggaaggaacaacactatga

SEQ ID NO: 450918 - DNA, 210 bp, Serratia marcescens
atggagaaagtaacgtcattcattgcctatgtcgtggcggtgctgctggcatgggtggggaagtattcggcgcaggacattgcgctgaccgtcggcgcggtggtaggtgtcggcacctttttaactaactggtactaccgccgcaaaagttatctgttgctcaagcgcatggacattcaccgggggttattcgatgaactcaatcgttaa

SEQ ID NO: 450919 - DNA, 204 bp, Serratia marcescens
atgaacgtcatcgcgcagcagggcgacacgcttgacgcgctgtgttatcgccactacggccgcactgagggagtggtcgaggcggtgctgctggttaatcccgtgttggcggaggtcggcgtcatcctgccgcacggcaccgccgttaccctgccggtgattgacaccgcgccgcagtctgaaaccgttcagctatgggactga

SEQ ID NO: 450920 - DNA, 504 bp, Serratia marcescens
atgaccaaagtgattttacggaacgccgaagcctcggccggtgacgccgctgtcatcccgccgccggagttgccggagccggtgattaaaaacacgttctttttcccggacgtcgatccaaagcgcatacgccagctgatgcggcttgagcataccgtcacgcccgaacgcttgcgccgggcgattaaaagcggcatcgcggagactaatgcggagctttttgattaccgcgcgcagcagatggccgccgggttcggcacgctggccgaggtgcctgcggagtcgttcgacggcgaaagcgagaagtgtttccactacctgaacgcggtctgcgccatggcgacggccgtgctgtatgagcgttaccgcagtgcggacgccagcgcaaaaggggataaaaaggccgacggcgtcgacgcctcaatcgacgagcattggcgggatatgcggtggtcaatctcacggctgcaagataagccgcgttgcatcgtcgggcaaatctga

SEQ ID NO: 450921 - DNA, 753 bp, Serratia marcescens
atgacgagtcccgcacagcgtcacatgatgcgggtctcggccattgaggccgcgcagcgggacgataacccgctgcgccatgccaccgcttacgagcaaatgctcgttaagctggccgctgaccgcgcaaagctgaaacagatttattccgttgagaccaaggccaaacacaaacgcaccatgctgcctgactatgcgccgtgggtggcgggtgtgctggccgaggggcgaggcgctcaggatgacgtcctgatgaccgtcatgcagtggaagctcgacgccggggatattccgggcgcgctggaaattgcccgttatgccctgaagtacggcctgaaaacgccacgcaacaaacgcccgacgccgtacctgctggccgaagatgtggcgctcgccgccattcgcaaccgcaaggccggtgaggcggtggcggtgaccgacttgctggaaacgctggacatgctcgccgccgaggatatgccggacgtcgtgagcgcccggctgcacaaaatcaccgggcttatcctgagtgaccgcggcgagttcgcgcaggcgctggagcatcttaagcgcgcgatgcagctcgacagcgccgcaggggtgataaaagaaattcagcgttgtgaaagtgcgctgaaacctaaaccggcacctgcaaaaaaactaacaaccacgcgcccgcgtaaagccgcgaagaccccggccaaacgcggacgcccaccgaaagcggccaaaacgaaagccgccggttaa

SEQ ID NO: 450922 - DNA, 1131 bp, Serratia marcescens
atgaaaaaacagacccgctttaaatttaacgcctacctgacgcaagtcgccaagctgaacggcatcgaggttgacgacatcggccataaattcagtgttgagccgtccgtcacccaaacgctgatggataccgtgcaggagtcctccgagttcctgaccaaaatcaatatggtgccggtcgatgaactgaaaggcgagaaggtcggcgtgggtgttaacggctcgattgccagcaccaccgacaccgacagtggcaaggagcgtcagaccgctgatttcaccgcgctggagtcgaaaggctacgaatgccagcaaatgaacttcgatttccacctgcgctataaaacgctggacttgtgggcgcgttatcaggactttcagctccgcatccgcaatgccatcgtgaagcgtcaggcgcttgatttcatcatggcgggctttaacggcatcagccgcgccccgacgtctgaccgcagcaaaaacccgatgctgcaggatgtggcgatcggctggctgcaaaaataccgcaatgaagcgccgacccgcgtgatgagtaaaatcaccggcgatgatggtgcggtgatttccgaggtgatccgcatcggtaaaggcggcgattacgccaacctggacgccgtggtgatggatgccaccaacaacctgattgcgccatggcatcaggaatcccctgaccttgtggtcatctgcggccgtaagctgctggctgacaagtatttcccgctggtgaaccaagaccagccgaacaccgaggccatggcggccgacgtgattgtcagccagaaacgcattggcaacctgccagccgtgcgcgtgccgtacttcccggctaatgcgatgtttgtcaccagtctggaaaacctgtccatttatttcatggatgagagccaccgacgccacattgaagaaaacgccaaacgcgatcgcgttgagaactacgagtctatgaatatcgactatgtggtcgaggattacggctttggctgcctgattgaaaatatcgaaatgggcgacttcagcaaaccggcctcggcctcacagccagccccagccccagccagcgccgaacagccgcaggagcaggaaaccgcagccaccgacagcggagagtaa

SEQ ID NO: 450923 - DNA, 846 bp, Serratia marcescens
atggctaaaaaagtttcgaaatggtttcgcattggtgtcgagggtgacacctgcgacggccgcgtgatcgacggtaaagacattcaggaaatggcggacagctttgacccgcgcgtctacggttgccgcattaacttggagcattttaaggggctgttcccgaacggcgattttaagcgcctcggcgacgtggttgaactgaaagccgaaaagattgacgacgattcaatcctcaacggcaagtgggcgctgtttgccaagatgaccccgaccgacgacctggtcgcgatggtcgcggcggcgcagaaagtctatacctccatggaaatccgcccgaactttgccaacaccggcaaatgctatctcgtcggccttgccgtcaccgatgacccggccagccttggcacggagtatctggagttttgcgcccgcgccaaaaccaacccgctcgccggtcgcaaagaccagcctgacgatctgttctcggccgccgtgctggttgagctggagtttgaagtacagccggaaaaactgctgtccagcctgagcgaacgtgtgaaaggcatgtttagccgcaaacaggccagcgacgacgcgcgtttcagtgatgtgcacgatgcagtcactgccgttgccgagcaggtgcaggcaaacggcgacagcgccgagacccgtttcagcgcgctggaacaggaaatcaccgggctgaaatctcaggttgagcaggacgcgcagaagctggcgacgctgcagcgctcactcgacagcaccgaaaacctgacgcagaagcgccgcccggctgcgaccggcggggatggcgatgaaagcctgctgaccaactgctaa

SEQ ID NO: 450924 - DNA, 984 bp, Serratia marcescens
ttggaaactgactttaaaataacccttgagggttttgctactgaagaagaagcaaacaacatcggaaattttatattaaacgccacccgggtattgtctgataaattcgaacttgaaacctcaaaattaaaacgcgtagttgtttcctataactttagcgaagcccttcaaaacgcgacatctatttaccaacacaaatcccctagttcattcaccaatagcaaacagggtgcagccgtcggacagctagtatcaaaaattggtaataatggactatgtgaagagcacacccttgtactatccattgatttttttgctgaactttttaatgatggtggcttcttaaaactgaacgaagacggttaccacgctgtcatccatcgtattcaccatgagttagtgcacgttcatgaaaaaaacttgctaacatgcttagctcaaaactataccgtcaacgagtatggcgacgcgctacttatctcagccactcgcgcatggtctgaatacctcgctaattacatgtcttcacggtctgctcctcaagagactatcgagtcatttctagagaatcttgacactgttgtaaatgaagtatctgacgagattgaaaaaatcattttgagctataaaaaggataatatttctttggatgaaatgtatttcgaagcaaaaaagcgcatcaagctaatcatcaactcttatgcttatgcgataggctacgtccattctctagatatcaatattaatgaatacaacccaaagctagccctcacactatcagcttcaaaaataaacaatcaattatcagaattaggcgttacctttgagagactttataacaagtttaatggccagagcattacaggctttgatgattaccgggatattacaatagtcattgatgaaatattcaagcaatttgggcttgttttagagtgccccgactggtctagcaactctggactctatatacatgtaaattag

SEQ ID NO: 450925 - DNA, 636 bp, Serratia marcescens
atggacgtaaaatcaatagcccaagggatgctcgcgggagttgagtcaatacctaaaggggttgcttatagcgtgcgccggacgtgggacggttctggcgcaatggggagtgacctgaagtcgcgcaatgttattgagaccgagcgttttatccgggtagttcgtgccggatatggcatagaagcgccgttgcgtgagttaatcatgatagttatccgtgattgctatcagaaaatggatcctcaagtgcaatcagcattcgggaaaagactcaactttgcggaaggggctgtcgctggccgacttggcgggcaatttatccttgtacagcagattagtaaccgaatcttggcgaaggtcaccggaggattgctctttcggtgggggataaaagggcttacaactgtcggcctgaacgtgattttgatgcagggcattattgagcaagctgcggtatcgtcacggcgtttaaaggctaaatatcccgccatctaccataaactgacgccgcgcaaccttgatatgctctattttcttgcagaggagtatctggagccgtttgtcgcatatgccagccgttcgcaaatgtactgtgaggtcataaatcatgagatttctaaggtcttggggaagtag

SEQ ID NO: 450926 - DNA, 558 bp, Serratia marcescens
atgctgacagtgctcttctatgtgctgttgggtttaggcgcagcgcatttcatttacgagcggattcttttaccatcaatccgcttacattatagaaatcaactatttacattaagagacgaagttagggagaagattattcatggtacctcagagtctggtattcaggccgctaatcttgtccatgatgcactcaataacgcaataaatcgtctccatttattgacgcttccgaacaaatttcgagcgcaaaaaagagtctgcgaagacgcggcgattaggcagcgtttgaagcgtgaaattgaagtgtttaaacggtgtgatgatgaggaaatcattaaggttttgatgaaatcaggcgggattctcgagagtgtgcttgttttcaataacttaatggctctcatctatctgtcgcctgttgtgttctttgtggtttttctcatccgcgtaatcaaaacgactaatcgtgtcgtgagatgggtaaaaggtcgggagcttgaagaagcgataatgctccttcctgatccacaggtgcagaaagtcgtatatgcatag

SEQ ID NO: 450927 - DNA, 2346 bp, Serratia marcescens
atgagtttatctattcgggggcgcgtagcccctttaccccctccgccatttgtgaagcgcgacgccgaaccattcctcggcgtttacccttggaatgcacccaaaaaagccattggcagggaaaaacagcttacccgtgagcaattcgttcaggggcaagctgttttaagggatatccactcattaccgcatttcctcagtgccatatttttagcgcgtcatgcttacctattgaaagataagggtctgaatgaggcgaataaatggttggtgctccagtttcagcgtcgcatatggccgcgtataaatatcgtgaacggaaaaaatgcaatggatcgcgatgcaaccctgcgtttttattctgaaatcgataattatgcgcgcttgccgaatatggatgatagggagctgcgccgcttctctgaccgcatcgccggtcagttgatgcaaaattttgatgactattgcaaaaatttcatcgaagaaaataacggcgacaactctggattgattggcgacagtgtgcaggctgagttctatggccgaatagcgtcaatgacgcgtgagtttaaggtcgtgccgatgcactggcgcaaattctgcaaaggcaaactagatgccgattcggcgctcgcgggcatttcccgtatgaccaattccgaatggtgggaacgccaattaaaagcgcagcgtactcgctggcgtgaagcgttgctgattgctgcgggagaggtgaaccgcaataaacacccctacgccagcaaaatggcaatcagcgatgtgcaggcgcggcggctatcaaacatggagtatctgaaagggtgcgagctggagaataccgaaaccggcgaacgttttgatctgattgataaggtgatggcaagcatttcaaatcctgaaatccgccgcatggagttgatgagcactatcgcaggcatagaaaaatacgctgccagtgagaaacatgtcggtatgtttatcactatcaccaccccgtcgaaatatcacccgacgcgtgtcgttggcaaagaaggtgccgaaaaggttcagtttaatcataactgggatttggaagcattcactccgaaggacggccagcgatatcttgtgaatatctggagcaagatgcgcacggcgtttaaagacagtcacttgagcgtatacggtatgcgtgttgtagagccacaccacgacggaacgccacactggcacatgatgttattttgcgagcgcaagcagcgtcagcagatcattgacatcatgcgccggtatgccctcaaagaagatgctgatgaacgtggcgcggcaaaaaaccgctttgaagccaagcacatgaacaagggcggcgcggccgggtatatcgctaaatatatcgccaaaaatatcgacggctatgcgctggatgggcaggtcgaccatgataccggcaagccgttgcgtgatatggcggcggcggtaacgtcgtgggcgtcgacgtggcgcattccgcaatttaaaccaattggagtgcctaccatgggcgcatatcgcgaatgccgtgcgtcttgcttgcgcggcatcagtattgctgaccggttcgatgagcaagtcgaggccgtccgggcggcggctgatgccggtaattttgcagcgtatatcgccgcacagggtggcgctaacgttcctcgtgatggccaggccgtccgagttgcccgtaagactgctaacgaaccaaacgcctacggtgaagaagtgcaaaaggttttcggcattttctcgccccgccacggtcgcgcccatgtatttgaaacccgaacaacagaatggcgtatcgtccgtaaggccgttgaccttgagcctttgaccttaaaaagcgcctctggcgcgcctcggagtcctgtcaataactgtggggaggttcagcgagagcctgagccagatatgcaggtagcaacgcctgagtatgtcacggcggtgatgaatttgattgagagcggggatgttagctggaatgacgcggacgtcgccaagacgcttagagacgtaatcagggggcagtcaccgagggctaatcaccaagaaatagcccgtaatcgtaaaaagtcccaaaatgatgcgccatcggcacgtctgacaccggcagaacgagcaaggattccgcaaatgcggcttgagttggcgcagctcggtatcactccggagcgttgggagttacgcgcattggtgcgcggggctactgtagtatttggagcgctgtcggtttcataccctgtgctggacgagtggcgggggtggtcttcgtgggatgtaggagcgccaacacacatgggattgcctgaaagtaaaagtgatagtgattatatttaa

SEQ ID NO: 450928 - DNA, 282 bp, Serratia marcescens
atgttgcgtatcgcgatcggtaaggagtggattgtcaccagtgacacccatcaattcattttgaaccagaaaaagcaggtcaaaagcggtgccaaggcgggcgaggagtggctcgacgcggtggggtattacccgacgattagtcaactggttaacgggctgattcatcatcatgtccgcagctcagcagcgaacagcatagccgggctggctgcggaaattggtcgtatcggccaactatgccaagaggcgttttcagcggtgagcaaagagggcaaatga

SEQ ID NO: 450929 - DNA, 216 bp, Serratia marcescens
atgcctgatttattggatttggtgcagcagcgccagcaggaaattctcaccggacagataaacgcggcgcggcatcaaggcggcgtgtcgtcatcaatctgtgaggagtgtgaccagcctatcccagcggcgcgtcgtgctgcttttcccggcgtgatccgttgcgtgtcatgccagaccatccacgaacagaaagccaaacattttcgagggtaa

SEQ ID NO: 450930 - DNA, 258 bp, Serratia marcescens
atgcacatgtataaaaccgtcggccaagatatgcgtaatcgcgccgatgatgcagcacgccatcaaatgctgactaatgcgcgcaatgaggcgaaagccgacgcggcggtcagcttctcctcacgccttgacctcctcgctacacacgcggcggtcaatcatctgtcaagcgtggaaattatcgagctgctgaggcaggagtctgaaaagctcgaccatcaggcgcgcgcggcaaaaatgggggcatgcaatgtttga

SEQ ID NO: 450931 - DNA, 1020 bp, Serratia marcescens
atgtcgattaagaagctcgatgatggtcagtaccaagtggatattaggccgaacgggcgtgaaggacgtcgcatccgtcggaaatttgacaggaaagcggaagcagagacatttcagcgatatgtttttgccaatgccaataacaaagaatgggcgaacaagcgcgcagaccgccgcacgctgacagaactgctcgatttatggtggctctttcacggccaaagtcaggacaacggcaccattgaacaacggcacctaaagaagacgattaaggcgctcgacaatatcaccgttaacaaactgactaagcgtgtgctggcgatacatagaagccaacgtcttggcgacggtatcagcgcagcaacaataaaccgtgatatgtatcgcctatcaggaatgttctccgctctgataaagctaaatgagtattccggggagaatccgttacacggcttagctccactatcggaaaaaaaccctgaaatgacgtttttggatcaggaggaaatcggccggttactgaaagtaaccacaggcgacgaaaggctctttgcactcattagcctaagcaccggagggcgttggggcgaggtctatgcgttgaagcgcgctaacataacgcgcgggcgggtgacgttcctcaaaaccaaaaacggcaaaaaacgcattgtccctatatcggatgagctggaaaaagaagtgaaagacaacgcaaatggaaatgatgacgggacgttattcaacgttgactatgacaggttccgcgaaattttgagggaagtaaaacccgacttgccccgcgggcagtctacgcacgtcttacgccacactttcgcaagccattttatgatgaatggaggaaatattattgccctgcagcagatactcggccatgccaatattcaacagacaatggcctacgcgcacctggctcccgattacttgaaaaacgccattgcgttgaatccattaggcggaggaaccggggcgatcgagtgtccacatagcgtccacgggtag

SEQ ID NO: 450932 - DNA, 660 bp, Serratia marcescens
atgcggcaagtttcgagtacaggtgctcggcatgaccgaatgagcatcagtaataacgcttttatggagctaccgcttcccgtcgctacttcggaagagcaacaaaaaatcgccgattgcttatcatctttggatgaccagttaataacggaggccaagaaactggatacattaaagacatataagcaaagtctagcgcagcaacttttccctagtgaaggcgaaagtatgccacgattacggtttcctgagttccaagggaatggtgaatggaaagagaaaaaacttgggagcctcactaccaaagtgggaagtgggatcacccctctggggggacagaaaaactacagaaaatccggtcgcccattcattcgaagtcaaaacatcggttggggtgagcttcttcttgatgatgttgctttcattgatgaagaaacgcacaacagttttatcgcaacacagataaattatttagatgtttttttaaacattaccggtgcatcaattgggcgaagcgccattgctgaccctagggttgttggtggtaacgtcaatcaacatgtttgtataattcgaaccacgggcgagttaaatccaatatttttaaatcagttccttatctcaaaagatggacaatcaccaactgataaggtacggtga

SEQ ID NO: 450933 - DNA, 198 bp, Serratia marcescens
atgcgcccggtgttttgcaacgccccggtcgtcagctgcagcgttttgcccaccagggtggccggattggtaatgctggccgcagtgagcaccagattgcccggcagcaaccagtccgccaggttggtaaaggcaccgctcagggagaacgtcaccgtgccgttactgctgacggtgtcgccggcctgtcgggtgtag

SEQ ID NO: 450934 - DNA, 273 bp, Serratia marcescens
atggatatccagcgccttgccggcaccaatgaggccacgttgattatccaagcgacgggccgtcaggtcgagattgccctgaccgatgatctgcccctgcgtgttatccaaccgctgcgccaccagacgcacgtctgcgccgctcagagtaccggatgcgttatccagctcgctgcccacttcaagcgtaaggccgttcccggcgagcaggttgcccccggcattattcaccgcgccatcagcatggagcgtgagccccgactgggtttttaa

SEQ ID NO: 450935 - DNA, 2286 bp, Serratia marcescens
atggctgaaattccgtcaatcgtcgtctcaatgccatcgcaattatttactatggcccggtcgttgaaggccgtagcgaacgggagaatttacgttggcaaaatcgacacagacccaacgatccctgaaaaccaaatccaggtttatttagaacatgaaaacggcagcactacaccagtagcacagccgatcatcatcaactcaggcggttatccggtttacggtggtcaaatttcaaagttcctcgtagaagacggccacagcatggctgtctacgattcttttggcgctgagcaattctacttccctaacgtgctgacgtactcaccctctcagttaaagaatgaactggcgagcaatgctggtgctggcatgattggcacaacaagcgggcaaactgtacaacaagcacttgatgccattttccctaagctggcggccaacaccggtgccgggctgatcggctcatccgacggacgcacagtagaggagcatctgctggctgtcgattcggcagagtatcgctcaataaacatccgaaatctatgctctgcctattacaagctgcgcgccaagtccggactcaaggttttatgccaaggcgattctatcaccgcaggtttcgataacaaaagcaccgacatcaccgccgcgggcgaaaatggtgattgggcgacacacgcaaatatcacgttcccggagcgtctgacgttttatctgtacgagcaaagcggctgcccgattaccactacagtacgtgccatttccggctatacggcgctacaggcataccagcaagggaattggcaagacaatccaaactgcgacattgttttgcttcaatacggcatcaacgattcccgcggcgtcgctgggcaaacccatgcatcttacctactgaacatggaaaagcttattcgccggttcatcaagtggggtattggcgtaatcatcgttcagccggcggccggtggtaatggcgagctcgagccattattccaagtgtgggggcaggagatcaaaaacctcgccacggtttatggctgcggttacatgaatggtaacgaggtgcaatacaacagctgggctggcagtgttcagtccgatgatacgcacttcaacagcatgggctatcagcgcctcggtgaggcggtgtcatcgatgatcttggctggcggcatgctgccatattaccggccggtgtcgtccgaaattcacacatggccgagtcgtcagagtgaccagattggcttcttttcagcaacgagcaatatctactacggatacagcccgctggcgtactcgctgcagcaaatcacaggcactgtacagggcggccaatcatctcgcatgtcgttctcattctatctcgatgcggaagccgctgaagtagatgtattgggtagctgggctgatgatgcgaagcttgaagttatcacgtcttgggaaatcaggccggaggcgagcgacattccttattatcatgacgctcatcctcgcagctcaacgctgcagaataagaacgcaattcagagtacgtcatcagctcttaggaacagaaacgataacttccatgatcgagtaaacaagcgtgtggccacgctagtcggccgcggatggaaaactatcacaatcagatcgccgatagatggaaccagtgtcagcacagccttcatccagggcgtaaccattcgcccaatcaacgcgcatctggcatcgcaaaaactagatggctatatgcgtggcgttgttcagtgcgttcgccagcgcatcccgactggcatcacggcagcagcaggtaatggtgttcctcagccggttacgctgacagaggtgacattcccaatgccgtacgatttacaggctgaggcgcgtagccaggtggcgcagttcttcgatagcggttttgcaaaattgaagatccactgcaagggcggcactcagggcgcaggttattatgaggcgctaatagccagagaaggcgtagggcaaggttatgtcgttactgagctgcacaagacaggggcgtggccggcaattactgcgacgatgagcatcataccaaagcgctctaaattcgatgcaggaagcgtggcggcaaacatgccatatcggacgatcttcgaagagaagccccgtgagtttggccctgtcgcctcggaattcggttatttcctcactttggcattcgattacactgccatcgggacaaagacagggtactactcggttgagttggagagttcgtcggtagggtcaggagcgacgccacaagtcggtatctaa

SEQ ID NO: 450936 - DNA, 2610 bp, Serratia marcescens
atggcaaaactcacagaaagccaagaggcgtacaccaacgctctggacgacagatacggattcccggcagggacgatgagggctctagttagcgtggagtcaagcggtaatggccgcgccacgtcatctaaaggtgcgcgcggctacggccagctgatgccttcggcgatggccgatgcaggcctgaaaggggtagaccctgcgtcgctatcgttcgaaaaacaaatggatattgcagctaaccaccttaacaaaggattttcccgctttggcgatattggcatggcgctggccggttataacgcaggtaatgggcgggttaattcagtgcgtaacggtaaaacaagcctccccggcgagactgccgactatgtgcagaagttcgccgacgcgggcatcatccccggtgatagtgaggctgtacagtacgcgcaggctgccaaacaaaatagcggtagtttacgcgctccagatctcacagatgccaaagctgcaattaactccataggtgacaccaagtcatgggaggctaaacgacaacaatttagcaacgcatcggccgggcagcctacggctagctcttgggagcaaaagcgacagcagtttcttgcggcgaaaggtgaaccacccccgcaaccgaacgacattgcgaagtccgatattcaatactcgccagagtatatccccccggaagtggctgcggcgccagaacaagcggcccgagggattgcgaatatccccttcgatatcctgcagggcggcgcgaatatcattaacgcaggcagccaggcggtaggcgctggtgatcttctcgaccctgtttaccggcctgttgaccgcccaacagacccgtatgcgcaagcaggcgaggcaatagggagttacctaacccctggcgtggggcttgtccgaggcgcgatgattggggctgtagctaatgcgggtaatcagcctggtgacttcgcggagaacgcttcgaaagaaatgctgctaaatgccgcactgatgggggcgccagcactactgaggggggctcgcgagcttacaggtggtgcagttggcgcgctccgtacggcgtcgaggacttcggaaggtgtggtaggcgagggcgtgaatacagcaaacgaggtatcaaagttggcgcgttctccaaccgggcgggaggagttggccgcggctaccgcaaacgtgaccgacgatgttgcaagagctgctgaaaccgcaggagttgatgtcaacaccttaacccccggtatgcgttccggtagccgaggcgttgcccaagcagagggggctttagcttccaccccaggcgttgcgcaggacgctcatcacgcagcgttcagcgagataacgtccaagctgaataaaaacctcgatgacttcggcgctaccgccggcaccgcgtcggagaaaagcggggcgataaaacagcgcatcctctctaacctcgacgagatgaaaaatgctgaaaatgctgcttgggatgatgtccgcgccactatgcctcgtcaaaagatgaaaatgggcaacgcaagcgcggtagttcaagcggaacgcgaagccggggtgcctctgtcagcagaaatgaagcagctaatgtccgccaatagcagcggtgttactttcgacgggatgaaggcctggcgggccaaattcgccgatgctgagcagaaataccgccgtggcggtgaggcaaacgccgcccgccgtgcaggcgaagtcaggcgtgcgatcaccgatgacatgaaaacgatggcggaaaaaggcgggttcctcgatgactggaatcgcgctaacgacctgtctaaagctaggctgacagcgcagaaaaacgcggagtcaattttcggtagggatttggcgacggatgccctggtcactaatggggtaaaagcactccagtcggcttccgctaaagggcttaacggaccgggggggttccactcaataatgtccgcactgcctgcggccgagagaacctccgcgatatcttcaattcttcaggatgcgctttcacagggagtccgagggggtaaggctgattctgcgggcatcaaacacatcgcgtcgatactcacgccgcaaaatgtgaacgcgatcaatcgctattcacgagaccttggcaggatcgccgacgcctacggaacgttggccagagccgcggcaagaccccagcaatacattgagcagactggtcgaacgtcagaggtgttgaagactcttgatgcgggcttacctaaaattgcccagacagtactcaacgccacggggaattcaacctcgggcgcgatcgtgggtatggccggcggtggtgtcgtcggcgcgacagtcggtgctgtggcgggaaccgtgctgaaaagtgccgttgctaaaatatcggcgacacggagcggccggtacgcgatagagaaagctattcgagaagcgactaaggcagttcgggcaggaggctctccggctgcggtagcagcggctgaaaggcgatttcgcgctgacaaagtggcaatgaaggccattaaggaggcggtaggagccacggagttcgaacgtttgtcgcgcgcagggattgtggccgcgctaagcggcctgagcgatacagagcagtaa

SEQ ID NO: 450937 - DNA, 294 bp, Serratia marcescens
atggagaaatttcaaagggttcacatgccctacggcattcgagaagtgaaaaacggtctttgggagctcttcaaccgggactataacgccctcggggagccgttcaagttcgcaagaaagctctcggcagcaacggttaatgcgttgtcgggggatggcagcgcacccggggaggaaggagggctgcaaactatttggttctatgccgacggcagcgtgcctaccgacaaagacgaacattggcgggcgtacagcgccaaattgcaaaaattagcaagtttgaaagttgagtaa

SEQ ID NO: 450938 - DNA, 201 bp, Serratia marcescens
atgttcgaaatgacaccgcaggaaatggtagcggccttggttaaggccggttacacacaggcccagatcgcgcatgagactggcgttactcaatcgtcgattagtcgcctgctaaccgggacgcatgcggacccacgaatctcaactgtacgcgctttacagcgttttgtagaccgctcggcactgaacggtaaggcgtaa

SEQ ID NO: 450939 - DNA, 681 bp, Serratia marcescens
atggcgttagaaccggatgtactgcagaagaacatcaaatacttgatggagagtgcgggtatcaccagcgtgactgaactgtccaagaaggtaaagatgcagcagtccacattgcaccgcatgctaaccggggaagtgaaggatccaaagtatattaccctcaaacacatcgctgagttcttcaaagtttcacctatagatctggtcgaatgcgaccttcaagaggccccgccgagaacagtcattgatgttgacggcgacccctacgatatagtgtttagagaggttcccgtattgggcaatacgcaattaggccatggcgggtattggagcgagttacagtacccagtagggaacggagatgggtacatacgttggccgtcttacgataaagaagcttacgcgctgaagtgtgttggcgattctatggtccccagaatcaaagaaggtgagtacgttattattgaaccgaaccacaactatcacccaggcgacgaagttcttgtcgtaacggaagatggcgaagttatggttaaaacttttctctttgaaagagacggcttctaccacctactgcctgtgaacgaggaccacgcccctgttcgagtcgctaagttaaaagttacgcaaatccaatacgtcgccggcatagcaaaatcctccttgtggcatccttcataa

SEQ ID NO: 450940 - DNA, 765 bp, Serratia marcescens
atgcctgctacaactaatcatccatgtttcaaacagccacagagtttagataccaaactctggaggtatatggactttactaaatttgtatctttaatttcgtccaaagagctatttctttgtcgttctgatttatttaaagacccatacgaaggctcacttaccaaagcaaataaaacccaaacagatttagcccctccattcattcatgaaagctatcaaaacaagtttattatggatcactttgacttagcaaattgggcaaggaaatggacttatataagctgttggcatgcgaatgaattcgaatcagccgcaatgtgggacttatatgcaaaaacagatgaagcgattgcgatagaaactacttacgaaaaactaagaaatgttttaacaagtaaattcttcattggtcttgtggaatacatagactatgatagtcaagctatcccactaaacaactctttctatcctttcgtttttaagagaaagtcattcgaacatgaaaaagaggttagagttgtataccaagagacaccagtgactactgatattgatggtagaaaccctcgtttagatcgagataaagttaacacaaatacaggtgtaaacacccctgttgagttaaatgaattaataaatagaatttttgtttcccctacggcctcagactggcttacaaaattagtttccgacgtagctagaaaatataacatcgatgctgaagtgatcaaatcagatctatactcaggccctataggatag

SEQ ID NO: 450941 - DNA, 636 bp, Serratia marcescens
atgaaagataagtggaagtattttgctggagcggcaatcggttggttcctaagcagttcttcaagtacgttaacaaatctgatagagcttgggccagcttatagtaaacttaaaactcagtatttgtatacgccggaagtttatgattccacatggtccaataattcagaatatattacggatggcgttgagctagggttggaccatggagatggttctaaagttgtaatgatgattaaaacaaatgatgatggttctatttctggggttatttataagaaaagtctttgcgattttaacccattgacggactctttctatttagaaagtcctgcccctagttggcttgatttattctcaagcagatatttttatgttagctttcttcatgacgggcgacatgagtaccttgcaaagttgaaattaactgattataactcttcaaaaaaagtaatgacatttgaaacgaataaagatgacgagtgggtgcttggttcggggttcaaagtatcagcaatgttacctgctgctgacgatgatatcaaggaaatagaaagctattgtatggcacgtaagggcgagttttttaaaaaaatattaagggaggttggtgagagtaaaaaaaagaagttgtaa

SEQ ID NO: 450942 - DNA, 1125 bp, Serratia marcescens
atgtttgatatcaaagtaaatatagttggagacttcattgagtcctatatttattcaggagtcctttttaccgtggataccaacggagtactttgttcttacagttgggatcatcttataagacggtatctatcgttataccctgaatacgccaaatttaaaaacaaacttttagactctagaaaaaacaatgcttctttattaaatgaagacattactattaccatagataaaaattttttgaataaaaaccagaaaggaacatgtactggtttagatgtctggtgtacagacttggatgtaaaagataatattttgtatatcgcgtcagaaaaaggagttgaaaccattccgtttgtagaagaatggaataacggtgttgtacagaatttcgtggaaccggacactgtgtggtctggggctaaagtttttggccttagtactgggtcttggggaagaactatattagcagcgggcacttctggtgcaatagaaattgtaaataacaaagtctctcaggttaaacaaattggtctctctaaaaaggtagagagggaaattgataataatatcattcttgattgtgagtgggattcattttcaactttagctatactcgatggtatcgataaaaaaatagcttataaatttaataacattggtagtgatggatttctcaagggaaatgttaaggcttatgagggtttcataaagcttagcgataaagaaaagagagataagattaataagataattaaggctttagagtatgagaatggggaaactgtttcactcgataatttttcgcactcttggtttgaaaataacatattgcatgcaatagaccataataataatatatatgctcttaagagagggggatgggttgaaagcaataaagaagatttttttgatgaatttttagttgtaaaattaaagaatatttccgcaggtagttttgttgaaactgaagatgatgaaatttatagattgataaacggtaagaagtatcctcttccagagggttttacttcatggcgagtatttcctaggtctaaaaattaccaagatagaattcatatcgtttatgatgattttttgcaaataagaatattcgattgttag

SEQ ID NO: 450943 - DNA, 531 bp, Serratia marcescens
atgactgaattgcatcgtgcccagcttcagttgctaaggaaatgtgctattttaattctaaaagattgttacttatgttattgtggaagttgtataataaaaattaatttaaaaggatgtttaagtatgaccgtaaataacaaaccaatatatagacataaagctgatcatcgactacctcaatggaataaatataaaaaaagcaaatggattgttagtattcaggaagaagaagatattttcaatattggatttacagctaattggagagtcaaaggtgatgtatggtctcttaaattctataataatgatttgtgtgtaataggagaggatcacaggccaaacctacaaaaaaaaggaaaggcatactatgaactggtagtagcaaagtttgttgtggatcaaggatgctggcacggatacccagttaatcctattaccgatcctcctgactcatctttgttatcggcatgggctcaaacacccggaataccgaagaagaaggttatgaaaatacatacggtaaaatga

SEQ ID NO: 450944 - DNA, 624 bp, Serratia marcescens
atggatgataaaataatactagctatcgtaagcgcattaactggatggttcttatcggcgctaaattctggctatagcggatatataaacaaaaaaaaactactaggcactctgcttgtcaaattaataaaaacagagcaccatacaagaaagatgatactaagcagtgaaaaaattaaagatttttgcgatggatgggaggaatatgaacaggtcagaataaatgtcttttcaagatactaccttgaaccaaatgaaatagttaaagatttaaaagacgcaataaataacatagccccttactacccattactaagtattaatttggagtcgattttagaagttctgttaaacaacaaaaaagccaatatgacaaactcatctagaatggaaggtaacaaagatctctacatcagattactttctgcttatgaggtcggattggatttatcacaacaagaattaaccaaagctatcaacactatcgctttaaagcacggatattacacttacattaaaagaagactttatttgcgtaaaataaaaaaaaccgaaggtaattactccgatttaattaaatcccttggattaaacaaatttaaaacaaagactccactagaataa

SEQ ID NO: 450945 - DNA, 1056 bp, Serratia marcescens
atggctgagttaattaaagatagaccggtagctttggatggaattcctttctataaagaaataccaaaaaagcctttgacttttgatattggaagtacagtgcatgattttttgaagatagatttggacgatctggacggacttcagccaattgaagcgagaagaatacctgagaattcaccagtatttggagtgaatccttcagatgaattactggcttcatatgaaagagataatattgagtttcaaatggttaatgtcatagttaatatttatggcataaaagaggttgagggtgttctcgtaggaaaaccttattctatatcattgaaaccaatggaaaaaaggggtaaggcaacattaaagtctccagattattttagaaattttgacatggaaatccttaagggaattgactatgtctataaaggatttaacccgtttacactcggctatgaagtctttggtaactatagttcacttatgtctggtggttttttaacaggtcatacggatatgctgggtttcgtggtcaatacatatgctttagcaaataaatgggattttaaagatgtatgtttgcctgaggttcccgattgtaataaatttttaagagagaagtttttcaagtatagaactcgaaaatattttaagcattttgataatgtaaaaccaagaaaaatatggggctgtgactccccgatagaactatttctcttacatgctatgaatgatagggggctatcccctgaaatacaaacagctctgtttgctgatgggagcacccacccgtcacttcatcagatgatatcatcgaatgcaaaagaatcagaagttaaacaaataacggatgcggatttttattttcctgagaaaagattagctgtattttgtgattccaatgcatttcacagaggtaaaaaggcagagagaaaagatactagaatcgatactgaattgaatgaattaaacattaaaactataaggattatgggccgggaaataattgacgcaccctatgaatgtgttaataaaataattcagcatctaaagtga

SEQ ID NO: 450946 - DNA, 441 bp, Serratia marcescens; identical to SEQ ID NO: 447382

SEQ ID NO: 450947 - DNA, 246 bp, Serratia marcescens
atgatgcgattaacctttggtcgccagcactttaccctgagcgacaacgacgcactgtttatcgcggaagctatcctgttacagcgtaaagagcctggcgtcgtcttgccggagcaccgcagcgaaaaacacggcgttatccgtctggcgagtcgccaggctgagccgcgcctgttccatgccgggccggtgccgctgacctacgcggcggccgatacccgcaacgatcagcttaccgactgttga

SEQ ID NO: 450948 - DNA, 1464 bp, Serratia marcescens
atgcctaaattaagaatatacttctcgggtttttttaatgttacaccgaaaaaaataaaagactatggtgcttttaatatctctttaattaatgatcttcctttgtttatagatccgtttttgttgtttaataatgaaaaatacaaaggcttgcatcaagaaataataaagtatgtttcttttttacgagaccggtcgcaacacggtgagctgaatagtggcttgattaaaagttggtttttatttcctgaggtaaagcagaattggttaggctatagcattgttggtaatggtggtagtggcctaggtattgatttcgcgaaatcattaaataactcattctctagtatactgaagaattttggcaaagaagaaataacggaaggtagtcaccttgagaagttgtgcttaattaaggaaggagttgggaaggatagtgtaagtgattttactactaacttaattaaatcttttttattaaagtacactgaaggttttgctaaaaaaaatattgataaaaaatatctctcagagcacacggtggcgaaggttgaatttaattatgaaacccggagttggtcatcaaagaaattcaccctgccaacatatgatggcgattatgttcttttaacgccaagagatatacttacaaaagacgaaacttggattaatagaaatgaaatgatagaagatttcagagatatatgtgacagtatccctaatgatcaattacgtggccagttatcagattactttaataggtgtttgcctgatgaggcaaagaaaaaagaaagagagctagccgcggatttaacaataaagaattatcctagcttcatagattattatatccgttataaagaaaagaatccaaatggggctaatcgcgagagcgatgcaaaggtcagtgaaactgaacgtagatatgttgaggctgtgcagcttttagttaatatgatttttgaaaggaatgaggacttcttttatgcaaaggatgatacgttcgaagaagcttataaacgcgttagctatcttaaacaagtaatcgaaaataacaatggatacaaagtattctacttgaatggtgtccctgttaaacgagaagcagatttgcaattaatgtttcgattgacatggtttgctagtatttcagatgtaaacagcgaagttgataatggtagagggcccgtggattacaaaatatcacgaggctcgaaggacaaaacgttggtcgagtttaaattagctagtaactctaagctaaagcagaatctagcaaatcaggttaaagtctatgaatcagcaaatgaaactaaaaaatctataaaggtgattttgtattttaatgatacagaactgtctaagctgactaaggtatttaaagaactaggggttaaggaaagtaaggagttggttttaattgatgctagacctaataaagtatctgcttccaatgtaaaataa

SEQ ID NO: 450949 - DNA, 864 bp, Serratia marcescens
atgcaattttacttccatgaagttggtataaaaggagcggagagtgcgttccccagaacggtttataaaaaaataaagacggagataatttctaatttcactagcaatccagaaagcacacagaaaatcttaaacaaggagttcagtgatggattttgcaacgcatggggtgtacccaaaggagctgcaagcataataaaaaaaattgaaataggcgatattgttttgcttgtcaggacaagggctaaggagggagacatacctatattatgcaagataaaattcatattaaatgaatcatcacctgagttgtcaaaatcattatggggtgacgagcgtttccctctaatttttttatttgagtctgaagtaattagctacacatggaaagagctagtgaatgatttaggatacagccataaatttcgcccaaatggtagcatttatagagttgtggaagaaagactaaatatccatgacggcgcagatggatatctgcgtaaaataagaaaatcaatgtatggtgataatttaaaaaatgaatattcatttacagaaggactacgacaaagaaaggaaacctctttcttctctaggaatccacggcttgtatcaatagcaaaagaaatacatggatatcgctgccatgtttgtaactttgattttgaagagtattacggcgatataggaaaagaattcatagaatgtcaccacttaaatccactatctgaaagaaactcagaagaaataattcaaactcatctaaaagatgtgattaccatttgctcaaattgtcataaaatgatccataaaagaagccctcccttcagcattgaagagttaaagtgtaaaattaaaaaataa

SEQ ID NO: 450950 - DNA, 861 bp, Serratia marcescens
atgttttcaatcgcaactgatatcaggaatacgctgggggagtgtcccctatggtgtgaaagaacacgaaggctttactggactgacattgaggccagtgaactgctcgcattagaagaaggtaatgacgctgtaatgcgctggtcgctgcctgaacgccttggttcctttgctctgactgaacgaagtcatattctgctaatgggacttgcatccaggctggctttttatgatctcaataccggcttactttccacggtggccgcctcaccgggaggcacgggtagccgcattggggatggacgatgtgaccgtaccggtaattttgtctttggaacaatggatgacgattttcccgtgaaagttatcggtaagtttcaccggcttaatgctgcaacgctgacagttgagacgcttgcactgccagatgttgccattcctaacagcatctgtttcagcccctatggcggcaccctctattactgcgactcaatgcagggtcggataatgtgctgcgattatccctcgctgcaaaaccagcgcgtattcactaaaatcgaaggtgaaggtgcccctgatggttcctgcgtggatgccatgggctatttgtggaatgctgagtggggagggagtcgtgttgtccgttaccgtccagatgggagcacggacgcaattctgtcgtcgcagggaattcagagtacctgcccggcactggcaggtgagaacttcacccgcctctattgcaccacagcttctgtagggcttactacgttgtctgaatatgacggtaaattacagaaagctgaatctgctgtcagtgcagggttatctgaaagccgctttgcagcgcatacaatttaa

SEQ ID NO: 450951 - DNA, 516 bp, Serratia marcescens
atgacaacaactgtatttgttacccatcccaacattcatctgtcccgtgtcaactcggcgctggcaaaaagtgcagcatcactgcccgatattaatgtgcgttatctgtatgacatatatccgaatggtaaaatcgacgtggccgctgaacaggctgcgctggaaaataccgatcgtattgtgctgcagttcccgatgcagtggtacagtacaccgccacttctcaagcagtggcttgatgatgtgctgacctacggctggtcacatggtggcgaaacacaggcgctgagtggcaagcaactcatgctggccgtttcgctcggtggtgctgagtctgcgtatcagcctgatggcgcagccggtcatacggtaagcgaatatctgctgccctttgaaacaatctccgggtatctgggtatgcattatctcaagcctttcattaccggcggaagtgcgacgatcaccgacggagaaattgcggcacaggctgaacactacaaaacggtattagtctga

SEQ ID NO: 450952 - DNA, 846 bp, Serratia marcescens
  misc_feature (789)..(798): n is a, c, g, or t
atgacagacaatattcgtagccgaagcacagataatagaagtgaagagatcgacctcggtcgtttgttcggtacattgatagataatcgctggcttattattgcaatcacggcattattttctgtagccagtattatttatgtactattttcaacaccggtctaccaggccgatgcattggttcaggtggaacagaatgctggcaattccattctgaacaacttgtctgaaatgcttcctaacagtcagccgatgtccagcactgaaatcgagttgatcaaatctcgactggtaacaggcaaaacggttgacgatctcgatctggaaacggtgatagaacaaaaatattttccggtctttggccgaggctgggctcgactgacaaatgaagaacctgcgcagatcgccttgtctcgtttcactgtaccagaatatatgctggataagcctctggaacttaccgttgtcaacgacaaagaatatgtgctggatttcgatggcaccgaggttctaaaaggccagatcgggcagtttgcgcaagcccatggcgtcacactgctggtcagttcctatctcggtaaacctggcaccgtattcactgtaacgcgggtaccacagctttccgccatcaacgctctgctgaaatcactggttgttgaagataaaggcaaggataccggcgtgttggccctcagctttacaggggaaaatgcgtcttcggtaagaaaaattctcgacagcatcaccaagaattacttgctgcaaaacgtcgagcgtaagtctgaggannnnnnnnnncttgtctttggaagccaagtcggttctcgatactatcgtttccgttga

SEQ ID NO: 450953 - DNA, 603 bp, Serratia marcescens
atgcaatctgaaaatttttcatctccaagatctctacgctcagccgatgctataagcgcaaagaactccttattgaatgatcctcatattgaacagcttactaaatacgttgaagaactaaagataaaacatcctgaatgggagttcccttattttgacccacatgatggtgggcaaggtgctaatatcctttttctacttgaaaaacccggcccgaaaacatccccggctcttggcggctcaggttttatttcaagagataataatgatgccactgctgaagctatttttaatttcatgaacgcagcaggtatcccacgaaagcgtactgtgctgtggaacactatccccggttggaatggaacgattaagctgacatctgctgaaaaaaaagaaggtctatcagaacttgccaatttattagctctcctaccaaatcttaccacagttgtgctagtaggtcgtaaggctgagaaagctttaccaataatcaaaatgaaaccagtgaaaataattgtgtccgcacacccatcaccaaaagtaagagcaaccaatagagcaatgtgggatagcattacaggacagtggttgcaggcattgtag

SEQ ID NO: 450954 - DNA, 183 bp, Serratia marcescens
atgcagacttacctacttggcaagatgtcaaatctgttatcgccgatcttgatgatcctgaaggcgttgaaattagaaatatttcagctccttatgatctacactttggccgaactccaacagaagttagtttacgtagatacaagtcagtaccaccaggtggtaaccgatttgatctcatga

SEQ ID NO: 450955 - DNA, 192 bp, Serratia marcescens
gtggggggggtctcgtttgccggcggggtgggtacggtgtggggcgtggtgaccggggtgatcatctttaccgtcatcaactacggcctgacctatatcggcatcaacccgtactggcagtacatcatcaagggcagcatcatcatcttcgccgtggcgctggactcgttgaaatacgccaagaagaagtag

SEQ ID NO: 450956 - DNA, 312 bp, Serratia marcescens
atgaaccattacttagccgtattaagcgcattggtcattctgcccttcgctctgcaagcaaaaccgctttccggcagccaggttgcctctggcgtcgtgcgttttaccggcaccattaccacgccggcctgcaccatcaaacaccaaaacgaccagctcatctcaaactgcttcggtaaagtgacggaaaaccggaatggttatatttcaacgccgttaaaagagatgccaaaagaattagtctctaccgtcaccagcgaaatagtgaataacgacccacatttaaaacgcgtaaccatcaactataagtaa

SEQ ID NO: 450957 - DNA, 1092 bp, Serratia marcescens
atgatggaaagtgcaaacgcaaaacattgttcagctaaccgggtgactctgcgtcgcctgctctgcagcgcagtcgcggcaatgctgttcaccagccaaccgctgcgcgcggagccgatgctggagcacatcgccaccccgtttcgcgtcgcgacggcggcgggcgatgtgacttactttgtcgcccatgagcacagcgctcagccgcgtaccgcactggtggtgatgcacggccacccacgcgatgccgctaaaacgttgcaagcggcgatcagcgcagcccaggctgcgggagcgggaggcaaagccctgctcgtcgccccgctgttccaggtgccggagaaacttgccgctcgctgccattccgccggtttgccccagccgcaagacggtgacgctctgtggcgctgcggctcctggatcgaaggcgatttggataatagcgggaaaaccggctcgttcaatgccatggataacctgctggccgacctgaaacggcgctggccatcgctgcagtcgataaccgtggccggtttttccgccggtgctcagttcgtgcagcattatgtcggctttgcccatccgccaaacgcagtgcgtctgcgctatgtggtggctgaccccggcagctggctctactttgagaatctgcgcccccagccagcaaacggggggagctgcggcagtgaaacaacctgccgtttccgttggcaaacgctgaacgccggccagtgtccacgggccaaccagtggaaatacggcctggaagcgcttcccgctcacctgcagcgcacggccgatgccgctcgtcggcgctatgccgccgctgatatcacctacctggctgccgccgaggataccggcaccgcgccgggcgcctactatcggatactcgacaaatcctgcgccgcccagctgcagggcccctatcgattgcagcgagccttggcctatgccgactatgaccggcgttacctggcgccggataagccgcatcggttaacgatcgttcccggctgcgggcacaacgtcgcctgcgtctttcccgccccggcggccaggcaggcgcttttcccgattaatgcagactaa

SEQ ID NO: 450958 - DNA, 222 bp, Serratia marcescens
atgactaataaacatcaattaaaaattattgtatctagtgatgttgattatgaaaaattaatagctgaaatctactgtgatgaagagtttatcgcgcttttacagcaagaggatggtgacaataacattaaagttgagttttcaccgaatattggggtggtagattttgattggcttcaacaagcattattggaagccagaagaaccttactaaataagtag

SEQ ID NO: 450959 - DNA, 720 bp, Serratia marcescens
atgttggataaaaagaaagcctcaatcagcagcccggtaataaccaaaaacctgtttattcggttggttgccgatgataataatttcgacaatatcatttcaattaccgacccgtccgttttaattctggcattgaaaacggcggcccttttccagggcgcgctggttcccgccgaaaacaactcgctacgattcgatgtgcagaaagccatggagctggtcaaccaaaacccagagctttcagtcactaattataccgacattaaaaaagaaacgtctgactcaagaacctccgtcatgaccgacatggtgctgtcgacgatcaaaacggttctgggcatcgtattggctcccgccccggcccaacagcttcaatcggccattgagggcgcctacgtcgggctggacgaaaccaaagacagcgcctggatcttctgggagaagaaaaaagacacgaaaaccacttaccaatacaatattactttctctgtcgaagccggcccgaccgggctggtgctgttaacctgcccgatggggttaaccattgaggtcaataaagaatatgagcgggtgctctttattaccttaacagacagagaatcctactcctgccgcatccaggcgctgacgacggcccagttggccaaacccgccgctaaaaacgccgaagccgcagaagtgctcagcgtcctgatcggcgacggcccgcgccgcgtctaa

SEQ ID NO: 450960 - DNA, 726 bp, Serratia marcescens
atggattgttctaacgagttcagacgcaatattttagatgagataatctgtatcattgaaaaggctattgatacccaaagtaatgtttcaataagagcgttatccatcaagtcagggtattccatcgggcatttacagcggatgttctatctgtatcaagggatgaagatagggacctatatcagaaagcgaaggctgagtcgttcgacgttgttgctgaaacgtacggatatgaagatttatgaaattgctttactgtctggattcagttctcagcaatcatttagccgtgctttttcaaatcaatttggctgccctccgagaacatttagaaccctgagccattggccttttttaaattatcaaccgattattggcttcgacaaagcgccttttcccagcagcatggtatacctgaatttgcatgagtattatgagaaaaaaaggcgggtgcaactgctttccccggtaatgagtcggggacaaataaagataatcgctaagagtccactgagttgtggactgtacaattcatcggcaaaatacatggcgatcaggcgcaatgaagaaaagatggatgaaagcgagtttatcctgtcagtttatgaagggattttggcttcacaggatattgccattgttgaaaatgtgatgtttaaaatccatgatcctgctccaggagaaaaggaagacatcagcatgtggtattttattccgattaaataa

SEQ ID NO: 450961 - DNA, 3840 bp, Serratia marcescens
atgagcgtgttgagctgggcaataggtctgtgcaggaagacggaagcatggctggttaagcgccaggcaaaagatcagctacagcgtgcagagctggggctgagtctgacggaaggagagttagatgaccgctatgacaccttagcgccgaaaactatcaatgatgccagtatgcgagagtatttcattgccctgaaatacgctttgttgcagaaagatgtgagaaacattgccattacaggtagctacggagcagggaaaagtacggttatttcatcatttatgaaatatcactgcgatgataagtacatcaatgtatcacttgccggattcgatatgacggaaaatgaaacaaccgtcagcccaactcatcaggaggttgaattcagtatcctgcaacaaattctttataaagagaatagagagaaacttcccgactcaaggatagacagaataatcgatagaggcccccactatgtcagaggaacctatcgggccttacttaaagtcattgcgcccatcgcggctgccgcatttattatctattttaaaacaattgcagagtttctaagccttccactaacttgggccgaggtatttaatgaacactatattataaaaagcattatattagttttgctggcttttacggcgctatactttataactgccagtgcatcacgaatcggtatttttgataagaaacttaagttgagcaagatcgcccttttaagcggggatgttgaagcaagcgaccaagagacgccatctttactgaataactgccttgacgagattgtgtatttttttaccaagttggaatataaagtggttatctttgaagatcttgacaggctaggaacgcctgagattttcgttaagttgcgtgaaattaacaaaatagttaataacaatattgttgatggcaatccagtcaggtttgtttatgcggtaagagacgacctgttccttggtgctgatgccagaactaaattctttgatttcattcttcccgttattccatttatggatagcagaaatgcgtttactctattaaagaggaaaatgtcgttcgatacgcataatgataaatatctgaaagacatttcggcatatataaatgatatgcgcagcctgcaaaatttggtcaatgaataccatgtattcagcaatatcgttgataacggaaatgataaaatcaaactgttgtcgctggttttttataaaaatatctacgccttagactattttcttaccgataagaaaacaggggttttatattcatttattcgcgactatcgcactcgcaaacttcaccgtaatcatttcgattctctggaaacaaaactggatcttttacagtccgaaatagaacatcttaatcatgaacctatgtatgatcataggggcattagagaggaaatagtttgtcgatatattccaaaaatactctgggatggcattcattttggtacggggaatggatatagtaatttttaccccctaacaactttggctttaattgatgatgaaaatggttttttagaatttttatcgcaaaaggaaaatttatatataggctactttgttagtcatcagagatattcactctcactttttgatagggcattaagagaacaactaaaagaagaatacctgaaacgaaaaacaaaaatgggtaaagataaaaactcggcttttagtgagctgcagataaaaataaagaaacttaaagagtcaataaaattaaaaaatgccctttcgctgcgagaactcacgctaatcatcgggcgtgaaaaatttgaagatattgctcaggggtatcttgaggcgatggagggtcatgacttcgtctctgagcagcagctccatgctttgcgtaccgatatgcgcaatggcgggttagacgccttgtatctgctgctgtctgatggtctggtgatgcaagacttcatggcctaccgctctattttccatgaaggatcgatgaccgtaaatgataacgacttcctgaaagccgttggtcaggatctgagctacgcaacctcaaacggtgaatattttatcgatgatgagaacagagtcaccagcgaactggttgaacataaccgtatttatgccgatggagcgcttcatcatcaactggtgacacatctgattgataacgaggatgaacatctggctggtatgatcacttcgctattcagcaagtctgatgaacatatccttgctgttttttctgagctttatagcagatttggcaaacccgagaccttcgataagttaatcgttactgcactgcaaaaaaatggttatcttgacagaatggttgccgttctcgcaggccagcctggtgaaaaattcaccaatgatattgctataagtatgatagcctgcgtatcgcctgaacatgcgctagataaatcgcaataccgccagcttattcattcgctgggctgccgtatcatctctcagctcaccgaggagaatcaggaagagttcatgcgtcacgtacaacaggcggaggcatgttatgacgagctgttcgaaccaatgacgctaacggagcggtattgcctgcaatttattgcacaaaacagtctttatcagttaactcggcacaatgttggcattgccgtttcgtgtcttattgaaaacataacgcctgaagaggcggaaaggaaaccttggacgctcgcctatgagcataaactcaatgcggtttctgattacttcagtcaaaacatcgatacattcgtaagggatgtgtttatctcctctgctgaggatgccgaatgtatccgctacgtcctgacccgcacctccctaagcgatggttccaaaggcgatatcgtcagaaaaatgaccttctcgtttgctgatctgtccgggatatcggctaaagaagaatttaccgaagaccagctaacgatctcctatcacgacctgttttaccgttatgaccgcgtcgtgccgggatggggcgcgctaatagactatatctgtgaagactgcaacatggcgatactgacggcgtatgtgacaaagcatgtggctgcattaggtcagtcccccctagaagtctatgatggcgaccgctatgacctgctgtacatgaaaattatctgtaatgatgacctagacgagtggacttatcagaacctggttgcaccgattgagattaacatgcgggaaattgatgagcacctcagcgcccgtaatttctgcacattgatagctatgttgaaactgcctctcgacgcggatgtgtatgaaaaaattgcggctcaatacgcggatctggatgagaaaatcagtgatgccttcgtctattggtttagtcagtataaaagtgaatttttggagcagcccgagttctatctaagaaaagaaaaagatgcgcgcttctttaaagccatgttcacaaaagtcatgacttacgcaccctttacggtgcaagaaagagcggacctggtgtcgctatttattgattatttcattgtgtctgatatcgctgaccttaatttcccaaatgatgtcctgctgcaggtgtttaacagcactagtaatgaagaattcaagggcatgctgtttacgcgatttattgtgacaggtctcaataaacatcaactggccgggctttgtcatcatttaggtgaagatgaattgaaaaatatattccttaatcgaacccgagcgacaattgctgttgcaaacagggagcgcgtgatatcaattcttcagcatctgcaagcagtacgcatcatcagagatttcaaggaacgtgaggatgggaaattctctgtcgttatcgaacctaacccagaggatgaagattag

SEQ ID NO: 450962 - DNA, 282 bp, Serratia marcescens
atgcagccgtataaagaggttgggtttgatcatgagctttgtttggcgatcggcagagccgtattggacgtggtagcgcaaggggaagaaaccagtgcgccggcggtgatgagcgccattgagcgatcggtggagcaggggctgaatgacgacgaagtcgccgctgccgacgatgccctggatttgatcgcgcgtctcatccatgactgccggtttgttcatctaccgaatgaagaggaggcttcccatgcattggttgaatttcaagcgctacaagagtga

SEQ ID NO: 450963 - DNA, 138 bp, Serratia marcescens
atgggcaaaagggatcttcccatcatcatcggcattctggctatgctgaccctgtggctctgcgcgcttttcaacatcggcgatatcaccttcacgatttctcgtctgttccactggatcgaaagccagcgcggataa

SEQ ID NO: 450964 - DNA, 297 bp, Serratia marcescens
atgtcaccgagaataccggcgctgtgcgcgctgttgctgagcgccgccgtgcaggcggccacgacgggcggtatcgacctgcaggctaaccgagagccgatacgcgcagcgaaaaaccccgccgctatcgcgctgatcccggcgaactttcacttcgcggtccccggcaagctgacggtggcggtggcgttcgagaattccccgccgctggcgctgttcgccgaggacaataaaacgctgatcggcagcgatccggacatcgccccctggtggccgacagcctcgggctggagctga

SEQ ID NO: 450965 - DNA, 276 bp, Serratia marcescens
gtgcaaagcccgatttaccgaacaccagatcattaccatctgaattctgtcgaagccggacgtaccgtcaaaggtgtctgcagcgaggcgggaatatccgaagtttcctattacaactggaacgtaaattacgacgggatggaagcttcagatatcgaaaagataaaggatcttgaggacgaaaaccggcgactcaaacagatgtttgccgatctcagccttgaatgtcgggccctgaaagacgttatcgaaaaaagctttaaagccagcgattaa

SEQ ID NO: 450966 - DNA, 351 bp, Serratia marcescens
gtggcgggcacgcctgaacgccctgtggcggaagctgtgcgcatgaacggcagcgcatgggtaggttgcacgctattgctggtctgggcgccgtggagccaggcctctttgaacagcgcgcgtcccgacgccacgttggcggcgagactggcggcgacctgcaacacactggcggttgagcatgccgactggagcgatatcacggcggtcgttcagtccgagcgcgtttgcctgcagcggaatagcgggcggcagcgttctgaacgctcgccgggtgacaccgcggtcggtctggtgcaacgcagcgttgcgggggccgccgtgcgggcgctggcggaaaaaacgccataa

SEQ ID NO: 450967 - DNA, 744 bp, Serratia marcescens
atggatgcgcttgctgcagtgatgttcagtatgattattgttggggcaatccgtcagcatggggaaacacggcagcataaaatcgtttcaggtgtgattgccgccggacttatcgcgggtgctggcctgacatatgtctacgtcagcctgttctatctgggggcattcagtctgccaatcgcagcgggagccaccaatggcgcagacattctaatcgcctatgtaaattatgcattcggttaccggggcatgctgctcctcacgtttatcattacgctggcctgcctggtgacagctatcggactcacaagcacctgtgctgcctacttcagccagctgacgaagttctcctataaaaaactggttattggttttgctctgttttcgatgctggtatcgaatcttgggctgactgaaatcataaagatttccctgcctgcgcttacctcaatctacccgccattcattgtactgattacggccgccatcgtttcaggtaaaaatgcccgcccggttggggtttaccttccctgcgtactgacatccctgatgataggatgcatacagagttttgtacctcccgcagcgatgcctggtttcatagagaatcttccactttttgatgagaagttggcctgggtactcccgatcctatgcgttggcacggtctgttttgcaatcattggtttcagggcagtaaaacaaaaagtgtctgagccggaagctctactagtgagagaataa

SEQ ID NO: 450968 - DNA, 705 bp, Serratia marcescens
atgactgaacaagtcgacgaaatgtcttacgagcaggaaatgctgcaaatgctcgcggctgccgttcgcgccattggcagcgtggcaccgggtaataccgagattgttctgcatgaccttcgcaatcctgagttttcgattgccgaaatcgcgaatgcccacgtgaccgggcgtaaaaaaggggattcagtcctcgcagggctgagaaaagataaggcgtttatcactgcgcttgaggaaagtcaggagcgcgtcacgcttttgccggattacgaaacgttctcacgcgatggcaccccgctgcgcagcagtacagctatttaccggggccgcgatgcccgcccctttgcggctctatgcatcaatgtagataacaacgggatcgcgcaggcgcttaacctactgcagacgctgtcaggcgtaacactgccgcccgttgctccagcgcctgaagtcaggagtgccgaacagcctcacgacagcattgaagatttaatgaaggaaattatcagcaacgcgaccggcctcaatccaggcagccgtcgtgccgacgcaaagaaagccaaaatgatggccgtacagcagatgcaggaacgcgggatctttctgatgaagagtggcgtggaaaaggcagcagacgctctgggcgtgacccggtacaccatttacaactatcttgatgaactgaaaagcgctgccaactga

SEQ ID NO: 450969 - DNA, 357 bp, Serratia marcescens
atgaaaagatataccagctctatgccttaccccttttcgcgtgcagttgaggctaacggctttctgtttctgtccggccagctggctatgaatacaaagggtgaacccgttcccggcaccgttgaggaacagacgcgcctgataatgaaaaacatcagcgaaacgcttgaagtatgcggatcttcgctggaccgcctggttaaagtcaccgtctggatttcagatatggcgcatttcagcgcatttaacgaaatctaccgcacttacttcccggacggttttcccgcgcgttcaaccgttgtcagccaactggcatacggccttgacgtagaactggaagttcaggctttagcctga

SEQ ID NO: 450970 - DNA, 912 bp, Serratia marcescens
atgtcactgagtattaaaacccccctgcttgaatcactgccgctgggcgagatgaacggaacccgcgtctggatgaagatggaagccgcgcagccgtcaggatcgttcaagatccgtggtattggctttgcctgtcagtatcactacgggaagggcgcgcgtcgttttatttcttcttctggcggaaatgccggacttgcggtcgcttatgccggtcgcaggcttggcgtgccggttatcgtcgtcgtgcctgaaaccacgtctgaacgtgcgcgtcacctgctgcagctggaaggggcagaggtcattgtacacggcaaaatgtggtcagaagctaacgaagtggcgatgtcactgctgaccgaacaggatgctttccttcacccgtttgacgatccccttctctggcaggggcacgcctcgatgattgatgaggttgttgaggatggtgtcagacctgatgtcgtgatcctgtctgtaggcggtggcggactgctggccggtgttgatgaaggactgcgccgcaacggtctggagaatgtgcccgtttatgctgttgaaacacagggtatgtcatcctacaacgccgctctcgaagccggtaagcctgtagaggtagccgctctcactggcgtggcgacctctcttggcgcacgccaggtgtgtcagcgcgctttcgaccttgcgaaaaaacgcaccgttgtgccggttatcgtctccgatcgtgaagcggtggatgcctgcctctctttccttgacgatcaccgtatgctggttgaaccggcgtgcggcgcgtctctggccccgttgtacggtaaaaagctgggcctgaataattataaaaatgtactggtcatcgtctgtggtggttcaacggcaacggtgaactcgcttagcactttcaaagcctaa

SEQ ID NO: 450971 - DNA, 933 bp, Serratia marcescens
atggtcccccgtttgcgtaagcggttgttctcacccgcccttcttttaatcgtgctgcctccgcttttctgggcaggcaactttattattggcagagcggtacacggtacggttcctcctatgacgctgtcgctctggcgatgggtactggcgatgtttttcattctgccttttgcctggaaatctgttcgcagggattttccgctttatgtggcaaatcgctggcttattgtcagactgtcgctcaccggcgtggtggcatttaactcgcttatttacgtaggccttcatgagacaacggcggctaatgcgctgcttcttaactcattcatacctgtgcttatcgccctgtttggagcgttattttttcgcgaacgcctgggtggcttacaggcaggcgggctactgatttcctgtgcgggcgttgtgatcattatctctcacggtaactggcatacgctggcggctctttcattttcccacggcgatttaatcgtgttctgcgccatggtttcctttgcgttttacacgctctggctgcgaagggttccctctcagattgaccgtcttggcctgatggccgcacagatagcggtggcgttcatctttctgatccccctctggctgacagagtatgccagagggatcgttgcagtctgggataagccatcgctgctagctctgctctatctgggcatcttcccgtccgttctcgcctacctgctgtttaatcatggcgtggcgcgttttggggcggcccaggccggtctgagcatccatcttattccgggatttggcgccattctggccgtgctgttcctccatgagtcgctgcatgcttaccatgcagcaggcatggccgccattcttacggggatctggcttgccatgaagaagcgcagcggtgcggtaacggaaagcattgccaaataa

SEQ ID NO: 450972 - DNA, 633 bp, Serratia marcescens
atgacagaaagaatctactacaacagtgacgcgcttgagatgaaatccgatgtggtcagctgcacaccacaggaggacggtcgtttccgtatcatcctttcagcgacgctgttccatccgcagggcggcggtcagccttcagataagggcaccatcggaaccgtgaatatgattcaggccgtacaggaaggtgacaacgtcattcacattacagatggccccgttgctgaaggtccggttcatctctctgtagatgctgaaattcgccgtatacacacccgctatcattcggcaggccatattattggcgtggcgggagagaaatatggctggtacggtaataaaggcaatcatcgtccgggcgaagggcgtgtcgtgtttgacgcaatccggctgaccagtccggtaaccgcagaaaacttttctgcggatgtggcggagatgatggcgcgcgaccttgaacttattctgagcgaagatgaaggcaaacgcatggtgacatggggcggtctgacgccttacgcgtgtggcgggacgcacgtgaagaaaaccacggaaatcggtgagatacgtatcattaaagtaaaagagaaaaaaggtcagctttccgttcagtacgaactcgcgaactaa

SEQ ID NO: 450973 - DNA, 669 bp, Serratia marcescens
atggactttcacttttacaatcaatgcgctaagtgcaataaaacaagcaagctggatatacttaagtgggcaataggttccgtaaccttcaatacgggaaaggaagtagttacagagtgttcaggcatcgtctatttttcattatactgcaatcgttgtaaccagtgtctggctggggtgtttgagtatggactagatgttgggcaccctcaccctctgaacgaatacgaccaaggcagcgggaatatcagcgactttataaataatttctatgaagattttatttttgatgtcaaaccatgtaaacgtaacaacctattttctcaagccgaagtttgctatgcctgtggtgccttctcagccgtgataatgctatgccgcacgataattgacaccgataccaaaaagatgtgggacgccagtatgaaggatgctgacatgcctggaaaactgaaaccgagactccaggcacttttcccaactgataatgatcgctccaataatacaaagaattaccacataacaaatatattgcgttttttaggtaatgaagtaacacatgaagaaacccttgttactaaagagaaagcaaaacaatgcttggaattgacagaacagtttattaatggttcaaacgagaactgcacctataacttttttaatccataa

SEQ ID NO: 450974 - DNA, 405 bp, Serratia marcescens
atgatgacgctgaaatacccggaacctgctgtacgacccgacgggcaggcctgccgtgaaccgtcgttgtttaccctccctccgcagggcgtggccaccttaagcgaaacggatgcgcggcggcttgagacgttctgtgcggctattcgggctaggttgtcagggccagttaggcttaccgcccacccgcatcgcatcgggagccgtaccagtgtagcgctgcatctggaggggcggctggggcgctgcatcgatgtgctgatcacggtggccggcagtacgttgtggccccagtcggatgagtacgaccacccgcgctggtatgtcaccgtgtcggacgcggccgacgtggtgtatctgttgctccacctgagtgacctgtgcgagagatttcgaattaattag

SEQ ID NO: 450975 - DNA, 186 bp, Serratia marcescens
atggctctgagtgatgtgaaggttcgttcggctaagcctgaagctaaagcctataaacttactgacggtgaaggcatggtgttgctggttcaccctaacggctccaaatactggtggcgacgttaccgctttgggggcaaagagaagatgctggtgctggggaaatacccggaagtgtcgttgtaa

SEQ ID NO: 450976 - DNA, 219 bp, Serratia marcescens
atgaacagaaaagagaaactgccggcggccctgttggccatatttctgggcggattaggcatacataaattttatttgggcatgaagtggtgggggctgttctatctgcttttatgttggacggggatcccgtcaattgtcggctttatcgaagggatagtctttttattccagtcggatgataaattcaaccgtaaatataataccggccgaatttaa

SEQ ID NO: 450977 - DNA, 234 bp, Serratia marcescens
atgaaaaagatgtctctgttggcgatcgccgtaagcgcgctgggtatgttcgccgttgccggttgttcttccaaccaagcgatcaagaccaaagatggccgcacgattgtgaccagtggtaagccctcggttgatgcggataccggactgatttcctacaaaaacgcgcaaaccgggaaacgggaacagattaaccgcgaccagatcacggacatgaacacgctcgacaactga

SEQ ID NO: 450978 - DNA, 1827 bp, Serratia marcescens
ttgccctcgcaaaatcatgcttctgatcctcactgggatgacggtattcccggtcttatcttcgactataccgccaacgctcaactccagcggcagcgggacgaaggtatcgattacagtttcagcggtaatggaacgacgggggcgaatatcggcgcctggcgcttgcgcgcagactggcaggggagcctggaacgcaaggcctacttcggtatggatgcctcccactccctggatatcagtcgctattacgcctaccgcgccattcctgcctggcgggcaaaactcacactgggtgagaactacctcgactccagtatttttgacagctttcgcttcgccggtgtaacgctgctttccgacgacagcatgctcccttcgaccctgcgcgacgcggttcctgacgtggcggggatcgcacgcaccaatgcgaaagtcaccatcaagcagcaagggcgtgtgctgtatgaaactcaggtaaaacccggcccgttccgtatccaggggatcaacggcgccgtcgccggcgagctcaatgtgcgtgttgaagaacaggacggcagtgtgcaactcttctcggtcaattcggccggcagcccctatctgacacgcggtggcgacattcgcttcaagttggccgcgggaaaaccctcggcctgggagcattatttgcaagatcctccgtttagcgccggcgaggtgtcatggggggtaggaaacggatggtccttatacagcgggatgattgtcgcgggcgattacagcgcgctatccttgggcgccggtcgggagtttgctcacctgggcgcactctctttagatatgacgcgtgcccaggcgtatcttcctgcggataatgaaaccctgcgcggcaatgcgatccgggcccgatacacaaaatcgttcgacgatctcgacagccagataagttttaccgggtatcagttcatggatcaggattacatgggcatgagcgactacctggactctcgggtttgggggtttcgcatcagcggcaataaagccatggaagttctttcggtcagtaaacaattcagggaattgggcctcagcatcagcctgagctataactaccagtcctactgggattcaccgtccagcgatcgctacaccctgcaggtttctcgggatttcgaccttggaggactcaaggatctgaacctgtccgtttcggcctatcgcaatacgtatgccggcgccaacgacgaaggcatgtacgtatcgatttctatccctttgcacagcaacggatatatcagccaaagcctggccatagagcaggggaaagcgtcacacaggatcgaatacgcggatgatatcgatgaaaataacagctacctcatcacggcagggcattcacgcagccagtccagcttaggcggttattatgatcatgaaggtgacatcgtcagcctgaatgccaacgtcgacttgcaggaagggcagtatgcagcagtggggttctctgcacagggaggagcaacgctcacccctcagggcggcgcttttcatcgcgtcgatgtccccggcagtacgcgcctgttgttcgattcccggcgtgacgtgggtaccccattctatgaagaaagtcatgccatccccggcaaccgttggggtaaggccgtcatcgcagacgtgcccgattatcagcccctgcgcgtgggtatcggcaaatcaaagatccaggaacccgacgtgacgcagtggcagaacgccttgtcagagggagcgatcggttatcgcccgtttgatactcccccgacgagagaaaataacggtgacgagggaagcacgagaggaaattga

SEQ ID NO: 450979 - DNA, 567 bp, Serratia marcescens
atgtcgtccaatatccttatcagcgcctgcctggctggtttcaaagttcgttacaacggtaccgacaaacctttgcttgacgccacgctgcaacgttggcggcaagaaggccgtctgatcgtctgctgccctgagctggccgccggtttttccacgcctcgcccctcagcggaaatctcgccgcacgccgacggcgcggcagtaatcgcgcaacgggcgcaggtgatggaatccagcggcgatgatgtcaccgcacaatacttgctcggtgcccaactggcgctggaaaccgctcgccgccacggctgccgtttcgccttgctgaccgacggcagcccttcttgcggcagtcaacggatttacgacggtgccttcaacggccgcaccaaacccggccgcggcgttaccgccgagctgctgcgccaacacggcatcgaagtcttctctgaccaacaacttccggcgctgatcgccagggttgaaaacaccgggaactttagtcctaacggtgcagaaactccgccacccggcggcgcagatgttcgatgccctgcggatgatcaatga

SEQ ID NO: 450980 - DNA, 1167 bp, Serratia marcescens
atgcgcaaatgcctcacatgctgtcttatgttaattttaatttatcctttaggtgtggacttatatcttgttggcttacctgatatcgccagggagctgaatgcttctgccgtcgaccttcataccgcattttcaatttatttggcgggtatggcatcaaccatgattatcgcagggatagtttccgatcggtttggtcgaaaacccattgcgttattgggggcgcttattttttcctgtgcttcatatggtgcagcattgactatcacggccgagcaatttctttttgcacggttttggcaaggcgtcggcgccggtttctgttatgtcgtcacttttgccattctgagggatgctctggacgatgataagcgttcaaaagtgctctccgtaattaacggcattacctgcatcgttcccgttatcgccccggtgctgggatatttactgttaatgaattttaagtggccaagtcttttcaccggcatggctattttcgccgggatatcatgttttgtctgtttagtttggcttgatgaaacctatcacaagaataaagacgcacatcaagcagcagaccgcagtggtgaaagcctactctcatcattatttttaagccgtttgttcatcacctgcctgtcaatcacagcgatcttgacctatgtgaatacctcgccaattattttaataaaccaaatggggttttctaccgctcaatactctatctcgatggctgtgcttgcaagctttagcatggccacctcatttttaatgccttacttactttcctggctgggccaaacaagggttctattcctgtcacagatgttatttttagtctgtgcttgcgtatttttctttacgcaggcgctatacctgagcacctatttaaatcttgttggattcgccatgattggcgttagtttcgctatggggtttggggtcttaatgagccaggcgcttaagccgtttaaacaaaatgccggattggcgagctccgtactggcgatttgccagatcgctttttctgcaggctacatctggactatggggatgcttggcgtgagcgcagtcaatatgctgattattctgttggtgttttccagcatcgcaaacgcgatcatattgatcgctgtacccaatgagcaacgcagccttcaggtgtag

SEQ ID NO: 450981 - DNA, 456 bp, Serratia marcescens
atgccatccggcgcaccgcacttgccgagcggcgtcagcggctcactctcgcattcgtcagacaatattttactgctggcggggccggaaggggcatacacgggggtggatatcgaacgccggttaacaccgatcgctctgcaatcggtcatcaaccgggtggcgacacaggcagagcaacgctggctgcatgacctggcggcttcgcagcaacagctcggcgcaaccgtgctgttctccgcgaaggaaacgctgttcaaagccctttgcagtaaaatgaacgtcaacccaggctatgctgccgcagaagccccggccccaccgcagcacggcgttctgtctctcaagctgacccgaaatttaggccccggtttggacagcggccaatgtttcgaactcagctatgctcagatgaacgatttcatgctgacctggttatgtcagtcttcaatatga

SEQ ID NO: 450982 - DNA, 441 bp, Serratia marcescens
atgatgaccgaagatgatgcaaggccgacattctcacaccgttcgccgatggaaagccctggtttcagattctggcaaacgttcttgcagtggcaaaggcagattgatattgccctggctccctatcatctgacgcagcagagcttcagcattctggcggtgattggctggttgtcaaagcagaattatcaggcgacgcaggatggcacggtcaggcaaaaaatgatcgttgaaaaatccggtgtgcagaagatgcagatctctctgttattacgcaagttggaacaggggcagctgatcacggtgcagccttttttactggatcggcgagagcggttgataaccttgacgccgcacggattgcgaacgttgaaagaggctgtgccgttggtggaaaaggaagacaagcggtttttagccaaagttcatattgaagactga

SEQ ID NO: 450983 - DNA, 447 bp, Serratia marcescens
atgttcacatggacttacagcgaaaaagtggcaacccgggcaacgccggagcagatctgggcgatgtggcaagacgccgcctcttggccctgttgggacagtgagttggagtgggtgaggttggaaggagagttcattgttggcaccgttggtcggatgaaacccaccagcggcccggaggtgaaattcctcctcagcgatattgtgcctctgcgatctttctctgatgtggcgcagttacccctgacgcgcctggcgttcgatcatgagtatatttcccctcaggggaaggacgagacagcgcaaatctgccactcggtgaccatgtcgggcctgttggcgcccgtgtttgggcgtctgattggcgggaagataaaaacccatttgcggcaggcgatgcaggaactgagtcagcgggcgttaaccgaggataagacattgaggtaa

SEQ ID NO: 450984 - DNA, 1173 bp, Serratia marcescens
atgtcaaaaaacgccatttcagccgtgatgatgacggtgcttgccgccacggcattttctgcaggcctgtccgaatttatcgtcattggtctgttgggacaaatggccggtgagctggatgcgccactgtcgcagatgggattgctggtcaccgcctatgcggcaggaattgcgcttggcgcaccgttgctgacgcgaatgacgctatctttacacgcgcgttctctggccgtcggcttgatgttgctttttgccgtcgtgagcgccgcttcggcgatggcgtccagcctggcttctttgttggcgttacgtattgtcgccggcgcgatacatggggtctatttcagcatcgcctccgccagtttatcgatgatcttcgacgagcggcgtgcgccgatagccatcgccttgatgttttccggtctgacgctggcgatggtgctgggcgtccccttagggatgctggcgacggcggattatggttggcaggcgccgttccaggcgatagcggtggtggcatgtgtgagcggcggtttgttgcagttcgttttgccggaaagttttgggccggcgctgccggtaccccgaggtagcgcgctgctgcgaagcacgctgttcaatccggcgttaatccgaccgtactgtttcaccgtattggcatttggcggcggttttgtctttttctcgtatgtcgaaccttggcttgctcatgtggccgcattggatgtcggctcggtcgcgctcgttctggcgatggtcggaggcggctctttagtgggcaacatccttgggggcgtactgccgggtcagctcggtttgcagagggcgctgattatcgccgtgttgctgcagtgtgtcgggttggccgggctcttctggagcgccggctcattcaaccccatcgttttcttattgctctggagttttggcgtgttcgcgacggcaccaatggtgcagacctgggcgattgtcgaggcggagcaagccaatgcgcgtttatcggctagctttaatgtttcggcgtttaatcttgggctcgctctcagttcttttatcgccacacgccaggtggcgctgaacggcatggcatatctaccggtgacggctgcgctgatggttgcattggcgctgccattctgttttctccgtacgcgcggcgtgccggcgaaatga

SEQ ID NO: 450985 - DNA, 378 bp, Serratia marcescens
atgacggcttcttcatccatcgttgtggtgttcgatcagctcactcgggaggatttttttcgccgtctggagtggccggctttagtgcgtgcttggtcaaaaaccatcgcctggcatcccctctccgctcacaaagtgctgctggagttggccggactggacggcattgatcgcctgaccattacccgtcggcggcgtggcgatcgcattttcatcggtgcgcgcgacagtaaaggcgtgctgctgcaatccggcgtttgggaatatgagcgcgaaagcgggttgtgcgtgtgctatcgccgcgtttatcggcctgaactggtcacggtcttgcgggagcgcctggctgattttgtgtgtgcaacctttatgaagtga

SEQ ID NO: 450986 - DNA, 417 bp, Serratia marcescens
atgaaacattggattgccgttatatcgcaggctcacgctcgtattgccgctgagtcgggatttctgcaagtctgccatggcaaggccgggccgctgcggaaaacccgctccggcgacgaggtgtttatttattgcccccgcagcgagatggggggcggggacgtgttgaaaaccgtcgagtttcactgtgttttccaaaacgacgacgtgtatcaggtggaacagtttcccggtttcaccccacaccgtaaagacgttgttttcaatagacactttcagccagtggtgctgaaagaggtcgcgggactggaattcaccgcagattctcactggggaatgttggcgcgtcgcggatttttcgagatcgggcctcatgatgccgccttgctgagaaaggcgatgcagggggacaaatga

SEQ ID NO: 450987 - DNA, 468 bp, Serratia marcescens
atgacaaccgctaacggcaacgcattcattttcaaccactccgtcgaaattcccgtaaccgcagccccccatgtgtgggccgcctggaacgaattggcgaattggcaccgctgggatgcttcgttgcgggggactgatgcggcggagaatggcctggttttaggaaaacgcttcgcggtgctaccgaacgggggccctggcgcgatcgcggttaatgtgaccgcattggttgagggttcgcatttcactacgacggccaatagcccgatgggattgctctctttcggccatacgctgaccctgagtgaggatcggcaaagcgttcagttgctccattcaatctgcgctattccgggggagaacgggagcgcattgccgccacccctgttgcaaaaattgcgcgccgatgtcattgacagcgtgcagcgtctcgctgctttcgccgtccaggaggagccgctggcatga

SEQ ID NO: 450988 - DNA, 654 bp, Serratia marcescens
atgtctgagacttttagctgtgtgctgcatcacgatgttgtcgaactgagcgagagcgccactggaacggtaacgcatgttgcgcgaaaggatttcgaggccctgatccctcggcggcagcggggtaagctgcccgccgcgacgcgcatggccggcggggtttggcaacactatcgccttgaccagcgtttggctaggttggatgccgatccgaaagagacgccgctgttgatcctcaaccgctacgccaattgggactatgtggccgacatgatgtgcgacgacgtagccgtcacgctggaaagcgttaacagctatgtcgccaccgcgtggttccccgcgagcctgcaggggtatctgacgatagaacatggcaatcgcgccgaagcactcacgttggcgactaaagacatcgatatgcaggccgccgcgattgatggtctgttcctgcgtgacttgcagaacaacaagatcggagcggtcgtggtggggacttttgaagcgatacctgaaaaagtcggtcgtcatgacattgtccagggcaaaccggccgttttcggcgcgttcagcattttctcttcccaagacagcgaaaccgcgattgtcgcggccttaaccactcatcaggagctttatcatcatgacaaccgctaa

SEQ ID NO: 450989 - DNA, 1149 bp, Serratia marcescens
atgagcaagctgtacatcaccaatgcggccgcgctaagcccgctcggcggcagtttaaatgagatttggcggcagatcttgcaaggtaccgtcgcctacggccatgcgcgcttacccggccggcgcgatttttttgtcgccgaaacggtgccaggcagtggttctgacatcgtcgcctacgcttcgttgtttaaagaggcgatccgccgcctcgtcgagcaactggaaattgacgcgcctgttgatgccatcttcttcgccagcgcagttggcaatctggctgaggtggaaaacgatatttacgccgaccggccggtttctcttgagcagttggatttttcctcgatggagacggtatttgcggaaacggcagcctatggtgccgggacaaagttcgtctgcgttcctaccggatgctgcgcgggattgcaggcgatcggcttggcgaaaaccaccatgcctcgtcttggtctgaagcgggccctcatcatgtcactggatttcggcttgacgccactggcactggaggcgttcaacaaaatcaatgcgacacgcacttatgactccgccatgtcgggtagcccgtcacgcccattctgccatgacagggacggttttttatttgccgatggcggcggcgcgatcttggtgacgacagaggaaccgacgccgtctgtaccgcatattgccggctatggctgcgtatcaagcgcataccatatgaccgatattgcaaccgacggcagttccattcgtcagagcattgaacgggcgatatgggacgccgacatcacgggcgcggcgctcgaccatgtgaatctgcacgcttcaggaacccagcaaaacgatcaggctgaataccaagcccttgtcgatgtcattggcccaaatctgccgccgatcaccgcttttaaagggaatcatggccatgcgttaggtggcgccaatatgatcgagatcgctttggcctggaagatgatgaccaccggcctattgcctcccacggcggaatcgctgccggttgatgcctacgaagccgttcctccgcgtgagcaggcggtttccgccacgatggcctcgctgctgaaaacggccagcggcttttcgggtattcacgccgcaatgattatggagaacggcaatgtctga

SEQ ID NO: 450990 - DNA, 738 bp, Serratia marcescens
atgaaacctttcacctgtatttccacggcgctctatcccggtaacggtgaacctatctcgattcaggttgatacgttggatcacgttgccggcgtagctcatctgtgccgtggcttcgacatcacaccggaagattggccggatggctacggtatttctaatgagatcgtcacgctttcgacccatcagggcacgcatattgatgcgccactgcattactcgccagatggcttcgacatcgcggcggcagatattgataactttatgggccaggccgttattttcaccgatcgcatctcttcggggcatgaagttgagctcgactggcgagagtatctggcgcgtctcgaccggtacgcagggcaggcgcgtgcggtctttttcattaccggcgcttacgaacgctatggcgaatcaagttatttcaccgagttcaaaggtgtgccggccccctatgtcgaggcggcattggatcggggatacaccctgattggcaccgatgcgttcagtctcgatccccctttcgcggtgatgtcgcgcgaatttgtcgcgactcgggatcgttcggtcttatggcctgcgcatgtgctgggccgccaacgcccgtatttccagattgagcggctggcaaacctcaaggattttgaggcggcccggttggtcgaatttatcgcattacccatcaaactgcactgcggcgccgcttgggcgcgcgccgttgcaaggattatagaatga

SEQ ID NO: 450991 - DNA, 927 bp, Serratia marcescens
atgcgacagcgaatagcaattgtagggggcggagtgactgccggcatggccgcgcgcttgctcgcccctttgggcgaaacgacgttgattcagccgggaacccctcacgcgagcggcatgcctgaaattgtgccgcgtcggccatttttcagcgcgctgggggaacgcggggaagatgaatgggttgccgcaatggcaccgtctctcaccgaggtgagttggcgtaagggagcccgcgtgcgcacagttcggttggcctctaccgaggatttcttggtttacgacaaaacgcgattggcgaggttactgcttgatggcgcatcggtggcgcgccggataaccggagaggtcggtgagatcgccgaattgcaggggtttgaccgggtcttcgattgtcgcggagccagagcggtgaaaaacgatccagcttatcagcatcaggtggttcatcccgcgcgcacggcttgccgttatctcgtcgtttctgtctcacctaaagatcatgacggcgtcatgaggttttgggcggaaacggcgcctggtggcaacaggcgcactttctttcgggtgccggtgggtaaagggcgtgtatcgttggggtgctcttgtttcccggatgacttgctgtccgatgacgaactgcatgcggcgttagaacagcaagaaggcgcaagggtgtcacctgaggccgtgctgtttagcggcgctgctgttccacaaccactcgtcatgcattgccgcattccgcatgtcaccccgttgggcgacgccggcgcaaccccgtgtccgttgactgaatatggcgtgttgaaagcgttttcgcagattatggctttggccggcggcgagtcgctgccggaggctgcgctgcgccgtaccccgaatgaagaagtcgatccgcatttaccgcaggagctgttttcatga

SEQ ID NO: 450992 - DNA, 441 bp, Serratia marcescens
atgtctgagctttgtctcaatctgctgaccaaacagcgggtgcggcacggcgttgaaccgctggcgctcatctggtcgctggatcattggctcggcagcctggagcgggtttgcggcattcaacggattgaagaaagcgctgtcaggcagcgctttatcctgcatttcgatgctgacagacctgaggcggaccgggtcgaggtggaacgaacacgtacggattctcggatatccgtgattcacctcattccaccaccgggtattcaggcgctgtcggccgattggtggacggaagcggagcacccggggattttgttcgtctgccggcgcatgctgatagatgaagcggcgtatacccccacgatggcgcgcaagatgtttggtttgctgcgggaaaatgtcggcaaattgatggagcgcccgtcatgcgacagcgaatag

SEQ ID NO: 450993 - DNA, 726 bp, Serratia marcescens
atgttgcatgattgtggtgttcggcgtgccgctttggacgttactaatacattatttgaattaggcgttatagactctaataatgacagtgtggaaatggaacaggatattcgtcaggggcttggtttggatagccaagagttaatgaccctggtggagattgtttcttcgttagggctttccgcggctccgttggatgaggataatgtcacaacgcttgccgacttggttaactatcttgccgcacatcgggatcgctggctgcataccgatgttccattcgtattgcaaggcagcacgattatatcccaggatatagagacggttttttcttatattcgggattatcggaagtggccggagatgttggcgcacgtcactaaaattgaagaagatatggatgatgggcggctgcaaagtttcattatgcatattgaggagctgggcaccaaacaagattactttgttaagtcctggcgttatgtcaatgacgagcatcggatcatcgatttttcccaaccgttgccgcccaaaggattccgcagccacaagggcggctggcgcttccaaccacttgccgatggacgtacccgtttaatcagttatcacggtttctcactgcatgacgatactcaggcggatgaagccattattttgattagaaagcacattcatgccgcgctgagcacgtgggcgcgccttggcaacggtgagtgcaatgtctga

SEQ ID NO: 450994 - DNA, 1401 bp, Serratia marcescens
atgtacaaaaatcgctgctatatgccattcattctgtacccacccgatatgtatgatgtctcagatggcgagtctgagaataatcttattaaatcgctgtcgcttgaaagcgatgggactgattttgttatgtatctttcagtcccttattgccgagtgtgttgtaaagcgtgcccatactttgttgacctgctgccgatgaataaaggaaagtcgcaagatttattggaccgctatgttgacgctttggttctggatttgaagcgccatgccgcaacacgtcgctggggcaatgcgcggttgagaggggtatacatcggaggcggaactggttctctgttggaaattacccatctcgataaaattctcacaacgttaactcgatactttaatttggcgaaggactgtgaaattaccctggaagggaatgctaaggatttcaccaaagagaaagcggtttatattgctgattcgattattaatcggatttctctgggggctcaatctttccaacctgaagtattacgcaccgtcggttcaccgcataaagcgcagcagacgattgactccatccgcatgttgcaagatgccggattagaacatatccaactcgatatgatgtataacatgccggggcatacgctagcgcattgggaaaaagattttaaagtactccatgaattgggtattaaacatctgacgacctatttgtatcgcattactccgggcacgcggcaagaagcgttgattaaatccggcaaggtggcgcctgtcgccgatgcggaaagcgtgttggtcaaggatatgcaagcgatgatcggccagttcgccgcggaggcgggtatgcgcaactatatgcacgaacactacgcgctgccgggttttgaatccaaatacaatcactggacgatgaaggagtgtgtcgacgcgttgggaatcggcccaggggcatacagctttataaaccagcggcgtactgggatttcgaagagcgtggatcgctatatcgacgccgtgcagaatggggacagcaccttcactactgccagcattcagcttacgccacagctaagtcgtcagcgttatatgattttcaatctgctgtactatcgaattgataaggcgcattaccgcaaggcgtggggaacggaatgccgggaggatttcaacgcgattattaacggccttattctggatggcttcatgcaggataatggggcggagctcttgcttacgctaaaagggaagtcatggttgcaaaatatcatgttggaattcttcgacgatagcatgtgggaaaattctcaggccttgaggcaacagcaaagctcttgggctatgaataatcacatgatcgatattagtgctgcaaagaaaagtttctggttagacaaaatataa

SEQ ID NO: 450995 - DNA, 141 bp, Serratia marcescens
atgtgcaaactgggaggcagatcgcaaaaaccgacccagggcggcgcggggcaaaaaatgcgtgatgcggttggcaaaaaagccttctgcgcccatactttccgcagcaaaattcagggccgcctaggatatgtcccgtaa

SEQ ID NO: 450996 - DNA, 912 bp, Serratia marcescens
atgcacctcattcttgcaccgagcaatctgggcctgcggccgttgcgccccggccatgtgcccggcgcctggcgggcgccgcaggcgctgatggcgcagcggctggtggaaaggttggcggcgggcgcggtcagcaccctgccgaagccgtcgtattccccgctggcgcagccgggcacccgcattcgcaatgggcatgctattcgcaccttcaatttacagctggcggaggcggtggccgcagtacaggaggggggagattttccgttggtcatcggtggcgattgttcggttttattgggcgcgttagccggggcgcgccgggcggggccgctgtccctggtgcatatcgatgggcacagcgacttccgccaccctggcaattacgatgccgaacagacgttgggggcggtggcggggatggatttggcgttggcgagcggccgtggcgaacccctgctgacgacctggcccggcgtcacgccgccgctggtgccggaacggcaaatcgtacagctgggggaacgcgagagccgggatgtggacttcgcctggccggatatcgcgcagacggcgattgagcgcattgatgtttttaccgcccaccgcatcggggaagcggaaatcgtccggcggatcgaacgcgtcttggccgcgcagccgcagtggcgcttctggctgcatctcgacgtggacgtactcgatcaaacagtgatgccggcggtcgattcgccggggtcgcccggcatcgatcggcaatggctggagagtattggcgtgcgcctgctgcaaaatccgctgtgctgcggcatgacggtgacggtattcgatcccgatctcgaccccaccggccattatgcggcgctgcttgtcgatatgttggcggcgatgttccagcaacctggcgcataa

SEQ ID NO: 450997 - DNA, 147 bp, Serratia marcescens
gtgctgaaggcgcgcaagcgctgcgacgtggcgcacggcaaagacatggccatcacccacggcgagtatgaagaactgaagagcgaactcggcgaacgcattctcgccggcaggtgggagaccattttgggcagcccgcagacctga

SEQ ID NO: 450998 - DNA, 129 bp, Serratia marcescens
atggaaaacgccgcgtctcaggaaatgagccgtaagcaaagcgcatgcggctccgtgggggctgtcctctccgttcgcccctctctcaaccaaaccctcctttcggatcggaggccgtctatggcatag

SEQ ID NO: 450999 - DNA, 504 bp, Serratia marcescens
atgatcattatcaagaacattatgctggcgggggcgttactttttactacaacattcgccgcgcatgcagctgacgtgaccattacggtcaacggacgcgtagtggccaagccctgcaccgtatcaacgccatcggcgacggtagacttgggcgacttgtttacatttaattatatacaggccggctcgggctcagcctggcatccggtaacgctgaatttgaccaattgtccaataggcacttcgagagtcacggcaacattcacggggacaacggacagcacgggatattacaaaaatcaaggtggggcaaccaatcttcaattggagctgcaggacaccagtggcaataacctaaacaacggaaaaaccaaggcggttcaggttgatgattccacacagtcagcgagtctgccattacaggttcgtgcgttatcagttaatggcaacgccaagcaaggcagtattcaggccgtaattaatgtcacatacacttacgcctaa

SEQ ID NO: 451000 - DNA, 357 bp, Serratia marcescens
atgaacgctattttatcgaaatatccagtgttgttactggcgtgcttactgctgctgcccacgacccgagcagccgcagatgtcatcgtcaatatcggcccggaacccgcctgtccctatggttattacgattatgcaccttactattgcgccccctacggttattacggccccgattggtttatcggcggcagatttatcggcgcaggcccttggtttcacggcccgcgagaatttcgcggccatgtggataaccgtttcgatcccaaacacggttaccgaggcgcattccctgaacgtggggatgtccctttcaatcattttaggggtaatgagatccgcaacgggcgtggctaa

SEQ ID NO: 451001 - DNA, 1707 bp, Serratia marcescens
atgcagtcaggcaatcaggcatttctcaaccagcttaaagacatcgtcggcggcccgcagttgttgaccggcgatcgcaacaccgagcggtatcgcaaggggttccgctccggcgaaggccaggcgctggcggtggtgtttcccaccagcctgctgcagctgtggcgcattttgcaggcctgcgtggccgccgacaaaatcgtcatcatgcaggccgccaataccggcctgaccgaagggtcaacccccagcggcaacgactatgatcgcgacatcgtcatcgtcagcaccctgcgcctcgaccatattcaggtgctggacaacggcaagcaggtggtcggcttccccggcagcaccctgcaccacctcgagaaattgctcaaaccctacggccgcgaaccgcattcggtgatcggatcctcctgcatcggcgcctcagtgatcggcggcgtgtgcaacaactccggcggctcgctggtgaaacgcggcccggcctataccgaaatggcgctgtacgcccagctcggggaagacggccagctgcgcctggtcaaccatctgggcatccggcttggcgacacgccggaagagatcctcacccggctggaaaaaggcgactatcgcccgacagacgtcgagtacggcgagctgcgcgcctcggataacgagtacgccagccgggtgcgcgacgtcgatgccgacaccccttcccgcttcaacgccgacaaacgccgtctgtacgaggcctccggctgcgccggcaagctggcggtgttcgcggtgcggctcgacaccttcgagaaagagggcaaagagcaggtgttctatatcggcaccaacgacaccgcggtgctgaccgaactgcgccgccacatgctgagccagttcgaaaacctgccggtggccggtgagtatatgcaccgcgatatcttcgacatcgccgaggtgtacggcaaagacaccttcatgatgatcgacaagctcggcaccgatcaaatgccgcgcttcttcaccctgaaaggccgcatggacgccagcctcaacaagctgccgctgctgccgcacaacctgaccgatcggctgatgcagggcctgagccatctggcaccgagccacctgccgaagcgcatgaaggattaccgcgaacgtttcgaacatcacctgctgctgaagatggccggccccggcgtagacgaggcgcagcgctacctgaccgagtacttcgcccaggccgagggcgctttcttcgcctgcacgcctgacgaaggcaaaaaggccttcctgcaccgcttcgctgccgccggcgccgccgtgcgctaccatgcggtgcacgccgataaggtagaggatattctggcgctggatatcgccctgcgccgcaacgacaccgactggttcgaaaccctgccgccggagatcgacagccagctggtgcataagctgtattacggccactttatgtgccacgtcttccatcaggactacgtggtgaaaaaaggcgtcgacagccacgcgctgaaggaaaagatgctcgagatccttaaccggcgtggcgccgagtacccggcggagcataacgtcggccacctgtaccacgccaaggcggatctgcaggcgttctaccgcaccgccgatccgaccaacagcttcaaccccggcatcggcaaaaccagcaaacgcaaaggctgggccgaagacccccgctaa

SEQ ID NO: 451002 - DNA, 822 bp, Serratia marcescens
gtgaacgaattggaattcagcggtttattaaaaaaagttaaagagatcgccttgtcctccttctcaatcattgaaggcaaaaaaaatgaagtgacgttttttgaaaagaaggatttcagcattgtgagtgaggccgatgtggaaacagaggcgtatataagggagagactacaggcattaacccctgatatccccgtttatggcgaggagctgggctgtgagattgccgatgactgccagttatattggctgatagatcctatagacggcacgacctggtataagttaggcatcccggtatatggctccctcatcgctttagtcaaagaaggagagccggtgatgggcaccatcggtttacccgcaatcaatactctagtgtatgccggaaaaaacgaagggtgctttatccatacgggtgaaaatagtgtcaggagattgttcactgaggcggatcagaccgaagcgacgcgggtagaacaagcgacaataacagcatcaggtatccatggcacctcgacatggcttgagaacggcgacacgccctggaatctcattgccgtgctggaaagtgcgaaattattcaagttctcaggggactgtatccagcatgtatccgtattcaatggttcatcggatgcggcgattgatacgataatgaaaccctgggacagtgcggccatcattatttgtgcaagagaagccggcttcaccgttatggatcttaatggcaaccagcaaggaatattagcaagcggtaatttgttgaccgccaaaaatgcacatttggctaaagagcttattaagctgttacaggcttga

SEQ ID NO: 451003 - DNA, 543 bp, Serratia marcescens
atgaaaaatgaaatttacagtttattggaaaactaccaaaccaactatgagaaggagcaagaacataagctgaatatgttgagtattctgcaaagccgagatgatgtattatttgagacctctaaacttgggcattttacggcatccgcctgggtattaaaccatgataagactaaagtattgctgacgctgcatgcaaagttaaatcggtggttccaactgggcgggcacatcgagcgcagcgataaaacatttttagacgcctgcctaagagaggcgcaggaagaaagcggtatccagaacatagcggctgacggggcctttgtgattgatatcgacatacatccaatacctgaaaaccctaaaaccgcagcccatcttcattatgatatcaccctgtgtttgatcgcagataaacacgccgagacagcgctttccaaagaatcgacgaaattggaatggatacccattagtgaagtcaaatccatcaccgacgatcctgccgtggtgcgcatggcagaaaaaacaatgctgctatcttag

SEQ ID NO: 451004 - DNA, 1224 bp, Serratia marcescens
atgttctcaccattagtgggcagtgacagacttttagatacaaacgggcatcccattcaattcagaaagggaaagggataccgaatcgaagatactaacggcaatgagtatttggatttcgttttaggtatcgggcccgttatattaggacacagccatcccgattttaataaaaaattgagtgatgctctctgtttgggattgtctttccctggattcggtgaggtgcacagcctgctgtccgacctgtttgaaagtgtctatgtcggttctaaagttatctccttatttaaaaccagctctgaggccgtaacggcatcgttccggtgcgcaatgatggaaaccgagcgcaaaaagatcctgaggtgcggtttcttgggatggcatgacgcccagctctatatgtcgccgagctggcatgaagccttgggcagcgctaaaagaaatgatttacgttatgtaaaaggcatgcgcggcgtcaccggtgaagaggccgttttcaactggattaatggcgatctgtctgaattggataaactgcttcaggaacatggaagcgacattgccatatttgcactggacgtgtatcaattggcttttttccccgaggagaagattaagtctgcaatagagatgtgcaaggcttatggcataaaaatactgttggatgaaacgaaaacggcgggaagaaccaaccctggcggttatttggcgaacaacccagatttcgatcctgattatgtggtgttaggtaaggcaataggaaatggcttgcctcttgctgttctgatcgggaaacctgacagcattgctatctatcgcgaagcgcgtatcggcggaacgcacaccaaagaaatcctttcctcccatgcggcccttgccgtggcggaaatcatgaaagagtgcgatggttataacctgatttcacaggccggtggggctatcgtgacgacgttgaactctgcctttaaagaagctggcgccgataatctattgatggctaaaccacttttcaataacgctctttttgacctggtgtttagtcaagatctggtcaatgacgctatgcagagaggccgtttgaagagtgagcttatgcggaatggtttgttgattatggaggggcacaactcctttgtcagcttggcccatagcaacctgaatcatgacgagctcttttccctggcccataaatcggcaaaaaactgggtagccgccatgtag

SEQ ID NO: 451005 - DNA, 1041 bp, Serratia marcescens
gtgaggcatttatcacggaatgtcaaattgtcatcgttagggctaacgcttgatttatctaattttaacctcaaagatataatcacaaaaagtaagttcacgatttacaatcaagaaatcagtccgtatatagtaaaaagcattgcagaagaaaatattcgcaaacagctagccaatgacggcaatgtttattcagagttgtcatggttttctgaaaggcaaaaatacggatatttattaatgcgtaattgtttttcgaccacagcactcccccctactccttgcaatgatgaagcacctgataccagtttatggattgaacccgcgtcaacgttaatggccctgctaggtgttacgggacacaccgtttcctcttacctgaatgaaatgcaaggccgattggcgcatatggttatgcctgcaaaaaacaatgaaaagtcttgggttcgctctacaaagtcgttatctccacatactgaagtcgtcaatggccactggtcggaaatgctgcctgacgatactcaaaatcagattattgctcctgaggtttttgcactggcgtgtttgagaaacccgattcaagcggcaacaacaatttggtcattggatgacattcttaacaatttaagctattcgaccatagaacagctaatgcggcctgaatatatcgccaatagccaatccagttttgacgttgactcaaaaatagagaatgtcagtgttattggggatatcaacggcagattggtgattagatacagcaattctaagcttgtcgggatcaacgatgccgctaatgaagcactggaaaaactcagaaagcatctttctgatccccaatatatcaacaaagttgttttgcagcctggcgacatcctcatcatcaacaacaggattgccctgcatgggagggataatctttccggttcggcaaattatgatgggaatgatcgctggttaattagaatgtatggcttttcacatagctcgtggaaaaaacttaaacacctcccagaaaaacaacacgttgttttagcttga

SEQ ID NO: 451006 - DNA, 1353 bp, Serratia marcescens
atgaaaatgaataaatcacagaatttgaaatcgatcccaactggttataaacagactgaggtggggattattccagaagattggaaagttagtaatattggagacctatgcgttatttttggacgcataggtttcagaggttatacaaaagctgatattgtatcacaagaccaaggagtgctaagcattagtccgtctaatataattggtgggcgtacaagttttactcatggaacatatattactcgtcagaagtatgaagaatcacctgagataaagatatacgaagacgatattctgttagttaagactggttctacctatggaaaaatagctttagtaaagaatttaaaagaggatgcaaccctaaacccccaggtagtagtctttaagagactaaaaagtccggctgcatttctggcatacataatgcaatctgatattgtgcaaaatcagattgaggaaactattgttggtggagcgattccaacattatctcaaaaggtagttttaagttataaaatcccgctccctactccaagagaacagcttgctattgctaacgtgctctccgataccgatgcactgattatcgcgattgagcaattaattgctaaaaaaaaggatatcaaaaccgcaaccatgcagcagttgctgactggccgcactcgcctggcgcagtttgctaagcaacctaatgagactctcaagggttataagactagtgaactggggatgattcctgaggattgggaagcaaaaccatttggtgagttgtttgagtcatcgcttcatcgccgaactatgcgaaaagaagacattgtttcttttgtcggaatgcaggatgtcagcgaaaatgcacaactaattgaacaatcgcagctgtcatttagtgaagtaaaaggtggatttacttatttcgaaaaaggagatgtcttggttgccaagataacgccatgctttgaaaatggtaaaggctgtcacactgaatcattactgactgatattggtttcggaagcacggaatttcatgtactcagggccaaaaactcctctcattcaaaattcatatattactggacaacaaataccaatctgaggaaggtattagaatctgagatggttggtagcgcaggccacagaagggtacctttatcagccattcagaattacttaatcccatgccctcaaaccaagatcgaacaaactgctattgccaccatcctctccgatatggacgatgaacttgaggcgctagagcaaaaactagccaaggtgcgggatataaaacaaggaatgatgcaacaactgctgaccggacgtatccgcctgccattggatcatcagccatga

SEQ ID NO: 451007 - DNA, 627 bp, Serratia marcescens
atgttgtgtcgcacgcaacatctgttcgtcagccacggaggcggcgtcgtatacccagcggaaggcaccgtcagccttacagatttgcaacaccgcgcgcgagccggagtctataatggcggcaacgccctcgtcttccggctgcaccccctgcgccgagcgccgactgacgatcgataccgccgtcggccaaacctgagacgctcgcagatccgcatcgcgcgtcagcaatgcggggtgataatcggcatgagcgcgcaactggccgtattcctgctccagcgcggccaatgcctgctggaaattaccggcggaatcaacagagacctgcagcggcagcacgcgcgcgctcaggtgagcccaacgtccccaatcccgatcgtccgaggtgatccaccccagctgaaaatcggtttcattgcacatgcgcgccagatacagggttgctgccgtcagcacctgctcgccggaaatcttctccaggcgctgccaggccgtcgcctgccagcgtgcgggaaggcccgcctggcggccaggtcccggcgggaacggcgccggatagtagcgcgtcagacgtggttgccagaaagcggcgctatcggcgctggcgccatacgccgcgcctaa

SEQ ID NO: 451008 - DNA, 1356 bp, Serratia marcescens
atgaaaattttatctcccctggcgttaagcctcaccgccctgctcaccgccggctgtggcaatgccctgaaaagcgactaccgggcgccgcagatcaactatcctgcggggtggcaatacgctgccgacaacgccgcgccgacgccgttcgactggcgcgatttccacgatcccgagctcgagcggtggctgcaacaggtgatggcgagcaacaatggtctggccgccgacgtgctgcgcgtttaccgcgcgcggctcgaagcggaacgcgtcggcatcagcaccgcgcccggcgtcagcgcctcattagacagcgacatcagccgcccgctgtccgagtcctccgcctggaataaaaccagcgatacgactctaagtattagctatatagtcgatctatggggcaagctggcgcgccagcgcgacgcggccgagtggagcagccaggcttccgtgcaggatctgcaggcggcgcgcctgaagctgttggccgacgccgccaccaactactggcgcatcggttttctcaatcaacaaatcagcgtcagccaggcgagcatcgcctatgccaaaacgacgctgcggctggccaacgcccgttatcaggccggcagcatctcggcgctggacgtagtgaatgcggaacaaaacttgctgacgcaggaacgcagcctggtggcgttacaacacgatcgtcaacaggcgctgaacgaacaggcggtgctgctgggcgcgccatcaggccaggccaccatcgcgcccgcgcgcctgccgacgacggcgatgccgcagatcaacaccggcattcccgccagcgtcctgagccgtcgcccggatctcagcgctcaagagctgcggttgcgcgccgccctggccaacgtcgatgaaaaacgtctgcaatactatcccgcgttcagcctgaccggttcactgggcgccagcagcagcgcgctgctggaattcctgcgcaacccgacgggcagcctcagcgccggcctgacgctgccgttcctgcagtggcggcaaatgggcgtggagatcaagatcgcccgcaacgactatgaacagcaagttctggccttcaagcaggcgctgtacaaagcgatgggcgatgtgaacaacgcgctgtcactgcgcacgcagctgctggcgcaggaggcgcagttgcgcgcctcactggcgttggcgcgcaaatcggagcggttgaacgaagtacgttatcgacagggcgccgtcaccattaccgactggttggacgctcaagaattccgtcgtgatgccgagctgaatatactaaaaaatcgcttctctcaatatgaaaattttgccgttatttatctcacctttgggggttaa

SEQ ID NO: 451009 - DNA, 1938 bp, Serratia marcescens
gtgaacgcgatcatcgaactaaaaggcatcagccgaacgtacaccaacggcggtcaagcgttaacggtgttgaaagacatcgatctgaccatcgccgccggcgaactggtggcgatcatcggcgcctccggttccggcaaatcgacgctgatgaacatcatgggctgcctcgacgtgccggatcgcggcgattactacatcagcggccagaacgccgcccacctgtcgccggacgaattggctcgcctgcgccgcgaacatatcggttttatcttccagcgctatcacctgatgcccgatctcagcgcgctgggcaacgtcgaaatcccggccatctacgccaacgcccggcgcgatcagcgtcggcagcgggcggcgcaattgctggcgcggttggggcttgagggacgcgaagaccacaagcccggccagctttccggcggccaacagcagcgcgtcagcatcgcccgctccctgatcaacggcggtgagatcatcctggcggacgaaccgaccggcgcgctggacacccactccggccaggaagtgctggcgatcctgagcgaactgaatcagcgcggccacaccgtggtgatcgtcacccacgatatgaaagtggcgcaacatgcgcagcgcgtcatcgaactgcaagacggcaagatcatcgctgacagcggccgcaagtcggcgtccggcccatacttgccgccgccgcaccgcagccggcaaagcggctggcaacgcctgattgaccgcacccgcgaatcgctgcacatggcgctgaaagcaatgaacgctcatcgtctgcgcaccgcgctgaccatgaccggcattatcttcggcatcgctgccgtggtcacggtggtggcgctgggcgaaggcgccaaacagcgtacgctggagaatatcaaagggctcggcactaacgtggtaagcatctatccgggccgcgatttcttcgacgacgccatcgacagcatccgcaccctggtgccggccgatgccgacgcgctggcgcagcaaagcttcatcgacagcgtcagcccggaagtagacgcttccgacagcatccgttttcgcagtaaatccgccaccgcctcgatcaccggcgtcgggcgcgactatttccgcgtcaacggtatcaaactggtgcaaggcgccaccttccgcgacgatcgtaatgcgctgcaggaagtgatcatcgacgacaatgcgcgccaggcgctgttcggcgatttcggcatagagccgctcggccagatcgtgtttctcggctcggtgccggcccgggtggcaggcgttgccaaaagcgaacgcaactatgcgcccaatcgcattactgtttggatgccctacagcacggtgatgtatcgcatggtaggcaaaccgacgctcagcggcatcatcgtacggctaaaggacaatgtcgccagcgaatcggcggtcaccgctatcacacaactgttgacccagcgtcatggcgttaaagacttcatgaccttcaaccgcgatcagctccgtaagtcgatcgagcgcacctcgatgacgctcaacctccttattttaatggtggcgtcgatcgcgctggttatcggcagcctgggcgtgatgaacatcatgctggtctcggtgaccgaacgtacccacgaaatcggcgtgcgcatggcggtcggcgcgcgacgcagcgacatcatgcaacagttcatgatagaggcggtgctggtctgtctgatcggcggcgctttgggcatcgcgctgtcgttcgccgccgggtcgctgttcacctcgctggcgggcggcatgttcaccgccatctattcctggcaagccgccgccacggcgtttttctgttcaaccttaatcggcatgatcttcggttatctccccgcccgcaaagcggcaaggatggatccggtcgtttcattggccagcgaataa

SEQ ID NO: 451010 - DNA, 1188 bp, Serratia marcescens
atgcagattcttaatgttaagaaaacaggtgtggttattgccttaattggggccatcattatcatatttttattgatattacattaccagaacccatcggcgacggaatatgtcaccgcgccggtgcgccagggtgatatcgaagacgccgtgctggctaccgggcgactggatgccgtcgagcgtgtcaacgtcggtgcccgggtctccggtgaagtcaaatcgctgaaggttaaactgggcgatcgcgtcaccaaagggcaaccgatcgccgacatcgacgatctgcaacagcgcaacgatctgcgcaacgccgaagcggcgctgaacgtagtcaaagccaatatgttagccaaacaggccttgctgaaacaggcggagtcgcgtttcaaacgccagcgccgcatgctgaacgaagaagccagttcccgggaagacttcgaggccgccgaagcctcgctcgccaccactcgcgccgatctgcaggcgctcaatgcgcagttggtgcaatcgcagatcgaagtcgagaagaaaaaaatcgatctgggctatacccgcgtggttgcgccgatggacggcattgttatcgccgtggtcacgcagcagggacaaacggtcaactccagccaaagtgcgccgaccatcgtcaagctggcgcggctggatatgatgaccattaaggcgcagatctccgaagccgacatcacccgcatttcgccgggacaaaaggcttacttcactattttttccgatccggataagcgctacgacgccacgctgcgcaccatcgagctggcaccggaatcggtgatgaaagacgactcgctcgccggcaccagctccgcttccggctccggcacctcgaacgcctcggtctattacaacgcgctgctggacgtgccaaacccggaaaaccgcctgcgcatcgccatgaccgcgcaggtgtccttgctgctcggcgacgcgaagaacaccctgctggtgccgatccaggcggtgcataaaatcgatggcaaagagcagcaggtgcaggtgctgacccaggaccagcggttggaaacgcgcaaagtgaccaccggcatcaccaacaatgtcgacattcagatcctcagcggcctgaaagccggtgaaaccgtggtgctgtcgcagcccgccgccaaatcgactgagggtgtcatcttcctgtga

SEQ ID NO: 451011 - DNA, 519 bp, Serratia marcescens
atgactacctttaggaaaatgtttttgttttgcttaatcacagaaattatttttttgttaagtgcattttttttgccagctattgatcaattcatgatttttaaagaggagagtgtaaggtttaccataattaatggggtgatttttaattgtatccctgaacctggctctagcgtaaacatttattttcaaagtgctgtctatttagttagggactttattcttagctatttattattgcaggcaaaaagcatatttactagactaagaaaaggcggatggttccatggaaatggtaatggcgtcatctataaaattggacttgggttcatttctttgtcggttttcttatttgtaagcgatctgtttttagtaaatatacaacatgatggcaagtttattacttactatcaatttgataacttgatgtatattcctataggctgtgcaatttttgtattagggtatgtactaaaaatatcaaactccatcaatgaagaacaaaagttgataatttaa

SEQ ID NO: 451012 - DNA, 579 bp, Serratia marcescens
atgaaacaaagtgaagttcgtgaagaagtcgcgatgatagttaaggcgattagaggaactgatattgaagtgccatctgttacacaaggtctaaaaccttctttagtttacgtgtgcgttttctacatgatctttgtggtaagcgtggttcctatatttgtttttggtaatagcaatgaaattgaaaccgtctcggctttcttctgtatctctattttgtttaaccttttctttgccttggtgatctattctgtttacatgcaagttctaaacatcccggaggaagtgaggaggaagtcaaaattaattttatttgttaaggagaaagtatgtcactacgcatattttcactttggattgctattaactttctctgcattatctttagcaagtggagtatctggttttttgccattcgtgcaggttcctctattcataattacctttttggtattccacatagacttatcgagattcaacctccccagcctggcggggctggtcgatgcagcgaaggacgagttcaaaaacagagagttgcaagagtttctcaatggtgtaaacaaggaaaaacgatga

SEQ ID NO: 451013 - DNA, 612 bp, Serratia marcescens
ttgccgaatttactcgagcgtcagttcgctttgccggagccagaccgtgtatgctgcggagttattacgtacatctgggcagggaatcgctggtgctatctggcagttgtcatggatctttttgcccgcagaattatcggctggagtctgtcatcgaatgccgataattatctggtatggcatttgatctgtttgttgctccagaacgaccgcgaggatgaccaggctatccctgagcgttccaggaacaacgatgtcgtttatccccgaatactggtcagatatcaggttgtaccatgtaaccccacgtccttctttgaagtatttagggttgggccggcatgtacagagcgcacaggaacaacaaatcgcataccatctgctgacgccacctcaccgccgcccatgccagtcaccggcggtgctaaccgatgtatcaggcgccagggcggcgagaaattcgtcgcggctatggaattgtgcaaaacggccacacatagtcaggtgctcttgttgtcgacatggccaaagtatagcttcagcgtcgtggcaggagtttacgcaaagagattggtttttaacttattgaaaatgttaaataagtgcacataa

SEQ ID NO: 451014 - DNA, 171 bp, Serratia marcescens
atgtttctggtgcaggaaattttggggataaccgtgatggtggcggccgagtcaacaacagtggtggcggtagtcgtgggcatgattctgggcgtgatgccgccgccgctgctgctgcgacagccggaggtgttatcgaagggatactcactgggccaggtgcgccattag

SEQ ID NO: 451015 - DNA, 168 bp, Serratia marcescens
atgggcgtgggaaaaataaacgggcggtttttgattgcgttcacggtattcattctgctgacccaatacctgggcgcctatattttggggatcagaaaagcagaaagctggatgactgaacaagaagcggtaaggggcggcgtattttgggtgaacacgctcctgtag

SEQ ID NO: 451016 - DNA, 216 bp, Serratia marcescens
atgaacaaatcacgctttgcatttacgctggcctgttttgcgctggttcttctcatggtgggcctgaccttttacccctgttttctgagcgataacgccacgtttgtgcaaacaggtctagtgttacccgttctgtatctcctcgagaccgggctcatcgttccgttatatatggcttttttagcaaagagcacagtatgggcgtgggaaaaataa

SEQ ID NO: 451017 - DNA, 1173 bp, Serratia marcescens
ttggcctgggtagcgatcgcgttcaccgcgctctatgtgctgatgcgcctgctaactaacggctattatcgccatctgtccgaagaagcgctggtgataatagcccgcgccggctcgtattttatggagacactgtacggtatcgccaccgtcaagatgcaaggcatggcggaatgccgcatcgctcactggctcaaccttgaaattgacagcatcaataccggtatccggatcacccgaatggatatgctgtttggcgggatcaacaccttcgtggcagcctgtgcccaggttgtcattctgtggctaggggccagtctggtaatcgacaatcagatgaccctcggcatgttcgtcgcgttcggcgccttttgggggcagttctccgatcgcatcaggtcactgacggcgtttctgctgcagctgcgcatgctgagcctgcataacgaacgcattgccgatattgccctgcacccacgggaggatcgcaagcccgacctcccttatatctcgggaatgcaaccgatggggttgtccaccaatgccctgagctaccgatacgacagtcagtcaccggcggtctttgatgccttggacatcaacgttgcaccgggcgaaagcgtggccatcgtaggtccgtccggggcaggcaagactacgctgatgaaggttttgtgcgggctgtttcccccggacgcagggcgggttgaggtgaacagtatcgatattcgtcagcttggcatcaacaactaccacaaaatgatcgcctgcgtgatgcaggacgacaagctgttctccggctctatccgggaaaatatctgcgggtttgcggacgaggtggatgatgcctggatggaagcctgtgcccgtgccagctatctgcatgaggtgatcatgcgcatgccaatggggtatgaaaccctgatcggcgaactgggggaaggattgtctggcggccaaaaacagcggttttttatggccagggccatttacaataagctggcgattttattcctggacgaggcgaccagtgcgctggacaaggacagtgaagcgaaggtgaaccaggcgattaaggcacgcagcattacacgggtaattattgcccaccgcgaaagcaccattacctcggccgatcgcgtcatcgttctgacccacaaggcggatcaatga

SEQ ID NO: 451018 - DNA, 417 bp, Serratia marcescens
atggaacttactatgcgaattttaaaacttcttattccattcttgatattgcaatcttcttttctgaaagccgctgaaaatatagagtatgaaatactgaaaaagatatcttttttttcgattggaatgaacggttttgccggtaaaataagtgacggtgaaatggcatataacaccattctgaaaaaaaataactcaaaagacatttttattcgattggcaaaagacgaaaaagccactccagaagccaagttatatgctgcttgtggcctcgtcaagttatcttatcgcgaaatggatccacttttcctaccttacaagaaaaataaaatcaccttgctcaaaggtgatgtattaagacgtgtttcattttacgacgaatacacgtcagtattgaagcatggatgtgagtactaa

SEQ ID NO: 451019 - DNA, 654 bp, Serratia marcescens
atgggtgactggtttattgccaccgaaggcgtgaagatcgtcaaagacagcgccggcctgtggccgcagaacatcacggggtttgcggcgttgggcggcgtgtacctgacccactacttaacccgctggcgtgaggaaagagcggcggcggcgaagcaggccagtgagcgtcattttatcgccacggagctggtctttttactggagcagtttgccgaggggggggcccaggtagccacggaccagggcgagcccgatcagcaaggtgagtattcccctgcggtaaaaccgccagagctgactgtcctggatgtttcgggggactggcgcacgcttcctccgctgatcatgtaccggattcgtgagctgcccatactgcagagcgaagctcgtcggaatattgctgcagctgcagagcatagttgggctccctatcacaaagaaggttttcaggagcgtcagtaccagtatgcgtgtctcgggcttaaggtcctgatcctctcacggcacctccgcaaactgactggtctgccagacaccgccttgatgcgacggaatggtctgcccagcctgtcctctggaaggcgtggcaggaggagcctaacagacgttctgttcaggcaagactgcggcggcaaactatcgcacagatga

SEQ ID NO: 451020 - DNA, 342 bp, Serratia marcescens
ttgcaccgcaaactgctgctggccaccctgtggaacagcggtgcccggatcaacgaggcactggcgctgacgcgcgagtttttctcgctggcgccgccctacccgttcgtgcagctggccaccctcaaacagcgcacggaaaaggccacccgcagcgccggccggttgccggcggccagcacgccgccgcgcgtggtgccgctgtccgatccgcagtacttggcgcagctgcagacgatggtggccacgctgaaaattccgctcgagcgccgcaacgcgcgcaccggccggatggaaaaggcgcgtctttggaccatcaccgatcggacggtgcgcagctga

SEQ ID NO: 451021 - DNA, 705 bp, Serratia marcescens
atgcatctgctgggatttgcgttctatccgcgaatcagggatgtccacgataagaagctgtttattaaagggaaagtggaccaatatccggcgcttcagtcactaatatcaacgaccagcctgaacctgaaagagatcgagattcactggcgtgaagtgctgcgtctggcgacctcgataaagcagggaaccgtgacggcatccctgatgctgaaaaagcttgccagctaccccaagcaaaacggacttgccaaagcattgagggaaaatggtcgtattgaacgaacgctgtttatgctcgactggttccgcgatccggcacttcgtaggcgggtacaggcgggactgaataaaggagaagcccgtaacgcgctggcgcgtgcagtattcctgcaccgcctgggtgaaatcagggaccggaaacctgaaaatcagagctatcgcgccagtggactgacgctgctgacggcagctatctcgctgtggaataccgtctacatggaaagagctgtcgaggccttgaagcgtaaagggctgaagatcaacgcgcaactgctgtcgcatttgtcgccgttgggctgggagcacatcaatctgacaggcgattatatctggaaaagcaaccggataccggtttccggtaagtttcgtcggctgaggccagctaaagtagagaggtcaaaaaatagccttgacgtacaataa

SEQ ID NO: 451022 - DNA, 528 bp, Serratia marcescens
atgtactgcaagcagtcacgtaaagttccggcgacagcgccgcttgagtttgttcctgaaagctggcacaaggtgatgattacacctgcgggtagtgaccggcagtattatgaattttgtgcgctcagcgagcttaaaggggcgttgcgctccggggacatctgggttaaaggttcacgccgctacaaaaattttgatgattacctcattcccgaaaaggagtttgacaaactcacaccggcgctgcaactgcccgtatctgctgattatcatgagtacattaccagccgtatgaccctgcttcagtccagacttgaagaggtcaatgtcatggctgcccttggtgagctgcccgatgtggaaatctctgacaagggcgtaaaagtctctccgctggataactgcgttccggcacaggtttcaccgctggcagagctggtttacagcatgctaccgcggcctaaaatcacggaaattctcgatgaggtaaacagcaggacgacgtttacccgacattttcgcatataa

SEQ ID NO: 451023 - DNA, 579 bp, Serratia marcescens
gtgtgcattggaaacagaatgaaagccaacgagatgtgttatctagttacgagacaaatcgccatatatagtcgttgcaatttttgcctttacgggatgaactacattgcgcatgacagtggatctttaacatgtttattcaaaacagtatattcagccttgggtaacggtgttcatctgaatgaggtgtttgtccatgtacatacaggagtgcatgtggagtttagattaatacataaatttaaaacattgctctcatcgccacgagtcattgtcctagtgagcagtacgcatgtacccactctaaaattacttcgtgctatgaatattcattttattgtctcactacgtgactcattgaacaacattggtaatctgctgcaagactcttcgagagctcgttatatgagccctaaccctattaaaccgaccaaggaattggatacgttagatgatactcagtatttaacaccgatggaaacggaagttattctggatttacttcagggcatgttaccacttgcaggtggcaaagaaatagtttatctcagtcaaaacagtcagtgcacaccagcttaa

SEQ ID NO: 451024 - DNA, 252 bp, Serratia marcescens
atgagggaattatcaatttatgaagttgaagaagtttccggctctgcaggactgatagattttggtgggttttcccctacaatcaatttagggtttagtccccagttcggattcaatgctacagattcattaggttttggtgcaggcactaccggtattgctaacgcagttgaaaaaggatacgagtatactgggaatgccattggtagcactattggtaaaggtttagacaagatcggcaaactgttctaa

SEQ ID NO: 451025 - DNA, 222 bp, Serratia marcescens
atgagagagctcagcgagaaagatgttcagcaagtcagtggtgcgggtgtggtaaccgacctgatcaatggggtacttgatgccccagccagacaaatcggctcgtcgatcggcgcttttgcagggaatcttgctgtagaggggttccacacggccacaaatgctgttaatgagttatacaaaggcgtgtcgtcctttgtcagcggtatctttggccgataa

SEQ ID NO: 451026 - DNA, 375 bp, Serratia marcescens
atgataatatttatcatcttgctgaacattatttacgcattgctgcaggtttgtccagtaggaatggcgcgcgccctgatgcaggcgcagcctgaccgggacgtgctgatgcggggcgacgccgcgtcagccacggacgaaaccgcaagtgcgcagagcgatacgccggcggccgatacgctgtccatcgaggaagaactgaaggcggcacgggagcgcgaggcgatagccgaggtgttcggtgagcgcaaggcgaccgacctgccgtatgaaaaggcgctggaagcggaagtccggccgcaggacaacgcggctctgctcgacctgtctaccttggatgccgagaccgcctgcgggatgcggtgcgcggtctag

SEQ ID NO: 451027 - DNA, 504 bp, Serratia marcescens
gtgccggacgctggcgtgctggatgatatgaatatcctgttcacgttcgcggtcgccacccagtgctattactggttgcagacgaaagttgaaaataacggaaactatgcggatttattggctatattgctgattatttgctggccgttcttttttccgctgggtggatttgggtctgctggattgcttttgttgatggcgtgttttcgtttctacgcgggatggccattggcactctctcacatgtgggtggacaatctgcgtactctgatggctgtgtccattagcattttgaccgtcttgatgaatattgatggaggggcgatcctgatgctggctggactgctggtgtcgacggttgtgctgctggtctctacagcgctgcggccgctcgacaccgttcgcgaaaggcggctgttgccgcggcagttcttcccgggggcctacattgctcatctggcgctcctctggacgttatcggtagggctgtcatggagtgcgtaa

SEQ ID NO: 451028 - DNA, 573 bp, Serratia marcescens
atggggatggttgtgctaccaatattctggggacaaaccatgcaaaatgacattcaatctcctgaaaccgtgatcctgggtgtggacacccatcttgatattcatgacggtgcggttatcagccaagcaggaaagctgcttggcacccgcatgattcaaaccattcaaactggctatcaggaactacttgattgggctaaatcttttggctttctcaaacgagctggcatagaaggaacaggaacttatggtgccgcgttaacacgctttctcattaaaaatggcctttacattgttgaagtaaaccgaccagatcgctcaaaacgtcgccttgaagggaagtcctatccactagacgcagagaatgatgcccggagagtactttcagggagcagcaaggcataccaaaaatgcagtccagtgcgtgtgaagcgctccgaattatcagcgttgcccggcgtagtgcagtgtaagcccgcacgcaggcgcctaaccagcttcgtgcattactcgtcagtgccccacaagatgtccgtgaccaactctggaaatctaaaccacatgactgtgtag

SEQ ID NO: 451029 - DNA, 867 bp, Serratia marcescens
atggatattctttcttttatattcggggttgcttttggacgtttttttaaaaaaaaaccatatatcaatgaattattctatctgctattactgttgtttgttttctttacagcaatgaacgcaaaagatattttaaaccaccaacatttaatcccactgattattaaagtaattttgttatcttttggttcgacatcgtttatatttgttttttgcttatttttctttcctcaaaatgaagtttcacagggaaaggctgtcatttcaacccaagtttttaaattatttctttcattcacttttgttatatcctctttcattcttggaggggttgtgggaaagatgggatacatcagcgaggataaagtctctttatttcttaactcctcaatattactcatgttatttttcataggcattattatatcaaacaatagtctgctaaaaataagatttcgagatatcactttacctattgttgctatagttgccaatttagtattctcgctgatagttagcatcctatggactgagtcaatagttttgctttctggttttggctggtgtagcctctcatcggctatgatcacagaatcgacaagtaatacattaggagccgaagcacttttgatagatatatctagagggttgttcgcactaggttatctactcttgtgcggaaggaaaaagccacttgcttctatagcagcaagtggcgtgctttcttgtgatgcgtttttacctcttgtagagaaaaattgtggagaacactatattccacgagctttctcgtgcggtttatttattacatttattagccctttatatattcagcttgcactttactttaccaaaaatatgatataa

SEQ ID NO: 451030 - DNA, 744 bp, Serratia marcescens
atgcttaaaacaaggtgctttgaagtaaatgatattgcaaaatgtgatatcattggaatattgaaggggttgcacgaaaaaatatttttaacccctgtaggtgttactctaaatgaagccatatccccttacattcactctccagcagctgtaagaaaaattgctatttattatgatgaaaataaaccaattggctttatgtgcatgcaacgatatgaagtagatattaataggaaaaagataaatgtttttcgtagtcaggctgggttgttagaaaaatacaggaaaaacaatacaactaaacttatatatttaaaatttattttttctgagctactgcggcacccacggaaatcattattttttgctatatgtattcatccatctagttattgtgcaatccttaaagggccttatggtcgcataaacgcttggccaaccgaggaaaacgtaagcagcaatatagaaatgagatgtttatgtaaaaaactatgtaatagttttgatttggaagtagaagaacgagatggtgtttttatttataatgatgggctaggcccaacaagaaaggaaaaaacatcacggattagtataagtgatgatgctgctttctttatgaaaataaaccctaagtatgttaatggtgatggggtggcaacgattgtgaatttttcaattatagatgtatcatgtcattttttatatcatatttttggtaaagtaaagtgcaagctgaatatataa

SEQ ID NO: 451031 - DNA, 1389 bp, Serratia marcescens
atgaacataaatctaccttctcgctatgaagatctgagcgaagcgtacagaggacgcctgtctccaaatagaagtcttatttctttgatcgtgcaggcaaaaaaggcaatgactatatctggtggcatccgttttttgcctatttttggtgaaagtggttcaggcaaaagctcagcttccagagagctttcaacacacatgcctgatgtcatatgccaacttcttaatcgagaagaaatagaatctatagaaagattaaaggaaaaaatagttggacttcatactcgaaacagcgataagacattagtctttgtaatcgatcagtatgaggaaaacgttcatggtcgtgaacagatcccatcccaattcgtagaaaaaattagccttattgataggggggaccttagaagaattccggcaatatttatttggttaacaacaagcgtagatttcagagatatgcttgtttctgcgacaacgagaaacaaaagaatattattgtcaaaagattttaatttggttgggccagagaaatcggaatgggcaaaaataattgaggaaacatttacgtttcacaactcagagaatccgttgtccgactttggcataattagagatgatcttgttgaaatgagtcatgatgcctccactataggggagtgtatcgagatagttggtaacaggcttggagaaagcctggaaagcttacagaacatttcagaatatcaggttttattgttttggccagttgcagactcgcttagaaatcagcgagtgctacaattttcgagacctcgagaggggtatcgtctaaattgggatgtctggtatgcagaactaaacgcagatgaccgcaggacgcttcctctgcatgagttcaatcgaacaaggttatattttgactttagaattattccatttagggtcgctgatttgcatcggctttgtttggacttaggggatgatactaagacgctcgcgaatacgtatcttacgcgatttaccaatacacacctcttccatgtagtgtcggataactggcaaaattatgactacaaccctgtgcgagagcgagagtcgcaacgctcagaagaagcacgggagtggtatgaaactataacgaatcaaccgactcagttaggcagaagaattgcaaaaatactaagagaatgtggcttaaacgcaactcatgagactgacataaccacacagtattctacagtccgggcagatgttctcgtggtcactgaaagtgacacaaagccccaaaagattatcgaattgaaagtgtatgcctctgaaaacacaatgccatctactatcaaagagcaaataaaagtaaccttaaggcggcatgcgcagttagcgggtttcttatcgaggcaatga

SEQ ID NO: 451032 - DNA, 852 bp, Serratia marcescens
atgaacgattttataaccccaataattaagctgttatcctctttggtctctgttcgcgccgcatttagatacctttttgttgccagcggattacttttgtcttgggttaaaatcgcccccgcactttctctttacaacttacctgggcaaatatctggaattgttactacgttgtttggtgttggcttgggaacaatagttagcgccataatattctctgccgtcgatggagtattatcaattataaaagaaagcaatagaaagaaactagagattgcacaggcggaagaagaaagacaaaaggacaaaaaagctattgatgcatttgttactagatttcagaaaaattttggacactatgatgccaaagcaagagagattattgaaatactgaatgagaaagagcgtacattcacaactgaacaagcatttacgtcagacactgggcccgaagcgcttaaggggcttctcaacaattcagtaattcaagtagttatgcctataaataaacatactgctgtgtacaaaatcaatcctttattaaaagaatgggtacatcaatatttctataacatgcataaaaataacactaatgaatttcttaaagatctaaatccatcaaaagcgtttttattagacataatggctgaaagaagtgagtatccaaaagaaccacttccctacccaaaagattttttcaaaaatccatacatgtttatgccttgtttcgagacaaactactccggtgattctacgcctttttatttcagtttccgcaaggattatagagagcattttgaaaaagttttggacaaaagtttttatgatgaagttgaggttatactcacataa

SEQ ID NO: 451033 - DNA, 174 bp, Serratia marcescens
atgaccatctaccatgcggcaaagaacaacctcccaatgtgcggacagcgcggacaaattggcggcttctacgcctgcacaattagcccaaagggttggaatcagttgccagatgagcagaaatgcaagaagtgcattgcaaagataaaagcaaagaaattcaccactaagtaa

SEQ ID NO: 451034 - DNA, 1464 bp, Serratia marcescens
ttgaaaaataccgaatgggagtttatagacgacttgcaaaacagatataacacgctcttaagaaatgactcagaaattgaaaacataacctcatacatactagagcgaggagaaaaccttgaactaatatgtgaattcacttccgataacatagaatcaagaccactgtcaaaacttcaaagcaggcgagataaacatccggcaggaacagttagaatagatgactcagaaatagactttgggagcaattactcacctgataataaaataacactatcaggaatgatttcccttggccgcacaacaacaatatcaataagcggctctagtagaactaaagaaacctgtcggattcatagaattaaaagcaaccatgaaaagaaaaacaaaacagccttcctaattgaatgggtagttaatcttaacatgtcaccatatatttggccaaattcattaatgaccgaaaggagaaccaaaacgaccaagacattctcaagtacagaccattcaatcacactttcggacgataaagagcaaagtggcttatcaagtaaatgctgtcatataaaaatacaagggtttaacatatacttcggagttgcagaagaaagtaaattaaataacactcagcaccctggattcattttttatgaaggtagtcccgatagcgaattcaggaccaaagttcgccaagcgctatccttcatcctaggcagaaatatattatacttgggtaattccgagctagacgaaaagctgtatcttgttggttttgaagcccagacaccaaactctatgggtggtctatttataaaaaacccatccccccctccttctcgtttaatgaggaatgactctcaaggttttttttcagatgaacacgtaataaattacatggttgagaaatttgtattaaactacgacaaatatgatttgaatcatgtatcatggttgtattggcatgccgtaatagccccagcacatcttaaagccgtttgctttggcgccactttagagtccactcaaaaaaaattcattgaaaaaaatgaagttagctttaaacattcactagttgataaaaaactgtggagagacattgccaaatcgcttcatgaaatcataaataaaaatgaatatattgatgagcgcagtaaaaaaaccttactaaacaagatttcaaacttaaattcaacaccacaaagtttattaactgaaaattttttcgaagtattagggttaagactgggcgataaagaaaaaaaggcctactcacgaagaaatgatgctgcccatggtaataaaactcctgatgacaatttcattgatttaattagagatagtaaattactccatatcctatgcaaccgagttctgataagcatattggcactaaccgataactacactgatttctatacacttggacatccctttagaaagctatcagaacccgttagtgagtaa

SEQ ID NO: 451035 - DNA, 573 bp, Serratia marcescens
atggaattcaatcaagacgcaaaagctgctatcgaaaggatggtaaaggcctacggagtcaagactaaactagctttgtgtgaagccttaggcatcacggctagtgctcttgcaaacagacaaaatcgcaacgcttttcctgctgagtatgttttgaaatgcgctttagatacgggtgcttctgtacattggttaacgtatggtcatggtgatatgtttgatcaaacggtagtttcagccccgaatacattagcggtacctagcaaaaaacttgtttcgagaaagttacatgatggggatacttttttattagataagaaattccttcccgatggtattaaaaatcctattgtgatagttgaagacgaaactaaatatatagcaactcatgcatatgctgaaatatatgatgggacatggctggtcgatattgatgaaaatataagcattcgcgaattagttcgcataccgggaaataaagtaaatgtttcggacaaaaagcattcttttgattgcccactagaagagttaaaggtaatagcaaaaataaccactatctgcaccgcagcataa

SEQ ID NO: 451036 - DNA, 2385 bp, Serratia marcescens
atgatcaaaatatcaggaaattactatgacccagtaggtcagccagttgaaaaattaagaataaccattgcagctaaacgaacaacggctgatacatttcgtgagctgttagtaagccaggtaactgggcctgatggtgaatattcatttgagcttgtacctggctactaccgagtcaccgtgctttacccggaagcaaaccggacaaccgtgataggagacatggagcttgaggcgaatagcccgccaggctcacttaatgattatgttcgctttgcagaccctgtacttgctgaccctacagtatatgcagaaataaaacggtggtatgggctatcagccagtagcagcgaaggagcatccgaagctgcaaaagttgcgttacaggcaaaggacatcgccgtaaatgaaagtgaatctgccaaaggtagcgcgggtgaagctattaaaggggctgagattgctaaggactcagctgagcgcgcccacaagagttctactgattcaaatgacgcagccgaacgggcagaagagtctgcgcagattgctctttctgttgctgacgcgtatacagatgaagttgaagcacaaaaggcagtcgatgaaggtaaggaactccgcaagtttttctatgttcgttctcgctcaaccacggagttagcgcttgagtatacagtgtcaaacggcagggtagtacccacaggacgttatacaattgctggtaatgcagtaaatgaagcgctgagtgaaatgaaatctcgggtaagtacagttccgaatgcaccagcaggtgtagatgataatattgccgcaggtgttgagttcgcagatgggcattttgcgccgctgatgcttgatgatgggcggcatgctttcatcgatgagaacgggatgctgcgagttgttgcggctgattctgacgttgtggtgcggccatttatcgaggcgcaaccctatacgcttcctgatggcgcagtttgcacgaaaataattgtcgatccgtataaaaatatcacagaggcatggactgaggacggggggtattattttgccaccccggatggtctaaaacgcgttggtgatttaaagccagccgctcaacagataaaacaggctactgctgccaacgatttggtgatgaactacggcgcgacgcgtatctccgttgccgatgatctgcgccctgtaatgtacatcctgccgaccttcggccaatccctggcgcagggttggagcacttacgccgatgacgtgttgatcgccacgacacagctctatccagacaatgcatggatgttcaaatctgaccgtggcaccgggaaggagaacccgaatcgcggccctgcactgattgatgaaattgtgtcgctgaaagatacagtgaacggcggttggaaagaaacagcgtgctcatcttctgcggcgcacattatcagcgaagttgagaagctaacgggtaaaagaattcatattctgcgatatgttgcagcggagggcggtaaggcataccgaaatctaaccaaagggacgttcgcttggtctaccctcgtacaaggattaatcgacgctaagcgaatttgcgaacggatgggatttaagcctgtagtgctcgggctggacgtgaaagccggcgaaacggataccgacggtacgccaggtatgttccccgagctttatacccgtttcctgcggaatctcgatcgtaactataacgccgaagtgaggcgcattttcggtggcgatcacccggaaacgccgatctttgttgagcagtgcagcttccaaccgtggggagagtgggacagtcgtgtcaggcaagggcagcttgatgcagacggacttgggaacatcagatttaccgggccgggttatcaatacccacacccgggcgacgttattcacatcaacagcctggggcaaaataagcgcggcgtggctttagctcgcgccgtagcatttgaatgctttggcacgggttttatctctctcaagccgcgttcagtctactggtcaagcgcaacaactattgatgtgtattgcgcttcgtcagtatcgatcaccaaagacgagtctgacgctatcgtgaattctgcagggcttggccccggcgctgggtttaacattcgtgcgcgcgatggttccgagataacaatcactgacgtttccccactcggtacgacgggaatgcgcataaccgtggataacccgacaaacacgcgagttgtgcaaatcggctatggtctcaagcgaactggctccaatacccaatccgggcctatcgatggagctcgtggtttaattcgcacaacgaaaggcatcattaatctgtacaccggagagacggaatatatgtggctggccgcatttttatgggagttaagttaa

SEQ ID NO: 451037 - DNA, 456 bp, Serratia marcescens
atgatgaactatgttcaagtgaaaaattgcaggacaaagaatattgataagtatatagattgtgacgttatttttccggatttatctgatgcgccgatttcatttactgcgatgccgaatgactcaactgaacacggaagggatatttataagagggcgtttaatgaggagtttggggacgtagttatcgctaaaaatgaattcggttattattgggatggggagaaatttgtagaatatgactttgatattgaaacattgcagttcaatgagatgaaaagcagattaataagtgaggctacgcaaaaaatatcaatcctttctgatgctgttgatttggagattgcaacagatgaagaaaaagaaaatataaataaatggaagcaatacagggtgatgctaaacagaataagtaaaggtaacgacaccggatggccggataagccagccaattaa

SEQ ID NO: 451038 - DNA, 579 bp, Serratia marcescens
atggcactggaagacgactatacgaacctgctttataatttgcttcctttaggccctgcatgggaaggtgataacgcattattaagagggcttgccccatctcttgcatcagtacataaacgcggtgatgacctgatgcaggagattaacccggctcaaacagtggagctaattgaccgctatgagcggctatgtggtcttccagactcttgctcaccaccgggaacacaaacattattgcagcgccagcagcggttggatgcgaaaattaacgttgctggtggtatcaatgagcaattctatcggaaccagctcgatgcgttaggatattcatcagtaactatagagcagttccaaaaccttaatgaaagccctaatcctgagtggggcgataaatggcgctattactggcgggtgactattccatccgattccagcatcgcctggcagacatgcaccagcagttgtaattcagcaattagaacatggggtgacacggtcgcagaatgtgtaattgaaaagttagctccatcccacactgttgtaatattttcttatcctgaatctgacggagaataa

SEQ ID NO: 451039 - DNA, 1065 bp, Serratia marcescens
atggctgacagtaatttcagcaggcccacgttgccgcagttgatagcgaacattcgcagtgatttactgacgcggtttgaagatgatgtgcttttgcgtcggcttgacgctgaggtttatgcacgggttcaagcggcggcagtacacactgtttacggttatatcgattacctggcgcgtaacatgttgcccgatcaggcagatgctgaatggcttgtacgtcatggagctataaaacgctgcccgcgcaaatctgaaacccgcgcaagtgggtatgttcggtgggaaggggttcccgatgacgttgaaatagccaccggtacaaaattgctacgtgatgatcagcaatcttacaccgtgacaacaacgacaaaatcaggcggaggattgttgcgtgctccggttttggccgatgtggcaggcggcacaggtaatgcagatgatggcgtcattatccggctggaggctcccattactaatttgccttccgctggttacgccgactccatatctggaggcgaggatgtcgaaccgctggagacttggcgcgctcgaattatggagagatggttttacacgcctcaggggggtgcagatcatgattatgtcatctgggcaaaagaagtgcctggtgtaagtcgcgcctggacgtttaggcattatcgaggagtcggaactgttggcgtgatgttggcaactaatgatcctatacatccggccccatcgccacaggttgtcgaagccacaaggcaacacatcttaccattggcccctgtcgcgggcgcaggtcttttcaccttttccgctacggagaaaatcatacccatgacgatcgccctagcgaatgataatcctgagacgcgggcagcggtaacagctgaactgaactcgcttttccttcgtgatggcattccttccgggacactccatttatcccgaataagcgaggctattagtattgctgcaggagagtatgctcatcggcttgtttcaccaactgaaaacattgtgttgggtaacacagaattgccggtgctgggcgcaatcacctgggcaagctattaa

SEQ ID NO: 451040 - DNA, 537 bp, Serratia marcescens
atgaacatgaaagacctcctttaccgtggactgtcgaatctacttgcaagggcggtagtgcgtggcatcgatacagcacagaagtgccaaatgatcgatatcgctgttgttgccaatgagccaaagaatagcgttgaacatcttgaaccttatggtttcacttctgctgctcatgccggtgctgaagccatagcaatgtttgtcggcggtgatcgttctcatggcgtgattctgacggtttcagatcggcgataccgcctcaaaggcttagagggtggtgaagtggcgctctattcggatgagggggacagcgtcgtactgcgtcgagggaaccgcatagaagtgagcacagcgcattttgttgtgaatgcgaaacaaaaagccaccttcaacaccccgcttcttgaagtccccaacggggaaataagcgataagaccagtactgtgagcaaagtgcgtgaacgatataacgttcacgatcataacgatactcacggcggtaaaaccggaaaacccaatcaggagatgaacacgtga

SEQ ID NO: 451041 - DNA, 1077 bp, Serratia marcescens
atgaataattttgtaacactgcgcgttaatggccgcgagtggggaggctggacgtcagtaaaaatcgcggcaggtatagaacggctggcacgggattttaatgtgcaaattacgcgccagtggccaggtgaaacgggcagcgttcctttgcaaccacgggttaaaaagggcgaactggttgaagtgctgattggtgatgacctggttatcaccggatggattgaagcgatgcccgttcgctacgatgctcaatcggtcagcttcggtattaccggtcgaagcaaaacatgtgatctgattgattgtgtagcggctccaactcaatttagcgggcgaacgctggcgcagatcgctaagaagcttgccgagccttttaatgtgactgttttagatgaaggggcacccactgccccgttacagggaatacaggctgatcatggtgaaaccgtcagggaagtgcttgccaaattgttggcacagcaacaggcgctagcctatgacgatccgaaagggcagcttgtcattggtgcgataggctcaacccatgcggttactgcattggtatttggtgaaaacattcttctttgtgacaccgaacagagtatccgagatcgtttctctgattatcaggtttctggtcaacgggctgggggaaatgtcgattttggtgaggctaccatttccgcgattcgagcatcaacaaaagacgatcagattacccgttatcgcccctatgcaattcagcaaaccggcaatgcgacaggcgcaacctgtaaatcgcgatgtgagtttgaagcgctacaacgcgccgctcgcactgaggaaaccacttataccgttcagggctggcggcagggggatggcagtttgtggaaacccaatcaacgcgtaattgtttttgatcccatcctgggtttcaacaatcgggaaatggtgatagcggaggtgacgtatagcctcgatgaaaatggcacaaccagcgagattcgcgtagggccagaggacgcatatctccccgagccgaataaaccaggcaaaaggccgaagcgcaagaaggccgtggaggacgatttctaa

SEQ ID NO: 451042 - DNA, 1293 bp, Serratia marcescens
atgagctggatagacagattgcaaccggcctctttccggggcgttccgtttaacgttgaagaagatgaaggcacatttgggcggcgtgtacagacccatgaatacccaggtcgagataaaccgtacacagaggatttagggcgcgccacccgccgtttcaatgtgtctgcatacctgatcggggatgactattttgagcttcgcgatcggttaattcaggcagttgaaacccctggccccggaacattagtacatccgttttatggtgagatggttgtctgcattgatggtgaagtaagggttagccacagcaatagcgccgggcgtatgtgccaggtcagctttaacgttgtggaatctggggagctgtcattccctacctctggtgtggctactggacaaacgcttatttcatcctgctccgcgctggatgacagcatcggagaggctttttccgcctttggcatggacggtttgccggattaccttcagggtggggtaatcgaaagtgctacgcaaatgtttgattatgtgacaaaaacattcgacatgatcgatgaagggatcagcgctgcggctcgacttctgcagggggatttgtcggtattgctgtctcccccttcaagcgggatggatttcgttaactccctacaacggatgtggcgctcgggtaagcggttgtcgggcgatgcggctgatctggtcacaatgattacgacgctctccggtgtcacgttgggaaccgacctagccccgcgcggcgtgtggaaaacagacagtgcgacgacacaagaggaagtcaggcagcggaattatgttgcgtcagcgatcaggacgacggcgatcagtgaggctgcatataccgtgacgacgctggcacagcctaggacaccggagaacacaaccagcgctgatcagctaacggttgcccatccagcgctggggaatgttacggatgtacctacacaaccttcaattgccggttatgacgaactgacgtttgtgcgtgaatcgctgaacgttgcaatagaaaaggagttgcaacggacgacggacgatcagttgtttcagcgtttgataacaatccgtaccaatgtaaatcgggatatatcctctcgcctcagccaggtagaaaaaacagtacagcggacacctattgccgttattcctgcgcttgttctggctgcacgttggtatgacaacgctgctcgggagactgatattacgcaacgtaatgttattagccatcccggctttgttcctgcgaaaccgttgagggttccagtcagatga

SEQ ID NO: 451043 - DNA, 1869 bp, Serratia marcescens
gtggctgatagctttcagttaaaggcaatcattacagccgtcgatcagctttctggcccactgaagggtatgagcaagaacctgaagggattccagaaagaattttccggtatcatggcaacggcggcagcggttgggacgggtattgttactgcctttgcaatccctattaaccaggccatagcgtttgaatcggtgatggccgacgttaagaaagtggttgattttgacacgccgcagcagtttaagcagatgtcggaagacgtgttgaacctatcaacgagactaccgatggcagcggaaggcatcgggcagatcgttgccgccggtggccaggctggcatcgctaaaaacgagctgacgtcgtttgcggaatcggctgtaaaaatgggcgttgcgtttgatcagagcgccgatgaagctggtcaaatgatggcaacgtggcgaacagcctttaagttgactcaaccggctgtggtttcgttggctgataaaatcaactatctggggaataccggcccggccagcgcggcgaagatttctgaggtggtgactcgcatcgggcctttgggtgaagttgctggcgttgcttcgggtgaaatcgctgcgatgggggcaacgattgccggtatgggggtagagtctgagattgcctccacggggatcaaaaactttatgctttctttgacagcagggaaatcggcgacatcttcccaaaagaaagcgctgagcttcctcaaaatcgatcccggcaaactggcgcaagacatgcagaaggatgccaaaggggcgatgctcaaggtgcttgagtcactatcaaaagtacccaaagcaaagcaagcagccgtaatgaattcactgttcggtaaagagtccctggcggctattgccccattgctgactaaccttgatctgctgcgttccaactttaataaagttgctgatgctcaaatctatggcggttcgatgcagaaggaatacgccgctcgtgcagcgacgacggcgaacaatattcaactgtttaaaaataagatggcggcagtcagtatcacaatgggcgatatgttcttaccggcgatcaataaggggttagacaaacttgcacctttcatcgaacagttccgctcatttgtgaagagtaatcctgagaccattaaatccgtgttcaaatttggtgcgacgttattgggaacagctaccgcagttggagtggtgacgaaggctttcaaaatgatggaggctgtcatgaaactttcaacgctgggaaaggtagtttctttactggtaatcgccggtggcctgatcgtgagtaattgggataccgtaggcccaattgtaaaagcggtctggcatgacattgatgatgttgcgaaagcactcggtggatgggaaaccgtgttgaagggcgtggcagcatttaccgttggtgcctggatggtatcaatggttaaaggcatcggcggcgcaaatactgaggcagggaagttatcaagaaatctgaggggtattgcgaacatgggcgtgattaccgtcacgattgctgtcctgttcgatatcatgaaacggttggataatcttcaccaggaagcagccaagcaaaataccgatgtaggtagtctgctgacaaataaaattaagcagggtgattctgaacgtggatacaccggatttatcccgcgactgaaagaacttctgaatattgacggtagccaaaactcaaaagtaccgttagccagccctcgaccacaaagcggcgaattgaaggtttcatttgagaacgctcccccaggtatgcgagttgccccggttgccggatcgtcgcccggtgtttcatatgatgtcggctatagcccattcgctaatcgttaa

SEQ ID NO: 451044 - DNA, 324 bp, Serratia marcescens
atgaaagaacttgtactttccaaacccattatggcgcataacgaaaagttgcatgtgctggagattcaagagccagactttgatcaaatcgaagcgtgcggcattcccttttcctataccgacaaaggtgaaatgcggttggatactcggtcagcactggcgtacattccggttctggcgggtattccgcgatcgtctgctcagcagatggcccccaaagatatcctcatggccacgatgaccatcatcagtttttttacggactcgggaactcttccgaactccgaaggcgactctacaataccgcccacttctggaaactga

SEQ ID NO: 451045 - DNA, 357 bp, Serratia marcescens
atgggcaagatcgcaggtaccacgtatttcaaaattgacggccaacagttgtctattaccggcggcatcgaagtacccatgaacaccaaggtacgcgatgacgtggtgggcctggatggctccgtcgatttcaaagaaacgcaccgcgcgccgtacacgaaagtgactgccaaagtgccgaagggtttccctatcagcaaaatcgttgaggcaacagccatgacgatcacatcggagctggcgaacggcatggtttatgtgctggcaagtgcctggcttcatggcgaagcaaaccacaacccggaagaaggcaccgtcgatctggaatttcacggtgaagaaggattctatcaatga

SEQ ID NO: 451046 - DNA, 843 bp, Serratia marcescens
atgggcgatgagttggctgattttattggcctgccattcaacgatgcggcgtcgctggctgcaatggctatggagatgaacgatagctccggccgctggagctatgcacgccagctttatggtcatgtgtattcggttaagttcggtgatctcagttcgctggttacgtttggcggcacgatgaacaaccagcacattaccgtgaccggtcacgaaacaacaagccaaacggcggcggatgaactcaccgcgctccatactgcgcgaaatgcggtgttcatccgcattgatccagcccgaccaacgcaaaccggggagttgaacggcgcattgccaccgaaaagcggcaagcgctttatcctgccagaacagcaatcactgttgagtcatgggattgccacggcttacaccgaaggcggcgtgttacgcgtccagcgcgcaatcacgacctaccagaagaacgcttacggggtgaaggacaacagctacctggacagcgaaacactgcataccagcgcctatgttctgcgccgcctgaagttggttattacgtcgaagtacgggcgtcacaagttggccaacgacggcacccgattcgggccagggcaggccatcgttacacctgcggttattcgcggtgagttgtgcgcgacttatcgccagatggtgcgggaaggcattgtcgagaatgcagagctgttcgagaaatatttaatcgttgagcgtaacgccaacgatccgaaccgcctggacgttctgttcccgcctgattatgtcaaccaattgcgggtattcgcgctgcttaaccagttccgcctgcagtacaacgaggaggccgcgtaa

SEQ ID NO: 451047 - DNA, 561 bp, Serratia marcescens
atgaagctgaccaaagttatcggtgctcttcgtcggcgggtggccctgtttgaagggcgtgttgctggcgcggcagagtttaaaaacctgcctgatgtgggcaagttggcgatgcctgcggcctacgtcatccctaatgaagatactactggcgatcagaagtcgcagacggattactggcaagacctcacagaaggattctctgtcgtggttgttctcagcaatctccgtgatgaacgtggtcaggcggcagggtatgacgccgtgcatgatatccgggcgatgttgtggcgtgctttgcttgggtggagtcctgaaagcgataaaaacattattcagtacgcgggtggcgagctgatagaaatggacagggcgcggctttattaccgttatgacttcacgatcccttacgaaattacagaggaagatacggcaatttccgaagcctatcaggacatggatgattttaagaccgtctcattggacgtggattatcttgatcccggtaaagggccagatggccgtattgagcatcacatagaaattaaccttcaagagtaa

SEQ ID NO: 451048 - DNA, 318 bp, Serratia marcescens
atgcttctgaaactggaagaaattaagcagcaatgtcgcattgacagtgacatggatgatgaagacgaatttctgaagcttctcggcgcagcagtacaaaaacgaacagaaacccggattaacagaaccctctatgctgagtcggtgcctgagtctgatcctgatgggctggtgctgcccgccgacatcaagatgggaatgttaatgctttgctcccatttttatgagaatcgctctgcggtgacggattttgagcagacagaggtaccgctcagttatcactggctggttgatccttatcggtttatcccactatga

SEQ ID NO: 451049 - DNA, 750 bp, Serratia marcescens
atgataacaattacatccattaaaaataagttggaagaatatacgaatcactctaatccatttgttggcgttgataaactaggtaaagattggtttgtgaaaccatattccatcgattctggcgaaggtgaaagagcgttgtttaatgaacttgtggcttttaatttggccgaaaaaatagggttgccctggccaaaaggccatgttgttcagctttctgaggatgtaaagaatgagctgaatatatcattttcttatgttatcgcatatgagtttatgcatgacatacaagagttacctgatggctatcaattcaatgataaacaagtggatagtctatatggtaaatctatatttgataattggctgaagataagtgatgtgaaagatgatacttgcaagttattaaatggcgaactgctatttatggatgctggagtggcctttttagatgatagtgatgctgtatggggggaggatggtctgatctggactaatgctggattatttgtcgaatcatcgccatatcatcgtgggaatttgaattctgcggaaggttataactcatggatggatagaatttgtgaggtatctgttgatttttatcaatctatcgtagacagcatccctgaagattggcatgttcctgaaagttacaagtcaaaattcgtcgaggtgttctcatcatccagtgatagatttatccctatgatgaagttatgtattgaacatgagttgaatcacccgtaa

SEQ ID NO: 451050 - DNA, 135 bp, Serratia marcescens
atgaaggcaaaagaaatgttcgtaatcggctatgacagctcgctcctgaatgacagttttttctttgtgaagcgcgttcagggctggaaagtaacgttggacgccgacaagcaggtggcggtcttcacccgctaa

SEQ ID NO: 451051 - DNA, 147 bp, Serratia marcescens
atgttcggtttattcctgctcgtttgctacacctacctcgaagatattcggcagcagtccctgcccgcgcagtatgagtgtttgccggttgatgggataatttcagctgctcgtcaccttgacaaggataggggagcggagcggtga

SEQ ID NO: 451052 - DNA, 594 bp, Serratia marcescens
gtgaataaagcactactcagaaataatgcccgtcatgaggctggtcattgggttacagggtgggtattgggtgagtatagtaaaaaaatagttttgtctatgccaagtaatgggcgatgggtggcatactgtgaaagagaaggataccaagaccttgaaaacataaaaggtatcaatgctactataggagatagagtcatcaatcttctcgctggtgccaaggctgaaagtatgacctcggacggattcaataatgagatctacaaagacttgatcgctgatggtaacggagcatggcctgacttttatctggcttctgagttatatagattatattaccgttcgctacctgtattgactaggggcagcttcgaggatgagtgggacgctatcaatgagcggtgcgagacaatactaataaagtataagtcatttatagataacgttggaataatggccttgataagatactcatccagcacagaagcagtggttacattttcaaaagaagaacttattactttgtttaacaactgtgagcataaaaatgacgctgacaaactaccaggtcaaagtaatgaaaactccgcataa

SEQ ID NO: 451053 - DNA, 321 bp, Serratia marcescens
atgattggttcagccaagaacatacaggcctatcgagttgagggagaactgttaaccacgttacaggaggttaataacgaaagtgattatgagcttttaaaaaatgccctacccgattctttgcaaaaaccctggggcgtagcattgcctttcaccttgaaagagtggtcatcgctggtggtgcctgatgccgttggcataccgcacacgcttgccggtgggacaggaaccctgctcgataaacacggtatagaccagacaataacgttgattgaagatcagaaagacgaggacgtcgccactatcagggggagaatatga

SEQ ID NO: 451054 - DNA, 570 bp, Serratia marcescens
  misc_feature (508)..(517): n is a, c, g, or t
atgcactcactgagcaagctggtccaagcgcttatcgcgtttggcaacaaaacagcacaagcgcaaagcaaggaaatggatgacggtcgtaaagagatcacgtctattcggcttaaaccccagacacgggcgtatctccaggttcagagcgaaaacttaggtatctccgtctcacagctgatcaacatcatggtggatggtgtggtatcggttgaaaccacaccgcagaaaaatgtcatcgacacaatgtacgatcgattgatgatgttgtttgaaagtcacaacctcacaccattggagattagccggttgctgaagcaccggggggtaactctctctaagctcaagtcccgcgatgccttgctcgacctcattactccagaaatgctggccgagattagcgaatggtttggtgtgaggctcacctggctcaatggacggggagatgaaatttacgaaaataacagccttacctggtataaaaacaccgagcaaatggcggtgtcgnnnnnnnnnngtcgcttattcagcgtcggattgaacacggcaaactggacatttacgtcataa

SEQ ID NO: 451055 - DNA, 1497 bp, Serratia marcescens
gtggctaagataatcattaaaaaattacggcatattaatagtcttgagtttgatattcctggttctggagtttggttacttacaggcgccaatggtactggcaagtcctctgtcctaggttgcctgcgccgaattgggtataggaacgcttttcctgtccactttccggcatcaagaaagtcagatcgacttgactccaatgagggggcctcgattggttacgtgacaagtaatggtgaagtagcatatacttacgttactgaacggtggtcaccaactcctaaaagtgctagtaagtttttacaaggtttaggttaccctgaaactatttatgtagccgctgatgctgaccggattgaaccccgaaaggaggatttttcaccaaagaagcttcgccctgctcagcaagatatcgtcgatgctgctaataaaatatttggtacacaaaagttttctgctttgaaggtaaccaacgttcgaacgggtattggttctcaagcgtttgttttagagctgccggctcatagcaagcaagctaaaagttactactcagaaaagaattttagccttggtgaaatctgtattctaaagcttttgcgtaagctatcgtcatgtaagcgtggagcgatgattttaattgatgagatcgagctggcattgcatccgacagcgcaagcagaattgcttgaatatctaaaaagaatcgctaaagataaatctcttacaatcgtagtgtccacgcactcggctaccttaataaaacaagctagccgaggcagtattctgcacttgcaatcggatgagaatggcaatgtaatttgcgctaagaattgcttcccttcctatgtgttaggtgccttggcatatcaagaggaatcagcctctgacgttatcatatatgttgaagatgaagctgcccgaacgattctcgaacagtttatacgaagttttctggcagacaaaattgcccagcagcacttaacgccaagtgtcaccgtaattgcggtgggaggctttgtagaagtattgaggttttatgtccggcagcggcccatgctgccatcaattacgcggtcttacgtgatgcttgatgccgatgcggaagttgatctcgagaatgctacgaagcacgacctgatcagtatctacaaagacgagaggcagagaatatcctttttaccgttcacgccggaggaaggggttgctcaatatttacacatgaatagagatcacttagtgactgaaattcgtctgtacttcggactcaatattatacatcttcgatcgcgcgatgtccgccaacctcctcagcagggaacccctaagtcgcgtgatatttgcaaggacatagttaatgaagtttgtgatgtattattggcccagattccgaacgcgacattcataagtgtaaaggaggcagtattaaagatttttgctcagcactactttgcagcgaatcgaccagctatcatgcagctaattgggccaataatctga

SEQ ID NO: 451056 - DNA, 1254 bp, Serratia marcescens
  misc_feature (7)..(16): n is a, c, g, or t
  misc_feature (1226)..(1235): n is a, c, g, or t
ttgctcnnnnnnnnnntcttcaaccgtgcggctaatgataccgatgaaactgaagaagatatggaaagcattcttgatgaatgtctggctgcaggcctgtataaccacagtctgagttggcattatcgtagccgccatgaaagtttgattgcattctccaatcatcagtattacgacggtaatctgatcaccttcccctcatctaaaaccaaacaaagttccgttcagtggcgcaaagtaatagggacctattctaaaggtaagggacgccataaccaggccgaagcagaggcaattgtctctgaaacagtgaaacgtctgaaggataaaaaatttatcgcatctggtaaatctattggcattattactctcaatacggaacagcagaaactgattaatgatctattagaccgcgccagacaaatacatcctgaaattgagccattcttccaacctgaactggaagagcctgtcgtagttaaaaatcttgaaacagtccaaggggatgaacgagatctgattatgcttggtattggatatggccctacagagccgggcgctaataccatgtcgatgaatttcggaccactgaaccgaaatgggggctggcgccgtcttaatgttgctgttacacgcgcacgtcaggaaatgatggtgtttagctcttttgagccttcctttatagatctcaatcgtacaagcgctcgagccgttgctgacctgaagcattttattgaatttgctcagcgcggcccgatagctctggcacaagcagttcgcggctcggtaggaagttatgactctccgtttgaggaggccgtagcaaatggcctaagaagaaaaggatggcaagttgttccacagattggcgtatcacggtttcgtattgatttgggtatcgtgcatccggataaaccgggagactatttagtggggattgaatgtgatggtgctacctatcatagtgcagccactgctcgtgaccgtgataaagttcgtagtacgattctgcaggggctaggctggaaactgcttcgactatggtcaacagaatggtgggttgataaagaaggcgcactagaaaggctagatatggcgattaatggtctgttggaggaatccagaactgcggaagaaaaaatcgcagataaagatgagctggatcaaccaatcactatagaaaatagtagtgcagacgtaactgatgagcagggatatattcaggnnnnnnnnnnaaagatctgtttctggtaa

SEQ ID NO: 451057 - DNA, 336 bp, Serratia marcescens
atgaacactgcatcctgtttaccgattgaagtccgtaccgccgttttccgccgcgccgtggcgcaggcctatctggacacctgcgccttttaccgggtgagcctcgggtacacgctggacgagctgcagatgacgattgccctgcgcctggaggggcattttgtgcatcagtacggcgcagaagacggtatggacatggcatgcacgatgttgagtgacatggtgcagccggacgttctggtggccgcaccgcgcctgaccgcgctggggcaaaagatgatggacgaactgtgctgcgagcgcctgtcggcggcacagaacgcgaccgtacactga

SEQ ID NO: 451058 - DNA, 336 bp, Serratia marcescens
atgaacactgcatcctgtttaccgattgaagtccgtaccgccgttttccgccacgccgtggcgcaagcctatctggacacctgcgccttttaccgggtgagcctggggtacacgctggacgagctgcagatgacgattgccctgcgcctggaggggcactttgtgcgtcagtacggcgcagaggatggcatggacatggcgtgcacgatgttgagtgacatggtgcagccggacgttctggtggccgcgccgcgcctgaccgcgctggggcaaaagatgatggacgagctgtgctgtgagcgcctgtcggcagcacagaacgccaccgtacactga

SEQ ID NO: 451059 - DNA, 234 bp, Serratia marcescens
atggataaccggggttggattgccccggtttttttatgcttttttccgctcatcgtgataatgctgatgattatcttgaaaatcattcgtatggcgcaaatgcatagtcggactttatctgagaaaattctgtactcgacgaaaatgtgtctattcttttctcttaagggattatcgttctcattcagagtgccgagggaaggcgccaccgcattaccgatatccccgtattga

SEQ ID NO: 451060 - DNA, 1542 bp, Serratia marcescens
atggaaaagtatattttcaagaacagtgatcaaattggtagtttagatgccgaaactgatacttttttagaggagtgctttgttgaatcctcaatgtatgatgttttaaaaaaattcactagagatatcgacttcactaaacgaatcatagttggtagaactggttcaggtaaaacagcacttttaaaaaaactgatgcaagataattcaataaaaaaacatgcaattattgaagcggaatccacagtttttgaacatattaaaaacaatatatttatatctcagctgctcgaaaaaaatattgatttaagggttttttataaatcgttgtggatacacgttttactagttaaggtaattgaaataacattcccaaataatgcttctttttatgataaaatccaaagtttagtcggcgggaaaaagaaaaagtacaatattgaattagctcaagaatatctagccaaatatagcgacaactttttcaatgataaaatagtttctgaaataacagagaaaatgcaaagtgagttaagtggctcattgggtgggagttttgctaaggcaagtggaaaattaacggatgaggttgctcaaaaaattcaaacggaaaccgcccgttacgtgagtagtgaactgcttcgaaagcaaaaggaactaattaaaatcatcactgaagaaaccgcggatgaagcccaaaatagagtgattattagcattgatgatttagataagtcctggctaagtagtagcaatattcgctatgatttcataaatgctttactcgatgcatttaaagagctaattgatattcgttctgtaaaggttttgatatcaatacgaactgatattttaatgggaatctataaaactaatttaaggcaagaagagaaagatcggtctcttattattccaattgaatggaaaaggaaagatatcttcgacattttagataaaagaataaactacctcataaagcataaatatgcaggaaaaacaaatgttcatttttctgacgtattcaattttagtgtaaaagatgaaagtgctgcgaattacatcgtagagagaactatgttaagaccaagagatgcaattgactttgttaatttttgtctaagtcaaggcgatggtgttagctctctgaatgaagataatgtttttgaagctgaggaaaaatattataactctagaaaaaacgcgataaacaaagagtggttaagccgttacaaacatataaatgactataccgactgcattgccttaataaataaaaaagaatttacaaaatctgatattgtttccgacactaacatgataattgatttcttgatgtctagatccaccagtgaagatgacattaacgacgaaaaaattgcaacggacttcaatgctcttttagatgtttggtttactattgggttaatagggattaaaaagtcagatactttaattgttttttcatcttttgataagccttctttagatattagtgactacaacaagacatttttaatacacccactattttatagagtgtaa

SEQ ID NO: 451061 - DNA, 1350 bp, Serratia marcescens
atggcttacttacgagatatggaagaattaattggaacaattgaagatataaatatgcaaagctatatgcgagaggctcttcgctgctacatggctgacgcacatagagcttgcattataatgtcatttataacaattcatgaaaacatatatacaaagctagatagattatccttggttaacagcactgccaagaaaatatatgacgaaattactccactaagagagaatcaagcagtatttgaaaaagaaatggttgaccgcctatctaaagaaaatataatctccaaattagacgccagtttcgtgacccttttaggcaacttaagaaataaatcggcccacccttcaggacattcaccatcggctgaggaagcaagatatattttctctgagtccatctcaaggtttttatcaaaaccaatattgtcagctcatcaggtttcagatgagatattagaaagcctaggcggggggaatttattcccaacattaaaagtttcagactacgcgataattgttcaacatgaattatcaagaatgtcgttggaaggtttaccatacctattgaataaacttatatcaaatctggactcccctaatgaaacaatcaaagcaaacgccttaagatttattttagggatgggatctgagggtgctaaagacgagaccatatcatcgataaaaaggatattaatggagaaacaaatccataaaacagaacgagaaaactgtattactctgattatctcttgcaactataaattactggaagacttaagcccaccaacctacataagattaaatgaagttatcattaaaaacaatgaccaagcagatctggcaagcccaacaaataaaacaaagaatcctttacagaatctcaagtcaatatcaaagctttcaccagaaatttcaaggttacatttcacacgctccgcaagcgcaataataaataaattcaaatataatacagacttgtatcaaatcgtcgaaaacagctcttggatggtggatttattatttgaggcattgctgaatgaagctcgaaactatgatttcgcgaacgcaaataattttgctaaatttattgttaatgtagatgacactgtttgtaaactctttaccagcaaacaatgctttagtctacttgcaggtatctataaggcaaatacgtacggagcaaattattcagagaagatagtagccaatgaatataaatccataccattaataaaagagaaagctttagtcggtgtagggaaagaaaaggaacagtatcaggagattttaaaagaaatttcaggtgacgattccttgcatattgatacattcctcccatctgagtag

SEQ ID NO: 451062 - DNA, 573 bp, Serratia marcescens
atgattgaggccaattttaataacgaggcgttactaaacagaatctgcgaggtttatggatttactcagaagatccaactcgctaatcacttcaaaatcgcagccagttccttacagaaccgctatacgcggggcaacatgtcgtacgattttgctgtgcattgcgcgcttgaaactggcgtaagccttaaatggctgatgactggtgagggagagaaaaacctgtcagctaatgaacctcaacactcaacggagcttcctttattcgaattaagtgaaggtgagctatccaatattggtactctttcgtttgaccagcagcttttcactaagcagccgaaaaagggtgcctctgtgaaaagcgataacagcacctatgtaatcgagcaggagtcctctttgtctgatggcctttggttagtagatattgaaggcgcactgagccttagggaaataaccgttttgcctggtaaaaaattacatgtagccggtggaaaagtaccgtttgagtgcggagttgatgacatcaaaatgattggtcgtgtggtgggtgtatacagcgaggttaattga

SEQ ID NO: 451063 - DNA, 264 bp, Serratia marcescens
atggcttctgaaatcgcaatcatcaaaatccccgcaccagtcgttaccttgcagcaatttgcagagttagagggcgtttctgagcgcaccgcgtatcgctggacaactggcgacaacccatgcgtaccaatcgagcagcgtgttatacgcaaaggctgcaaaaaagccggtggtccgattcgtatctactacgcgcgctggaaagaagagcaaatgcgtaaggcgttgggtcattcccgttttcaactcgtcatcggcgcttaa

SEQ ID NO: 451064 - DNA, 510 bp, Serratia marcescens
atgtttgattttcaggtttccaaacatccccactatgacgaagcatgtcgggcttttgcgcagcgtcacaacatggcgaagctggccgagcgtgcgggtatgaacgttcaaacgttacgtaacaagctcaacccggaacagcctcaccagtttacgccgcctgaattgtggctgctgactgacctgaccgaagactcaaccctcgttgatggttttctggcgcagattcattgcctgccatgcgtgccggttaatgaattggctaaagacaaattacagtcttacgtcatgcgcgcaatgcgcgaactcggcgaactggcgagcggtgcagtatctgatgaacgtctgacatctgcccgtaagcacaacatgattgaaagcgttaacgctggcattcgcatgttgtcattgtcggcgctggcgctgcatgcacgtctgcagactaatcctgctatgtctagcgtggtcgataccatgagcggtattggcgcatcgttcgggcttatttga

SEQ ID NO: 451065 - DNA, 201 bp, Serratia marcescens
atgctgaaaagtgaaccgtcattcgcgtctctgctcgttaagcaaagccccggcatgcactacggccacggttggatcgcagttaaggacggcaagcgctggcacccgagccgctcacaggctgatttacttgctggcctctctactcaaaagctgggggagtcatggctatcgaagctgtttccgcgactgttccgctaa

SEQ ID NO: 451066 - DNA, 339 bp, Serratia marcescens
atggctatcgaagctgtttccgcgactgttccgctaaaagcgggtgaacgtctggccggtctcaatcatgtggctgaattgcgcgcgaaatattggggcgatagctggaaagaggttgagcgttttgtcgatgacatgcgcgataaacgtgacacacaatttgaagaaaataatcgggcgctggccgctattttctttctggcaaaaataccggcggctcgtcatgagctcgaattaaatgagctgactactgacgagaaaaaagcgcttattacagcgatgaatcattttcgtgcagtagtgagcttatttccaaaacggctaaccatgccgaattaa

SEQ ID NO: 451067 - DNA, 228 bp, Serratia marcescens
atgcgtaataccgaaacccgtagttttaacactgatagtgatgcgattgccgtattgctgactgatgcaaaaaaagaagagcgtaaagaccgcgcgctcgctgtttccatccgccttgaggcgttggctatccatataaccaaagagggtatgagcggcaccgaagctgccgaactgctgcgccgtgaagcaacccgctttgagaatgaatcacaggagctgcactaa

SEQ ID NO: 451068 - DNA, 222 bp, Serratia marcescens
atggccgatgcaatggattcagcacaactgcgcgagcaggaagaccgcgaacgccacattagcaacgcgcgcagccgtatcgctgcgccttcccgttttctctgcgaagaatgtgacgcaccaatcccagaagctcgccgcattgcgattccgggtgtggccttttgcgtgacctgccaagaggtcgctgaactgaaatctaaacattatcggggagtatga

SEQ ID NO: 451069 - DNA, 2223 bp, Serratia marcescens
ttggcggttcaattcgcttacccgtggagcgctccacggtcggcaatagccagcccataccttacctatgaccaacagtatcgccgcgaccgtatgttcgcggctttgctgcatgcgagaaaggtgctttctctccagcccgagtgcgtgcgctttgatgtttatcgcaccgctgcggtgctggagcaaaatcagggcagtcaacgagccaatgcctttttaatcagcttctgcaaaaaggcattgccacgtcttgaactggtcgcaaaaaaatacgagtgtgcaggcattagcagcgatgtatcaggcgctgttttcggtggtcatttcgatacgaaatatatgcagtatctggcatcacgtatggtcaatatggtcgccagatacgaccgcctcccggatatgtcgcgtgccgacattgacctgctggctactgatatcgctaattttattcgtgctgaactggcagaacatgatgacgctgattcagatttcggcgagttggcgacattacatggctggtacatgcgcgccggactaattgcgctgcaatttggtgttactcctcctcattgggcgggactgacaacaaaatactttgaccaggacaaagcggcgccagcaatcatgcgaatgtttaatgaggtttggtggcgtggccgtctgcgacgcattgctgcgtcatggcgcgaacatctgcaaattgcagtcggcaatgtcagcaagaaacgacacgcctacgcgagtaaaaactgcgttatcgactggcgtgaacagaagcgccgcacgcgagaatttctcaagggattggatctcgaagacgaagacggcaaccgcattagcctgattgaaaaatacgatggttcggtcgctaatcctgcgatacgccgctgcgaactgatgacccgcatccgtgggtttgaaaatatctgcaatgagctcggttatgtcggggagttttacaccctgaccgcgccgtctaaatatcacgccacaactaaagcaggctaccgtaacagcaaatggaacggagccagcccgtcggatacgcaaagttatctcaccggcctttgggcgcgcattcgcgccaagctgcaccgggaagaaatccgcattttcggcatccgtgttgccgagcctcatcacgacgggacgcctcattggcacatgcttatgtttatgctgccggaagacgttgagcgcgtacgcctcatcattcgcgattatgcgtgggaggaagaccatcacgaattgagaagcgacaaagccaaaaaggcgcgctttcatgccgaggccattgacccagaaaagggcagcgctaccggctatgttgctaaatacatttcaaaaaatatcgacggctatgctcttgatggtgaaaccgatgacgaaagcggtgagctgctgaaagagaccgctccagccgtttcagcatgggcggcgcgctggcacatccgtcaattccagtttatcggcggtgcgccggtgacggtctaccgtgagttgcgtcgtctcgctgataccgagaccgcacacggtctgagtgttgagtttgcagccgtccatgatgccgctgacgccggtgattgggctggttacgttaatgcgcagggtggtccgtttgtccgtcgcgatgatttgcaggtgcgcacattgtatgagccgcgcgctgagttcaacctgtatggcgaggaaactgtttgcatccgtggcgtttacgatgccgctgttggtgccgacaccccaattttaaccaggctcacgcagtggaaaatagtgccaaagcgtggcgttgatttggccgttgacgttaagggcgctcctgcgccctctcggagttctgtcaataactgtacgggaagcgaaagcgacccacctatattggatttcacaaaacctctaagtcggcgtgaaaggcgagagttgaccaaccgactcaggaagcaaaagccagcaataaggcgaaaattcatccacggcacggatgagcaaaacacagctatagcgaaaactatcgacgagatacatctgacaaccggcattaatattagccggggcgaagcacttcacctgatagccggtggtaaaggttgttttgatggcaaatggctacgcgggacgaccaagggagagattttttctgcagcgccatcgcatcaggctaaagctaggaaaatcctcagtcgtgtagcggctttaacagaaatggcaacgaaaagctaa

SEQ ID NO: 451070 - DNA, 732 bp, Serratia marcescens
atggataccttaatagaatttttatctctgggtctctttattgcttttatcgtggggttaattaagccgtcgctggttcgaatgccgagccgtaagcgctccagtgcggtttatctcggtggttgtttggcgctgggcgttattggctcaatcttatggccgactgaaaaaagtcagccagttgcaaaaactgaggcaccggcggttaaagcggaagcggcaaagacaacgtttgagtacgcagacaaaactctcaaagagtatcgcaacgagccaaaacaaacccggcacgatatcgttaaaggctatgtgggcttcaaaggtgtaccggcgagctctgctgatgtcttttatgcctgtatgagtgagtacacttttactaaagatgatgcgttaaagctcggtgatgtgttggagtggtgtttcaacgacttcgagaaggatccacaatcgctgaataataaaatcaaccttgacgcatttcagggtaattttagcggttgggatggttcttatcgaccgttcgagaagctgattaaagccagaatgaatgatgattcctcttataaacatgtttcaacggtctaccatctgattttgaataaagacccgcatgccgttgtaaaaacaacgtttcacggcactaatgcctatggcggcgttgtcaaacagaccgtagcggcacgcgtcaacgtgcgaacgggtgaggtcgattcgatactcgacaattaa

SEQ ID NO: 451071 - DNA, 618 bp, Serratia marcescens
atgaatgtaaaattcttcggcataatcattatatgtattttgatgtttaccttaggtttcttcattggtgggtttaaatgggagtgggctgagagtaaacatgcgagtgaagtcgcgctctgggcaatgcttggtggatggctatctgcatttgcgacgttggccgccgtaatggtttcattacatatggcatatcaagcaattaaaagtgagactgaaaagctcagggttattcatggaatgagtggtgtggtttcccatggcaagggggtaaattgctctctcacaattcaaaacatgagaaatctgagggttaacattacaggtatttatttctctctgggtaagtcctctggtcgttactctttagataaaataatcgccctaaatgatgtgtctttgacctataaaggtgggcgtgcgtcattttgttttattattgactcaggggtgaagtggtgggggatgtattcgttatttgatagggatgaaaaaattaatttcaataagggcaagcttttcgtaacaaccgacctcaacacttacgagttcaagctaccaaaacattatctcactgcgcttgagggtgcgtattcgcaatatcaggctattaaatag

SEQ ID NO: 451072 - DNA, 1044 bp, Serratia marcescens
atgagtaaatacaaaggccgcaagccacagccacaaaagcgcccgcgcaacatgaaagacagcgcgccccaaaaaatgggggcgtttacctttggtgaaccgagcgccgtgctcgaccgccgcgatattctggattacgtggaatgcgtcaataatggccgctggttcgaaccgccggtcagctttaacgggctggcgaaaagcctgcgcgccgccgttcatcacagctcgccaatttacgttaagcgcaacattctggcctcaacgtttattccgcacccgctactgtcacaacaggacttcagccgcttcgcgcttgattttctggtgtttggcaacgcgtttttagagctccgaaagagtgtcaccggtcgcccgctgaagctggaagcgtcaccggctaaatacacgcggcgtggtattgaagatgatgtctactggtgggtgccgtcatttgaccagccgcacccgttcgcgccgggatccgtattccacctgctggagccagacatcaaccaggagctgtacggcatgccggaatatctcagcgcgctaaactccgcctggctgaatgaagcggcgacgctgttccgtcgcaagtattaccagaacggggcgcatgcgggttacatcatgtatgtgacggacgccgcgcaaagcggtaccgatgttgaggcgttgcgcgatgcgatgcgcagttcgaaggggctcggcaacttcaaaaatctgtttttctacgcaccgcacggaaaaccagacggcattaaaattgtgccgctcagtgaggtggcaacgaaagacgatttcttcaatatcaaaaaagtcagcgccgccgacctgctcgacgctcaccgcatcccgttccagctgatgggtggcaagccggaaaacgtcggttcgctcggcgatatcgagaaggtggcaaaggtgtttgtccgtaacgagctcatcccgctacaagaccggatgcgcgaggtcaacgcttgggccggtcaggaggtgatccggttcaaaagttacaccctcgacaccgaaagtgactga

SEQ ID NO: 451073 - DNA, 1770 bp, Serratia marcescens
atgaccatcaccaccgacaccactttattaaacgacccgcgacgccaggcggctttactgtactggcaggggttttccgtgccgcagattgccgaaatgttgcagaccaaacgcccgacggtgcagagctggaaacagcgcgaccagtgggaggaaaccgcaccgctgaaccgggtcgaaagcaccttagaggcccggctgattcagctctacgcaaagcccaacctgacaccccacgatttcaaggtggcggattttctggcccgacagatggagcgctttgcgcgcattaatcgctatggccagaccggaaacgaggttgaccttaatcccaatgtggccaaccgcaacaaaggcgaccgaaaaaaaccgacaaagaactttttcagcgacgaggctatcgagaaactggaagagatttttttcgcggagtctttcgagtatcagctccgctggcaccgagccgggcttgagcaccgtattcgcgacattctgaaatcgcgccagattggggcgacgttctacttttcccgcgaggcgctgctgcatgcgctgaaaaccggccataaccagattttcctgtcagcgagtaagacgcaggcgtatgtattccgcgagtacatcattcagtttgcccgcctggtcgatgtcgacctgaccggcgacccgattgtcatcggcaacaacggcgcaaagctgatttttctcggcaccaactcaaacaccgcgcagagccacaacggcgacctgtatgtcgatgagatattctggatccccaacttccagaaactacgcaaagtgtcgtcgggcatggcctcacaaagccacctgcgcagcacctacttttcgacgccttcaaccctggcgcacggtgcttacccgttctggtcgggggaattgttcaaccgtggacgcgcccgcgccagcgagcgggtcgacatcgatatcagtcatgacgcgctcgccgctggcgtggcgtgtcccgatggtcagtggaggcagattgtcaccattgaggatgcgctcgccgggggatgtacgctgttcaatctggagcaactccagcgcgaaaacagcgtcgacgacttccgcaatctgtttatgtgcgagttcgttgacgacaaggcgtcggtgttcccgttcgaggatttgcaacgctgcatggtcgacagtctggaagagtgggaagactttgcgccgttcgccgacaacccgttcggctcccgtccggtgtgggttgggtacgacccgtcgcacagcggcgacagcgccgggtgtgtggtgctcgcgccgccggttgtcgccggtggcaagttccgcattctggagcgtcaccagtggaaaggcatggactttgcgacgcaggccgaatccattcgccagctcaccgaaaaatacaacgtcgagtacatcggtatcgatgcgacgggcctcggtattggcgtcttccagctggttcgctcgttttatcccgccgcccgcgatatccgctacacgccggaaatgaaaaccgcaatggtgctgaaagcaaaagacgttatccgccgtggctgtctcgaatatgacgtcagcgccaccgacatcaccacctcatttatggcaatccgtaagaccatgaccagcagcgggcgcagcgccacctatgaggccagccgcaccgaggaagccagtcacgcggacgtcgcctgggcgaccatgcacgcgctgttaaacgaaccgcttaccgctggcagcggccaggtaacatcatccattctggagttcaactga

SEQ ID NO: 451074 - DNA, 855 bp, Serratia marcescens
atggcaaaaaaagtttcaaaatggtttcgcatcggcgtcgaaggcgatacctgtgacggccgcgttatcagcgcgacggatattcaggaaatggcagagacctttgacccccgcgtctatggttgccgcattaacctcgaacacctgaaaggcattctgccggatggcccgttcagtcgttacggcgatgtggtcgagctgaagtctgaaaagattgacgacgattcggtactgaaaggcaagctggcgctgttcgccaaaatcaccccgaccgatgacctgatcgcaatgaataaaaaattgcagaaggtctacacctcaatggaaattcagccgaatttcgccaatagcggtaaatgctacctggttggcctggcggtgaccgatgacccggccagcctcggcaccgaatacctcgaattttgccggggtgccaaatttaaccccctcaaccgcttcaaagccgagccgggcaacctgatttccgtcgccaccctcgccgagctggagtttgaagaccaggcggaaaatgtctttaccgccctgagcgacaaagtgaaagcgatcttcagccgcaaacaggccagcgatgacgcccgttttcaggatgtgcatgaggccgtgacgaccgtcagtgagcatgtgcaggaaaacctcactgctactgaacagcgtcttgccacgctggaaaatgcctttgcgaccctgaaaaaggacgtcaccacgaaggccgaccagaccagccaggcattcagccagttaaaaacgtcgctggatacaaccgaaagcaccacgcagccacgccgcaagctctccaccggtggcggtggcgatgagctgctgaccgactgctaa

SEQ ID NO: 451075 - DNA, 1059 bp, Serratia marcescens
atgcgtcaggaaacccgttttaaattcaatgcctacctgtcccgcgttgccgagctgaacggcatcgacccggacgacgtgagtaaaaaattctccgtcgagccgtccgtcacgcaaaccatgatgaacaccgtgcagatgtcctcggcctttttgcagaaaattaatatcgtgccggtggatgagctgaaaggtgaaaaaattggcgtcggcgtcaatggcaccatcgccagcaccacggacaccaacagcggcaaggagcgtaaaaccgccgactttaccgcgctggagtccaacaagtacgagtgcgatcaggtcaactttgacttccactttaaatataaaaagctggatttgtgggcgcgcttccaggacttccagcgccgtattcgcgatgccatcatccagcggcaggcgctagatttcatcatggccgggttcaacggcgttgagcgcgccgaaacctctgaccgcgccactcatccgatgttgcaggacgtcgccgtcggctggccgcagaaataccgcaatgaagcgccgacccgtgtgatgagcaaaatcgtcgacgaggaagggaacgtggtttccgctgttatccgcgtgggtaaaaacggcgattacgttaacctcgatgcgctggtcatggatgccaccgacaacctgattgacgaaatttatcaggaagattcggagctcgtcgcgattgtgggtcgtaagctgctggctgacaaatatttcccgatcgtcaacaaagaccagcccaacagcgaagcgctcgcggctgacatcatcatcagccagaaacgcatcggcaacctgcccgccgtccgtgtgccgtacttcccggcgaacgcgattatggtgacgcgtctcgataacctgtccatctatttcatggatgaaagtcaccgccgctccatcatcgaaaacccgaaactcgaccaggtggaaaactacgaatcgatgaacatcgattacgtggtcgaaacctacgccgccgggtgcttcattgaaaatatcaagctgggcgatttctctgccgcgcaaccggagggctaa

SEQ ID NO: 451076 - DNA, 744 bp, Serratia marcescens
atgacgagccccgcacagcgtcacatgatgcgggtctcggccattgaaaccgcgcagcgggaaaacaacccgctgcgacatgccactgcctacgagcagatgctggttaagctggccgcagaccaacgcacgttaaaagccatctttggtaaagagctgaaagccacgaaaaagcgcgagctgctgccgttctatctgccgtgggtcagtggcgtgctggaacagggaaaaggtgcgcaggatgacatcgtgatgaccgtcatgctgtggcgtctcgatgtcggcgatatcggcggcgcgatggatattgcccgctacgcgtttaagtacggtctgaccatgccaggcaaacaccgccgcccgccgcagtacatgtttaccgaagaggtggcgctcgccgccatgcgcgcccatgccgccggtgaaccggtcgtcatcagccagttgctcgacacgctggcgctgaccgccgccgccgatatgcctgatgaagtgcgcgcaaaactgcacaaaatcaccggccaggtgttacgggacaacaaacagcccgccgacgcgctggcccacctcaagcgagcgatgcagctcgattgtcaggcaggcgtcaaaaaagacattgaacggcttgagcgtgagctgaagcccaaaccggcaacggtcgttaaagccccggtaagagcgccacgcgccgtgaaaaccacggcaccggctaaacgtggccgaccgaaaaagaccgccggttaa

SEQ ID NO: 451077 - DNA, 507 bp, Serratia marcescens
atgacgacgctgattattaaaaagaacgatgagccgcagccgggtggcgtggtggtcatcccgccgcctgccagcgatgagccggtgataaaaaatacgtttttctttcctgacatcgacccgaaacgcgtgcgtgaagggatgcgccttgagcagaccgtcgccccggcccggctgcgtgaggctatcaaaaccggcatcgccgaaaccaatgccgagctttttttgtggcgggaacagcagattgccgggggttttagcaagctggccgacgtgccggctgacgatctcgatggcgaaagcgtgcgcgttttctattacctgcgcgccgtcacctcaatggcgaccgccacgctctatgagcgttatcgcggtgtggatgccagcgccaaaggcgacaagaaagccgacagcatcgataccactgtcgacgagctgtggcgggacatgcgctgggccgtatcacgcgtccaggacaaaccccgctgcatcgtgagccaaatctga

SEQ ID NO: 451078 - DNA, 204 bp, Serratia marcescens
atgcaggccatcgcgcaacagggcgacacgctcgacatgatttgcgcccggtattacgggcgcactgagggggtatttgagtcggtgctcgccgcaaatccggggttggccgagctcggcgcagttctgccacatggcacggtggtcgaactgcccgacgtccagtcatcccccgtaactgaaacaattaatctgtgggagtaa

SEQ ID NO: 451079 - DNA, 291 bp, Serratia marcescens
atgacggaaggtgaaaaaagcgtcctgtcactgtttttgatcggcgtgctgattgtcgtcgggaaagtgctggccggtggcgagcccatcaccgcccggctttttattggccgtatgctgttgggcggctttgtctcgatggtagccggggtggcactggtgcagtttcctgacctgccgcccgctgccgtgtgcggatttggctccatgctgggtatcgccggttatcaggcggtggaaattgcgattcagcgcaggattaaaaaaggggaaaacgatggcggtcattaa

SEQ ID NO: 451080 - DNA, 498 bp, Serratia marcescens
atggcggtcattaagacacaccccaacgtcgcggcattcctcgacacgctggcattttcagagggtaccgcgacgcacccgctgacgaaaaacaacgggtacgacgtcattgtcaccggcctcgatggcaagccggagatttttaccgactatcgcgatcacccgtttgccggtggacgcccggcgaaggtcttcaatcgtcgcggggaaaaatccacggcatcggggcgttaccagcagctttatctgttctggccgcattacaaaaagcagctcgctttgccggatttcagcccggcatcacaggacaggctcgccattcagctgattcgtgagcgcggcgcgctggaagatttgcagcaggggcgcatcgagcgcgctatttcccgttgtcgcaacatatgggcctcattgccgggcgcggggtatggtcagcgtgagcacagcatcgacaggctggtcgcagtgtggcgcaaggccggaggggtatccgcatga

SEQ ID NO: 451081 - DNA, 297 bp, Serratia marcescens; identical to SEQ ID NO: 186273

SEQ ID NO: 451082 - DNA, 468 bp, Serratia marcescens
atgcaaaagcccaacagtctgcgaaaagccttaactgatgcggtgccggtacttcataccaaccccgatatgctttgccttcgcctggacgatggcaacaatacggcgacgctggcgcgctccctgtcgtttgaaaagcggtacacgcttaacatcgtggtcacggattttaccgacgatattgacctgctgtttgtgccgattatggcctggttgcgggtcaatcagccggacatcatgacaaccgacgagggcagaaaaaagggctttatctggtatgccgacatcaacaacgacagcagcctcgatgtcagtatcagcctgttactgaccgagcgcacgctggtcaaagaggtcgacggcgcgctacacgttgagaacatccctgagccgccaccgccggagtcggtgacgcgccctgttgagatgtggagtaatggcgaacgggtgagtaaatgggatgaatga

SEQ ID NO: 451083 - DNA, 450 bp, Serratia marcescens
atgaatgacttcaaaccctttgaggacaagctcgccgggttgatagcggccctttctcccgccgggcggcgtaggatgaccgccgacattgcgaagaaactgcgccagcggcaacagcagcgcattaaatcgcagaaagcgccggacggttccccgttcgccccgcgtaagcgccagcccgtcagggcaaagaaaggccggattaagcgcgagatgttcgcgaaactgcgaaccaaccgctatatgaaagcgaccggtaacgacagcgcggcagttgtggaatttacaggaaaagtgcagcgcatcgcccgcgtgcatcagctcgggctcaaagataagccatccccaaaaagcgccgccgtcgagtacccacagcgccagctcatgggctttaccgacgatgaccggcagcttgtggaaagcgtcattatcgacaacctctctgattga

SEQ ID NO: 451084 - DNA, 630 bp, Serratia marcescens
atggttactaatagtagtatagatttaactaaattatccaaggaagaactgattgaactttatgaaaaacacaaaatttcaaatatagctcaccaattatggtgtcttacgcacccagatattccagtgaatttctcttccgaatttgtaaagttgatagaaaaactggaaaagttagtcgaattgaacagccagggggaaacgtctccagacattttactggatgccctaatagattcaatctattctgattgccgtggattattttgtgagaagagtggcaactcaaaaaattatacgttacaaaactgcctaaaaatagtaaatgagaacgatgcagtaactaaaattgatgcaatcattaacagaaaggaatttagtgatgaaattgtttgtgattattctttctgggagtgggtcaaattcgtgaccgataaggcgatagttcacaaagataatttaacggaagacaaaaagaaaacaatagaatatagataccaatttttgaacaatagctcgaatgtatttgattttcaatattatatcctccaaatccataatatatatgtcaatgtcgtagaatgcttcgctgaagatttattaagcacatacaataaacccaagctctaa

SEQ ID NO: 451085 - DNA, 594 bp, Serratia marcescens
atgatccgcaccggtatcgtcgtcgaaactgacctcgacgccgggcgctgtcgcgtacagaccggcggcatttataccgactggctccagtggctgacgcatcgggccgggcgctcgcgcacctggtgggctccctctgttggtgagcaggtgatgattctggccgtgggcggtgagcttgataccgcttttgtgctgcccggtatttattccgacgacaaccccgcgccgtcggcctcggcggatgcctggcacgttgagtttcccgacggtgccgttatgagttatgagccggaaaccggcgcgctgaccgtcaccggcattaaaaccgccgatgtgaccgcatccgattcggttgccgtcagcgtgccggtggtgctggtaaaagcctcgacccgcgtcaccctcgatacgccggaggtggtctgtaccaacaagctgacgaccggcacgctggaggtaaagcaaggcggcaagatgtcaggtgatatcgagcacagcggcggcgctttcacttccaacggcgtgcaggtggataaacacggccacggcggcatcaggcgcggcgatgaatggacggaggacaccaaatga

SEQ ID NO: 451086 - DNA, 348 bp, Serratia marcescens
atgacggcgcgttatctcggcatgaaccgcacgaccggtgaaagcatttcagacgttgaccatatcagccagagcatcggggatattctgcgcacgcccgtcggctcccgcgtcatgcgtcgtgaatacggctcgctgttgtcgcagatgattgaccagcctcagaccccggcgcttgagctacaaattatggccgcgtgctacatggcgatcctgaagtgggagccgcgcgtcaggctgaccggcatcaccacagcgcggcagtttaacgggcagatggtcgtcgacgtgaccggccaaatcaccgataccggcgagagcctttccttaaccatccctgtgagttga

SEQ ID NO: 451087 - DNA, 909 bp, Serratia marcescens
atggcagttatcgacctgagccagctccccgcgcctgatgtggtggaaacactggattttgaagccatcctctccgagcgcaaagcgacgctcatttcactgtacccggaagacgagcaggaagcgatcgccaggacactgacactggagtcagatccactggtgaaatatctggaagagaactcgtatcgggaggtgattttacgccagcgtatcaacgaggcggcaaaagccggaatggtggcctatgccatcaaaaacgacctcgaccagctcgcggcaaataataatgttgagcgcctggtcattaccccagaagacgatacccaaatcccgccgctggcggcggtcatggaatccgacagcgatttgcgccagcgagtaccggctgcttttgaggggctgagtgtcgccgggccaaccggtgcctatgaatttcacgccctgagcgccgatggtcgtgtcgccgatgcctcggcgaacagcccggccccggcagaggtcacaatcgccgtgctgtcgcgggaaggtgacggcacggcatcggatgatttattgctggctgtcagtaccgcgctgaatgatgagagcgtgcgcccggtcggtgaccgcctgacagtcgtctcggccgaaattgtcagttacgcggtcgatgcggtgttgtacgtgtaccccggaccagcaaccgaacccattctagccgccgcgaaagcgcaattaaccgcctatatcaccgagcagcgccgcctcggtcgggatattcgactatctgccatctatgccgcgctgcatgtgcagggtgtccagcgcgtcgaactgcgcgagccgctggccgacgtcgtgctcgataaaacccaggcagcgtactgcaccgaaaccagtgtcgtgatcgggggctccgatgagtaa

SEQ ID NO: 451088 - DNA, 594 bp, Serratia marcescens
atggcgaccgggtcgtcggtgctggagcagcgagccgccgcagcgtgtgcagtcatcagcgatttatctgtcccgctgcgtgatttgtggaacccctggcgatgccccgtaaaatttctgccgtatctggcgtgggcgttttctgtcgaccgctgggaagaaacctggtcggaaacagtgaaacgccaggcggtcagtgatgctttctggatccaccaacgcaaaggcaccgttgccgccgttcgccgggtgattgaaacgctgggttacagcatgacgctccaggaatggtgggaagtagccgaccccgcagggacattccgccttgagattgacctcaatgatatcggcatcactgaaccgatgattaaagagctggagcggattatcggtgatgcaaagccggtcagtcgccatatatcacagctgacactatcggcatccgtaagagggacggcttacaccggttctgcgttggttgatggtgaggtaatcgcggtttatccgccggactataaaccggatgacggaattatttacgacggcatggcgcaatttagcggtaattattatttttcaggtgagcaaaaatga

SEQ ID NO: 451089 - DNA, 3336 bp, Serratia marcescens
atgacaaacatcattgaacaatcggtatgggaaggcagcattcacctgttatcgcgtgctgaaaaagtggaaggcggtatgacaggttccgcaaatattcaggctaaacaactggcaaaccgtacccgttatctgatggacagtatggatgtgattaaatcaggtgagtcgccgtactggtctgaagacgccgcaaaagccgccattcagcagggtatcatccaggagggggcgctattttctgtcaggagccagaacgggctggcgtgggtagatgaataccgcaatgtgaacggcgtccccgtcgctactggaaaatccctgccggacgcttcggctattattccgttcgtggttccaaatgaaaccgacccaaccggcacgattaccgggctgtcactgacgcgcggcggtcagtatttcatggtgcgccgtgatgacagtaaatttccgataacgtattacctgaatgccaatggcgtggctgaagtggttgaccgtgtgccgggtatgtcaacgattaatcagcttggcagtgatatccgaaaaacaaatgtctacctgcccggtaagaatctttttaataaagatgcggtaacggttgggtattatttatttgaagggtctggcgagccgcgagtaaaccctgattattgttattcggactatattggcgtgaaagctgggggcgtgtactgctctgataaaaggattcgtatcgttacgtattacgataaaaattataattatatcagcgatgtaatcaatgtatattcgtttaccacaccagataacgccgcgtgggtgcgactgtctgtgtcgcttcccctcattgacacttttcagctgtcgtttggtgccggagtgcttccttacgaacgttatcagatggtgctgccgcagaatgttcaaactgccaggatgaatgttattgaagcgctggactttacaccgggaaaaaacctttttgatccggctgctgtgatgaacggtgttcacctatcctctatcgggacaatatttactgatggtgattacaccacgtcggtttctgcttatattgctgtttcgccagagggtagtatttgcattaatcagcagtttaaagcagctgcctggtatgatgaaaatggtgtatttatcagcagacagtatgatgaatcatttttggtaaaacctatcggtgccttagtcatcccggaaaatgccgcatttttacgcgttgaggtgccgacggcggtcgtcacagcaacaatggttgaacgtggcgaggtggcgacggagtttgagcctttttgtctggtatcacctgatgtatacgctggccgaaaggtgaagtttgggcgggtggttcagaatgaaaactcattggttttcggtgctggagttaacctgtttaataaaaataaagtaagcactggatatattaacgagtatggctctgtatacccgattcagggatcgtcaggcgcggagtatgtctattcagaatatattcccgtgaaagagggagtgaaatataaatcaaacctccagatgcggtttgttgagttttcagacgcagataaaaaatttttatcgaccatcgtcagggcgacaggttttaccacacctgtcggtgcgaagtatgtgcgcgttacggtgctgaaaagcaatgcgccgtcaatgtctctggttgaaggtgagcgcctgggtcaacaagatgaatatgttcacctgatggccccaaaagctaaagacggtacgcctgtacgtataccgggggaaatggtccttgcgaatgaactcgatattgattttgtacagcatggcctgctggtatcagggaaaaaccttttcaataaatataccaggaagtcagggtatattgatgagggtggagtaatccgtgaacctgatgatcgttatgattattcagatttcattgctgttactccgggtaatacttatgccttaaaccccggagccagatttgtcacgctatatgcgaaagataaagcgtttatcaggactgtggctgatgccagtcagaatattaaatcaattacgccggacgccgattgttattttgtccgggtaacagtcagcgtggcctttagtgacacgttccagatggaggaaggtaccgcatcgacggcttacgagccgtttgcttattcgttactttccgctatgcccgatggcacgccggtagccggtggaggaagccagccggagccgcagccggaaacggtgattgtcccggatgtttacgggatggagcgactgcgtgaaacccgtatgcgaatgactaaaatgaccttcgcccaggcggttcggctggtcgtggcgatgctgggcgatagctacaccagaacgtcagctcgttatgtgctgaaagtggcgcagatattatggcgctatttcaacaatgcaggcacggccgccatagtgccacccatcgggtacggctggcgctcgtttggttttgaccctaacggcgataacactgatgttatcgggacgaaggtcaaccgcagcggcttcacctgcgcttataacaccggccacggcccggatatttcgtcagtgacggcagcggccagcggcgcgacgatttcatatagccaggatttttcgcagggatttgattcgttcctgttcgcggagggtggttcaggtgtgattcagtatcaggctacggggggagagccggtcacaattgacctttcgacctatccggccgggatgcagatttttccgctcgcgcttccgattaccggaaacggtactgtgacgtatacggtcatcaccgcgccggtaacgctttacggcgtcaacatcctcaataaaaccgcatcgggtgtgcttatccacaaaatgggcggtagcggttcgaactcccgtcactgggtgacggcgatggatgcacgctggcttgcggcatttgaaagtcttggggcggatctggttaccatcatgctgggtacgaatgaccagggggcgaagctgtctgcatcgacgttcagggataacattctgacgatgattgataacgtccgttcagttcgcccaacggccgatattttgctgatttgcccggcggaaaataaccgcgacggcgggaacagtattcccatgaccacctacgcagaggtgatgtacaaaatcgcacgtgatgacagggatgtggcgtttttaaatatgcaggcgtcatttggtgaaagtcatgaggattatgccgccggttcagcgagaccgtggatgattggcgacgggcttcaccctgacccgagtaccggcggttacgcgattgccggtgcaattactcgcgcaatcggtctgccagtcgtttaa

SEQ ID NO: 451090 - DNA, 1074 bp, Serratia marcescens
atggaaaaagtataccaggccattctgaccgaaaagggccgcgacaaactggcggcagcggctatcactggcgaacaggtcgggtttaccatgatgggcgtgggggatggtggcgggcaatctgccgcgccattatccgcacaggactcgctgattaacgagctgtaccgcgcatcattaaacaggctggtcatcgctgaccaggccgcaaatgtgatccgggctgaaatggtcatgcagccgcaggtcggcgggttctggttacgggaggccggattatacgacgatgcgggcgactgtctggcggtggcgaacctgccgccctcttataaaccgatgcttgcggagggggcgggccggttgcaggcaatcaatctttggatagcggtcagcaataccgccgatgtgcagctgatgactgacccgacagtgattattgccagcgtggatgaggtgacacgcgcaaagaatgaggcaaaagattataccgatgaggtgttaggcgccctcgatacgaacataaagcagattattgccgaagccgtcaaaacggcggtaagcgatgcctgggaactggataaccccgtcggcaccacgcggttttttaatcagaacctgaaccccaatgagcgctggccgtggtcggagtgggtatataccggcgaaaatagaacgatccgcgtcggcaaagccgatggctcaaacgtaggcgctaccggtggcagcgataccgtcacgctccagcgtaataacctgccagctgtacagattgatgtgagcggtgaaaccagcgagcagatagagcaaaaactgacaaccacgaaaaatggtaaacacaatcatggtggtgtggccggtaaagatgacccgtgggaaattggcggtgatgtgcggcagctctttaacccgaaagagctgggtgtgaccgatgatgccggagagcacgaacacgaagtcacggtaccggcgcacaaacacacgaccagcggcaaaaccgccaatctcggcgaagataaatcgttcagcgtggtggaagcgcacaccctgctgatgtgctggagccgcgtcgcctga

SEQ ID NO: 451091 - DNA, 1182 bp, Serratia marcescens
atgagcgattttcatcacggcgttcaggttgtcgagattaacgacggcacccgcgtcatttccaccgtatcaacggcgattatcggcatggtctgtacggccagcgatgccgatgccgccaccttcccacttaataagcccgcactgattaccagcgtgcaaagcgccattgcgaaagcgggtacaaaaggtaccctggccgcatccctccaggcaattgccgaccagtcgaaaccggtcattgtcgttgtgcgcgttgccgaaggtaccggcgacgatgccgaagcgcagactatttccaacatcatcggcggcaccgacgaaagcggcaattacaccgggctgaaagcgctgctcacggcggaggctgtaaccggcgttaaaccgcgcatcctcggtgtgccgggcctcgattccctcgaagtggcgaccgcgctcgcgccgatttgtcagaagctccgcgcctttggttatatcagcgcctgggattgccagaacatttccgaggcgatgctctatcgcgagaatttcagccagcgtgagctgatggttatctggccggattttctggcatgggataccacggcgaacgcgaccgaaaccgcctgggcgaccgcccgcgccctgggcctgcgcgccaaaatcgaccaggacaccggatggcataaaactctgtcaaacgttggtgtgaatggcgtcaccggcatcagcgcgtcggtcttctgggatttgcaggaatccggcaccgatgccgacctgcttaacgaggctggcgtcaccacgctcattcgtaaagacggtttccgcttttggggcaaccgctgctgctccgatgacccgctgttcctgttcgagaactacacccgcaccgcgcaggttatcgccgacacaatggccgctggtcacatgtgggcggtcgataagcccatcaccgccaccctgattcgggacatcgttgcgggtatcaatgcgaaattccgcgagatgaaaacggcgggctatatcgtcgatgcgacctgctggtttgatgaatcggccaacgacgcggcgaccctcaaagccgggaaactgtatatcgattatgactatacgccggttccccctctcgaaaacctgacgctacgccagcgcattaccgataaatacctggcgaatctggtgtcatcggttaacagcaattaa

SEQ ID NO: 451092 - DNA, 516 bp, Serratia marcescens
atggcaatgccgcgcaagctcaaatacctgaacacgtttctggatggcgtcagctatctcggcgttatcgagtccgtcaccctgccaaagctgacccgtaagctggaaaactaccggggcggagggatgtcaggctcggcacctgtcgatttcggcctcgacgatgacgcgctggcgatggagatttccctcggcggcttccctgatgatgcgatctggtcactttacggtgccgtcggtaccgggacgctactgcgctatgcaggctcttaccagcgggacgataccggcgaaaccgtggcggtggaagttgagacccgtttcaaggtgaaggaagtcgataacggcgagagcaaacagggagaggataccagcagcaagttatcgctggtctgcacgtactacaagctgaccatgaacggtaaagagctggtcgaaatcgacgtcctcaacatgattgagaaggtgaacggcgtcgaccgactcgaccagcaccgccgcaatatcggcctgtaa

SEQ ID NO: 451093 - DNA, 276 bp, Serratia marcescens
atgagcaaagaaaacatcgtcaccctggaaaaccccatcaaacgcggcgagcaggtcatcgaaaaaatcaccctgatgaagcccaacgccggaaccctgcgcggtgtcagcctggccgacgttgcgcgctctgaagtggatgccctgattaaagtgttgccgcgtatgaccagcccatcactcaccgagtcggatgtcgtcatgatggatttacccgatttgatggcgctggcaacaaaggtgatcggttttttgtcgccgaatttggcggattaa

SEQ ID NO: 451094 - DNA, 2442 bp, Serratia marcescens
atgagtaacgacgttaaattgcaagtattactcaaggctgttgaccaggcgacccgtccgtttaaatccatccagacagcgagcaaaacgctgtctggtgatatccgggacactcaaaaatcgctgcgtgaactgaatggccaggcatcccgaattgacgggtttcgcaaggccagcgcgcaacttgccgttaccggtcaggagctgaagaaagctaaacaggaagccgccgcactggcgatccagtttagaaatactgaacagccgacgcgcgcgcaggcgcaggcaatggatgccgcacgtaaaagcgccgcagcgctccagctcaaacacaacagcttgcggcaggctgtacaacgccagaggcaggaactcagccaggcgggaatcaatacccgcagcctggcggcagacgagcgccggttaaaaaccagcatcagcgaaacgacggcgcagctcaatcgtcagcgtgaagcgctggcgcgggtcagcgcgcaacaggcaaagctcaacgcggttaagcagcgatatcaggccggtaaggagctggccggaaatgcggctgcaatgggggccgccggtgtcggtatggcgacgaccggctcgctggccggtgttgcgctgatgaaaccgggttatgattttgcgcagaaaaattccgagttacaggctgtactcggcgtggcgaaagactccgcagaaatgacggctttgcgaaagcaggcccgactgctgggtgacaatacagccgcctctgccgatgatgcggccggtgctcagattatcattgcaaaagcaggcggagacgcggcggcgattcaggcggcgacgcccgtcacacttaatatggcgcttgctaaccgtcgaacaatggaagagaacgccggtttgctgatggggatgaaatcagctttccagctcactaacgatcaggtctctcacatcggtgatgtcctgtcgatgacaatgaataaaaccgccgcagattttgacgggcttagtgatgcgctgacatatgctgcgccggtggcgaaaaatgccggtgtcagtattgaggaagccgctgcaatggttggcgccctacatgatgcgaaaattacggggtcaatggctggtacgggtagccgcgctattttaagtcgattacaggcaccgaccgggcaagcctacgcggcgattaaagagcttggggttaaaacggcagacagtaaagggaatacccgcccgatatttaccatcctgaaggaaatgcaggccagttttgaaaaaaataagctgggtaccggtcagcgcgctgaatacatgaaaacgatcttcggtgaagaggccagctctgccgccgctgttttgatgaacgcggctcaatcaggaaagctggacaagctcactgctgcatttaaagcctctgacggtaagacggaggaactagttaaggttatgcaggacaacctcggcggcgactttaaagagtttcagtcggcatatgaggctgtaggtaccgacctttttgaccagcaggagtcctccttacgtaaactggtgcaaacagctaccggctacgtgctcaaacttgataaatggatccagcaaaataaagagctcgcgcagacgctgggggtgattaccgctgtggcgatcggggtcgtggggatgattggggctattgggctgattgcctggccggtgataaccggtgtaaatgccatcatcgccgctgcgacggcgctcggtaccgtatttactacggtggccggtggcgtcgttactgcaattggcgcgatctcctggccggttgttgctgtcgtggccgcaatagtggccggggcattgctcatccgtaaatattgggaacccatcagcgcgttttttggcggcgtgatggaaggattgcgcacggtctttgcgccagtagcagaactatttgcaccgcttaaaccgatgtttgactggctgggcggaaaacttaaagccgcatgggactggtttaacaacctgatcgcgccggtcaaatcatcgcaggaaaccttaaacagttttcgtgatgccggtgtgttgtttggtcagcgcctggctgacgctcttacgttaccgcttacagcattcaataagctgcgcagcggtatcgattgggtgcttgaaaagctcggcataatcaacaaagagtccagcacgtttgaccagactgccgaaaaagcaaatgcagccacgcagggtaactcttatatcccggctactagtacttatagcggctatcaggcatatcaacccgtcactgcacccgccggacgttcttacatcgaccagagtaaaagcgagtatcacatttccgttgatggtggcggtaacggcactcagctcgatcgccagctacaagatgcgctcgaaaaatttgagcgtgaaaaacgcgcccgccagcgtgccagcatgaaccacgatggatag

SEQ ID NO: 451095 - DNA, 480 bp, Serratia marcescens
atgatgctcgcactcggtatgtttgtttttatgcgccagacgttgccacaccagacgatgcaacgcgatgccgaatatcggtggccgtcaaactcccgcgtaggtaagcgggattctttccagtatctggggccgggtgaggaaaaaattaccttggccgggacgctttaccctgagttgaccggcggaaagctgacgatgacggctattcgtctgatggctgaccaggggcgagcctggccgttactggatggaactggcacgatttacggtatgtacgtcatcaataatatcagcgagacaggaagcctgttttttgctgacggcacggcgcgtaaaattgattttacgctgacgctcacccgcgtggatgaatcccttgcggcgctgtatggcgatatcggcgaacaggcaaaatcactgattggcaaggcgggaaatatggcctcgtcagtggctggcatggtggggattagctga

SEQ ID NO: 451096 - DNA, 1167 bp, Serratia marcescens
atgctggatatgctgaatcttaatgcgggtggcgtactgacgcccgattttatgctgatgctcgacagaaaagatattaccggcaacatcagtaaccggttgatgagcctgaccatgacagacaatcgcggcttcgaagccgaccagctcgacatcgagcttgatgatgctgacgggctggtcgagctaccgttacgcggtgctgtactgacgctttacctcgggtggaaaggctttgcgttgtttggtaagggaagttttaccgtcgatgaggttgagcatcatggcgcgccggacacggtgacaatccgcgcccgtagcgccgattttcggggaacgcttaactcacgtcgggaagagtcctggcacgataagacgctcggcgaaatcgtggcagcgatagcgacacgtaacaaactgacgtcgagcgttatacccgagctggccggaataaaaattcctcatatcgaccagtcacaggaatcggatgccaaatttttgacacggctcgccgagcgaaacggcggtgaggtttcggtaaaagcgggaaagttgctgttcctcaaagccggtcgtggggttatagccagcggaaaagccattccgcaggtcacgatcacccgcagcgatggcgaccgccatcagttttccattgctgaccgtggggcatataccggcgttacggcaaagtggttgcacaccaaagacccgaagacacaaaaacaaaaggttacgttaaaacgcaaacccaaagagcagcatttacgcgcgctacagcaccccaaagccaaaccggtaacgaagaaaaaaacggtgaagacgccggaagccagggagggtgaatacatggtcggcgaggatgacaacgtgtttgccctaacgacaattttttcaaccaaagcgcaggccatgcgagccgcccaggccaaatgggacaaactgcaacgtggtgttgctgagttttctatcaggcttgcgacaggacgagccgacctctacccggagacaccagtgcaggtttcaggctttaagcgcgtcatagacgagcagtcatggacaatcacgaaggttatgcactctctgagtaatggtggctttacgacgagcttagagcttgaggttagattgttggatgtagagtacgggaatgaaggggaggaagaataa

SEQ ID NO: 451097 - DNA, 834 bp, Serratia marcescens
atgaataacaacaagcgcggctggtggtgcgcattgcctttggcggcctgcgcaacattgccgacgtgggcggcggaaaaagtcgcgtcgaaagaagaaagcctgacggtgattggccgcaaagacgccgacggtgtgcagagctatcagccgttgaccagcgtcaccggcacccgcagcgaaaccaacctgctgaatgtgccgcaggcgatcgacgtggtgccgcagcaggtgattaccgatcaggcggtcagcagcctggacgaagcgctgtacaacgtcagcggcattacccaggccaacacgctgggcggcactcaggacgcggtcatgaaacgcggctttggcgacaaccgcgacggctctattctgcgcgatggcgtgcgctcggtgcaggctcgcaactttacgccaaccaccgagcgggtggaggtgctcaaggggccggcctcgatgctgtatggcatgggcgagccgggcgggatgatcaatatgatcaccaaaaagccccagctgcagcaacatacccacgtggaaggctggggcagcagcttcaacggcggcggcggccagctcgacgttaccgggccgctcggcacgtcgggattcgcctatcgcatgatcgtcgatcacgatgaaaccgactactggcgcaacttcggccgcaaccgccagacggtgatcgcgccctcgctgatgtggtatggcgagaacaccaccgtgcgcttggcctacgagcatatggaatatctggtgccgttcgatcgcggcaccattatcgattcgcgcaccggcaaatacgccgcgcgatcgccgtttcgacgaagcttataa

SEQ ID NO: 451098 - DNA, 516 bp, Serratia marcescens
atgaaacaggttaccttaattggcctttattcagggatgagattgaatgaaatttgtagccttaccactgatgatattgttaccgaggaaaacgtaaggtgtttacgcatctcaaaaggcaaaacaaagaatgctgcccgattagttcccgttcatccttcaattaacggacttattgacacgctgattcaaaaccatacggataagtttcttttcagacacgcagcgttaacagacagggctgatggtaagcgctctacatggcatacacagcaattcaccagagcaaagagaaaggctttaggcgagaaggaaacggagaggaaggtctttcactcattgcgtggtatgttcatcactgaacttgaccgccttaaagtgcctgaagacaggatagcgcttcttgtaggtcatgagagggggagcacagagtctttcaagacttacagtcaaggggcttcactcaaagaacttgttcagtacgtggaacaggtcaattttgacggtatagcttga

SEQ ID NO: 451099 - DNA, 930 bp, Serratia marcescens
ttggctatttttgatttgttttcgaaaagacaaaaaagattgagaggagaggttcctgatgtgtatcagtacacgaacctacctaacaattttcgtgtgcaggttattcatatcgtcaaggagacaattggtgaggactacggaagggggagtgagccgggtggcatttacaaagcgataaatgacacgctatgccgcgaatatggtgtttttaaattaagggaatacccaaacagtaacttcgaagctgtatatgatttctttctgaatgaaaaagatattgaaaaatgccttgatgtgattgaattaagtttcaaagcaattgatggatatgtcagagagaatcactggcgttttcacggacatgaacaaaaatccgactctgcgatagaagagctaaatatcagatttaaagaatcaggcattgggtttcagttcgaatcaggagaattggtgagagttgactctcaattcattcactccgatgcggttaaacctacccttcagattttagggcgttctaaagcattcgaaggagctaatgacgagttcctctctgcacacgagcactacaggcatcaaagattcaaagaatgtcttaatgattgcctgaagtcgtttgaaagccttatgaaggccatccataaaaaacgctcatgggaatatggaagtactgatacagcaaagaaactaatttccagttgcctttcaaatgggcttgttcctgactacatgcaaaatcagttttcatcactgaggattttactcgaaagtggtgtgccaactatcagaaataaagagggtggtcacggccagggggatgaggtgacgaatgtaccagagcatctggctagctatacattacacctgacagcatctaatctactatttttagcaaaatgtgatgagaatttcacaaagaaaaaataa

SEQ ID NO: 451100 - DNA, 564 bp, Serratia marcescens; identical to SEQ ID NO: 207946

SEQ ID NO: 451101 - DNA, 177 bp, Serratia marcescens
atgaatcaactcttcaatgcttatggtcagaaagtaagttgtaatcttctgatgacgctgcatccatcgcttatcacaaagctggaaaagctttctgaacagattggtcaaggtgtggtatcagaagaccagcgtttaacactggcaatcggtgagatgctcaggaggtttgaatga

SEQ ID NO: 451102 - DNA, 1629 bp, Serratia marcescens
atgcgctatgacgccgccgggcggctgcttggcgagcagggcgtgaacggcgagctgcaataccaatgggatgcgctggccaacctgcaggcgctgacgctgccgcagggcgatcgcctgcagtggctgtattacggctccggccacgccagcgccatcaaattcaaccagcaggtggtgagcgaattcactcgcgatcgcctgcaccgggaaaccggccgcagccagggcgcgctgcagcagcagcggcgttacgacgccctgggccgccgcagctggcagagcagcgccttcggccacgacaaactgacccggccggaagacggcgtgctgtggcgcgcttatcgctacaccggccgcggcgagctggccggggtgagcgacgcgctgcgcggcgaagtgcactacggttacgacgccgaaggccgcctgctgcaacaccgcgaacccaatcagggcaaaccgggcgcgcggctggtgtacgatctggcggataacctgctgggcgagcgcagcccgcagaacgacatcgacgcgcacctgccgctggcgccgatcgccgacaaccggctgacgcactggcaaaaactgttttaccgttacgacgcctggggcaacctgatcagccggcgcaacggcctgtatgaacagcactaccgctacgacgccgacaatcggctggtgcaggcgcacggccgcggcccgcagggcgagttcgaggcgcagtaccattacgacgcgctgggccgccgcagccgcaaggcggtgcgctacaagggcaaaaccgaacagacgacccgtttcctgtggcagggctaccggttgctgcaggagcagcgcgacgacggcagccgccgcagctggagctacgatccggccagcccgtggagcccactggcggcgctggagcaggcgggcgacagccgctcggcggatatttactggtatcacaccgatctgaacagcgcgccgctggaagtgaccgacgcggcgggcaacctgtgctggtccgggcaatacgacacctttggcaagttgcagggccagacggtggccggcgcggcgaagcggcagggcgcgcaatatcagcagccgctgcgctacgccgggcaatatcaggacgacgaaagcggcctgcactacaacctgttccgctactacgaacccgaggtggggcgttttaccacgcaggatccgatagggctggaaggcgggttgaacctttatcagtatgcgccgaacccgctgatgtgggtggatccgtatgggctaagttgctcgccatcaacgaagttgaaccgaaagtttagggctttagaaaaagctcaaaaaacggcagtaaatactcgacatctacctgatggccgcattcgctattatgacaaagaggcattagctagaactcaggggccaacaagaggacgctcccatgttacagaatgggatcctaaaacagggaatgtaagatcttgggaagagacttataatcatgcaggagaggtcaatcgagttcatccaaaaatgaaagatggtgaagtgttaaacctgccccattatccaccaactaaagctgatatcgatgcaggaatcgcaactccttcaggtaaggcaacaggaataggatggtga

SEQ ID NO: 451103 - DNA, 1392 bp, Serratia marcescens
atgagtggggggaaattgccggaggggtgggtaacagaaaaactcaatgagttggcaaaggttattacaaagggaacaacaccaactacccttgggtttgaatatttaagccaaggaatcccctttattaaagttgagaacattgatgattttggcctaaatttcagctcagtgtatcaatatattagcgaagaggggcatcttgcgctaaaaaggtctcagtttgaagaaaatgatgttttgtttagcattgctggtacgataggtaaaaccgcgatcgtcaaaaaccaacatattcctgcaaacactaaccaggctgtagcaattataaggggggcggatgatataatcgcccctgcatacttgtgtcaacaattaaaattaaacgcttataaaattttcaaagaaaatgctcgtggcggagcgatgaataatgtttcacttggagatttaaaatcggtagaaattaaattcccaaacttactcgaacaatccattattatcaaaaaactcgatacgctgctggcgcaggtagacagcaccaaagcacgtcttgagcaaatcccacaaatcctgaaacgttttcgtcaggctgtattaacagcagctgtaaacgggctactaacagaagagtggcggaataatattcaggagccccagaattttaaaaaaattaattttgagttaatattgactgaacttcgtaacggattatcatcgaaaccgaatgaaaaaggtttggggcacccaatcttacgtattagttcagttcgctcaggtcacgtagatcaaagcgatattagatatcttgaatgttctgaaactgaattagaacgccatagattagaagaaggtgaccttctttttactcgctataatggaagcttagagtttgtaggcgtttgtggtcttttaaaaaaaacacaatacaaagatttactttatcctgacaagcttattagagcccgtttaaaaaaagatgcattaccagaatatattgaaatatttttttcatcaccaagtgcaagaaacgcaatgatggaatgtgttaaaacgacatcaggtcaaaaaggtatttctggtaaagatataaaatctcagcttgtatacttaccatcattaaaagaacaagccgaaatcgtccgcagagttgaacaactcttcgcctacgccgacaccattgaaaagcaggtcaacagcgccctaacccgcgtcaacagcctcacccaatcgatcttggcgaaggccttccgcggcgagcttaccgcccagtggcgagctgaaaacccggatcttatcagcggtgaaaacagcgctgccgccctgctggaaaaaattaaagctgaacgcgccgccagcggcggtaaaaaaaccgcacgtaaaaaaacgtga

SEQ ID NO: 451104 - DNA, 468 bp, Serratia marcescens
atgcaacctgctaaaaagtggtcacaggaacttgaggggttacgcggcctggcatcactttgggttgttttgggccatatctgcattttaacccgcttccgtccccccattctttctgatcctgcaatcggtgtagatcttttcattttgctttcgggttatctgatggccaaaaattatgttgagcgtaaggaacgggaaccttggaccgacgcgtcgactttcaaaaaattttggactcggcggttctttcgcatcgcaccgctttactacgtcttattggctgtggcaattgtatttggtagctacttcggtgaggccagagacatcattggccacttctacagcgaaactcaaaccaacagctcacgctatagcgatcattcattcttgaatgtatttacacatgccacctttatgtttggctttctgcctgattattcctttaatacggtgctccccgactag

SEQ ID NO: 451105 - DNA, 1110 bp, Serratia marcescens
atgaacagtgaaattaattcattaggctatgaaaataacattcaaactattccggaattgcatttatttcccgaaaaaaaatacaagcaagggatctcattcatttaccacagcgagagtgataaaattatcgaccaaagctgcgaagcaaggttatcagatgaaacgcccaataaaaaatcattcacacataaaatatttgttatacgaaaatgcaagccggagcatataggagacattttcctgcggccatcagaaaatgatgatagcagcataattctagatattaacattcatacgccattaggagaaaaaataaaaaccgggctattccgtaaactttcaattcttttatttgaaaaatataagacactgagagttgagactcgcattttaattgatcatcataaaatcattaatagccttatattgagcgggtacacttttgcaggtatttcacaaaaatttaattcaaattcagagctagaggaatttgcagtattttcattattgaaggatcaaactaatacgggaaaaagcctattattccctgcagtggatagtaatatttatcgcgatgaaaaaattgcactacgtttagctgaaccaaaagacgcattatgtatatggttagagcaatcaaatcctgaatcatcgaagtggggtttattcgaaacagcatcacttgatgaaataaaacaaaaaattaggcgttgcgggcttaattcagccgtaggccctaatatattactaactattatagaatgctcaactggtaatgctgtaggaaaaattgttatccgcaatgttgtaccacctcatgtaggtgatgttggttacgggatattgccggaatatcgtggtttgggctatgccgtaagggcactgaatcttctgaaaaaatgggcctttaacgaagctggctatgtccgtttagaacttggtgtcaaagaaggcaatatcgcgtcagaaagagtcgcgcaaaagggagggtttgaatttgagggtgtgcgtccggggagattaaaaaaccacgatggttcatacagtaatgaaatgcactatttctttcttaacccgaacgttagctatcgcaaaataggggattga

SEQ ID NO: 451106 - DNA, 858 bp, Serratia marcescens
atgaaaaaatacaaaagcaccggagtaacaggaagagcaggtgagctatattttgcttattggatagttcgctattttaattggccttgccgattgcttgatattgatgttggcatagatgctcaagttgaaatttttgaagatgaaatatcaactggggacttttttgcggttcaaattaaatcaacggttggaaacacccctgatatacagatcgatctatctgactttatgtactggcaacagttggaaactcaagttgttttggtctccatcgtaatggcggatagccataatgatcctgagatgttctggaggccattttcaaaacaatgtctggatgaaatagttcaagagataacctcaaaaggacaccagtccaaaaaagtcaccttcacagattcagataaattatgtgttgaatccaaaaattcctggaggatggcaatgctttcagaatccgacaaagatctgataaggctcgccaaatcattattagatgatttagaaaaacatgacttagataattttgtagaggaagactattacctccaagatgaacacaaggactatataacttttaatagcgaaattgacatattcaaccatcatttcatcgattatgaaaagctgaaagatgctgtatctcatgatagaaggctggtgctaagagctccccttatagaagaagctatcgattactttgagaataacgaggcgatattgctttatatgttcaatcatgcttttaattggattaagggcgaccgaactccaaatgaaatactgccccaaacattgagtcgtgaaattagacggcagacaaaagattgggtttatcacatgacgggttattaa

SEQ ID NO: 451107 - DNA, 678 bp, Serratia marcescens
atggaaaacaataataatgcgaaggataagactttacggcaccatattaacggagccgaaataaccaaagagaagaacctttggcaagttttcaagctggctaagaaaataacaaccagctttcttcatagggttatatgtagcctatctgccgcattattatttattaatattttttttgtcgataaaaatatcaaccatgcaatttcagacataagaacctggtcaagtttcggatttaatttcactataacaaccttaggctttcttattgcaggcttcaccatttttgcaacattatccaagccagaaatgatgatcgctatgatgctgcataaaaacaaggaagcccaaatccccacccttaaatataacttcatggcatttatgaaagtgtttataattttcatatcatgttccttcatatatttatttgttatgctatttgggcaaactaatggaatggcaggaaatataacgagattgttaccacatagtgatttaatcaagaaatatggcgtaatggcgatatatgtattagtgggcacgagtttagttcaccttcttcttacaattaaaacatttatttataatatatatgcaatagtcatgacttcaatccgatgggaatatgagaaatcggcacagtctgagattaatgaacaggaaaataaatag

SEQ ID NO: 451108 - DNA, 198 bp, Serratia marcescens
atgaaggcccagaataagcagcacagcaaggtggtgccggtgcctgactatacgggacaaaagacctgcgggatcacggtgcattttatgccgtgcgatgaggtgaaggtgacgaccagctgtgtgagccccggccgaccgggctatccgatcaacgagccgctgcagatgccggagccaaaagtctgtccaaaataa

SEQ ID NO: 451109 - DNA, 513 bp, Serratia marcescens
atgaaaacacgacactacctcgtggcactgggtgcgctgttgctggcgggttgcagcctgccgacggcgaaggcgggaaccatagaggcagtcaaccacaccaaatgggcgatcaaccatttcagcgtcgacggtcagtcggggatagacattattgggccctatcagggcggcggtggcggctgctgctatggtgtgccggcgaaatggcggccgggtatgacggtaaaaatcgactgggaaacgggagtgggtgatacggatggatttccggggtttgcggatagggagaaataccgtgcttggcgaaataaaatgaaggcccagaataagcagcacagcacggtggtgccggtgccggactatacggggcagaaaacctgcgggatcacggtgcattttatgccgtgcgatgaggtgaaggtgacgaccagctgtgtgagccccggccgaccgggctatccgatcaacgagccgctgcagatgccggagccaaaagtctgtccaaaataa

SEQ ID NO: 451110 - DNA, 198 bp, Serratia marcescens
atgaaggcccagaataagcagcacagcacggtggtgccggtgccggactatacgggccaggaaacctgcgggatcacggtgcatttcatgccgtgcgatgaggtgaaggtgacgaccagctgtgtgagccccggccgaccgggctatccgatcaacgagccgctgcagatgccggagccaaaagtctgtccgaaataa

SEQ ID NO: 451111 - DNA, 4974 bp, Serratia marcescens
atggacataaaaaaagtgggtggagctggacttcacgcaagtgagctcagagcaattagtaaaatggagcagcacttccagagcagctggcacggatttgcggggctggttgcttcggatgcgcaaggaccaatggagattgactgtcttattattacccatgaccgcctgcttttagttgagctcaaagagtggaatggagtaattgaatatgacaacgggatgtggatccaaaatggtcaaaaccgtggaaaaagtccttttatcataaaacgagaacatgccctgcgactacaaaaattacttgacagagagttgtcacacaaccttggttactggctcactgttgaagctcatgtagttctctgtggaagcgctactccagaaaatctccctcagatagaaaggccttttgtacactcacttgatgaatttttagctattcgagctccagaaaagtatgacgatcttgtcgcaaataaaagactggccggattctttaactcgacgggaaaagcgagaccaaactctgaaaagtctctacagattatctacagatttatcgagggaccaaaaattcagaaaaaagagctcgttgttggcaactttcaggctcacacaaacaaatcttggttttctcacagaaactcaatctacaaagaatatttggctaaagataagacaatgccatcagcgaaaggattgattcgccgctgggattttaatcaattggggaccttgcatgccttgcaatctacttggtccgatattgcactacgtgagaaccggatagggaaatttgttcgcgataacagcaatatgcgtgattacctgcttaggtatgtcaaagatgtttctgcagatgacatcacagaggatttctgtgaactgtatgagttaccccgaaatgctgagcgtttagatgaggttatagccagtggctctgcatcatggtcaagagagcaacggattgataagattcgagctcttttagcaccttttggtgacttacatgcattgaatattgctcaccgtgatgtggacccgcacaatctttggtatgccaataaccacgacagtattctagcatcaggttttggagctgcgtttttcccggaaacaggaactgtggctgaacatcgaaagttgctgcaaagttcaccagtcgcactgcctgaagatgctatgtgtgaaggtgaaatcattgacgctttccgtatagatgttttcctactggcttccgtcgcttatcagatctgttttaatcagaagctggaacaagtggatggtgtccccgaatggagtcctcctgtaaacgatcctttcgatggactcttgaacgcttggtttgaaaaagcgctctcttgggacgctgctgagcgctttgaaggtgccaacagcatgctagctgaattcaacgtccttaccggaacatgccctgaagaagataaggaatcgcaacagatctttgagcagttgctgcatagtccgcaccgacggcaagaactgacaccatacttaattcttcagacatttccgccatcagcggatcagctacaacatgccatcgaagctctagccagtggaagcagtaagaagtctttctttgctcataaagataatagagaaattcttgtaaagttgtgggataacgttcaggtatcacaaaatcagccgggctccaatcgtcgagtattgcagtttttaaaacgattggaaaagttccaagaaacaaccctggctactccaagggtcatagattttggcttaatgaatccccatggattatttgtagtcaccgaatatgtagtgggggaaacttggtcaaattacttgcatgatttaacattgtctcaaggagataagagagatcttgcaattaacctaataagtactgtaatggatttccacgaaaaacgagttgctcatggagatttacatccagataatattcttgtaaaagactgcaatgcagaacaaatcatgcttttagatgtacttgattacggtagcgaaactgaggtgtttaatactgattatgggccagcaaatccagctatcacagatgcatatgggagagaccgatatgcagtctttaagattgttgaagaacttttcgcgagagattttccaccacaggttcaagaagaactcattagagctcgggacaatcaaacacaaattccagttgctcttgctcccctgctcaatgcgctgcatgtcgccctagagctagaacagccaaaaaaaccagagcagctagaggttgaagaaaaagaaccgattttgttgatctggagaggtaatctcccgtctgttcccacacttttggagcccgttgacggtggctactatttcaactgcaaatggattgatagccgagttagtggttccaataaagaactcgcttgttttattacaggtaatactgcctatctacaagttaacgtggatgttgaagctcgtataattactaaagttcgatatacagcctccattccattaagtgatgttgtcagcgctcagcgacgttctgttggacgattatcacaacctattgctctgaaaaatggccctgcggatgaaaaatgctctttggttgatacaattctaagcatggaagttgttatcgatgccattattgagcaattgaatctttccatagaggtttctgatgagcctttaacggacgaagagcgtcgagaattatctccagaaaaattatggaatgctttggctgagtctgaagggcagcttcgtcaaaccttccagattgaaactagtgtcgaggaaaaattaagtgatagtggatatccaatgtacccctattcatgccttgatggacaagatctgcagatcgatgcggatgagacctactacatctatcaacctaagtccgatgaaaagcttggtgagcttgttatccatgagactaacagcagctttgtggctatacagcctgttaaccattgggctattaaacagtttacgcctggaaagtcgcttcaacttgaatcaattcgcagtaaatcgtcaagggatcttagactcaaggctctgaatcgagtgatggctaaaaaatcggtcatccccaacttggtggattactttgatatcagacaaaaacccgtactcagagaaatgaccgaacgtccgacaatccagaaattgcgtgagttgtacgatatgccaggacaggaaacaaataatagacaacttgaggcattccaaattttggttggacaaggtcctgttggagtgctccaagggcctccaggtaccggaaaaacgacttttgtcagtaaattcatccattatctatttgaacatacaggtgcgaacaacatcctactggtagggcagcagcattctgcggtagataatgtcgcaataaaagctcgtgaactttgcgctgacaaaggactagaactagatactattcggattggcagtgaatcactaatcgatgatcgtatgcttccaacacatagccgagctttacaacagaagatccgtcacaaatttcaccgggaatatgacatacgagttagcgccctctccacgagactacagctaccacatgaacttatccaggatgcaacgcgattgcaccgtagcttagctcctttgttagtgcaattaggacagttcgagcgtctgcgtgaaaagcttgtacgcactggtggtgatgcaaatgagagccatgcaaataagctagcggaattgatgcatcagcgaaatctgactttagaaacaattgaaactatcgtccgacaacagttcaacaactcgtttggcgagttgccaacaaatagtgagcttttattggacaagttacttcatgccttggctctgacgcatggagtgaacaatcccgttaaggtagaccgtctgcatcgattgttatccctaagccaagaatggcttgatgttctgcgttccggagaagctggctatgaacgttttatgctcaaaacaaaacaattagcttgcggcactctagtaggagttgggcgtcgcagtttagaactagatcaaactcaatttgattgggttattgtggatgaagctggccgtgctcaagctagtgagctgatggtcgcattgcaaagtgcgaaacgcgtcttgttagtaggcgatcataagcagctaccgccattctaccagaatgggcatataaagcatgccagcaaactacttgatataagcaaagaagcctttcaagagtctgattttgagagagcttttaaggcatgtggtggagtaactctggatacacaatatcggatgattgaacccattggtgatctggtttcaacatgtttttatgccgatgatataggcaagctgtacacagggagaggcccagcaaaatcttggtacgatgaattgccttctccatggaataaaggagttagctggatcgatacctcctctgagcagggtgaaaaagaggccacacccggctacaccaaccaatatgaaatagatttgctcttacaatcattacgcgttctcgttgaagctgatgccattgaacatctacagcgaactgtaactaatgaacagccttaccctatcggaattattaccatgtatagggcgcagaagaatgagattgagactcagcttaatcaagctgagtggatggggccgctgcgtcatttgctccgaatagataccgtcgactcttatcaaggtcaggaaaacaagatcatcatccttagtttagtaagagacaattcctacgcgttacagggtttcttacgggacacgcctcgaatcaacgtagctatttctcgagctcaggatcgcttaattatccttggagctagcaacatgtggcgtaaagataaaaatgactcggcattgggttctgtgtatgaatacatcgccgagcaagcaatgagagacaatagccattatcagatgattacgactctggaattaaataaggaagctgcaccaatatga

SEQ ID NO: 451112 - DNA, 1503 bp, Serratia marcescens
atgactccactttctaacgaaactaaagcacgcatagggaaccgcatcaccatccttatccctgctaaaaagtacataatgaacgtagcttggaccgaagagaaacctatgcctgctattgagttatttgcttgccgattactcatactctttgagagaatattgcctctcgagttacgtgattttttcgggctctctgagcgggaggaggaagaactactcaattcattagaagacaaacgcctagctgcgttggatcaccaaggttatttggtcccaagcccactattaaagagccaagttggtgatggggatggtgtgccgatgttggttaaatataatgagcagaccgagcatgtggtacttgacgcttttgcattaactgttcgtaaagaacagaggttggggcgattgatgttcggcttgccagaaatccccatgccagaatccgtaaaaggattaagtatggatagaatcattgaagagtttggtcgacaatttcgtagttatttagaaattacccgaaataatgatcatgagcgtcaacgtacacaactttataaggtgatgggctgcagcgccaatgaagtgcttcagttagcagttgatattgagtttacctatcagcaagctaagggggagccaaagcagtttatccgctctgttgaacggttaggacctaatcagactcgtcctcttagtaataagttagaagctcatatcgcagacttccttggttcaaattacattgaagaaataggtactgatgcggaaacctactgtcagctagctgacgaccatatacttaagcctttcgccaacggctaccgggtagattattcacgatggatgcttgctagagatgaaagtaagactggttatggttcgccagatactcgtggtgtttttggacctttgtatttaattgagaatcgaagtgatatcctgcaatggattcgtaaaatactacacgaacatgatgacgttacggagctgaaagcactatggatgccgagtaacgttccattttggggagccaattctgaggacatagaccgttttgttcaagggctaaaaaaaattcttgagcaaaaggacaatgacgcaaaagtgtctctaatccatcaaggtacaaaatgggatgttaaacagtatttgaaaaatatatttccatatgggttgtctactcccttagaactggaccgacttgagttgtttttagttcctggtattttcggtgttattcaatatcatggtcagcctaatactgatagtggggttagtttgcctattggctatatgaccaaagatccgaaaagaattaaatctctggaattattattccaatccaggatcggtgatctcagtaatttgaatagttcgtggggctatttcggagaatcaaaaccctcactaaaagaacaaaatcttctaccacaaaactggctaactaatcctgtcatacgatgtgtaactaggcctattctcagtttgaatcgatga

SEQ ID NO: 451113 - DNA, 828 bp, Serratia marcescens
atgaaaaccgcagtaaatacttcagataacaccaacagcaccaaaaacaccaaaaacaccaaaaacaccaaaaacaccaacagtcctaatactcagcaattcctcatgatgccttatgaactcctcagcgttcacgaggtaaacggccagccattcgcgctaaacatgaaagtggcttatcagtacattaaaggctttcaagataacggacagcaagcctatttctctcgcgccaagcttggcgaaatgttggggatcaagcttagagcaacgtccggccttctggaaaaaatggagaagatgggcctcgttaatagaatagagcgttctggatacaccaacctctacactgttaacccaatcgaacagaatgataccgctgctaaatccgttgctgaggaagtaaaaaatgaatcaggtcctgctgttggaaataaagcacaaagcgttaagccttcaaatagcccaacagagagcacgcctgagaatacacacgacgctcgccctgttgggattgacgatagtcacagcgccgagcctgtcaatgctgaccacatcgaacaacctgcacagccttcacagctccctcctgtaatcgttgaggaacagccagttgaggaagaggagccagacttcaacgcatacgccgctatggcggcccctgtggctctctctggatgggtgacaacccacaacgccaccgtagaactgaaagccgcctacgaggcgcacaggaacacctgcggcgaatcccacagcatcccgagcaatgcacatcacaccccgagttactcaacggctgaatatgacgccggggaagcattttaa

SEQ ID NO: 451114 - DNA, 666 bp, Serratia marcescens
atgttaactttaaaagaaatccatgctgatatacttgacgtaacagaaaaagttatttcagtggggcttagcaataaagaaaactatcctagcgttgaaaaattggggaatggtgtatcacagattggaatatctggggtatctgatttagctgtggcgttaaaaaaagttccttataaagatctttatgctgctcttgagcatgctaaattttataattttgttttagcggatggtggaatcatccaaatgatatacatatttaaggatgacattattctaaaacacaaactcgcttactttccttccccagactttgaatcattccaaagtgaaagcgatttgtatatggatgattgtgtttacgtcgaaatccttgataaaaggattattcctgtagcagttaggtttgattatgactgtactccagggacatttagagatttggtacatcccaaaagtcatttgactcttgggcaatacgaaaattgccgaataccggtatgttcgccaataacaccctctctttttatcgagtttattctacgtagtttttataatactgcgatgttaaatttttcggataaaataaacttaaaaataaaaagatttcaagaaacggccacgcctcttgaaaaagaccgcatccatattcgtgtaaagtaa

SEQ ID NO: 451115 - DNA, 2157 bp, Serratia marcescens
atgataaacgtcattaatggttcaacagaaaagcctataacatcgcaaacattgcgcgaatggcttacatctaaggatggattagatggcactttatacataggctatcctattattggtactgtagatggtgcctatgaaattgatgctcttttaatatcgcctcagctcggagtcctggctttcaaccttattgaagggaataaactcccagactctattgaagacatacaagatgaatgctttactttacttgagtcaaaattaaaacaatataaagaactcatggaaagacgtaggctattggttcctgtaaatgtgattacaattgggcccgtcttgaaagctgactttgatagaatcgatagtgattaccctatcactacaaatcaacattcattactacgctatattgacaatttagaatgggatgaagaacaacattaccctcatctcgtttctgttattcaagcggtgtcgagagttaaagtcgccaaaaagcgagaaaatgtaacaaaggatgattccaaaggtgcaatactaataaaattagaccagtcaataaccaatctcgatagccagcaaagcaaagctgttctcgaaactgtgaatggagtccaaagaattagaggccttgctggctcagggaaaacaattgttctcgcaagaaaaatagcatatctatatgccaaaaataaagaatggcgcatcgctgtaacttttaatacgcgttcattaaaaaatcaatttaaaaaactcattacaagttttgtatatgagcaaactaacgagcttcctgactgggataagatccatatcatccatgcttggggtagtcctaagattgagggtgtttactataatgcctgcctcgaacatggtgttacatatgaagatttcggcacagcagcatctcttgctggacgagacaaagcatttgcacatgcttgcggtgagtttttaaaaaaagtcagtaatcctcgtccaatgtatgacttgattttgattgacgaagctcaggatttttccgttgaattcctcaacctttgctataaccttttagataagaacaaaaggttagtgtatgcttatgatgagcttcaaaccttaactgaaagctcattgccgtctccagagaaaatctgggggacagatgataatgggaaaccatacgttacattgacaaacaatgctaatgagccagaaagggatattattttagacaaatgctacaggaaccccgcgcctatacttactagcgcgcatgcccttgggtttggagtttacagagaaattttatcagggcattcacctgaaatgaagccaaggtattctcgtcaacttgttcagatgtttgactatgcccctctgtggcaagaaattggttatgaaatacttgatggcgagctgacagaaggtaaaaacgtagttatccgcagacgtaaggaagctagtccagagctcttagagaagtattccccccatgaagaaatcattcaatttcaatgcttctctgaccctgaagaacagaatattgctcttgttaatgccatagagaaaaatattagagaagatgagcttaaacctgatgacataatggttattcactcaaatcctctcacaacccgcaccgctgttgccgaagcaaggaacatgctattcaaaagaggtatatcttcaactttagcaggagtcagtggctcccccgatgacttttttgaagaagactctgtaatgtttacttcaatttatcgtgccaaaggcaatgaagcagcaatggtatatgtaatcaatgctcagtattgtgctgagggtaccggcttaggtactaaaaggaacattttatttacagccatgacccgcactaaagcttggttaagagtatttggtgttggtgaaaacatgataacgatccaaaatgaattcgaacaggttcgtgacaatgggtatgtcttagagttcaaatatcctactgccgaagaaagaaagtatttaagaattgttaatagagacatgaccgaacaggaaaagaacaaacttcataaacgccagaaccaactggaagaggtcgttcaggaattattatctggtgagatacataaagaggacttaccgccggatgtcattgaaagcttgagaaaagcgttaggtttataa

SEQ ID NO: 451116 - DNA, 1473 bp, Serratia marcescens
atgaagtgtatatcattgccaccgtatgcaccgactttgatagagtcaactcgtgcaattggttatacattagaagcagcaatagccgatattattgataatagtatcacagctcaggcttcgtgcactgatattttcttcttccctaccgggaattcctatatagccatattggacgatggttatggaatgaatgcggaagaaattgacatcgcaatgcgttatggcagtcaaaatccaaattctaaacgaactgcaaatgatttaggccgctttggacttggtttaaaaacagcatcactttcgcagtgtcgaacactaactgtagtcagcaagcaaagaaagtgtattgaagcaaggcgttgggatattgatcatgtaatcaaaactcaagactggtcccttatcatccttgagtcggatgaagaaataaataaaatcccacgtattgagaagttgaaagaaaaagaatatggaactctcattgtatggcaaaatcttgaccgacttaaagttggagagcttgattttgaacgttctatgggaaaaaaaatggatgacatgcgcaaacatctatcattggtttttcaccgttatatcagtggggagccaaatctgaaaaaactacagataagaatgaacaacacgcctatcagtcctgcagatccatttctatcccaacgaaacacgcaagtcatgtctgatgagtccatactttgtgaaggctcaaaaattgttattcgtccatatatactaccacatatctctgatttaactaatcatgaagtagaattgcttgggggtaaagaaggtctcagaaaaagccaaggtttttatgtgtatagaaataaaagattgctgatttggggaacttggtttcgaatgatgcgtcagggagaatgctctaaactagctagagttcaaattgatattccgaatgagttagatactctttggacactagatataaagaaatcaacagcaattccgccagaaatagttcgtaacaatcttgctccaatcatacaaagtcttgcagagaaaagtaaaaggacctgggaatttcgtggcaaacgcgaaatggatgactcgattgaacatatttggcaacgatttatagggaaaagcggtggtttttattatcaaataaaccgcgatcacgttctgataaaagcgttgattaattcatcaccgaagttgaaaggaaatatggaaagtctactcaaattgattgaagcaggaatacccttcaatcaactatatctcgatttaacatctgaaaaacaaattaagaatgatatcgaaataactgatgtagaaattgattcgatattaagaggattacttgatcaattttctacaaaaagtgtgaaaaatgaaatgctagagcagttagcaattacagatccttttataaattacccacagataattgctcgctataaaggagagtacttaaatggttgcaactaa

SEQ ID NO: 451117 - DNA, 246 bp, Serratia marcescens
atgttacagatgttgacacttgaagaatgggctgcggagcgataccgcagcaaaccgccctctcttaataccttgcggcgttgcgctaaagagggccacttcgccccgcccgcacgtaaagaaggcaagttatggcgtgtgcgagaagatgctgagctagttggcccactcaccactccggtcattaagcacaacgacaatccgaagcttagaaggatattgaacgatggcagcccgaccgcgtaa

SEQ ID NO: 451118 - DNA, 201 bp, Serratia marcescens
atggcttatagtgaggctacctcggaaggcgctccagatgctgttaagcgctccgaagagctggttagaaaagatgggggcatgtatgcgcaatatgccacggatcttttgtccaaagactgcggacagggcgagccgggtcttcaagagttacaagaaaaggattgtgaatacttaagggcaaatatgccgaacaagtaa

SEQ ID NO: 451119 - DNA, 459 bp, Serratia marcescens
  misc_feature (407)..(416): n is a, c, g, or t
atgggggctgcggccttgtcggtaggggacattctcggcaaggtcatcggcttcatcatattgccttatttgacagcacacctaggcgcgtcggggtacggcgcgctgactctttatttgtccgttattcagatcttgatcattttcatttcgttcagtggtcaaggtctgttgccggtcaaatacatgcaggagggggaagggagctccctggtgttccgcagagataacatcgccttggctttcgcgtcgagcgcgctactggtggctatattctacattgtcacactggtcaccaagatctctgtttctttcagcgacggttttctggttgttttggcatctctggcgcaggcgctgaactttatcaatttatcgcatttgcgcattagtcagacctataaagnnnnnnnnnntgctttccgcattcaacgttttattcactatcgctctttttga

SEQ ID NO: 451120 - DNA, 726 bp, Serratia marcescens
ttgatagcgatcgcggcatcatttttcagcattcagctggcctacgagttctttgtttacagaaaaatagcggttgaacgcagcgtgctccaaccgttgcgtaagcgttataaggaaatcattagctacggggtatccctattgccacatcatggcagttattggattaaatcctcggtggatagattcttcatagcgcattacatgagtacggcggtagtcggggtttatggcttggcgtttcagctaacctctatcgttatgctctttttcggcgtaatcaaccaggcgttccaacctttcatttatcgcaagcttaaagcgaacgattttagaggggtcgagctcattcaatatggttacacagctctggttatcgtttcgtgcattatttacttctttattttgccatttgctttcccgtatctgtttaatgctgagttcaatcgcgccatttattacttcaacattcttttgcctggaactgcatttttatcgatttattatatttttacgcactcactgttttactatcgtaaaaataaattaatctcaattattaccatgggctcgatgataacgcatttgattggtatatttgtcatcaccatgacagaaatcaaagttgagtatttctgcctggtttatgcaatttctagtttttatgcgtgtgcagtgactttttattgtggcaagcgacagatcagtattgagaggaaaagatga

SEQ ID NO: 451121 - DNA, 609 bp, Serratia marcescens
atgaatagcctgttgccacctgcttcatcgccgcttgagcggcgcgcggcggaagcttgcgccggtatcagcgatctgaacgttccactgcgtgacctgtggaacccggcacgctgcccggtaaagtttttgccctatctggcctgggcgttttctgtagaccgctgggacgagaaatggacagcggcagagaaacgcaaggccgtgacggccgccttttacatacatcgccgcaagggaacggttgccgccatccggcgtgtcattgaggcaatgggctattcaatgtcgatcgccgagtggtgggaagtcgccgatccacgcggcacgttccgtctaaccatcgacgtgaacgacgtcgggatcactgacgaaatcgtaaaagagctggagcgcctgattggcgatgccaggcccgtcagccggcatatagcaggcatcaacattattgtcagtgcgagcgggattttgaatgtaggcgttgccagctatgaaggggatattatcgatgtataccccgctggctttataccagaaaacgcaatttattatgatgcatccattaattatgacggcaattatcattataccggggtagcaaatgagtaa

SEQ ID NO: 451122 - DNA, 234 bp, Serratia marcescens
atggcgcggcgtggcgacgaggcttgggcttttcaactggccagaaaaagaaaaccaaccggaagatggactgttacggttgtcgattttttgagggagctgcaaaaggtcggctttgactggtcaccgggtcaagctaacgaatatatccagtattacgagtacacatggcgcctcctggaagaaggcgattatgggcttaacacctactataaatacaacatgaatgagtga

SEQ ID NO: 451123 - DNA, 195 bp, Serratia marcescens
atggagatggaaaaggtactaattgcaactctgtgcgtagttgtaggtgttcccggggtgctcgctgtcatgtcatttgttgtctggcaaaacggcttcaaagtgttgggcgccggttatgtggcccgcttaaccgtagtgctggttgtttttctctggattttttgcgcgctaagcaaaatcaaggggtggtaa

SEQ ID NO: 451124 - DNA, 231 bp, Serratia marcescens
atgctgatcggttttctctgctggcttgttggcgcctgcgccgctttctgcctgctttgcttcggcattaaaagtgggcacatctactgcgtcactacggccgcaggcgccctaattctgtcagtcatttggccaatcaccgccgcgctggttctcggcggattcgtctacgggctggcaattctcgtatttagctatatcacccggagtaaagccaatgaaaggaattga

SEQ ID NO: 451125 - DNA, 858 bp, Serratia marcescens
atgtctgaaatgctatttgaaaatgctgttgcggctgatgtgcttgaaagaatcctttcttcttatggatttaccatgcagaaggagctgggcgaaaagctggggatttctgggagtaatgttggcagctggctacagcgtggccgtgttcctggtaacgtcattgttaaatgcgccctagaaaccggtgcagacgtgcattggttggttacaggtaaatttgcaaatgcaaattttgagattggaaaaacgcatctgcacggacgggcgctttatgagcaaatacagacgtctggcggaaagcccgtcttaagacgaatgctggatgcgtatgggtttcgaacacaaaaggaactcggagatttcctggatatttcaacggcaacgattagtacctgggtgaggcgtgaatactttcctggtgatgcggtggttgcttgcgctttagatactggagtgtcgttgctgtggctagccactggacagggtaatccaggcaatcctgatgctgtctcttaccagccttcttttaccaccctgaaacggtggtctgtaacatccggcgagctgattcgtgctggagaatggatctgtgatccatcatttattcctgagcccgccacagagcttgggtatgtccaaaaaggcaactattcttggcttgtcgattttggaaaaagaacacttggtaatggggcatggttactcgatattgatggaagctgcgatatatatacagttgcaatccttccaggcaaaagaattaatatcacaggaataactataagttttgagtgtgatattgataaagtgaaccctttgggtgctgtaataatggaaattaaaaaactgttttaa

SEQ ID NO: 451126 - DNA, 456 bp, Serratia marcescens
atgaaaaaattcttcaagtggatactttatatcatcgtggccttggttgttattggctactttgctgatgataaaaaaggcagcacagctagcacatcaacttcgtctgaaagcgcaccatcggtcgcggcaccagccaaggaagtgtacaaaaccacagcgaatgcattgttcaaagattacgatgacaatgaagttgctgcggatgaaaaaatgaaaggtaaaacaatagaggtctcagggacagtgcaatctattgataaagattttaccgattcaattattgtgcgcttaaaaacaagcaatgaattcctaccggcaatgatgggcattcaggattcagagaagtcgaccgctctagcacttaaaaaaggtcagaaggttgtgatcacctgtgaagggatgactcgtctgatgggcgcaccgtctggccgtgattgcgtttttgctaactaa

SEQ ID NO: 451127 - DNA, 1878 bp, Serratia marcescens
atggaaagtcaggttaaaggactaaaaattgaaattgcatcagggctagcaaaagttgatttatcaccattacaggactctcttgacaaggttagatctgttctaacagatccagcaattcagcaagggcttgttgatttggtcagcaatgttgcgcagcttgctggctggtttgtcaagacagctgcggcagcaggagagttactaaagtttcagaacaacagggttgctgttcttggcggtaacattgacgcaaataatttagatcaagtaacaggaagaataaaacaactccaagacatgattaataataggtccccattaaaaggggacggacaatcttgggtcggaaagattttaggtgatgatgattctgtaggtgcattaacaaaagaacttaatggtcttctggtagttcagcaaaagttaaatgaaaagagattcgtaggtaataatctacctactgggctagcaacagtagttagtgagcagtttgggctcggtaaaggcgaaacaaatggtaagcctaaatctgaccctggtgcaaaaaaaattgagtctgcattcaaagctacagaattaaattacatgcggcagatagcgcttatcgaaacaacaggtaaaaagactgctgaggttaccgaagccgaaaagctacgctttgatctagcgagcgggaagcttgttggtattaattctgagcagcagaagcgccttattcaactagctgatgagttagataaactgcaagctttgaaaaaagccaatgaagaaaatctaaaggtagctgcattcgcagcaaatctgaaatcttcaaatgacaatgcgagccaggagctttctgctgactttgtaggtgctggcatgggtgaaaaaaaccgcagcagaatgaaagaactgctggggattcagcaagacttcattagtcagcagcaggacctacagaaacaatatcagactggtcaaatagacaagtcatattatgataaagcaactaaagtacttcaagattcgctaaatgaacgacttgagatacaagaggattattacaagcgttcagatgaacaacgtgatgattggtcagctggaatttcagatgcgttagtagatttcgccgaacggtcaagtgattactatcagctatcggctgatgcaatgtcatctgtccttggttctgctgctgaatcaatctcaaatcatctttatgatctggcgacaagtgcagaatcattaggtgatttttttaaaggtattttttcagatctgggacagtcagtaataaaaacactagccgatatggcggcgcaatggattgtttatcagggagttcagttattagttggaaaaacggcacaagcagctgcaattccagcaatggttgctaatgctcaagctacagcgttacaagcacaactggcagcatttgcatctacggcagctatacctatcgtcggcccggcattggctccggccgcgatggcaactgctgctactgtaacgatgcctatggtggccgcaatttctgcagctggtctttctggtatggcccatgatggtattgatgctgttcctgaaacgggtacctggttgcttcaaaagggcgagagggtaacgactgctgggacaagcgcaaaactggatgcaaccttggagcgtgttagtcgagatgcaaatacaggtggcgttgcaccaaatatcgaaattcatacgcaagtgaatggagatcctgatgcaaggacattgcagatgctgaaagaaacccaaagagcagcagttaaggaggcgttagagcaaagcgcttaccaaattgcaactggccgtggtgatgttggaaaggctgtcggcatgggttggcaaacaaaacggagaacaggttaa

SEQ ID NO: 451128 - DNA, 150 bp, Serratia marcescens
atgagcggtaagctttatcctgaagagttcaaaattcaagcgatcaaacaggttgttgatcgcggccattccatcgcaagcgtctccacccgtcttgataggggtcagcttggaaaacggaaaatatcctacgttaaagccgtctcttaa

SEQ ID NO: 451129 - DNA, 900 bp, Serratia marcescens
gtggagggatacattactgctgaacggatcgcaaactcaattatgcaacaaaatagcttcgaaggaacgcacattttagtggagggagttaaggacattaaagtttacactaagttctttcaaaaagaacaggtcaagctcacgcagacatttggtaagtataagttgcgtgaagttttcgatatattatctctaaggggatttaacaagaaaatagctattcgtgatgcagacttcttacgattgaaagataatagaaagtttgaggtagactatgcaattgacatctatccaactgatggtcatgacagcgaagtcatgatgttggcagtgaacactcttgaggatttattggctgtaactgttgagcaggataagctagatgcttttgaaaaaagaataggggagtcgttcaaatcaagggtaattaaaatgtcataccttattgggtgtttgaggcttgctaacaaaagatcagggctgggattgttatttaagcccgcaaagcaaggtggaaatagaataaaattcaagaaatttgtctgtgacaaagaatttaacattgacacatctaaaatgattcatgtcatatctgaatattctaaaaatagagatacaatcgtttgtgcacaacaagtgatcactgataatcttgataaagtgttgatggaaaatcatgatgtacttgaagttattaatggacatgatgtagctgaaataacatgcatattatcctctatcggagttaaaagtaagagtgatatatttcagcatcctgataaattagaggaggcacttgccatgtgctttgataggaataaattttgtagtacaaatctctatagaaaaataaacgactggaaagttaagaatgatttagagattttttttagtatgtga

SEQ ID NO: 451130 - DNA, 324 bp, Serratia marcescens
atgtcgatcgccgaatggtgggaggtcgccgacccgcgcggcacgttccgtctcaccatcgacgtgaacgacgtcgggatcactgacgaaatcgtcaaagagctggagcgcctgattggcgatgccaggcctgtcagtcggcatatggcaggcatcaacattattgttaatgcgaccggggtgttgaatgtaggtgttgccagctatgagggggatattgtcgatatatacccggccggatttataccagaaagagcaatttattacgatgcatccattcattatgacggcaattatcattataccggggtagcaaatgagtaa

SEQ ID NO: 451131 - DNA, 318 bp, Serratia marcescens
atgaaggcgttggattgggcggtcagcaatctgcaacttcctcataccgtcgaggctttggcggataaagcgtacatgagtcgtcgaacgtttacccggcgattccaacagtcgacggggacaaccctcacgcaatggctgttaagccaacggctggctctcgcccagcgattcctggaaaaaaccgaccaatcgattgaacaaattgccctggtggctggcttcagctctacgctttccatgcggcggcattttcaacagcaattcaaaacgtccccatcacgctatcgcaaagagtttcatctcaaggtgaagtag

SEQ ID NO: 451132 - DNA, 366 bp, Serratia marcescens
atgctaaacgtcaatcatctttcagcagagtatcaggggcggcccgcgctgcgtgacgtgtcgttccagattgccgccgggcaactggtggtggtgctcggcccgtcgggctgcggcaagaccacgctgctgaatttgatcgccgggtttatcgagccttcagctggcagcatcacgctggatggaacgcccgttcacggcccgagcgccgaacggggcgtggtgttccagcatgagggtttactgccgtggcgcaacgtggtggacaacgtcgagttcggcctgcagctggccggcgtcggcaaaggcgcagcgccgccaggtggcggagcagatgctgcagcgcgtggggctggcgggctatga

SEQ ID NO: 451133 - DNA, 714 bp, Serratia marcescens
  misc_feature (665)..(674): n is a, c, g, or t
gtgtggcaaaacgtttaccaagtgcctttgtatgaattcgtcaactttaccaaacaatgcaaattgaatggtaaaacggcgctattcatcattactctgccagcacaggtatttataccagctatctacgatttcagagcgcaaggctgtcacattgcttacgatatcatggatgagtgggagtgcttcaatcaagtgggtcaagcaccttggtatctgcgaggagcggaagaaactatcatattacaaagtgattatgtatgtggcgttgctccatcactgcgcgataaattctcctcgctccgaagtgatattgaggttattggcaacggttactcagagaacgtattgggcgatacacgaaatatcgcgcagagcacctcaaataaagtgggttacttcggccaccttacggactcctggtttgactgggatatcatttttaaactagccgaacataaccctcagtatcattttgaaattattggttatggcgagcccgaatgggttgtcgaaaaagtgaagcattttaccaacatcatgctagttggtaaagtgatgccgaaagatctccatcaatatgttaaagaatggtcgatcgggttaatccccttcaaaagtggtgagcttgcccaagcggtagatcctattaaaatatatgagtnnnnnnnnnngtatatgagtacctttattttggtttgccaacgttggtaa

SEQ ID NO: 451134 - DNA, 537 bp, Serratia marcescens; identical to SEQ ID NO: 101702

SEQ ID NO: 451135 - DNA, 1029 bp, Serratia marcescens
atggcggcaaggcggcatagaattaataattactgggatgtgatttatgaccctttaattgatttagatgattttatagatataaaatttggtgacttaaaacacaaccttagcccttgtaaaggattgtttgatttgggggaaattgaagataacatcaaaactgttaaagacatctcctttatagagtgtgatatctatggtgagctaactgttacaaaattaaacttcaagaagtgcagtttttcaaaggtatattttggttattctatttttaagaatacaaagtttcagaattgcgttttcaaaaaatgtagctttgctatgacaaagtttataagttgccagttcattgactgtgattttgaagaaatatcattctctggaaatgaaacatttttcgaaagcacacaaataaattcagaggttttaattaaatctggatatacaaacttagatgattctatcttaaaagaaaaggggactacatgtgaatatcaaaaatttagactagagggtactaaggcaaaaatggcaaagatggttttaaactcactttcagccacggccgatgatgatttgtattataattcagttaaaacttacttaataagtaaggccaatgctaagatatataaacataagtatgatttagataatgaagttggattttttaaaaagaatggctctagattaaaagtactgaccactagacttgaattatttgttctgcgtgtttctggtgcagttaataattggggtaatggattgtttcgcgcgattatggttgggttttcattaatatttttatttagcatttattattttagttttttcggtgcaagcgttgttggtagtttaattaaaagtatagacattactttcttagccggatatacgaagcatgtaactaaagaaacagcgacgttccagcaatgcgttatgctattaaatatgtgtctaggattgtggtggtacgcaatagtaataccaactctaattaacagaatatgcagtgtaagacaatga

SEQ ID NO: 451136 - DNA, 675 bp, Serratia marcescens
atgaatattaaatgtttggtattatatggaagttgtgcgcgcggtgatcaaaatgcatcatcagatattgatctgtttgccatacatgatcagaatgaatatagaatgtatataaatggaaatatcaacattgcgttgtattctgaaaggaaagcatttgaaataatggagagcgggaatctattcggattacatattaaggaagaaggtaaactaatgtttaatgatgggatttttaatgagatgagggctagcttcaaatataaggattcgtatagtgaagagatctctgtcgcatccactttgggacggtttattttaagagaacagaaaacaattaaaaattccgctctattaaataaacgactgtcttggtgtgtgagaactattctaatagcaaaaagcgcagaaatgaaagagcctgtattctctaagtttgatatttcaaaaaaattctcatgcttaaaggttagcgagtctgttatatcgtctcttatcgacttaaagaaagtaacaactaaagatgaaaagattgtgaatttatcaactgttttttttgagcacttttctcctattgatgaatacaataacataccaattgacagtaactattttctcagaaaaaccgtaagtaaattgttgtcagataagaattgctcagtttataactactaa

SEQ ID NO: 451137 - DNA, 132 bp, Serratia marcescens
atggtggcagcctccagcaagtattggttattgctaccaccgaagtttccacgcttatgggtggtagcccagacgggggtggaaataccggccttactggaaaccggcctgaccgaagtcagccccgcctga

SEQ ID NO: 451138 - DNA, 507 bp, Serratia marcescens
atgagtgacagtgcttataatatgtattcactagcagtatctagcattgccttgctactgtcagcgtatacctttttcaaatcacgaaaagatgttaaattcgcacaagagaatgcaagcgaagcattgaaattgcaatatggtgcaattgaacttcaaattcgaactggtataaccagtgcaagaaatacaataaacaatttaatacctatcttaacaccatacttggcaaaaaaacaagcaggctcattgagcactgaggagtcttactcccttgatttattatataaagcttatgactcttgcattgaagatcttctcaaccaatatgatgaagcatgcaagaaatatattagcggtaaagttgacaggaaaatcttcaaagagacatatattcatgaaataagaaaaataacatcaagccaagatctttcctcctattataattcagaaaaaacaaaatatacatccaccttaaaggtgagagatgaatgggtaactgactga

SEQ ID NO: 451139 - DNA, 3126 bp, Serratia marcescens
atgcttggcatactgcttaatcgcctcaccactaaagtgagagccgaactcaaacgcaacctcaaatgcaataagacatataagaagcatcgctggagccttgttgagagggctcaggtttactgctccaaacattatctgaaggccatgcttttgctctgggctatggcaggcagtgctgttctcatagcgataggctgccgtgctgaatttagtagctttggggttaatcatctgaaaaacgtcactaaacttcctgaatggatgtcaaacctgcttggcagccagctgacgataatcgggattgtgttcccgctagttgtcggacttatcagtgtgctttttcagaaaaaatcgtcgaggatacacatccagagcgcctatcagctgcattcgggttatatgtttgccggactcagcgggctatcacttgctgcatttatactgattagtggattatttatatctgcaggtgacaaatatcttgatacggcctttgcagttacggccttaatctggatgcttttcaatatagtactttcgatttggttctttattaccagtcttaacattctggatgataagaaacgcgatcacctcatgctgaagtattttcattcacagattgtggaagaccacattttgcgttccctgaaatactcatggatacaatatcccggctcaaaaatagacaagaattatattaagggaataaccattcttccctactcagtctcaagcgaagaaagtatgggctcagttaaattccatattgaggatcatatggaaatcagtgatgttaatcttagaccactaaattttctgttacacctgctgaaaccagtgcaggataagaatggctcgattattattctgccgtccatagcaaaaagggacaacacaataacactgctctcctcaactgacgtgattatcccttggtggtggccgttctttttcagacaatgttttataaaaggtccgaaacgaaactggaaagagtacagacacattacccgtgatttttatggtgaggtttatgatgctatggaagacaaaaacataagcacctttatcatcgcaacagaccggctggttgatacatatacaacattgaaaaaaagcttccggtacacagatggaaactacattgatgaatgtcatggttcaggtatgtcacttacattcagccagtcattctatcatgatttttacactttcagtcacgaggtagtaaagtcactggaaacaacgggtgaatatttccgtaaaattattgatttaccattctctgtatatcgtgattcagacagctgcgaaaccatcgattttcagcagtgtatggaatctcttttctacgtatggcacgcgttgaacagctggaaaagagggtatgcagaaactctgtcggtcagccaagagcagcgtcacagggaaattgtcaaagattttataggggaatgggaaagctggtacatgtggcgacgtattaagggccgaggcgagaacaggtttgatgatgactctgctgaactactttatcatctttatgagacagcccggatagtcatgactgcagtgatgtcagacgaccgctatgcctcagatcacagtacggatatgcttttactctggttcagccggaataggtttgaacagcactttgaacaataccgctggcacagcttcttcctgacgccgtcataccttacgcaggcctttggaaaatcggcctggcaggttgtcctgcgaggaaatgaatattcagaaaaagctgcacaggcaatcattttctacaatgcactgacagatattcgtttgctcactgccggatatattctttcgcatgtgcagcagaaaaaaaatgtacgtctgaaaaaggttataaaacgacttcttacttctgaacctgtctatccgacaggtgcgcatgatctcatgacgacgtcgttaacgtcttcgactgatattattgacattattatcaggctggaatgttctccgtgcgatagtgaggattcctggtacaagacgctatcagatctcgtaaaggatttttcatcatttaatgaaactgagatcatatctgggcgtatttatatgggaacctatgaggatatcaggaatatttacgccagttatgctgatatagctttttatctttccgctaagtccctgccagtcacccagcgcgtaagaatggcattgaacgataacctgtttacttatcatcagaaggaacagattatttatcaactccagggaattaaacgccgtgaagacatgccatcggatggatatttaatgtctgataaagcctttaaagagaagatagcctgttttaatgaaactctcgatgcctatattcaggctttcagccggagcatgtattcagaacttcttaacgctgagattgatactgagctactgaaaattaccgatcttactcttacccgtgaactaccctctatgcttgcccaggatgcactgctttcccgattttcttacagtacgtcaaacagcggggagatagcgtggacagtcaggtcagttaacggaaccatgcctaaaaatatcttagtccgtgggatgaacagtactaattccggaatactggcatcggtttctgacgtcaaacacactctacttcgtgacgtttaccatggactgagtcagctgcagcccctccatacaatcaacgtccgcgacgaatatgaactgctgaaacatttacgggagataactgccgataacgaagactatacgctgattttcttcggaacccatctgggaagcgagctacgtgaactgagctaccacgcagaaaggtttgcggaactggggataactctggacatgaagagtgatctcaagggcctgatgacagtcaggatcaataactgtgctatctatcaagtatgggataatgagggaggattttactccctgcttgtccggaacagtgtctttggctcccttcacatgctgagcgatcctgacgggcagcttttcagttccttgtggcatgcaagtgatgaagaccctctgtcgggcagggtgactaccagttggaaacaggaactcgggatcaatgggtccattgtggcacgatttaatcacctctga

SEQ ID NO: 451140 - DNA, 375 bp, Serratia marcescens
atgtacctgatgtttaaacgttcaccccattatgttctgatgattgtcatcatggccgttggcatgatgatgtcgtcgatgggcacgtttgcgtcacacggtacaaacggtctgacaggttacgagatgaatctgcatgatgatgcgcaagtcaccatgacaatgcaggatcactctcacgacccggatattcctcagtcagatcacgcaggccatcaccaggcagaccatttccatgaaaccccgcagctgccgccctctgtggagatttccctctctcctgtagcagacagatggttgccgcttgccgatcttcgtagcccggtgaaggccacggagatcatttaccgtcctcccagcacccgccagatctga

SEQ ID NO: 451141 - DNA, 759 bp, Serratia marcescens
atgacaacattactgccaggggaaaccctggcagcctcgctggctgaaaacgtcagtcaaacatggcaaaaaataatcgctcgtcgcactgtccgggaggtgataacgccgggctgggttttgcagtcgctcgggcagaggcctggctcaacagaattacgaagagccatttttgaactggtcagaaggatcccctatcagctcggctcgtggaatggcgaaagcatgagcctgtttcagcagggctttggcgactgccgtcacaaagccgccgccgccgagcgactgctgaccgccggtggcgtcacggcaaagcgaatactggtgcgttttgactgggctgatttacctgtacccgcggagattctggaaattttgccacaaactcagggatttcatgacaccgtgtcttttgaattaaaagggaaaacatgcctgtttgatgctacctgggatatggccctgcgcggtgcgggcttcccggtgatgcctttctgggatggcaactccgacacctggtcagtgacctctcggatggcgacgcagcaaaccgtacagatgccacagcccggacaggacatttacagcgctaatcagatgagctggccgcagcgcgagaaaaccatggcgttcaatcgggcgctgaatagctggctggagggtattcgggcaagccgtgacgacgggtgcaccattatccatagcgatattgaaaccacacggctgagtctgaaaacctgcctcggacaactgagttaa

SEQ ID NO: 451142 - DNA, 429 bp, Serratia marcescens
atgcgaaaaaaatattcaaaccagagttggtgccagtttgtccgaaatacgggagtattgttcaccgcgctgatcaccctccctgctctggcagcagaaggcggcttctccgctgagaaagaacctgttgccgcagagcgcatgtatgccgggcataaatttcagcaggaaaacagccaaagccgtatccaaggcgttcaggccatgcgagaagatgcatgggttacactggaggggaatgtgatcagccagcagcaggaggagtggtataccttccgtgatccgacaggaaccatcaaagtgcgcattcctcagaaagtatggaacgggcagcatttcgatgctcaggatctggtgcgagtaagtgggcagataagccatgaaaatggcactacgagcctgaacgctgaggttatcaaaaaaccttaa

SEQ ID NO: 451143 - DNA, 429 bp, Serratia marcescens
atgaccggcatcgcgcggttcgtacaagataaagcgttaaagaaaatcctgcgggcgaccgatggtttaggtacggaagcgacgcgagcggggatcatcgaattgctgttcaaacgggcgtttctgtacaagaaggggcgctatattcactccagcgaaaccgggcgcgcgttgattcactcgctgccggatcttgctgcgcgtcctgatatgacggccaactgggaagccacgctgacgcaaatcagcgagaaatcctgccgctatcaggactttatgcagccgttggtcggcacgctgcaagagctgatttatcaggccaagcagagccgggcgagcatggcgtttcgtgggttgccgccgccgccttccagcgggggcaaaaaacgcaggaaaagcgccggcaaggcgcaggagaagagtgaatga

SEQ ID NO: 451144 - DNA, 1563 bp, Serratia marcescens
atggcactgcaattcaccacggctattcgtggcaatttttttgatatcgcggcctgcgtggaggaaccgcaacagcttgacgaacgcctgcggcacattcccgacggtttgttgctgctgaacgggggcgtcatcgtctggttcggcagctggcagcagggtgaggcgctgctgccgccgggtttcgcggtcacggagtatcgcgacaaaccgatcgtaccgggctttatcgacacccatatccactatccgcaaaccgaaatgattggcgcctatggcgaccaactgctggactggttaaataattacaccttcccgaccgaaagccgctatggctgcgagcggcacgccgacgcgatgtcggccttctttctgcgggagttgctgagcaacggcactaccaccgcgctggtgttcggcagcgtgcatccgcagtcggtcgatgcgctgttcagccaggcgcaaacgctgaacatgcgcctgatcgccggtaaggtgatgatggatcgccatgcgccgcaggcgctgctggaaacgccggagcagagttaccacgacacgcgcgagttgattgaacgctggcacggcaaaggccgcctcggttacgccattacgccgcgctttgcgccaaccagcaccccggcgctgctggaaacgccggagcagagttaccacgacacgcgcgagttgattgaacgctggcacggcaaaggccgcctcggttacgccattacgccgcgctttgcgccaaccagcaccccggcgctgctggaaacgccggagcagagttaccacgacacgcgcgagttgattgaacgctggcacggcaaaggccgcctcggttacgccattacgccgcgctttgcgccaaccagcaccccggcgctgctggcgcaggtgcagcggctgcgcgaagaattccccgacgtgtggctgcagacgcacctgagcgagaatccgcaggaagtggcctgggtaaaatcgctgtttccgcaaagccaaagctatctggacgtttaccatcgctacggcatgaccggcggcaaaagcgtgttcgcccactgcctgcacctggaggagcaggagtgggactgcctgtgcgagacccgttcggcgattgccttttgccccacctccaacctgttcctcggcagcgggctgtttgacctgcagcaggcctggcgcaagcgggtgaagctcggcatcggcaccgacgtgggggcaggcacctccttcaatatgctgcgcacgctgggcgaggcgtacaaggtcggccagctgcagcattaccggctctccgccgtagaagcgttttatcacgccaccctgggcggcgcccgcgcgctgtcgctggacgataaaatcggcaacttcgacgtcggcaaagaggcggatttcgtggtgctcgatccggcggtgacgccgctgcagcagttacgctacgccaacagcgccacgccggcggaacaaggcttcgtgctgatgacgctgggggacgatcgcaatatttatcgcacctatgtggacggcaaggtggtttatcaggcggcggtgtcagactga

SEQ ID NO: 451145 - DNA, 582 bp, Serratia marcescens
atgacaccacaaaatagagcgctggaatggttgagtagtaaaaatttaattcttgatacagagactactgggttgggagaggacgccgaaatagtagaagtatgtctgattgattgttatggcggaattgtaattaatacgctgattaaaccgacaaaaccaattccggcagaagctacagccattcatgggataactaatgaaatggttgcttatgccccaacatgggcagacgtacattatgggattggtgagcttttctttttacgtggttttgttatttataatgctgaatatgacactaggttgattcaacagagtgcgaaactgcatggaatagatgacgcattttgtgagtttgtcgggctgtataaaagatgtgcaatgttaacatatgcagaattctacggccaagaaaacattcgcggtggttatcgttggcaaagacttaccgcagcagcagagcaacaaggcgtcattattgagggaacgccgcaccgtgcactttcagattgcctgacaactctcggcgttattaaagctatggctgctggtaagcgcagcaaaggaattaatgaatga

SEQ ID NO: 451146 - DNA, 1314 bp, Serratia marcescens
atgtttgtacaattttcttttaaaaactatttgtcgtttaaggatgaggcaacgctatcgatgcttgccgcaaaaattaagtctaaggataagaatttagataaaagagcggtatttaatgctttccctgatatagaccttttaaaagcagctgttatatatggggctaatggaagtggaaaaagcaatgtcttttctgcattatcttttatgaagaaaatggtaatcaattcttcaaaagaatcacaagcggatgaggatataaatgttcttccatttaaattgaatccaagatttgaagatgaaccatcatcatttgaaatgatattcattattaacaataaactttatgaatatacgtttgctgcggttcgtgataaaattacatcagaaactctttctgtaatagaaaaaaataaagaagaagtagtgttatttaatagaaatacgaaagaaataaatgtccacaaagaatttaaggaaggtattgatttaggaaaaagaacaaggaaaaatgccttatttttatccgtctgtgctaactttgatggagaagtttcgaaatcagttattagatggtttaggaaaatcagagttatacaaggtatgagtgatataggttatctcccattcactgtaaaacttttggatgatgaaaaaaaacgtaagaaaataaaatcaatcattgatatgtttgacttggatatcgttaatatctctaagagccaaggtgatcgggttgagaaaaaagaaagtgaacttctggatgcaatttttacaactataaaaaaagattcaagatttaaagatatatctttaccaaagaatgatcccttaggagtcgctactactcataaccgtttcaatgacgaaggtgtttttgtagataccattaattttgagttgggtgaaaacgaatctgaaggaacgaaaaaactcattgcattagctggtcccttgatggatacctttgataattcatatatcttatttatagatgagtttgatgcaaggcttcaccctttaattaccaagaaaattattagaatgttcaacagcttagatattaataagaataatgcgcaattggtagtcgcaacacatgatactaatctgttggataaagatgagttacgtagagatcagatttggtttgcagaaaaagactctttaggcggctcgcatttaaagcaactagttgaatataaagttaggaatgatgcatcctataggaaaggatatttcgaaggtgattttggtgctattccaatgttaggtgatccagatataatttcgggttcggatttaaattaa

SEQ ID NO: 451147 - DNA, 1026 bp, Serratia marcescens
atgaaaaataataacattagtgcttgggtggatttttttgctgatcgtggagtgtctgacgaacaaacagacctttacattcaatatataacagtattattgagcagtgaagttccgataatattcgagaaacagcatttatctcaccttataggtattgatgagtcaatacttgataaaatggtttcttcctctaaaaatttttatagagagtttaatataagaaaaaagaaaggtggtgaaagaaagattgtttctccatatccttcactattaatgtgccaaaaatggatctataaaaacatattactaaaagataaacctcatgaagcatgtcacggctttacaccttcaaaatcaattattacaaatgcctctatacatttagataaagcctgtcttctcaagatggatttaaaagattttttcccatccatacctataaattgggttattaactactttaggaaactgggttactccaataatatatccttctatttggcttctctgtgctgctatgaaaaaaaattagcccaaggtgcgtcaaccagcccttatctttcgaatttgttactcaaagggttggacaatagactgagtaatttaagcaaaaaatatcaattatcttactcaagatatgctgatgatctatgcttttccggaaaatacatccctaataaaataattggagtcatcacaaacataatagccaattacggtctacaagttaacagcgataaaacttcgttattaataaaagccaacaaaaaaataataacagggatttccgtaactggtcaaaaaccatcgttgccaagagagtataaaaggaaactaaaaaacgaattgcatttcatcaaaaaatatggttacttatctcatatttcccaacaaaaaataaaagaccctaattatctactttcaattcttggtcgggtaagcttctggcttcaagttgagccacataatgaattagccataaccagtagagactacttactttcaattttgaaaaataattaa

SEQ ID NO: 451148 - DNA, 984 bp, Serratia marcescens
atgaatgacagaaagcctatttttgaacccatttcgacgtggtcaacccaacgaccggctaagcgtgcagtcgtttttggcgagcaaacgttgagttatgcccagcttgaataccagtccaatctactagcgcgctatttattatcaaaatatccgatgcatccacgaggaagaattgctgtctatctggagccaggtctaatgatgcctgtggtgctgttggcaattctcaaagcgggctacacctatattcccttatcagattttttgcctaacgagagagtattaaaaattctcgatgacgctgcagcctttttgttgctgaccacggtttccatcatgcgtaaaacggggataggaaaaaatttcccttctacgctggcgttagaggatatcgcctatgcagatatgccggctacgataagcctgcccgtggtacagaaaacggatatcgcttatgtgctgtatacctcaggctctaccgggttaccaaaaggggttgtcattgagcacgggaatttgagttattacctggattggttcaaccaagcactttggcctgaaactcaggcagtattaccgctgacttcaaccttgagttttgctgctgcggttacgcaactttatgcccctttgctgcgtggcgatacgttgcatattttacctgccaatattttgcatgagcctgaaaaattgctgacttggtacgaacaacatccttcaggagcgctttattgtgtgccgacggtatgggatgcgttgctgcgctacgatcgtcaagcaggcggcgcgtcgcgtttaccaacaaccgtatttctttccggtgagccggttccctttgatctaaaagagcgaacctttgcgcaatgtcaagacgcaacggtgtataacctatacggccctacggaaacgactctttcgctcgtttggaaaaagggaaggcggtcactctgggtaaggcattgcgaggcagtaaaatactga

SEQ ID NO: 451149 - DNA, 849 bp, Serratia marcescens
atgaacagagacatattcaggattatgtttgcactaacaaataaacaaccttggctagttgatagatctcaagttctggaggatatattatttgaagaatgtgcaaatgatgagacgagagagttattaattgatcttattaataggtttgagtttcttgataatgacaggtatcaagttttaatcaggcaaatggcgctcgagattgttacagaacctgagttatatgaattatctacattgatattagctatgagtattggtcatgatgctgatagcggacaagcgataatatattctttgaaagtattactgcaagaacttttgtggacaaaacataaatcagtaaatgatgcacaacaagctttaaaaacattcaagaggaatccacaattaaaagacataattttagttgatgaatttgtaggctcaggtaaaacggttatcggccgagtagaagcgattcaaaggcaatttgcaattgccgaaaatgacgacttcactataaaggttaaagtacttgcagctacagagaaaggaatcgctaacgttattgatgccggaattaatatcacctcgcagattataataaaaaaaggtataagtgattattacgaagaagtagaagcaagaaaaaaaataaatttaatgttagccatggaagaaatactatcgaaatcttacggaggaaaggaaatgccaacaatggggtatgggaaagcggaggctctatactacagaaaggatacaaaccttccaaatagcgtattccccatattttggtgggcggagtactcaaataaaaagcccagaaaaacattattatatagagctatgggtgatgcataa

SEQ ID NO: 451150 - DNA, 2334 bp, Serratia marcescens
atgagcgcccagttcgtttcccagaccgtacgtaccgccaccggccactggccggtgatactcccggcgctcggcatcgccttgcagccgaacggcaagtcgcagccgtgcccgacctgcggcggtaaagaccgcttccgtttcgacaaccaggaggggcgcggcacctggttctgcaatcagtgcggggccggtgacggcctcaacctggtggaaaaagccctatcgctgtcagcaaaggctgccgccgaacaggtggctgccgtgatgggggataatgccagcactttgccactggccgctgaggccggtcattcaccacaagacaaggccgaggctcagcgcaaggccgcgcgacaggcacaggctctggttgccgctgcccggctccaggccgggaatgtctacctgagcgccaagggctggccggaggtggaagtcctgaccttgcagggccagccgctgcgcgttggcgggatcaccttccaacccggtgacctgctgttgccgctgcataatgccgggggtgaggtggtcaacgtgcagctgattaacgccaacggtgataaacgcatgctggcaggcgggcaggtgaaagccgcctgccacactttgagtgggccggacaacgcggttatctggctcaccgagggctacgccaccggcctcaccgtgcaccgcctgaccggcgaaacggtgtgcgtggcactgagcgccaacaacctggcggcggtggcgcagcagctgcgcagccactatcctgatgcgcggctgctgctggcggccgataatgaccgcagcggcaccgggcagacccgcgccgccgaggcggccacgctcaccggcggtatcccggcgttgccgcctacggagggcgactggaacgacgtctactgtaatcaaggtattgagaccacgcgcacgcagctccaggcgctcagccagccgcgtcagcacagcccgttcgacacgctgagcgatgccgatttaaaagccatgagcgccagcgagaaggccgagctgctggccgagcactacggcaacaccctggcggtgccgccggtgggggaagaactctgccgctatacgcgcggtgcctggcaggtgctgccacaccggcaactgagccgggagattgccgcgttgttccagaaggtgcgcgcaccgttctccgccgccggtatcaacagcatcctggacaccctcaagctgatggtgccgcagatgggcgacccggctcgccggttgataggctttcgtaacggggtgtttgatgccgtcagcggccagttcagcgctcaccggcaagagcactggctgcgcaccgtcaacagcgtggactacacgccgccgcgtgccggtgagaacctggctgaccatgcgccgcacttctggcagtggttgacgcgggccgccgggggcaaccacgacaagcaggagcgtattctcgcggcactctttatggtgctggccaaccgttacgactggcagctgttcctcgaagtgaccggccctggcggcagcggcaagagcgtgatggcggccatcgcccggctgctcgccggggcggacaacaccacctccgcgaccatcgacaacctggagtcggcgcgcgagcgagccagcgtggtcggctactcgctgattatcctgcctgaccaggagaagtggagcggtgacggcgcgggcatcaaagcgatcaccggcggcgatgcggtggctatcgacccgaaataccgcgacgcctactccacgcatatttcggcggtgattttggcggtaaataacaacccgatgcagttcagcgaccgcagcggcggtgtgtcccgtcgtcgggtgattctgccgttcccggaagtgataccggccaacgagcgtgacccgcagttgctggcaaaaattaccggtgagctggcagtgatcgtgcgccatctgatgcagcgctttgccgtgcccaataacgcccgagtattgctcgaagcgcaacagaactcgggtgaagcgctggagattaaacgtagtgccgatccgctggtcgacttttgcggctatctgctggcgagtagtgcgcctgacggtctgtatatcggtaatgccaacattaccccggcgaacccacgcaagtacctgtatcacgcgtacctctcttacatggaagcccggggacacaaatacccattgaatctgaccgcgttcgggcgcgccgtgccgcaaaccctgcgagagtacgaaatagcgctattgaaacgcaagaccaatcaaggggtgcaaaccaacctgatattgagcgaagactgcgaagccgactggctcccgaagtgtgaaatgtgctga

SEQ ID NO: 451151 - DNA, 600 bp, Serratia marcescens
atggatatgattaaacaacatccagactattcgcatgagtcgtggtcatcagaaatattgcagcctttaaggacaaatttaagaatattttatcgcaatgagcaacgtggtgtatgcgcgttttgtaaaaatgaaatttcattgcaagctgcggctaattgtaccatcgagcatataataccaaaatcaaaatatattgattttatttttcatcaaaaaaacctatgtgtcatatgtgctgactgtaatcaaattaaaagagctcaggaaattctagatgagattccaaatgttttgagtaatgatagacaaagggtgcgatatccaacggcaagttcttcatttaaaatagttcacccacattttgatgtttggaatgaacatataataagaatggggcgtgcttacgtagatagaacaagaaaaggcgggaatacaatattaatttgtaagctaaacaggtttttccatttgtttgaggtgggagaggagtatatcgatgatgctgacttgtcagaacttatgaatgagtatcttagctgtggacgccctattagaaaagcagaaattctttttcagattaaggaagcgttacgttaa

SEQ ID NO: 451152 - DNA, 582 bp, Serratia marcescens
gtggtacaagtaaaagatattagggtgattagtaaaaaagaaaagtcaaaaataagcctttttcaaacaagttctggtcagcaatgcatggtcctaatgatgattggtattgtgagttcaatcagtgataattcacttgtttgcattgatgaaccggaaattagccttcatcccaaatggcagctcgagtttattagtatattgcaaaggacattttcagattataaaggatgccattttttgctagcaacacattcacctcaaattatctctggccttaaagctaataatgggtatattctttctttggaaaatgatgaactaacgagctcggaagagaattcgctgcgctcggctgactatcagttagctgaggtttttgatgcaccaggatatagaaacgaatacattaccaagttatcgattgatttatttgcaaggataaagaaaaataaaaaaattgatgaaaatgataaactctcgatgagtaaactaaaagaatttaaaaagaatatagaagcagaagatcctgtatatgaactaattgaaactttagaggaggtttttgattactatggctga

SEQ ID NO: 451153 - DNA, 246 bp, Serratia marcescens
atgatgcagctaacctttggtcgccagcatttcacccttgatgagcgcgacgcgctgtttgtggcggaagctattctgttgcagcgtaaagagcctggcgtcgtcttgccggagcaccgcagtgaaaaacacggcgttattcgtctggcgagtcgccaggcgcagccgcgcctgttcagtgccgggccggtgccgctgacctgcgcggcggccgatacccgcaacgaccaattgaccgactgttga

SEQ ID NO: 451154 - DNA, 534 bp, Serratia marcescens
ttgagcactaccgctatcgagtatttgcctaaaatcatggattttgcatctaaatatgccccccccctccttgtagcagcagtaactgcatatttttccacaagatttgctctgaataagttctacaaagaaaaatggtgggaaaagcgtttggaatcattcacggagatcataaatattgcgtatcgaattaagatgactgatggttacttcctggattgcgaatatgaaaaaatggaagagtctgaatcaaggtttaagccgcatcctaaagacattgaggataagttagtagcggaatactggcgagatcttcaagagcttgaaagaatagcacagttagctgattttacattaactgcaaatgtcaaaatcattttagataactttgtaattgccagaagaaaaataatggatgactgttacgacgatgctcttgacaatttagaggcatgtgaaagagatttcgctcttacaaaaaagttacttggtgacttagtctcagaagctaaaagtgagttaaaaattcattaa

SEQ ID NO: 451155 - DNA, 885 bp, Serratia marcescens
atgagcagtatatcaattcttgaagctgttaacacttcatctgtccagttccatggtcagcctatcattacggccatggtcgccggcgtggcttatgtggcgatgaagcctattgttgaaaacctcggcatgagctggggcactcagcaacaaaagctggctcgcaacaaagaaaagttcgggtgtattcatatgaatataccctcagccggaggcattcaaagagcactatcgctgccactgaagaagctcaacggctggctgttcagcattaacccgtcaaaggtgcgcgccgacatccgcgacaagctgatcgcctatcaggaagaatgcttcaccgttttgcacgactattggacgaaaggcgccgccgtccgtaagcctggtacaaccgtcgatgagagaacaccattgcgtgatgcggtgaatatgctcgtcagcaagaagcacctgatgtacccggaagcttactccatcattcaccagcgcttcgctgtggagagcatagaggacttaacgcctgagcagatcccgcaggctatcgagtacgttcaccgcgtagtgcttgatggcgaatatctgggtaaacaaatagaactacagatgccagccagacaattcgacgatagcgaactctaccaacttgtttgcctctggagcgtggctttattgataagacaggacactcagaagataaccgaagccctggccccccttggacttccaatagcagttaaggtgaatgcgaacgctaacaatctggatgggtttatacgcagcgccggcttgctgctactgcgtgagagcagtcatatagccaaacaggttagcccaccgctgaactggagacttgagataacgcgtatgcagtcagcacttcactga

SEQ ID NO: 451156 - DNA, 933 bp, Serratia marcescens
atgaatgtaatttatacaagtcagtcaactaaagataacttggatttaatttatgcgcaggcatatctatatgatcgagttaaaaaattcagctgcatgaattttgtcctgagtattgttactcctatagtgctgtcaatcatagctgcttatattaaaagtaaagggttatatccacaagaaaaggtctctgctattttaggtctttatgggctcattgttttatccgtaaatataatattgggtggatatctttcttccgagaagagaaaagcagccattatacaggagatgtttgactgcaatgtattaagaataaaatggaatgacttgaaggtaggtaaagaagtatctcgagatgatatattcagagctgcgtcatattatataaatcgccccgaaaaggctaggaagagatttggcgataatagatggtatgtcaataagaaatatgatgccccacaaaatgtaatggccttgctatgccacggtaaaaattttggatgggatatatcattgagggttaagcttaatactgtttacataatagggatcattactgctgttattagtctatctttctatggggtttttatggaggccacttttaatgatgttctattctatatagtatttactctcccattaataaggtattttcttgttcagtttattgataataggaaaagtataaataggatttgtaaaataaaagattatattgacaaagagatatctgatttaaaaatatctggattgattaactctgaagctcttaattataaggtaagatcaattcaagacgaaattttttcgcatagggcaagttgtccattggtgccgaattttattcatctctcaatgaagaaaaataatgaaattgtgtacaatgattattttgaggagcaactaaaacttatgaagttcagttag

SEQ ID NO: 451157 - DNA, 996 bp, Serratia marcescens
atggctacgacagtaataaatgcatttaacgaatttctacaaaatactgtaaatttagaaaaagcaaatactgacgatgcccgggctagtcgtgattggctgattgataaaatggattcatttgaaagtgatggggactcgccactcaattaccctgatattcatataggttttggatcttttgctaggaggacgaaaataagacctctcgatgatatcgatcttatgtttggactgtcagcagaaggatgtacttatactatttataacgataaaataacattaaacctcggtgagggtgctacgaggctcagtaattttaaacacaatgatggcgagacgattagctcaataaaaatattgaacaattttaaaagtaatctaaaaaatatccctcagtataaaatcgctgatattaaaaggaatcaagaggcagttacattacaattaagttcgaaagcatggagctttgatattgttccttgttttaaaacaaaggaggatgtctttggaaaaacctattatttaatacctgatggaatgggcaattggaaaaaaacagaccctagaattgataaagaaagaacaactaaaatcaatgttgaaaataatggtaatgtgctcaacgttattagggtggttaagtactggcaaacgaaaaaggctataccaagtataggttcttatttgctagaaacaatgatactaaactattacgatggtaaaagtaactgtagcaactttgtagacttggagctgaaaaacatatttaatcatttaggtttttatattaatttttcagttaatgatcacaagggtattcaaggtgatataaatcatttatctcatgatgaacgggggagagtatcggaaaaattttattctgaggcgaagaaggttgaagaggcaagagggtttgaagaagaaaaggaatatgaaaagtccattaataaatggatagaaatatttggtgttcaatttcctagatacggttga

SEQ ID NO: 451158 - DNA, 987 bp, Serratia marcescens; identical to SEQ ID NO: 437058

SEQ ID NO: 451159 - DNA, 177 bp, Serratia marcescens; identical to SEQ ID NO: 427601

SEQ ID NO: 451160 - DNA, 165 bp, Serratia marcescens
atggctaaaaaaaccactaccggaaaagccgtcaaaaaacagaccaacagcaaattaagttttcataagcagttggttttaaatcgctttatgttccgtttttttaaagacggcactttgcatggtttgaaaaagatggccaaagcctgttcttccatgagttaa

SEQ ID NO: 451161 - DNA, 243 bp, Serratia marcescens
atgtgggaatataatgtagacgcgggtaacaatgttgcggaaataatagtcagaaaggaaatggcgctgccgattaattatccacaagcagcgcaaggtttgagcgaaagtaaaatgagttttctttatttattgattatcaatgaaaaagtggtaaatcttctccaggtcgtcaaagtgcgtcacctgaaccaacagccggcgctgttccaggtcgacggccagaatgccgtcctccgataa

SEQ ID NO: 451162 - DNA, 867 bp, Serratia marcescens
atgatagattggactgaatctttagttgatgatatcgctagaaggaaatgcatactattcttaggggctggggtatcgatgaacagtattggtaacaatggttcacggcctcctggatggcgtgcttttttagaaaattgcatgagcgggttacagaaaactcaacagataaagaagttaattggtaatgaggattatctcacagcatgcgagttaataaagtcaaagctggccaaaggcaagtttgatacattgttaagaaagagttttttagaacctcaatataaacacgccagtttgcaccagcatctgtttaaattagattgtagaattgttttaacacctaactttgataaaatatatgagacttttgtcacaacagaaacacaaggaacggttgttgttaaaaattattacgatcaagatattgtcactgcaataaaaggtgatggtcgtgtaataatcaaaactcatggtacagttgataatactcaaagcttgattttctcaagaggagattatgcaagagccaggtctcaaaatcgagatttttatgagctattgaatgctctcagtttaactaatacatttctttttgtaggttgtggggttaatgatcccgatattcgacttttgttagaggattcatttttcaaacataatgctacaaaaccgcattttatgatatcttcagataaaggggtccataaagagatgattcctgtaatagaggatacactaaatttaaatattttgcagtacagagagcaaaaaggatcacatgaggaattgataaatagtttttctgaattagtaggtctagttgatataaaaagaaatattttaaaagaaactatgaattggtag

SEQ ID NO: 451163 - DNA, 1008 bp, Serratia marcescens
atgaaaagtatagttttttttaataacaagggtggtgttggtaaaacaacattaatatgtaatgttgccgcttatatgtctttggagtttgggaagaaggttcttgttatagatgcagatcctcaatgtaatacaacgtcttattgtctttctgaaattgaattagaaaaactgtatgcgaacgaaaaacgagaaaccattgagacattcttgaatcctgttcgtcgaggtaaagggtatgttcaaagtagaattggcccaataaagactgagcggttcggttttgatttaattgcaggcgatcctaaattggcgcttagtgaagatttgctagcaactgattgggatccagcaacttcagggaaacctagagggctgcaaacaacattggtcttttcacatttgtctaatctttatcgcgattatgattttgttttttatgacgttggcccgtcattaggtgcgttaaatcgtgccatattaatttcatgcgattatttcataattcctatgtcagtagatgtatttagtttgatggcattgagcaacattaatcaatccttgaagaactggcgttcagggatcattggtgggctctcttcatatgaggataatgaaggtgaggagtattgtttgggaaatgataaggttaaatggaaattatcatttttaggttatgctatgcaacaatataaagctaaaacagtaaggggggagcgtttgaaagtaagtgcttatgagaaaatagccaagaaattccctaagataatggctagtgaaattgttaatgaatatgcaaaaaataaaagcataaactttgacctaggtcagatagaaaatatgaatagcctaattcctttatcacagttggcccatgccccgttattttatttgaaaagtagagatggtgttgttggttcccactttacgaaagtgaatgatgcacgcgatgtgtataagaagttatgtaacaacttgcttactaatatcaaggcaattgaaaaatga

SEQ ID NO: 451164 - DNA, 513 bp, Serratia marcescens
gtggaaatgggaattaccggcgcgggctgtggagagagattcgctgcgctcaccctacgggccgccgttggcggtccaaaacgcaggcgttttgttgaaccctgtcgaggcttctcacccctctcggcggtgcgccatgcaaaaaaaaaagcctggacgcgaatccaggctttctctttgaatttggcggtgagagagggcttgattcgctgcgctcaccctacgggccgccgttggcggtcccaaacgcaggcgttttgtcgaaccctgtcgaggcttctcacccctctcggcggtgcgccatgcaaaaaaaaaagcctggacgcgaatccaggctttctctttgaatttggcggtgagagagggcttgattcgctgcgctcaccctacgggccgccgttggcggtcccaaacgcaggcgttttgtcgaaccctgtcgaggcttctcacccctctcggcggtgcgccatgcaaaaaaaaaagcctggacgcgaatccaggctttctctttga

SEQ ID NO: 451165 - DNA, 1032 bp, Serratia marcescens
atggattttattaaaaagttagaatttggaaactacacactaaaatttggtgataacttggtcctaatggattttatcgatgaaatagtcatgccatcgttttttgaaatgaactatattcgagcgataaaagatcgtggggagtatttcttcattgacacggaaatgatcgttttagatgacaataaagagaacccagtacttggaataaaaggtaaaatagttaaaaatactgttttaactagagagcaagtatttcatgggaataaactagtagatgactatgatgagctggaaacggcccccagctcattcttcttgttaatattaaactctcatcgattaattctatgtaaagaagttagcggcgcacctacgatagaaaacttcaaaagcacgagtcaatactgcttaacacaaagttggaatgattatattgatgccgtttatgagcaagagaaggaattcagagagaagaaccctgaactacctagaataactaaaaaatctatccgtgcagagatcccagcccctaaattaagaattacgaccctcaccgatagaaaaaccttagcagaattcattgagctatttgaaaaaatagacagactttctataaaattacttccaaccaatcaggaagaaattgataatgatgattttttctggcaagagtttggtcagcgcaatgaaaaacttaatagtaaccaagcaagtgttctattcacaaacccagaggaaggacttagtcacaacgctgttttagaagaattaaatgcagcaacaaatctcgcaaactccgaatttaggatgcgcggttatgacgaaatgggtgatattatgaaaggtagtaatgataatttcaacctatctactgaagcagacaatttatctaaagatacaacagtcgctgcgcaagagagctatgcaagtttctctgagatggttgctgatggtagaataaccctacctcaagcaaaagacagagggacactaagaaaaataataaatatatttgaaaggtttaaataa

SEQ ID NO: 451166 - DNA, 138 bp, Serratia marcescens
atgccagtgaataccgcaaagcgacgtgaacacattatcgatttgttatgcgagcacggcagcgtgcgcgtggaacagctcagcaaacagtttgcggtatccacggtgacgatccgcaacgatctgcgctttctgtaa

SEQ ID NO: 451167 - DNA, 993 bp, Serratia marcescens
atgatgatagccgcaaagcctcataaggaatatgaagagcaattacacctcttgttaagccgaggaatgctaattgctgatcatgaaagagctataaggaagttaacgcaagttggctattataggctatcaggtttttggtatacatcgagagtaattgttaccggtgatgatggtctttcatatcgaacagatcagtttttggatggaactacttttgaacactcgtacgacctttacttgtttgataagaaacttcggttattgatgctggatgcgttggagcgtatagaaatccacgtaaggtcagttatcgcgcatgaagtggggcgaagagatccacttgcctatcgaaaggttgcttatattaatcctcgttttacctcaggacacgcaagtaggtttgacgagtggtgtgagaagcaagataaaaaaattcgagatagccgggatgaatgtatcctttggcatcgaaatcaaggcaaagaaattccgttttgggtcgctgtcgagacatgggattttggtcaaatgtcaaaatattactcgatgctcaacggaggtctacaaagcaaggttatccgtagattcggtctggacaataaacaaacttttgcaaagtggctaaatgggttaaacctattacgaaatcggtgcgcccaccattcgcgaatttggaaccggaaatacataccactagcggtgccacaaaccgactatttcaactcgttaaagctggaagattttgagaaagagcggttatacggcttaatctgtgttatttggtatttggtaaagcgtattggcccgagttccaactggcttagacaactggttgagcacattgatagtaagcctaacatgcctggatgcgcataccacgcaatgggaattcgcggagcagcgtttccgcgtgataagtttggccctgatttggggcttttagaagccgttaatgagccactgagtgactcatcgaatgggcaatattag

SEQ ID NO: 451168 - DNA, 201 bp, Serratia marcescens
atgtttttacctatcaatcttatcagtggtgctttaatcgtagttatgggtgttgtgctaccgcaacaccttgttgtgatcttgtttgattaccggccagggactggcttctgccactggcagctaggacactaccagtggcagctaggacactaccagtggcagagctaccatcctagttatcttctggctaacacatag

SEQ ID NO: 451169 - DNA, 192 bp, Serratia marcescens
atgatcgatcgccagaagttagaaatggctgtgattgaaatcgccaaacagaacggtgaacaaattgaccggtacacgctctatactattcgcaatgatattagaaacgcgctggcggcaacctccaggaataagcaacgcatgagctccaacacctatcaatgggagcggccaaaaacaccccgcagatag

SEQ ID NO: 451170 - DNA, 279 bp, Serratia marcescens
atgatcgctaccgtggttgtatgtatcgttttatgtgccattcttctgctgctggttagcatccaggccaagaccattgcttgccaacaaacagtaatttccgacttaaaggagcgagtcgaatcgctggaagggaaggaaagaaaaagcgatgacaagatatctcaggttttgcaaaacctatctgaagtcgagggggtagctaaggctgcgcatgattcagcctcgagcctatcaagcaagatgaacaagctttcctccatcctgcctagctcgtag

SEQ ID NO: 451171 - DNA, 2832 bp, Serratia marcescens
atgtcaggaatcagcaacgatcaagcctcgtatgcccgcaagctggacgagaaatacggcttcccaagtgggactatggaaacattggtaaacaccgagtcatctggcgccggtaacgccacatcatcaaaaggtgcgcgtggctatggccagttgatgccgtctgctatgaccgatgccggaatgaaaggcgttgatccagcgtcactgccttatcgggaacagctaaatatcgcagccaatcacctcaataagggatttaaacgctttggagatattgggctagcccttgccgggtataacgccggaaatggacgtgtaaacgctgtaaggaacggaaaatcgacactgcctggagaaactgcggactatgtgaggaaatttgcagacgctggaataattcctccagatagcgaagtgattcagcacgctcagctagctagagctggcgcgagtaaaaagctttctgagccagattactccaagcttgatgaggatatttcgtcggtagggaatacatcggcatgggatgcaaaacgagcacaattcaaagagcaagccgccgcaggtcagcaagatagcgcccagccaccagtaaccgaacaagcaccagtagactcatgggaggctaagagggcgcagtttctggcctctcagcagcaggggcagcaaccagagcagcagcagattgcgcggtctaatttaaatcctgaaatggaatacttatcgccagggctaacaagcgctcccgagcaagctcttagaggtattgccaatattccatcagacctaatggacgcaggagtaggtgtgattaacgcggtagggaacgcggcggcatgggcaaacggcgtcctgggcgtaaacggtggtgagtttactcctatgtcgccggttgcgcgtccggttgctcaacccacagatcaatacgctaggatgggagaggaaataggcccgtatttaatccctggcgttggcgctgaaagaactgccgcagctattgcctcggcagctaatggcggtcgagcggaaaaagcagcaacaagtattgccggtatgttcggcgaaaacctgccaggaactttggcgtcatctcaacagaatggacagatatccccgccaaaactagcagaggaaacggcgctcggactggccggctcacttgctggccgggcagttgtaggcggagtgttaaaagctaccgacgccttgcaggggattagagcaagagcggcaagcgcagatccagcagcagccatccccgcagccaatggattgcctgacacgctgtcatcatcagctgagcgagttggcaaggctgcgcagtccggagatagaggccgaatcgctgaagtggttaatgatattaagcctgataaaaacactgttgatgccgctcggcaacttggactagatcctgatgacatgctagaggcttacacgtcaggcaacgatgcgtttaaagctgtccagatggcgctagcgtcacaggatgaatcagtcctggccaaagttaagcgagatagcataaatcgtatttcagaacgggcatcaaaaattattgatgacgctagagcaatgcctgaccgattggcaatgaatgataaattcaaggcagattttgagtcatctagaaatgcgctcaaagccaaggaaagagagttatacaaaccaattcaggatgctataccatcacgagcagcagtagatgcggtgaatacgaggaatcaactagactccatggctgacgatgtaggcggataccagcatttatcttcagtggaggaaaaggtttatgacgctgtatcaccgatgtccgaaaattcagggcagctaacttaccagcgattaaacaatatgcgtgctatggttggttctgagctagaacgggccggaacgccatttggcagcactgaagagagaaaccttagccagctttacgctgtgctttcaaaggatagggatgctgtagccgcatctgcaggatacatagaccaagtgaaagcggcgaatgcggtaaccgctcagcgtaaaatgatggagaagcgcgtctatgagcttcttggtaaggacttgagcggtgatgtcactgttaaggcgaaaagcgctcttgatggcttacagagcggaaatacgcagccattcattcggctgatgagatccgtgccggacaaagaggccagaagccaaattatcgctactggaatgcgcgacatgctgcgtaagggtagccgttctgacctggcgaataacatcaacgggctggtggacttctacggggatttgaagcgaaagggaaccatacggctcttggctaacgaattgccaccagaaacgatgaaggagctagatagcttttacacacttggtagaaacgttaagtcagcaaacgcatatcacttagagaccggcaaacttaatggctttttgaagaagttcgatcagccaggcggatttattgaccagctttccaagcatgggaaaatgtctctaatcgcaacagcgatggggcatgtgccagttgtagggccggtgcttaatacctcgatagctgctcacatgggagccaaagctgcttcaagaaaaacgggagcccaggccgctcaagacttgatggtaagtcctgtatggcgagatatggttaccgcggccaagaccagcaaaaaccaggcaaagcaaaatgtagcatcaagccattttgaaaaaagaatagcagctatgccagcgtggaaagagttttacaggtcactaccagcagcagagaaggcaaagatagccagagtgggaataattggctggctatctggtgaggctgagggcgatagttattaa
